United States Patent Application Publication US 2024/0068045 A1 - sequence listing, part 2

SEQ ID NO: 6068 - DNA, 2872 bp, synthetic construct
  misc_feature 1..2872: note = Description of Artificial Sequence: Synthetic polynucleotide
  source 1..2872: mol_type = other DNA
gygtttttyggaaygttaygttttgygattgatttgygagtaaagtagygggtttagtttgyggygygyggaaaaggyggtyggygaagagtygttyggttygygggtaggggagggatyggagggagayggyggggagggagygttggtttttttttgggttggggtttyggaggaagtttttygttaagatttyggtygtgygtttttttyggggttygtttttttttttttyggttttttttttgttatygttttgggttttaagtaggtygtttagtygggttatattyggtggatagaagtygggatttagggttggyggttgggttygtgtattttttaygygggygtttyggttttgaagtgygygyggagtaggttttgatygttttttttttttttttttttyggttatttttgttttttttagttattgataggatttttttygaaaattttagattttttaagttttagtttggyggttttttttttttaagtygygtttyggtgatttgggttgygygattaygaggaagttygagaattttttggtttaagtgagataggaattagggtaataatgaagagaaagatattyggtttttttttattttaggtygtagaggygtatatygtgaaaagaaaggttaattagygttttaaygtaygttygggttttttttttygattattatgtatttttaattttttgttatygagggttttggattttttygaggttttttgtattttaagtggaattttttgttttatttgttagtagtttygtttgttgagaggaygtattttggggattgttaagaagtagtagatataattyggttttgttaatatagtatayggttttgttttygtttttttttttatttttttttttgattygtygtttggggygagttggagaaggyggagtaggaggtggggagaagggtgggggtgggggaaggtttggygtagtataaataagttttttagygggttgtttatatagtaggtggatttgaygttagttaggaggtttygttgtaaattygaataatattttttttygygtttttttttttttaaagaagttagggaayggggggagataggtggaygggggagaaaggtattttaattagttggttttaaatttattaataataataaygataataataatgtaaagtaaaataaaataaataagtggttyggyggtattttagaattttttgyggygttttgttttttatttygttttttygaggagaggtagtttygygagtagtgtgtgtatagttygtattgttaataataygygygygyggtygggtgygygygtttgttagygtatatttatatatatagatatatagatatatatatatatatatatatatatatagattygggtggggggagyggttgygygagatagygygagttttygagaaagygygagataygtyggygygtgtagtttygyggtygtygtttygttttagttttagtttygygttattygtagttygttygygaaygttygtttyggttatttatgyggyggtygygttygttggttgyggttttttyggtttttttttttttygggygygttttttattygyggtagtagttgttyggattygygygtgggtgtgttgtttgggggtttttgtttygtygtygygggtgttatttttygggaygttgtttayggygttttyggtygyggtaagttttttggtttttattttggygygttatattttygtattttattttgttttagttatttttaygttgggtygagttgygattttattttgtttygygtttttttygyggtggygataaagtttygttttaaaggtagygttttgtttgtyggggygagtgtgatatgtgttaaatttgggttyggygttggggtygtatttyggatttagtattattatttgttgtttttttttattttgttttgtgatgggggaaaaaggggtggagaggggagatttgttgttggtttayggatgatttttagtttggataatgtaaaatgttgtttygttyggagagatttyggttggaggagaatgtgtgtygaaatattagatgtgtgtttgtttatttttttttttttaattgtttgttgttttttttttttttttttygtatttttatttttaatttygggaggagaaataatagtaaaaatatttggyggttagaagtatatattttattgatttaattgttgatttttatttatttagttgggtaagtgtaygtttttygygtttaagttgggtattttagygtttattttagaagtatttttttaggaaggagagagatggaaaggggatatttttgtttttggagttaagaaatttttgggttttattgaygtttygggataatygtgtatagggatgattgttgttttgatygygtttttttttttgtttaygygttagtaygatyggtttttttyggtgtttggtttggttttatttttatttygttttagagaggtygtttggttgtttgtgggtgggtttggggtgaaatygtatttygyggtatttggtgaggggaygtgggaggagygtagatatttttyggtgatagggagggttttttatttggttgttatttggaagtttatagtggtttyggygggtaggygggygggtagagygygggttygaaygtttttygygtttgyggyggygtaygtgyggyggyggyggyggygtyggyggygygggygggatttattgggtggtygygygygttattygygygttttttgygygtttttgtttattygygaggtygtaaygygttttgatattyg

SEQ ID NO: 6069 - DNA, 2906 bp, synthetic construct
  misc_feature 1..2906: note = Description of Artificial Sequence: Synthetic polynucleotide
  source 1..2906: mol_type = other DNA
tygygggggtgyggttttgygtaattgggtgattygygtgttttttygtattttatttgtattaagggagygygtgttagaygaagggaattttttttttttttttggtgattttgttatttttttattaattgtaygaagtttaagggatattygagttttttggttgggyggatgggtttygygtttggtatggttgagyggtttatttttattttttygtttttatttttattataatagygattatttagttygttaggagtttttgttttttagygtaggtttttttttttttttagttttttgggttgttgaagtygggttttgggtagatagagattggggtygtggggagagygttaggttgtttttgtttttttygygtttyggggtatttyggygygttggggatgtagttttygttttygtygtatttggtygttygagygttygygtttaygtttygygyggggtygttygaaattggggtygygttagtygygggagttatygaggagttgttggggtgygtttgtttttgttttttaaataagattttygagattttttttttatttttttaatttttagtaggatayggaatttyggygtttttygaaagttataaaagaggggtayggaaattttaagttygtygtgttaattyggagaaygtaaattygaggtagagygtgygtygtgyggggatgtgggtgtygaggatttygaagygttyggtttttttygygatttttattttttttagattttggttagatatttatttagtttaygtttagagggygggggttatttygatttatttyggaagtygttaattttagaaattttttttgttaggttygygaaaygaaggtatttygttatttyggyggggtaagttyggattttattagggtaggttygggaggttatttagggtagaygattygaggtagagygttttaaaattttgtygtygtaygtttagttagagygtygagygygtttgtttttttttygttattttttagttttttattygtygattaaatttttgggggattatatttttaagttttgggagtttygggtaaagttttttttttttttgaatttttttattgtaatgtaattatgggtagataagaggggtggttgttttgttttttgtaaygtaaaattaatagatatttaattaagttttaatgttyggttagtttttygttttttggtgtttattttttttttttttttattttygttattttygttygttattttttttatagattayggatatgtagggttatttatttgtgtttaggaaaaataaattattagagtgatatgagaaggaatggtgtatttggttgttygttgaaaggttttagagaagaaaayggaaaggggaataaaayggggggattttttttttttaataagtagggygttttggggaagtttgggggttaggggttttttgtttygtggttyggtatttgtttttttyggagtygttttttgttgtygggyggygagttttattttgtttttygtagagggygyggtgaggaagttygtygggggttygtagttttatgttagygtygtygtygtygtygtygtygtygtgtgaggygagtatagyggtygtatttgtggttgatttttgggttgagggggttgagttggtttagtaggygttaagttttttttatgtgaataataaatatttttatyggyggtygygattggtttgygttyggygtttttygatttttygttygyggttatttattyggygyggygyggggagtygyggttaggatygygttygggatygttaatygtttygygttaattagttatttygggaagygggaggaggaattttygaggggygggagtttttggatttyggtgttatttagyggttttggygygggtagggagggggattttyggttygyggattttttttygttttttagtttgaagygaygaggagattagaaatgttaatagttttgatttttaaaaattattttttttttttygtttttaagaaaaaggggaggatttaattatagagtgagagggtgggaagaagygggagyggtagaagaaggaatatggttgtggaggagtttagyggtttyggttgtttggygagttygggatyggygyggggaggygygaygttygttygagtatagygggtagtattygygagttygggttttyggtgaatatagttttagaaagygttatygagaataatatatggtagatgataagtgtttygttatatgtttttttttygggaatgtttaaagtagagtyggtaagtygygyggtttttttgtaaagtttgtttggygtygygyggyggtttygttatttgtttygtttygyggttttggygattgtttttttatttttygttttygagggtttgagggaygygtgtaatagagtttttagggttygaggtattatatagygyggttygttgygggtattgygtaggaaggggtatgggtggttatygggayggttattttattgagatgatttaaggagtygtagaygyggggtaggaaatttygggggagtygtgttygggttttgtagggaaatttygggatttttttygtatgtygtatgyggaaatttgtygggttygaygtgtatagtttagygtttttttttattagttattgtttaggtttttygattttgtattygtyggaatgagagaaagtagtttttygtygtttagttttygggtagttgtttyggtygggttttgygttggtgagaaagttttatttagaggyggtygygygtaattgtaggyggygttttaggttygggygagttagggagagyggggygyg

SEQ ID NO: 6070 - DNA, 2906 bp, synthetic construct; identical to SEQ ID NO: 6069
  misc_feature 1..2906: note = Description of Artificial Sequence: Synthetic polynucleotide
  source 1..2906: mol_type = other DNA

SEQ ID NO: 6071 - DNA, 1696 bp, synthetic construct
  misc_feature 1..1696: note = Description of Artificial Sequence: Synthetic polynucleotide
  source 1..1696: mol_type = other DNA
tyggagtyggagtyggygaagtygyggagttgaggygygtttgggagagttaaggttyggygggttatgtaggtgtatgttttttttttygtttaaggagyggygttattagygtttttyggttttgtttttggattttggtatyggttygttttagtygygggggaaggygttttatygttaaagtgygtttyggyggtttyggttygttttgygggtygtygtyggagggagtgygggggygtttygaagtygtttaggtygtattygttggatgttgygttttttttttyggygtyggtygtttygggtyggyggtagttgattgyggtygtgagttygyggagyggygagagttaagaggaggtgttygyggygttttygttttttttagatatatatttttttttttttygttttttttyggagggtggaagagataaaaayggggggttagttttttagttygtyggttgtyggtaygyggggyggygtttygttyggttttygaggattagyggygtggyggttgygttyggattyggttygtyggtyggaggagygygyggygttygyggtygygttygtatygtaggtttttttagagagttygggggygggygygggttyggyggyggyggyggtygtagttttyggyggygygtaatygttygtygtygttygtygttgttyggttttyggygygtygtyggtttyggttttgtgyggagggagygagttygyggtttyggttttyggygtttttagtggtygygtygttagyggattgttgtagyggygtgagtagygggggtygyggttgygggaaaygtttyggagtttaggaatatagttttygttggttagyggyggtagtagtagtagyggggtttttgygygyggygtttatygtttttttttygygtygggttygyggtgttgtaggyggtagttaygtagattgtttttttatttttttgttttttagttagaaygtgaatgtattgttgaygtatattgttttgggagaagattagygtgatgtagtgtttttatgtattagygtygtttttttttygtygtttgtttygyggggttaaygtyggygttttttagygtygygtyggtyggygtygygtagtttygygttttyggtygttygtttttttttttttttttttttttttttttttttttttttttttttttttttttttttttttttygggtygtttttttttygttttttttagaygagyggagyggggttagggygagygggygagygagtyggagtgagygttaagtgaggggtygygygtaagtygtaggygttygtagttattttgggtyggtyggagggagtagttgggtggtygttgataggttggagyggygyggggttgyggygggagagttygygtyggttttygtttttyggttygtattyggggttttttggttttgaagagyggggtttaggggttyggyggttygyggyggggttgttgtatttggtttgtttttygttyggttygygttatttttattttygttgattgttgayggggygyggattygygttyggagttyggaattgygtggtggggattygggggayggyggtyggggttaygaggtttttaggatygagagttygggtttygttgttgtattgtygttagtttttttttyg

SEQ ID NO: 6072 - DNA, 2054 bp, synthetic construct
  misc_feature 1..2054: note = Description of Artificial Sequence: Synthetic polynucleotide
  source 1..2054: mol_type = other DNA
aygyggygatgttttaagtygttttttgtttgaaatttyggygtattttyggggaagtagtgttaygttttagaaaggygtttgtgttgttttttattggggaaaygtagtgtttgttttatatgygtygttttatagaattgtagttttaatygtttatttggtttttttttygggygttgggttattattttttttaaatatgygttygaatatttgtgggtttgtttttygttgaaattttagggtgtttaaaggttayggggtygygatgatattgggtaggttttyggaaattttttaggattttttttattttaaagtttagttagggaygaaaggggttgggagttgaaaaattgtttttttaattttttygggtgggaggtagagtygggaatatatagaattttatttygaaagtttygggaaagagaagtttgagtttaggagygtgagaggagaatatattygggaaatttttgtttyggtygttgtattttygygggygtttaggtgggaygtgggtaggtgygygagygtygtgtgtgtyggtgtggatttgtgtgtgtgtttgygtgtgtgygtgtgygtgtgtygygggttggtttygggatattgaggattttygggtyggtttaggtttgttygattttgttgttttygtygttygttyggttttatttttyggygggtyggttttttatttggaygygtygygttttttttttttagygggagygtygtattgatattgtagatggagtttatgtygttgtttttygtttttttttgaaygtgtgygtgtgygygygtgtggttgttttttttagttttagtttygaaygtaaatattttatygaggtatagggaagtygggagtagtygaggaaygyggagggygtygaattagagtttgyggggtttgatagttttttttgyggygtttaaggtgggygtaatgtttaataaaaaggtyggaaaatggggatygatttygaatattttttttttttatttagtttyggagttygagtagyggyggyggttttygggggttgyggtggygaygtygggttgttttttttygtttttattttygygggttgaatgtttttgatgttaagygggtatagyggygttatttygygtygtttatgttygttyggtygggtygttgttygggygyggygagtgygygggggattygtyggggagygttttyggygtttttgygygtttttttgggtagyggyggtygtttttyggtagttygyggtyggtygygtygyggtagtttttatttttgtygagatattygtygggtagtgttttggggtyggggttggggggtygygggagtygtyggttgtttttyggggaggtgyggggttgyggyggtggtggttgyggyggttggygttgyggyggyggagagttyggtygygggtygagtygggtttttygggygygttttyggtttttygggygggttgttygtaaagtttgtagggggtagggagyggggtygtygttggttyggtygtygtyggagttttygggttgtttgttgtygtygyggttygttgttgttgtgtattgaagttyggttaagygttgtaaaaattttagttgtttggygttttttgggttttttttttttttttttygttttttttgtttttttttttttttttttygtttygtttttttttttttttgtygttygtygttygtygtygttttttttttggttygttttygttggttyggagttygyggttgatatttagagygagggagagyggtyggtagagggggtagggggygtttttttatatgtttttattygtygtygttyggtttgtyggttttttttygtattaaygtttgtygatatttttttgggttttttyggttygtayggagttattttggyggtggygatgtggggyggagagaggggtatatatgggtgatyggagygtayggygygygtttagagggaggygtttagtygtttyggaatttgtagttttgggygttggtygtyg

SEQ ID NO: 6073 - DNA, 1258 bp, synthetic construct
  misc_feature 1..1258: note = Description of Artificial Sequence: Synthetic polynucleotide
  source 1..1258: mol_type = other DNA
tygyggaagygttttttgttgggtagaagagtgggtttttygtygyggygtatttgtttyggttgtyggtttttygtatttatttgtaygagatttgttttyggaaagttaagttttttagttttttttttagygtttygtttttttttttttggtyggyggtygygggttygtttagggtagyggttttygtygtygyggttgattttgygtttygygggttygygtygttttyggygtttaggtagtagttttyggygtygttttygttgttgttgttgtygttygtygttttttttttttttttygtygaggagttggggtttatggygttygtttyggyggtygyggagggagygtaggyggygtygttgtaggggtygggygggttggyggyggyggyggyggyggttgtaggagygygggtaggttygygygtygttggtaggggtagtaaatggtagttttttttygtagtatttattygyggttgtatygtatyggggtattgtgggaaatttygtttattttttygtttyggttaattagaggtygtygtttttygtttttygygttttttygygtyggttygtattttttagtttygttggtttttttttaaatttygagygaaagtttaagttgaatatgaattttgttyggaggygaygggttgyggyggagggggagagagaggaggataggttgygatttygggttggggaygttagggtagggatagygagtattaggaaggagagygttyggggaattygagtggtygygttttgggttttgtatygtgaggttggggggattaggatyggygggygtttattttggttttgagtttagttgtygaygttgggttagtattttttttatygtygttttttagtgagtagagttgggtttaggtagtagtttttgggygygggaaggtagygggagttgtatttaggggaggggggaggtagtaggagtttygttagtgggaattttggagtgaattygtyggygggtgttaagtygaagygtygattttttgtttttggattggggttyggatttttgygtttttaaattgygttttygttttgttygtygttyggtgttttttttaggygtagtagattttyggtaaatagyggttaattygatggaatyggattatagggttttyggtgaagtagaaaggyggaggaaatttaggaggtagaagtgaggattttggygtttggygtygttgygttgttyg

SEQ ID NO: 6074 - DNA, 628 bp, synthetic construct
  misc_feature 1..628: note = Description of Artificial Sequence: Synthetic polynucleotide
  source 1..628: mol_type = other DNA
gygtggaggttgyggttyggyggggtaggygttgagygtatygyggyggtattyggygtagaggttttagygyggggagtygggtttagtttyggtttgttagygtygyggttttagtttattygaggtyggtttggggggttygtagggygygyggagygtygagtgygygtygggttgggtttygtatttyggtgtaggagygygggygyggygyggyggagygtttygtatggagtyggttygggagtttttttygygggttyggtygtygtygtttttygtygygygtttygygttygttttygtygtttttaggtygygttygttygtagaggttgaggttygyggtttygaggggttgttgyggygattygggtygggttaygagggtagtattagttggaaggyggttttggagggtaagygyggagyggttttttttttttggtttagggatttttgtttaggttygattygygattyggaggyggttagagttattttggtygttgtttyggaggggagygttgggagygyggygtygggaygyggyggagttatttattttagggyggttagaygtyggttygtggggtggggtgggagggaatygggggttatygyg

SEQ ID NO: 6075 - DNA, 1075 bp, synthetic construct
  misc_feature 1..1075: note = Description of Artificial Sequence: Synthetic polynucleotide
  source 1..1075: mol_type = other DNA
gyggtttttagggygagtattttygtttttagygttttttggttattaaagaaaaattagaygtttgygaygggtttttttttygttygggttttttygtttttygtttttygtyggttatygggygttattatygygggtagtagggyggggygttttgggagtygttgggtgtttgggttggygtttgtaggggtttygygggattaggtyggttgtaggggygyggyggygtagtttattttgttgttgaagagtygygagaggttgygtatgggyggagggggtygyggggtatttyggagttygygtaygttttagaggygtagggygtygtygtgygaggyggtgtagagtatttggtygtgtatttgygggygtaggggygggygttatyggtgaygyggtaggygggggggatatygttgttygygtggatggatyggggyggggtatttttttttttaygggyggyggtttygagaagggtagagggatttatttggatgtagttgatgatgaatgtgtggtttyggaatatttttygtagttttttagattgygygtygaaggttygggygtaagygttttygttgttygtgaatattgyggatatatagygygygttgggtttttttttttgttyggtttttygtaagtagggatggggyggygagagygtgatttggggygttttygagatttygttttaygggggtattttgaggtttatatgggaagtggatagtgtttttttagagaaaygggtttttayggttattttgttttattttgtagatgtttgygygttagttggttttgtttttgttttgttgaatatygttygggtttagtttttatttygyggtttggtgaagttggttttygtgtttgtttgggaagtttttgtttggggataatygttaggttttygagtygttttttttttatttttygttgygtyggtaattttattttttygtttttattaayggatyggtatttaaattaaagtttagttttttggggtttatgattaygtattttygggatttttagygggggygagttttyg

SEQ ID NO: 6076 - DNA, 5566 bp, synthetic construct
  misc_feature 1..5566: note = Description of Artificial Sequence: Synthetic polynucleotide
  source 1..5566: mol_type = other DNA
gygtttttttagygatyggggtagaattaggaygtgtaatgygattgttttttttttttygtttttyggtagagtttttgttygygttaatttatttattaggttttgttygygttaygygygtttttggtaggtttggggyggggaaaggygaagygttgggtaygygagggtttgtgtattttagtttttaygaygtttttggttttttttaggttygtygttgtygtatttaatttttttttttygggggttattttgaagaagttttagattttagatttagttttttagatttygttttygagttygttyggtgggtttgtaggtyggttttttttygtttagaggagagygtagataygtaatgttygttygttggtttygttygttttatttttgtttttygygttttttygtttyggtttttgtttataggtygggtyggaaygttagttttaggagtygayggtggttttttgttygtttyggggaaggtgttgtttttttatyggttttaatttttygttyggygtttggggtttggttgyggggttyggtttttagtygagggygtagggttggttaggtttgttttggttgaggtggagatttygtttttagggattgttgggygtttttgtttygygagtaaygagatygtygygagygaayggtttttattgagtttatttttttaagtgttattaygttaagttagagaagygaggygagtggaggggaygtagaggggtyggaaaagttatttttttttggtttygtttttagataaaaaygggagtttggttyggtattygggygttyggtgttttyggggygttttattgaggttttgtttgtaaaattagygttygtgttttgaagygtayggygtttggaagttgtttttttgttygtttttttygaggtttttttttgtgtagygagtttgagaaatatggaggatygtttttygtaagygggtggtygygggygtttttygatttttgggtgaagttagagggaaaayggggttttygggttagtgttttattttttatttygggagaaattaatgttyggagagggttygtttgattygtatagaaaggtygattttgagggyggyggtygttygggggagaaagyggaggttttgggttygygggagygyggtagtyggggttggtatygtagaggagagataygttattgtttygtatttttagaaagygygaggygtygttttagttggggtaggyggtygaggtyggtttttatgygygtttttygaagttttttgaaatattttgyggagtttygtgtgtatagaatttagtatygtttagtttttgggtagtttaattttttgtagttttattttagttttttyggttttttgaayggtgattttttttatygtttttttagagttgtttygtgtttgggtttattttggggggttyggtattttttagttatttttttttttatttattttttttttttttatttttttttttattttttattttttttttttttaggagagygatttaygaatttttttttttttagttaattttagggtttagttygtagattttgygagggtaggtttttgtttatyggttygttaggygttttggaggtgaygttttgttttttagagtttttgttgtagttaygaattggggtttgggtygtaggaaagtatagggttgaagtttagygttttggggttatttatattgaggtagttagaggtaaagagttttaagaatttagaaaatattttttaggaagtygtttaattggtttttatgggataggtggagttattaatttgggatggttttgtaggaattaaagagtttagggttttttttttttttaatattatgtttaggagatttagagtygttggatttttttttttttgattggtgattattagagtttttagagttgtagaaaattttttttttaaaaaattaagtaagygttaataagattttttataaatttttattagttttattttttyggggggtaggtagattgtggggtttgattttttgagattyggggaggatttttggtagatgtgtgtttagttagaatatttggtaaggatttttttaatgaagaaaaagtggaggaatttagttttagygagaagaggtttttttattttgttttagatatatyggatagagggtatattttgattagagttaygtttagtggttaggaggttagtttagtatttttttttttattattttygttttgggtgggggggtaatttttttgggagtagttgtgggaattgtygttttttattttagtttagttagtattttgaagtttgtaggggaaggatagtaygtgggatggatattggggaaggagtttygtaaggttagggtgtaatttttaggttttaggtggtttggtaggttaygttgtttyggagatgtttgttagattttttaagtttatttagggtttggtagtaatttgttggttgtttttgygggggtttgggttgttgagtayggtgtagttgtttagggttaattagttttagggtgttygtgttaggttgyggttttttygtttttttygtattgagggtatttatggygtgtaaatgttttygtatttttagagttgttttatyggatgtttttaggaatttatatatttttataaaaatgtattttaaatgatggataggygagtttggggtaataaygggtgtttggtgggtagataagagtaaatgggaaggagttygagggaggagggggaagagaagaggaaatagaatttttagttggatattttgataatagttggaaggaaagtttagaaaagatgaagagagaggaggggagaaattaattggggtttttatttttgtygttggatttttaattttygttttaaatgggttttgtttttyggtaaaattagtttaaaggattttaaaataaagaaaaygagatgatyggtttgggagttttttaattagagtagagaagttagaggggggygggygatttggttttgaagttttagttgaatagttattttttttttttttggtaaaaaggatttttttagaattttygaggtttttggattttttttttygtaaatggagtygtatattgtattttttygttttttyggatygttaagtatgttttatgagggtygttgttttygggtggaatgyggtygtatgtaygygtttttttgtataygtatatataygtatatttataataagtgtttgtaggaggagtgttttgygygttagttttgygtttaagataggaagttgtygggttatygagttaaatgggagtgatattatttttttttattagtaaggaaagyggattataaaagtttttttgtatttyggtagtttatttaatattatttatgtattttgtgtaaggaattgtgggatttygttttayggtaaataatatggaaattttaaaaatagygatttttttgtgygtgtttatttaygygtttyggggtgatttggyggggttgtygtygggtgatttatatttttgaatygygaagygatagggaaagygygggygagygtaggagaygyggtygggggttttttygggtttttgggttttygtattyggagygggggaygyggtygttttaaggggaggaggggyggygggttgtttttgttatttagyggyggtyggagygttaygtgggygygyggygtygyggttattggttygaggtaygtgtttaggagatyggtttgygaygttattygagggggttttgttaaaaataagaataaaaatttagagtgaaagtgttttaggttgygtygagtggtttggaaattttygagttygygyggaggtygaggyggygagggyggyggayggtyggggagygygggyggtttagttyggttyggtygggttttggtttygygttttttatttatgygattygggtygyggagttttgyggggttyggygggggygyggtygtaygtyggtggggygtttyggttygtagyggggyggyggtygygaggagggggtttttatgtgygtgygggyggtggygggygygttgatygygggygttyggtattttygagggtyggttagggygtgygggyggggayggtygggyggyggyggyggtyggagtyggttygggygggygtgagygtyggggaaygygttgtttgtatgygygtagttttygtttygggyggtttaggyggyggygtyggagttygaggyggtyggaygyggagaggagyggggagttygggaggyggttygygttttygtyggattattgygattgtttagatttyggttgygyggygaagtygaggatttggttttgttgaattttttatygtttgggygagyggggyggttygtggtgtttttaatttagttygtggatttaaaggtggtttygygtygagygyggtyggygatttgtaggattttagttttggtygyggtygtygygtaygttttyggaagattyggyggggtgggggygygggggttttygtgtgygtygygggagggtygaaggttgatttggaagggygttttyggagaattagtgtgggatttattgtgaatagtatggaggagaatgattttaagtttggygaagtagyggyggyggtggagggatagyggtagtyggaatttagtttyggyggyggttygggyggyggyggyggtagtagttygggygaagyggatatygggygtyggygggttttgatgttgttygyggttttgtaggygttyggtaattattagtattygtatygtattattaatttttttatygataatattttgyggttygagttyggtyggygaaaggaygyggggatttgttgtgygggygygggaggaggaaggggyggyggagtyggyggygaaggyggygygagyggtgyggagggaggyggyggygygggyggttyggagtagtttttgggttygggttttygagagtttyggtagaattygttatgtgygttyggygygggygggtygtttttagtygtyggtagygatttttygggtgayggggaaggyggttttaagaygttttygttgtayggtggygttaagaaaggyggygatttyggyggttttttggaygggtygtttaaggttygyggtttgggyggyggygatttgtyggtgagttyggattyggatagttygtaagtyggygttaatttgggygygtagtttatgttttggtyggygtgggtttattgtaygygttattyggatyggttttttttaggtgagttygyggggattaygygtttyggttygtygyggggaggttygyggagttggggggyggtgttggygygggaatttatygggaggaaaatatttygaatttttttygygtataygtataaagatttaygygatattgtgtgaagttgaygtyggttygggtagyggttaggagtttagyggtaggattgattyg

SEQ ID NO: 6077 - DNA, 5566 bp, synthetic construct; identical to SEQ ID NO: 6076
  misc_feature 1..5566: note = Description of Artificial Sequence: Synthetic polynucleotide
  source 1..5566: mol_type = other DNA

SEQ ID NO: 6078 - DNA, 1164 bp, synthetic construct
  misc_feature 1..1164: note = Description of Artificial Sequence: Synthetic polynucleotide
  source 1..1164: mol_type = other DNA
gygatttgtttagygttaaatygyggttttagttttttttagttttyggtttagtyggtttattagtyggttygygttttgtagtttttttagagggaygygtttygagatggagagtaaagttttgttygtgttgattttggtygtgtggttttagagtttgatygtttttygyggaggggtggtygtygtygatygtaagttttgygygtaaatttttttttatttgtagattyggygggtggttattgttattygaattgaggatgagaagaaggaagttggaaggggyggtggatgygtttagggatttttttagtttgggttttagtttygaaayggttttyggagtgggatttaggaggggtygggagggaattttttttygatygtgaagyggyggygtttagttttygttttttttttttgtygggttttygygttattttttttattttggttgggatygygttttygggttygtaggtttygtyggggaggtttyggggtgtgggggtygggayggyggaggyggggagtaagggttyggttggyggtgatttgtagttatttttttgtyggaggggttttggaatgaaaggygygygggttaaggtgatttygttttggttggtattgyggtttagttttygttyggggattygygggtygattgtggttttttttggggaagtyggggygyggggaggygtttygggtattttagtygtayggggtaygttygttttyggyggggtttttygtttygttgtgggagtggtagtgggtgtyggggtggagaaagtaygygtggygyggagttttggggaygyggygttttattygttttggggagtttyggattttttttagtttttaggttygtatgtttttttttttttagtgttttgagaatttagygaggggttgattttttygaaatygtggygtagttattagtaatttgtggtygtygattyggggggttgttaggtttgygtttggttattttttttgttttgggggttgaggttagtttygggygttyggtttygtygygyggttgygagtaygtggggttgaygggygtygygtggaggtagygagtataayggtggttatygtygttagggaatygttygttygttggggtttaggygttyg

SEQ ID NO: 6079 - DNA, 1495 bp, synthetic construct
  misc_feature 1..1495: note = Description of Artificial Sequence: Synthetic polynucleotide
  source 1..1495: mol_type = other DNA
tygtaaatttttttttgygtygttttttttygygtggaatgggayggagtagtttttttaggygttgtttggttgyggaggggagygggtagygagagtttygggttttygtttgggttttygggttttyggggygttggtttyggttttygygtagygtttagygatttttgtygggggttttyggtagtygygtygttatttttygttyggttagygygggaggaaaaggggttgygttygggagygtygagtttaggtttttttyggtggygtgttygygttttggggtgggggtgtggtggggaagagggagggggygaggttaggggagggtgygaaggaggygtttgtttttaatttgygggygggaggtgggtggttgyggggtaattgaaaaagagtyggygaggagtttttygaaatttgttggaatttygggttygygyggaggttaggagttgagyggyggyggttgtyggaygatgggagygtgagtaggayggtgataattttttttygatygggttgygagggygtygggtagaggttaggaygygagtygttagyggtgggatttatygaygatttttyggggygataggagtagtttygagagttagggygagygttygttttaggtggtyggatygttygtygygttygygtygygttttttgtaggtaaygggagaygttttygygtagygygagygttttagygyggtygttygttttttttttygagggataaattttttttaaattygattygagtttttggattaaattygtttgygtygagagtygttygygtagagygtttygttttyggygagatgttygagygtaaagaaggtagaggtaaagggaagggtaagaagaaggagygaggtttyggtaagaagtyggagttygyggygggtagttagagtttaggtgggtgygtagygyggttygggttttaygattttttttttgttttttttatttttttttttttttggatgtygtggtttttttttttttttttttttygtttgtttttttygttttgygttttgagygttygttgagtygygyggtgtttttttttttgggggtygtygtttatttgggygtygagttttatygggygtttaygtttagagtttagggtaagggatagtagtttyggtygtatttttttagagtttygggagygtttygttttttggtayggtttttttttagygttttagyggttgagtttagttygggagtgggatttgggttataggagtygaggttgygtgygygygtgtttygygttataagygttttgtaygggggtygtgtgttttttagygggaaaygttggaatgggtygtttggagggagagtyggttttttyggtgtgtttggtagygtagaagtgggtggtygagtaagaggtygygtgggaagttagtttyggygttttggggtatagggtaagygatgtagagtgygygtyg

SEQ ID NO: 6080 - DNA, 352 bp, synthetic construct
  misc_feature 1..352: note = Description of Artificial Sequence: Synthetic polynucleotide
  source 1..352: mol_type = other DNA
gygtttttggtagtagtygtttaygttttyggttttgygtatygggtttgtttygggaggggygygtgaygttatygyggggtagtygagaggggatygygggtttygggtagggtaggygttttygtagttttagttataatataagggagagaaagtaaygttttggttttagaaatttttatygttaaggttagttttggttagaygtatagttaaagagtttttttagtttagyggatgaatygttygygagtggtattttttaaaattttggttttattttttaagatgtttttttattgygtaatttagaaagtattyggatygtygttatttattagyggyggyg

SEQ ID NO: 6081 - DNA, 1141 bp, synthetic construct
  misc_feature 1..1141: note = Description of Artificial Sequence: Synthetic polynucleotide
  source 1..1141: mol_type = other DNA
tygtttagtttttagygttgygttgttttygygtttatyggatgattaygaatatgattagygagttgtttattaagtttaygaygaatattayggagtagatygtygtgatgatgatygggatggtyggggagatgtgygygggttttagttgygygtttttygagtyggygttgtygttgttgtygggttyggtttagtygggaaattaggygttgttgttggggggtaggtaggygttyggggygtaggtagggttyggtttttygyggaagatttggatyggggagtttatggtggggygattgtagtaggaaggygaggataggyggtatttgyggygttgygggagygaaagaatyggttggaygyggagaggtaaattttgttygygttttggttagyggygttggggattyggagtttgyggatttttattygggtygtaagtygtygggggtaggatagggagaayggatttttygttgttttttyggttagtaggygygtygttgggtgttagagaggggygaagagygttygtttttttttttttagtttttgaggtgttttttttattaattttaggtatyggtttttggtggaattgtttttagattgtttgagtttttagggttaagttttttttttattttttagtayggagttttatttagaattgtatttygaaagtttaaagtttatttatggtttttagagataggygaaggygaggttttttaygggaygttttggtaggtgttgaatygygygtttaygagtttygtttagtttttggtattatttgttttyggatttyggtttygtttttygttygagggttgttgtttygtygagygtagttttygttttttagygtaygttttttattattggyggyggttttgyggggyggggyggggygggatyggygggaygtagtygggaygyggttgggygttgggggtttgygggyggagagttygtttggtgygttygttttaggtyggtaggtttttgtttygtttygttygttyggagttagtttttagttttttagttttttagtttygygttttttttagtttygtaggttygttyggtttattaattgttygagyggtatatygtttggttttyg

SEQ ID NO: 6082 - DNA, 3297 bp, synthetic construct
  misc_feature 1..3297: note = Description of Artificial Sequence: Synthetic polynucleotide
  source 1..3297: mol_type = other DNA
tygttygtygtttygaagttgttyggttttttttttagttygttttttagtttygtaaggttttttttttatttttttyggygattttttttygaggtttttyggaggygtttggattttttttttttgtttttygttttgtyggtygttyggttttygagggggtaygaggagttgtygggtygtttttygtttttgttyggggyggygttggtattgttyggtygattttyggggggtygttygttgaggtttttttattyggtagttaagtttagggaagaagaygttatygttgggtagagttygtttatgtyggtgagtatygtggtttttattaygttttatatttagtttttttaggatattagtttttttygattttttttaattttaattgattygtttygttggggttagtagtagggagggtggtaaggtygggaaggtygggaygtggttgggtaagttttaggaygggatattggyggttttygggatatygttttttttygygggaagatattttaagttatttttttttgggttattttttttttatggtttaagaaaaygggagggagttttygttttttttygaggttgttttttaaatttttagygtgtygttttttttygtttatttygagttttttttaaaygygttttygtttgtttttagygttygtttttttatttttttgttttttyggtaggtaagggaggaaatgaygtgatgttatttttgtgttaggttagtttttagttttagtttagtttttygggttttagggaattaatttygyggttttatygggttttattttygaagggaygttgygggttayggggataygyggtgttgygagttyggagagttgggyggttgggttttttttttygttgttttttggtttattttttttttyggatttyggagtttttggagaaggggaygyggagggygattgtygagggttttagygggatttggagttaggggttagtttttttttttatttttygttyggttgttgggtggggttttygygttttggttagttgggagggggygagggtygttttttagggygggaagatyggaggtttaggttgygtyggggtggggyggggatagagtttagagaggygtttygggtyggggagaaggtagggggttgttttttagagaygygtagtttatagaygygaagttttggggattaagygttttttttatgtttgtygtttattttygtttttttttttygttttttttatttaygaggttygagtaygtagtttagtatattttagtttygttyggtttygygygtygaggggaggygatgatatagagggtttygyggaygttttttaygygygtttggtttygtatttatatttttgggatttgttaatgyggggttggagtagtggggttgyggtyggggtggaggtygygtttygygtggggtttygggggtatttttagtattygyggyggtggagtgygtygtygttggagggaggygagaygtgggattgttyggtygggtaaaaggagtgagggggyggggaggaggtagagtaaggggaggaagaggtygggagaagagggttagagtaaagatygagagtyggagaaaggygaaaggygyggtgagtaatygtygaygtagagagggtagtttttygygttgtaatattgagaaggtattygygggaygtatgygtayggyggayggaggygagtyggtyggggtttttttttyggtyggtagggtggayggtgggttygtgagtattttagtttttygaatttttttttttygtttygggttygttttgaggtttygtgttggaaagtggtygaggttgggaggggygygtygttygttyggattttagggtgtygtygttgttgyggggygggagtyggtgygagtygggggttttttttygtagtgygagtttgggggagtggggttgygagtgygttygygtgygaagaggggtatygygttattaggattaatatgtttygggtttgttagggygttygygattttatttttgyggtttygygtyggtgttttggtggggaaygygggagtttagtttttagattttagaaatygtattgattattygaagygtatttyggaaagattaggygggtggaagygtyggtttttttaygggatagggagaggataaggaaggggttgggygttyggggttggtggtttgagygtygttgggaagggtaaggagatagagttttttggaatygtagygtttttttttaggagaagtgtaattagggtaggggtatygaggggtagggtgaggaagtggaygttttaygygtggattttagaagatygattaggtatgggygtttattyggagtttttgtttaygtttttgaaaatygaatgaatagagaagtgttttttatttttygtttgygttagggtagttaaygtgtaggygtygtygggatttttttggaataaattygggtatttgatttttygtattttyggagttgttttgggaagtygaaataagtttgggygttyggattgyggagattggaaagtagggggyggagggygggagattgggggygggaagtggaggtgtaggttgtagttggggatygyggtgggygttggaggggagggtttgtgtgygyggttgttttttagygttgggggagyggaygggttaggggtttttagggaagyggygtttygggatyggggtggttttttygtttttgtgtgygyggygatttttatatttagttygggyggaggagttttgagagaagyggttagttgagagtggggtgggygttttggggaaaggtttgygtgygttgyggttttatygttgttagagaagtggaagagagagagtgggygtygggagggggtttataggygtygygatttattttatttttttttaygtttgtgggggagtgagtggggaaggggttttgggagaggyggygygygggtattgaggtgtatygtgagtttttyggatttgatagtattaaaggaaaattttggygagtagttagggttagygagygattttagtagtagggaygyggtygtgygagagttygyggataggygagggggattttaggggagtagttgttgtttaygggttaygggygatgtayggagtggagaagtgaaygtggtttataggatttttgttyggaaggtggagagygttataggggaattttttygatttttgttygtttyg

SEQ ID NO: 6083 - DNA, 2213 bp, synthetic construct
  misc_feature 1..2213: note = Description of Artificial Sequence: Synthetic polynucleotide
  source 1..2213: mol_type = other DNA
tyggttttaaaygtttttttagttatttgtgaatygygaaggagtyggttttygyggyggggattttgttattagtattttygygggtygaggtygttttttyggtyggtttttygttttattygaaaaggaattagagtatttatttaagayggtgattggtagggtagattaaggtgttttggtttyggttttagtttygyggtgygtttygttygtttattttgatygggtgtaggtagttatygtygygtagggygtttaattyggygttygtyggygtttyggygtygttttgtaggttgygggtgagatgygygatgtaggtggtggttagtagtagtaygtttagtttggatagtttggtgtygggyggtayggayggtagygtgygttgtagttttaggaaagygtgtygtagggtttgtattyggttgygttttygygtygtattygtygtygtyggtygttygttttyggaaygygagtygtttttagggttygtyggtttyggttyggttygttygggaygygagtygyggatggyggyggttaggggygygggttyggygttggygttgagggggttgttygttgggyggtygyggtttatggtagtttttygygtygygygygttgtaaaggatygaaggtgyggtgaggtyggggggyggtygggtttaattygagaggygtagttttttggtttttttygtgygtttattagtagtttaayggggttaagggygtttttaagygagttygttttgtttgggaygygatttgttttyggaygtttggggagagttgyggaatttyggagtttttgggttttttagaaggataagaagaggygtagtgtyggttttgttttttaggggtaaattaagtaaaaggtttattttattygggaagaaagatttyggaagtatagtttaggattagtattygttygygtttgggtgattttatttaattyggtaygtaygagaggtggygyggttttttttygtygaygtygyggaaaattayggtttattagtygttttyggttttttaygttaggggggatttttgttygaggagygggggatttttagttttatttyggggtayggtattygttatygtttygagttygagagttgygtagtaygygtttgaygggttttttattttttttggagyggttgagtggagtttygtttygtygtgagggygggygaggggygtggagtagggtttgtgtggttagggtygygttggttattttattttygttyggtygatgtttaagtygayggttgtttttaattttygttggttgtgatttttatgygggygtttygyggttaggygtgtgtgtttygatyggttaaggtaggtygggyggaggatttggtttatyggagaggttaygtygggggttgaggyggtttagagggttattaattaaatttttyggyggggygggttygggggyggggygtttttttggtttygtttttyggtttattgttttaygttgtttttttygaggygtttygttgagggyggygtgtggagagtttggggtgtttgtygtyggttgyggtggggtygggttggaggtygygggtgaggtttgtggttaatttygygttgtygaggttttattttttygagtttagtttgattttaggtygtttttaggtyggtgtttagttgaggygggaaygttgtagtttggttgagygtgatttttaggttttgtgaggaaaagtygagygygttatatygaggygttagtygtttattttattataaggtaaaagatttatgttgttttagttattttaaagttgggagatatattgtattttttattagatttygaatgtttttagtgtttgtaattttttaagaagtttttagagtagatagtttttggatygtgggtattttttttyggggayggggattttgttgatygttttygttgttttygygggggttatygttttttaattatttgggygaaatatttttttttggttttgtatttgtggatttaygggaagygtgatttgtagygaggtaggattygattttaggtttttttagaaagyggaygttgygttttaaggtttgtttagagtygttttaggaagtygtgggttttygatygttttaaatygtagyggtttttgtaggttttggattygtygttttyg

SEQ ID NO: 6084 - DNA, 363 bp, synthetic construct
  misc_feature 1..363: note = Description of Artificial Sequence: Synthetic polynucleotide
  source 1..363: mol_type = other DNA
gygtttagtayggygggtagygtygygttgygtatygtygtygattatgagygaggatagtygyggagatagtygygtygagagygttaaggatttggagaagtagtttygtttgygygtgtgygtgtttagygagttttagaagatygagygggattatgtgggtaygttggagtttttggtgtyggtgagtgttttyggtagaygtagggggaygttygggyggygyggggygygggtttyggagtggttgygggaaggaygygyggtattgtttgtgyggggattygggaygggtyggggtattataggygygggaatttaygtgtggattttgygttygygggygyggtgattttygyg

SEQ ID NO: 6085 - DNA, 960 bp, synthetic construct
  misc_feature 1..960: note = Description of Artificial Sequence: Synthetic polynucleotide
  source 1..960: mol_type = other DNA
tygtttttygaygttttaattagttattattttttygaaggaaaataaatyggtttttgatatatttttttaygtgtagygttygaygttaygggttttgggyggttgtattttttttttgtyggttayggtttaaggttttattattgygygtatttagtttttttttaggtgattttygygtatttggyggyggygttttaggtttyggaggttgttygggygggttggggttygggyggygttygttgagagtygyggygttttttagtygtttttygggygtygatygtygtttttttgtttyggggtggggtttaggggtattagtagtygygggttttyggtygtygtttgggaatttagggttagatttagttttataataaygttttttygttayggtaatttaattggaggtagaagtyggyggggyggtygagyggggyggggygggagygyggtygtygygagttayggtggggagygggygygggggattttggygggtttygggtagygyggttgtatttatttgtgttataattgyggygayggggggttgaggaatyggtttttttaaaagtaaatygaaaatgggtaatagagaggtyggggtagygttaagaggggttttgtttyggtgtttagggtaaaaaattyggtttyggtttttagaaattygagttagyggtggtttttttttttttttttttttaaaygtttttgtgttttygggtygaggggygtttttygygyggtttygagtgtatagygatattagggttggygttggagaggggagttttttttttagtatttttygggtttttttygtatttttatttatagttttttttttgggttygaygttttttygttttgtagtyggagtttgggtttggtgtttattgtttygyggggtgtttyggaygtttggtttttgtagygttttttayg

SEQ ID NO: 6086 - DNA, 1404 bp, synthetic construct
  misc_feature 1..1404: note = Description of Artificial Sequence: Synthetic polynucleotide
  source 1..1404: mol_type = other DNA
aygyggggttttygggaatygtygtttttttttttygttttygygttygygttttttttttyggggtttyggtttatttatttttggtgyggtttygtyggatttaggagtttyggtygttygggttgyggggagggggygtttygggtyggttttagaagttattttgtaaagaggtagggggygyggggtygygyggggygagttygggattygyggggaagaagtttttygggatygygtttyggtygttygagtttttygygttygtygttttttatttyggtygggggtttatttgggagttygttgttttyggttagtygttygygtgtgtttagggttagtagtaygtataagtgttagygtayggtygtygygtttatgtttaatgygggtttygttgggygtgygggygtgyggggygyggggattygatygatyggtygttttygtaggygttgttygttgttygtygtttygttatygttygggttttygagtygtttagttagttyggttgatgagttgatagygygygtttattggttygtggygtyggaggggyggggygtygtttagggtyggttaatgggygtyggttttyggtttttygaggaagaggggggttygggygtygtyggggggattttttttttggggygggyggtaggtggggggtgtgggtttggtyggtyggttygttaggygyggggtttaggttaggttggggttgtttggaggttgygtttttttttgttygyggygtttyggttttygtygtygagagtggaygtttttttggggtaatttttttyggtttagaggtagtttygggggyggggattttgygaatyggggatttygtgaggtygttygttattygtgggtagtgaaaygygttagygygtagagtagattygtttgygttgtygtttgttggaygttttttgagtatttattggggatygagtgygggygaggtagtagygaaggaatygggaggggaaatttygtgaagattatttgaaaattgaygtttaaaataaaygaattttttagtattygttaaaggatagtggttygttagtgtgtttgttayggggyggtygtaggatttgygtttggaatygggygggygttygggayggataatgtygtttggyggtyggtttygygggaggttttygtayggggttaatttyggtyggygaagttygttgttyggaatgygaggtygaggtttttttttgtgatagatygggyggggttaggaggaggggtagggygggtatttyggttygaagatttaggaattgttttggtttggtttggggtttatatttgaygtttggygagggttggtttygggtttggttttatygggtttgggagggaygggyg

SEQ ID NO: 6087 - DNA, 1247 bp, synthetic construct
  misc_feature 1..1247: note = Description of Artificial Sequence: Synthetic polynucleotide
  source 1..1247: mol_type = other DNA
tygtggggtattaygygyggatttttgtttggyggtttttgygttyggggttgttgagttyggggttygttttgaggtygyggttgtggtttttggttttttyggttygygttattgtygygyggygttygttgtattttgttttttttgyggtttygtatgtttttggtggaatttagttyggyggaygaygaggaggatgagatggaagtttgttggaaatygggtaaattttatagaaaattgatgaggaagayggtygagagtaggattttgggagtatttatggygggtaagtggttgygtttttttaggaggyggtggyggyggygtaggaygygyggggtayggagyggttggatagyggtyggggttyggtttttygggyggattyggagtgygaggagtygggttttagttatataaatttyggtttygttaygttttttttygtttttygttgggaggggaggaatggggagggagggtagaggaggggtggggagggtgggaggagagtygggtggtgygggtyggaggtgtgggggagaggggtygyggtgygtyggtgtggtaggaagaygtagygttttygygggaygygygyggggttgtygggyggtgygygyggygygggtygtaagygttgatygggggaaggygggygttgtyggttygtggtyggggagtaaaggttggttygtygygttagggtttttttygaattttyggaggtgtggttttttygtagygyggtttyggttttyggttttygttagtygtttttatttttttgggagygagyggtttyggaggagggaagyggyggyggygtttttaagagatagtttggagtaggygtttttgttgtaggttgygtgttgtttyggggyggtggtatttttttttttyggttttaatygttaggtttgtygtttgygttttttaggggttagttyggagttagagaagtttygttttgggttaggygtagggtttagttyggaatagttttattttttyggttgggtatygttttttataaagataggygtttattttygattttygaggttaggtaaaggttaygagtttttagagtttggatygatgttaaaagttgttgygtttttttgtaggttttagttttttttttygtagtttttaattttttttgaygtagattttagttgttttattttttygtttgttttygggattttttttttttygyggtttgtttttyg

SEQ ID NO: 6088 - DNA, 1861 bp, synthetic construct
  misc_feature 1..1861: note = Description of Artificial Sequence: Synthetic polynucleotide
  source 1..1861: mol_type = other DNA
tyggtgagtagagtyggygtagttatagygyggagtygyggygtttattggttttyggagttgttaatyggygtgtaattttgtaggaatttttttygggtttatttgggagttatattgtygttttttttttttagtygtttaggggagtttggagaagtaggtttaggagggagggagttagaggaaaagaagaggaggagaaggaggaggattyggggagggaggygyggygygggaggaggaggggygtagtygyggagttagtggtttygtttggaygygttgttttttagatattttyggagttttagtygygyggatygygygttttygtygttttgtttttaaatttttgtygtagtttttttttaagttagygaatttattttttaaaattagaaattgaatttyggtaygggaaaggagttygyggaggagtaaaattatagtagagtaagaagagttttagagagtagttttttyggagtattaatttygtgtygggagtgtagaaattaataagtgagagggygtygygttttyggggygtagttgygggyggygggagtaggygtaggaggaggaagygagygttttygagtttygagttygagttttygagtttgagtygtaatygttgyggtattttgtttyggattygtgtgygygggttgygtygagygttgggtaggaggtttygttttgttttggttgtaagtagyggttgggagtagtyggtttttggggaatatgyggygygygtggattttgtttattttgggtttggtggtttgygtgtyggyggagtyggtgagtgggttaggyggaggatgygygygtygtttagggtgtttgaagttaygagaggagttygtagggaataggggagygttatttggggaatttttagtttttaagtatatatyggagattygttgggataaatgygttygttyggttattttttttttttttttttttttttagaaaagygttgttygttggygttatttygyggttygygggaatgggggtatygagaattgyggtttggtttagtygtagaggtttttgaagttatttttaattttttygttttyggygggttttgttgygtggtttgggaaggayggaggggaaagggtggtaggaggggggagtttgggtygggttygygagggaayggttttatttygygygtttttygagattagggatgatttggaaatttyggggttttttttttygtatattatttttttygygttagtttttttgtttgattgtatgtaagttttggggagatgggggttagatttaagagattygygagtgtttagagagaaaagtttgtaaaagtttttttgtttgatgttttttgyggttagggygaggtaatygatattaygtggaatygtagtaggygattttttaaggggatattgggggaggtayggaaygygttygaaaatgttgggaygtyggttattggatttttagttttgyggygatttttttttygttgaggggtggaggttgtatygyggggygttagggaygggaggatatttttataggagttataygggagtgtygtaagtagggygaggyggggtaygtgtgatayggygttyggtttygggtygtttggtygttgggggatagaggtttttttttygttaygttygttttttttggttttggyggggygtttttggggtygggaggagtttygttttyggyggagygtttgtyggtatttagtttttttttttygttttggyggtgggaatttgatttttttttttggtygygtttygggggttggagtttgtttttttaygtygtttaatgagyg

SEQ ID NO: 6089 - DNA, 3044 bp, synthetic construct
  misc_feature 1..3044: note = Description of Artificial Sequence: Synthetic polynucleotide
  source 1..3044: mol_type = other DNA
gygygygtgtggaaggttgggtggggtgygtatataygtttatttgtgtaygtatatatatatatatatatatatatatataggtatatatattygagtttagttatttatattgtttgtttagggygtttggaagagttggygagttygtttagttttgtttattyggtttygtttygtttttttygggagggtttttygggyggygtttagtttygagtagagtaaaggayggyggyggttattttygtttttyggtygttggtttttygttttttttygtttttttattgaatttattttygtgtttygaaaatttgattttaattygattttttygygttttygttttttttttttagagtgagygttaaaaagggtttgatagatagaagtttttggttttagtatyggtttagttygtttttagaygatttttgttttttttatttttatagtttttagtggtygttttattttygtattttttyggttaattttaatttttttygttttttttygygttgtttygygttttttttttaggattttttygtatatttttagygtttagygyggttttttataatttttttaygtttygtttttttygttttgttttygttttygatattatttgygttttttattygttttaatttttttttttygttatttttatttgtgggtttttagttttttgttttttttttggtttttatttttgatattttagggattttttttttttttttaygttttttttttttttaggatttygtttygatatttyggggttttttygttaygygtattttttttttttaggttttgatatttgggygttttttttttgttatttatttttagttttagttttgattttygggygttttgttatttttaygtttttygtttygtttyggtttttygggygtttttattygtygtttttatttttttatttgttatatttggtatttttgtttttatttttgtttatatttttttttygttttygatatttygggygtttttttataygtttttattttttatattttygttttygaaaattygggygttttttttttttaygtttagtttttttttttttttygttyggtttyggatttagtttggagatygygttygggaggggyggttgtygttygyggggygttygyggtgttygggtttgggtagygaggaggtgaygtygttttygygggatgagttygggaggyggaggggyggaggaggtgttggyggyggtattgagyggyggyggygtagggygygygggtttttygygtygattttatygatttaaggggyggyggyggtggyggyggttgagygattttgggtygggygygtgatgaggaggggtyggygttagatttygttgtaygtyggagttygtttggattygggygttggtagtygaagggttttggtttygggatttttygtygttagttttygttatatttttttygttttygtttttttattttagtygggggtggggtgggtggggttggggttttygygggggttttyggtttygyggttygttttygggtgtgtttggaggagttttttttttgtggygygygggagttttgtgatgygttagtyggygggayggatgagttgttttttygggaaatygttttygtttttttaygattttttyggttttygtttgggtgtttttygggtyggtagtatttygttttygggygttygaagygagtttttygggggtttgttygtaggtattttttttttttygaggyggygygygygttttyggttttgatygyggtyggatatattygygtttyggttygtttgtygttttttygtttgttttttttagttattttatttttagttgttttygttattttattttattattttttttygttttttygygtatttygygtttyggtttttagttttttttttttttgaatygtttattttatagtttttygttttygggaagaagaaatatttttygaagygtattttttagttttttttttttaygygttygtttttttttttttttgttttttttgggggaggggggttgtygttttggattgaaggttattgatttgtatgtatttgttttagygttggaggttgttttagtygtygygtyggtgtygtygttgttagtggagttgttttttygtttttttagggtggttyggttttattaaatatgtyggtttttgtygggtttyggggtygtttggtttttatttyggyggttttttagtygtttttgtagttygagatgtttgattttagttattttayggaggaggagaggaaaattattttggtygttatggataggtagaagaaagaagaggagaaggagtagttygtgtttaagtaaggatttggttttatattttygtttttttttttgtttttygttttttygtttattgttttgyggtygtttgygygttttagttygtygttttttttttygttggyggygtttaggttaygagggttgyggttagygtyggtygttygggttgttttaggggtgtttgagagtaggggtgtgtgtyggggagggagggygttaaggtyggttgaggtgagggtggygagttttaggyggtgtgattttttttggygttttttyggattttttygttggttattttggtttyggggttttagygggattggggttgaatttaggttttgtgygtatttttttttttttygtygygttgaggtagtgattggggtatagaatttaatatggtygtgtataggtgttttttggayggattygggygaaggygygttggtaggggatgyggaygttattttggttttaygttttygyggggyggttttattagtaaygygggatagagtagggttgtttatagtggttgygagtagygggyggyggygygggttaggggtttaagttttgtygyggtygggtgggtgtgygttygtygttattttttagtttttttttttyggyg

SEQ ID NO: 6090 - DNA, 1603 bp, synthetic construct
  misc_feature 1..1603: note = Description of Artificial Sequence: Synthetic polynucleotide
  source 1..1603: mol_type = other DNA
tygtatttygttygattaaggtyggggtygtagtttgtattyggattggatttggatgtagttaatttttttttggttgatggaatagttttttttttttatagtttyggygygtttttttttygygygtttygtygtttttygtygtagaataggagttgygyggttyggagyggyggyggyggygtyggagtattygtttygtaygtyggggygaggggygagygagygygttttttttttygygttttgygttttygygtttttttttttttygttgttygttttttygtttttttttttttttttttttttttttygtgttattttttttttttttttttttttttttttttttttgatygttygtttgtatatttttatttttttttygtygttttttttttttttttttttttttattgttatattttttgtgttttygtttttttttttttatttgtttgtttattttygaaygtgaattygyggttttyggaggagtttagygttyggagtatttggagttyggtyggyggygggtygagtttggttagyggyggyggyggyggyggyggyggygggagtygagggagyggtagtygygatygygggtatygygggagttttagyggtagtagtygtygtygagatgtttyggygaaagtaaagtaaatttyggtagattaaaygtaagtttgygygyggggtygggagttggtgggattattgtttaggagyggggtgygygggaygggaaagyggtgggtgggtggyggggttaggggagattygttttyggttttttagatgttttaaattttgtttgagtagtygaagggataattagatagttatagatagatagayggttagttygagtttygggtaggagagaggttgygaggagtagtttatgtttgtttygtttagttttygygttttygggttgtttttttaatttygattygygtaygttgygagttttyggygttgtygtttagtyggaggggtagtttygtttttttagaygtttattattgttgttgttattgttttgtgygattgaygtgggattatttttgggaattatttttagtaattagggtagaaattttttagaaaagttgggyggtygagatttyggggygagggaggtaatttttttaygyggtggaaaattagagygttagggtttygattttgggyggtgttagagttatattaaattygaagygaaataaaaagtaggtgtaaaagttygygtttttgyggygggyggtygtgygtttttgttttgygggygygggttggtggttggtaggtygtgttttgggatttygggygggttyggtttaygtygttaggaygtttagtygagyggggattygggtggtgtttggttttggtggygygyggagttttttttgggaggggtygttagttattttttagygyggaagttgtgagtttaaggyggtgggygygtaggggagtgtatggttttgagttttygggtgttygggggtttygatggtgtttagaggatayggygggttaagagatatttttygaaataggtaygttygtagagattaagtyg

SEQ ID NO: 6091 - DNA, 1365 bp, synthetic construct
  misc_feature 1..1365: note = Description of Artificial Sequence: Synthetic polynucleotide
  source 1..1365: mol_type = other DNA
gyggygaatatgagtgyggatygtaygatttagttttgagygttygattggygttyggttygtygagtttttagygygtttygtttyggtttttygygtttttagggtatagaaaatagagtgttttgtagagttttagggttttaaaggtggggattggggattygtaaaagttggggtggagagtatagttttgattatttgagttttyggagttagggygtgagtgagygtttttataygttatttttgaagtttattaygtatttttggtagagagggatttatttygtttattgygtttttatyggttgttttggtagtggttgtaatttatgtagtttagaatgatgagggtaaaggagaaaaggygaaattgtatttgggyggtygggygggggagagaygttttttaaagtttaggaattggagggttygtttaaagagtyggygtyggtygygttgttggggaggatttagagggagattygttatttattttygggtygtatyggttagtttagygygattagtattttttygttaygaatttgagagataagaagygaaaatagggtgtgtgggggatggagagagtttyggggaggtagttgygttttygtaygttttaatttaaagaagagagggaaggaggaagygaatttattgtttagtaygagtygyggagyggtttaatttagagygggtagttgyggaygagttggagaggaaggtgattataattagtgaattagtaatttttgtygagttttaagtttygatttagyggtataatgygttgtgtyggygtttyggggaaaggaaagaattttaaaggtattgagagygtagggttaaaagaaygtttttaggttatttggagtttayggyggtgtatttaagygtygtagttgyggttgttttggtgtgggttgtttatygtgygtaygtttygggyggygyggtttttttaggygyggtgttttatttygggttygggaagygagtygtttggttagtaygtgggttggggaaaagtttgtygagatyggttgggagygtttggtagttttggaattttagyggtygtygyggggttggygaygttaggtaggagygyggagyggygggtgtagttattgggatgtttygttttygttygygagygyggtttttaggtaaggggtgygttygtttatattttttgtttttttaattaattgtgtygttttttgygttttttttayggttattttatagttaagattttttttttttygagttgtagaaggtagaaygttttygggaggaygaagtgattygaagggatgtggtaagygtatttttygatggagatgtagatyg

SEQ ID NO: 6092 - DNA, 419 bp, synthetic construct
  misc_feature 1..419: note = Description of Artificial Sequence: Synthetic polynucleotide
  source 1..419: mol_type = other DNA
tyggggaggygatttttggatgygttttgtgygagtaaagtygggagagygagttttaagtatttggtagyggtgtttttagtaggygtygaggaattyggttatttatttttggtgaattttgygtttattgaggtattygaggtayggatgtgttygtttagtattyggagaygaaggagagagagyggggatatgygttttagttttgttaggttttagggtttttatttttgtatttaaagtttttattttattttatttttygttatttattttttgtttyggttattyggtgyggttttagtatygygygttttttyggtayggttttyggagaaagttttttaattattagttayggtatttgtagtttttgtaygtygttyggtttygtygggtgggtagygttygttayg

SEQ ID NO: 6093 - DNA, 3675 bp, synthetic construct
  misc_feature 1..3675: note = Description of Artificial Sequence: Synthetic polynucleotide
  source 1..3675: mol_type = other DNA
tygygtagtttagttygygtyggggyggtgggtgggtgggtgtttgttatgggattatttttagygttttatttttttygtaaaagtggygttttygttttttyggtttaggtatattygttyggggttygtaygttyggtttagatattagygyggtggagagtatygggtggggttttygaagggtgaggttyggaggygtygyggagggggggttttttagagaggagggggygttgygggaaggtttttaagggaggttgygtttaattttygaygttttgtatttagttyggygyggygygtttagtygttttttyggatttttttyggggygygggagtttagyggygygtttagtttttatttatggtggtgatgatygtgatygtaaagtagaaggagtyggygaatttttattggaygtyggygyggtgyggtttygattgtaggattattagttttagttgtyggtagttttygttgttgatgttgtatttttttttgattyggattttttyggttttgagtttttttttttygygtatttygtggttygattygagggygtygaatayggyggygtttattagtaggtaggtgaaggtgtagaygatgagggatagagttygtaygttttgtttttttatggtygttagtaaggagtyggygyggggggtatgtttygtaggtttatagtygygygygttttattgtagygttyggyggtygtygtygttttttttttygtygtygtygtygtygtttttaagttgtaagyggyggyggtagtagtagtagtagtagtggggaggyggggggyggggaggttggggggggtttttttygttggggtygttatagttatygttatygygaggyggttggyggggtaggggyggygygggttygggtttagtygagaaggyggataggtataggaggttgttygagygtyggggttaggygttygggaatttygatattttgygttagattyggtygaagtagttygttttattgygtagggttatgtagggyggtttygttgggtatygygygggttttgttgtttttygtatttygtttttygttttygygggaaaygtagggaygggaatyggagttagaaagyggtyggagggyggtygyggggttyggtatttttgtgggtttagttygygggtggyggtgtttagtaaggagtttgtaggttygygygtttagyggaatttgtttttttttttattttttttygttttttttyggtggtggggaggaaaagtttgygaagtggyggtgtttttggagttttttgtaagyggggagggggtygagtaggtgtagygggaggggtagttygttttttaaaggttygygygtttagygtttattygggygygygggtgygtagyggggttttygtygggygtyggtyggtgygygaagtttgttyggtttaatttttaaggygygggagyggggygyggttttaggayggtagggatygygatggagyggtttygggggyggtygggggayggygyggtggyggtyggttagttygttttttygggggyggygggygyggyggyggyggygggaggggtttygygggtttygyggagtagyggggyggaygygggygtatgagtygygygggggtyggggtttttyggygttygggygtttygggaggyggtygtygygttggtttgtttygggygttaygtgygtgygygtygttgggagttygaatgtgtgtgtgygygtgtgtatgtgygtgtgtgtgtgtgtgtgtgtgtgygtttggtagtttygtttyggygggagggtttyggggagygggggtygggttaygtygaggtygggttttttttttttttttttttttgtagtttttagggygygttatttttygtttggtttttagttagttggygaggttgttgtggtagttttygttgtagatttagygyggygtagggygtaygyggagggagttygggaggggyggtttgagtygttagggagggggygggggyggagtygtyggygggttttggygggggatgggaggataaaygyggttttttgggtttttttagtttygttttttaagagygtaagtagttttggygggtggagagtttgagggattyggggttggaggaggaaaaygggatttagttagagatggtaggttgatagttttaggtagattgggtagagagtggggagtagaaggggagggggttatgggtatataggagagyggtagtagyggtttaygaagttttttttattttttattttttatttagttattyggygygggagygtgttattggttagggatatggtttygtggagtggtggggtttygagggttgtttyggttttttygttttttagyggtatagttygtttgggttagtatttgtagattygagtygtttttttggagagygttaaggatagtatgggtygttatttttggagttaggatagyggggaaagatatygtaatttttygatttagtaatttttttgttgttttattgaaggaaaaaaaaaaaatatatatatatatatatatatatatatatatatatatatatatatatatatatatatatatatatatatataattattttttgatatatataattattttttggttttttatagttgggygtaaggtgygtygtggatgtagttttgagttaygygatagttttttygagattatttggggtaggaataygaggttygggttggggygtatttattttttgtttttagatgagttttttttaggttttattttttttttattttggttttttttatttttttttttttttygttttttttttttaggttatygaggggtttttttttgattttyggttttttgaatttygtttggagttttggagttttaaaaggatagatttaagttttagagatttttgggttttttttttttttttgattttagttaaggaagggatggagatgggaaagagttgtttggyggtaggttagtagttggttaaggggtggttggggaattagatttaattttygggtagttygygggttttaggagattagttttttttgtgggtygttttttggagyggtgttygggttttttggttttagggatttygggtttagagggtttgggattttagtgatttatygaggttttttagttgggaygttttgtattttatttttagggattaygggtgtttattagggaaggggagttygygttgtgggttaygtttgagtygttaggttttygttgggtttgygggygttttggggygagggagyggggagttttatttygagtaggtattttttttagatttattttggaaattaaggttttygygttyggtaagtgagtttggttgtygggtgagttatygygagygggygataaggatttttagtagttggtaattaattgygtygtggtttagtttaygayggaattttagttaggtttttygtygttttggtagyggygttatttttgagttatagtygtygggttttygygyggttyggaagtygtttgttygtttyggygttattagggggtattggatttygatttaygyggyggtygygtagtyggtttygttgyg

SEQ ID NO: 6094 - DNA, 3675 bp, synthetic construct; identical to SEQ ID NO: 6093
  misc_feature 1..3675: note = Description of Artificial Sequence: Synthetic polynucleotide
  source 1..3675: mol_type = other DNA

SEQ ID NO: 6095 - DNA, 3378 bp, synthetic construct
  misc_feature 1..3378: note = Description of Artificial Sequence: Synthetic polynucleotide
  source 1..3378: mol_type = other DNA
gygagygyggagtyggagagtygggagtataggyggtygygtygygttttggttyggttygggttygygygttagtatygttygtagygygggtattyggatttttygggygttyggggggttttagtaggygygggggaaygggagggggtttgygtgygtyggygggtgttttttagggggygtttyggygaggtttagagygggtygggggyggyggyggttggaggagttttttttattttyggtygggygttyggtttagtygtyggygaygygaggygttygyggggatttgtaattygtyggatygagttttygtyggyggggtygttgttgttggggaaggtaaggaaggttttggyggggggttgggggygyggygggtgggggygtagygagggtgggagggggtygggggaggggygggygtttagattttttaatttygtygtttggggtttygtagtttygaggttttgygtttagagtttaggagtttggatttttattttttatttttttagttttttgttttttttagyggtggygatggaatgtggtaggttttygygagttygtattgggtaggttgaggagggggygattttggaygtaggagaggtttttyggygtygtygttttttttttatttatatattatagtttggtatttttttttattatatgtatagggtaggttggggagggygttttygttgtatttttagtatatatagaygttggygggggtttaagggagttttttatggtttttaatagttatatatagaygtagtaggtttyggagagttttygagygtgttttttttttgttaattaygtttagggttttttatagatattgtaagggttygagaygttttttttttaygtatagagttyggggtaggtaggagaaaattttagattttttttygaagttttygttygtagaagttttygtttgtagatttggtattggtagtggagattttttggaggtatttttttttatttygggyggagggttatttttgygttttttatttttaygygaaygtttggtttttttttttttgtttatttttttattgggtyggataggtygygyggataagtygtttttaattttgggtyggttttatgtygttttygttttaagygtygagtattttygggygtygagtattttygggttygygtygtyggtgagtagaggtygtyggttttttatygtygtygygttagtttggagtygygyggagttgtttygaggaaygagtayggttttygtttttttttggggaggttgggagttttggattyggttaggagttttttttttaggttttygyggttttttgggygaggtagagagttttttyggtttygggagggggyggyggagttgagaattatygygaagygatgygatygggagggtttgayggaggttgyggtttygagttygygtttttttttttggtygyggyggtttttgtttggttatttttyggtagtttgaagagaaygtttaatttggtattttagttttaggtygttgggtattttatttttttttatttttattttgggtttttaagttttttggagygtaggygtttaggttgggattygaagagttttaagttagtttttttttagtattygttttygtygygattttttygtttttttttygggtttggggygtagatttttgggttgtaatttyggagtagttgaaaggtaggaaggygtgtgggygggtagggggtttgtattttygttttagaggagtygtttgtygtttgtgttggggagggagttgggaggtttgttttttygttttattttgggaatttayggagattttyggtattttttttatagatataaatataygttttttyggagygagagtygtygygggggaatagtagaggtygygygggyggaggygggggaaaggggagttgggttttttttttatttgggagggaggtggtatayggtgtgtggggtttggggaggygattgttaygttttttagaatttttatgttttttattygtttgygatttyggttgtygaggaggtaaygagggaggtygagtygttttttttygtgggyggtagygaaattttgygttygtaygtyggggtgtygtygagttyggttttgagtatttagtaaggttaagtaggygaaggagggggygggggtttttgggygygttttygttygygtatagtyggggttttggaagggggtgtgygtagttygtygagttagtttygttygtttgtygttygygttyggttttyggaggyggaygttgygygygttyggggatttyggagygttyggygttttaygtttttttttyggttygttagttgttttttggygttgtttttagatttgttgygtttygatttggggggtagaaggttggttygggagattyggyggttgagggtygagtygygaagtttagggatgygttagagaggygygyggtttygygggtgggygttgygttggggggttygagtttggggtttgtygttttygattttagggaygggygtttgtttttgtyggggtttygygtaggggyggatagagggygattygtygtttyggttttaggtagtatttattyggatttygggttagggagggggygtagttaagttgtggagttttyggaggtttttttttttttygtaggtttyggtttttttyggatttyggtggtygygttygtgaaatggggaygygggttttgttttyggattttttttagttttygatttttygtatttgtttygagatttaaygtgttyggttygtagygtgttgggtttgyggygttagggtggttygagtttygagattatttgygtttgyggatatagtygyggggtttggtatgaagggttttagggagggtttagtaagygttyggggttygagtagttttttgyggygtttttygttttyggtyggttygatttygttttygggagtgggtygtggggygyggagttygtttttyggggaygtygyggggttttaggtttaggyggtyggygyggggtygtagtggyggaaggyggagggtyggygygttgtygttgattgtygggagagggygttygtatygygttygygyggttttgttygtttttttygtttttttygygtttggttygyggtttyggttttattttgggtagtttyggtygttatttttttttygttygttygttygttygttygttygttygttygttgttygttttygtygtygggtttygtgaygygtttygygtttyggtyggagtttttttygtyggttyggttyg

SEQ ID NO: 6096 - DNA, 1108 bp, synthetic construct
  misc_feature 1..1108: note = Description of Artificial Sequence: Synthetic polynucleotide
  source 1..1108: mol_type = other DNA
gygtgtttagatgaaaagyggggtagtygyggttygtagatagygggyggttgggttagatygtagagggaagtttttagyggtaagttttttygyggggaaggttgtgtttgttttaggagatgagtygtaggtattaggggtgatgaggttygggggaggtggatgtgggggatggagyggttttaaggtygttagttttagtyggygttttgggtygyggggtyggagagtttyggagyggattttygtygygtttygaattygtttygygtttttaggttatattyggttygtatttttttygttttaygtgygtttaygygttttttygggtttttttttttttttygygygggtygggggygygggtttyggaggagttgggggyggygggggygyggggygggygattgtygggtttygggttagttttygtttttygtttygttttygatygttyggttttttygttyggygttttttygggttgygtttygyggtttttggyggyggyggyggygggygtagagygyggtatgggygttygggtygyggggtttggyggyggygggyggaygggygygyggttgygggygtaggtgyggggyggygggtyggggtyggggtyggggygyggagtygtygttygggggtyggggygttygygttttygtygtygttgaygtttygtttgtttttttttygtgtttygttygtttttagatttttttttttygttttttygtagttygggttttggtygtggygyggttgtygtayggtgtttttygaygtttttyggaygygttgtttttgtgatyggttttttattttygttattttagtttagtttagygtygaygyggtgagatttyggtygggtyggygggaggggygtygggtaggggygygggygggggttgtyggygggtttgygggtggggagggttygtattygttttgtttyggaggggtygttgtggttygtagtygtygtggtttggttyggtyggyggggtttatgygtttttggagagggtgggtgggygtygagygggtggtagtgtggagttggagaygggtttgggaggagtygggattttyg

SEQ ID NO: 6097 - DNA, 1700 bp, synthetic construct
  misc_feature 1..1700: note = Description of Artificial Sequence: Synthetic polynucleotide
  source 1..1700: mol_type = other DNA
gygyggggtgggygttttyggttttttagtttttaattttttygygtattygggaygggtgaaggygtttagttgtygagtatattygygaygygggtttaaatttygtyggtttttaggtatttttatttygttatagygygggttgttttttttttttttttyggaggaattttttaattttttagtatttatattataataaaggaggttyggtttattaatgygygatygtagtttatagggatttttaaygaatttyggtttagagaatgtatttggtygtgttaygygygattttygaggggtaggyggaygggtttaggygyggataaaggggtttttyggggygtttaagttyggggygggaygtygggagyggagttggtygggaatttattttygtagyggttyggttgtgtttttygtggagtagaagggyggygggtagtagtagtagttagaygttgagtyggggttttatggtggygygttygaggyggygagggayggttgttyggygtgygggggtygyggyggatagttagttttyggaaggtyggatttttagygttaygtatygtttygggtgyggyggttttaagyggagatttgagygyggygggtygagttttttaatttgttggygttgttttttttttttyggyggtgygygggyggygttttaaaggggaggattttgyggygygggtaagaggyggygggagygygyggttygggagtgtggttgtagtgygtygggatattagggtttygygtttygtatttaagaggttttygygttttaatttttygygttygygygttygyggatttaggtygaggatygaaaggggtygttygagttttyggggtyggygtttagagagtttagtaaggtyggtygttttgtyggtgtgtygtyggygggtgtttttggaagggttaatgygttygggtagtagtttttgaagtygagttygaggtgagagygattttygagyggygtttagattttggttygagagtatygatttggagygttttgtgtaggttagggttgtaygtttttttgtttgggagtagaaagggggagggtgggagagygaagatygagtttttyggttaaggagtatttataggggtttaaygggaggtttttttttttttygggtygtgggggggayggtttttyggttatttttgtatgygggtygygtatygygttgttttygygtttygyggatygagatyggyggtgaggatgggttgttttttttattttgygttaaattygttttgtttgtygtttttaggttaagtgggattgatyggggtttagagtggaygaatygttagtatggggagagattagygygyggtggtyggttttgttttayggyggtaagygattttttgtttggttttygtgggttaygygygtatggatttttyggtgtaattttyggggattgataagtygggttygtaygtttaygttttttttttttttttttttatgtaggtggttgttgttggggatagtgatygtggggtttttygtttagagygttttggyggtaagttttggttttygygtttggatttgygygttygagagtggttgggaygtttgagtggttttggagaaggtagttygttygtgygttttygagtgtgtgtgtgygtgtggatgttyg

SEQ ID NO: 6098 - DNA, 692 bp, synthetic construct
  misc_feature 1..692: note = Description of Artificial Sequence: Synthetic polynucleotide
  source 1..692: mol_type = other DNA
tyggygattyggttatttttygagggttttaggygttttatttaayggtygtttttygttttttgttygttattttttygtttttttaygaaggygygaaygttttagattttygtyggttttygatagtatttatttagttttttttttggagattttaggttgtattttgggatagaaaagaaggygggtaygatygyggtgtygggttttattttagtygtttttttttttgagggagttaggygggagagaggggaattatygaggtttyggttttttygygttttagagyggtygggygagttttattttyggtttgtgattygttgatttgtttttgttttattagtygggyggtgaattggattgattggtgatttttggtattaggtttttttatgggtatyggagtaggyggataggggtggggtttygygagygatayggaagggttagtgtggyggagyggattttgtggaggyggggttattgtgtttttgagaagggttttygggggtggagtttattaaggttgygggggygtggttayggagyggagttaataaaagyggggygtgtayggtygygggttagtgtttatgaagggygaggggtgtggttatagggygggatttaygaaggatgtaggggygaggtygggtttttgtaggatgtgyggtygygggtyg

SEQ ID NO: 6099 - DNA, 1924 bp, synthetic construct
  misc_feature 1..1924: note = Description of Artificial Sequence: Synthetic polynucleotide
  source 1..1924: mol_type = other DNA
tygtygtttgtttaatgttttygttagttttgtyggtttttatygtygtttgattttattgtttttttygtggtttttgttgtttttttaaattgtttaaygatygttatttagtaaaaatgaatgaaayggggtygtgtgatttaggtagtttggagatgagattttggaattataagttatattttaaygtataaatygattttattygttttggatattygatgtaygyggaatgggygttgtaaaatgyggttgtttygtyggaggtatttgtttgggatttgttggtagtygtyggttttttttgtttgygattttyggtttagtygtygggattttggtgtatttgtttttgggygttttttttattttttagtggtygttagttttatttttagtttgtggtttyggattygtyggtttgagygttygtagagggtyggtygtygttatagtttygygtttyggttttygygttttttggattttygttttaggtyggygtagtttagtttttygggtaggttttaygttatyggggtttagtgygyggygaygaagyggagagttgtgtttagatttyggagagaaatttyggtttygyggggyggygyggggyggygyggggttyggagttgtttaatttygtygtttygggaaggyggtttygggttygtagggagtttyggggagggttttyggtttygtyggtagyggygtygaggggtgtttgggtttttggggatygygagaggaaaaagaayggaaatygtatyggggaggaaggaygygtagaaygttttygtgaagyggggtgtttyggttaggygtgygygggagygyggttygggggagttyggyggygtygtygygygtattyggtagaggtttygygggagaaygygtagttyggggygtggggyggggaattgttygygygaggttttyggygygtttgggtttyggygagagtaaagygygttttggtatygggggyggyggygtagaggtygggaggaagaaattygggttttggtttaggtygggtttttatttttgygattygygagaggtttaggygggaaaggyggygagtggygttagyggtttygaaagtaaatttggttyggtgttattgttygagggtygtygggygygttttttaattttttygagtttggaaaayggagattttygtagygttttttttagtgygtgttgygagtgttgaaggaggattyggtgtttggaygattyggagtaggggaagtattyggtygaygttgtygttgttatyggygttattggygggtaggatagtggggygggtaaggggttttttygygtttttyggtttttygygttyggygttagttttttggtttttttttttgygtagttttaggtttagtttttagttattttttaagaagaygatttygagggtygaaggtygtttttgatttttgattayggatttttygtgtaattyggaagagtygtgattttaaaattyggtttyggggttatagaagttygagatttgggaggygttygggattttttttttagaatygtagggattyggtttgggatttagggtgtggtttttygttttgygyggtygggaaggyggtygggttyggttatygygttaagtattgygtatttttgggaygygtygttgyggggggttggggggttggggygtttttaygaygtttggtttgttyggttagtgtttggtgtygttggtgggttygtggttgygaygggtaaaygttygtttygygagtygggtaaggtaatttttgygggtygygttygaaggtyggatttttttaagtygtttgggagtttttaaataggtggattygaagtttttgtttgatyggagaataaygtttaatttatttygtyg

SEQ ID NO: 6100 - DNA, 1991 bp, synthetic construct
  misc_feature 1..1991: note = Description of Artificial Sequence: Synthetic polynucleotide
  source 1..1991: mol_type = other DNA
tyggtgtatygtgttttggtaatygggttttggygttttygagagyggggygaggggtgttaygygatttttaggtygttttgtatttttyggtgygtttgtagggattttgtagtaaagttttggatgtttgtagtyggtgtaagtttgtaagtagttggagagyggtggttggagtyggggggyggtgggygtggttaygtttttttttaggtagtttygggaatgttttgaaaagtattygaaagttttgagtygygygygygttaaaagaaaaggtataattttttattatttygggygtggygtgtttagatttygttattttagttgygttttyggttgtagygtataygttttttgygttttttttttyggagygtygttgttygtygggtttatttttygtagtagtttttaggygagagagggggttagagtgttygtattttttttaggggtattatgtttaaygaygaggtatttagtaagttttttatatygtyggaagttttttaygttttyggggtatygtygtagggtagagtygggggttttggtaaagygtttggggygttagtgggggyggttagyggttygagygtygggggtagtagtagaggaggyggtttyggtttyggggygtyggatttgggtgtygggagtaagaagttttygyggttgtttaagtgygtaygttgtaggaattayggttaygtttygtygtttaagggttataagygtttttgtatgtggygygattgttagtgtaagaagtgtaatttgatygtygagaggtagygygtgatggtygygtaggtgggtgygggygtgygggagttygggtttagttttagtttttttttttttttttttttttagatggagtttygttyggttgtttaggttgtagtgtagtggygygattttggtttattgtaattttygtttttygggtttaagtaatttttttgttttagttttttaagtagttgggattataggygtatattattatgttyggttaatttttgtatttttagtagagaygggggttttattatattggttaggtyggtttygagtttttgattttaggtgatttattygtttyggttttttaaagtgttgggattataggygtgggttatygttttyggtggggttygagttttttgaatgaagtttttttagtatggtygttgttatgygggttttgggttgtggagagatgyggyggtatttgtygatagyggyggygtttggggttttgggttttyggttaygttatatygtyggtttgggagygtyggagaygygtttgatttygttygtygggtagagttgygggtttygttyggttyggggttttttaygattttttattttgtgtttyggyggagttgygggggttttttttgttttygggtttttgagatttttgatttygtttttagggtagggaatttyggggttygtttttttgggttttttygygattttagagttygygttttaatagaattgggagggtttattgygttagaggagtttttaggattttygttttygtttttygaggtgaggttagaggggagggttygattttaagggaattttagggatttttagtttygtttttttagtagagaattaaggaatttttttygttttggggttttaaaaattttygatygygttttgggagtagagggtttyggggttygattttttygagygtttttagaatttttgattttttttttttgttgagttgtatttaaattagaaaggattttggagggyggtagygttggttgttaggttagygggaaagggaggttyggtyggttgttgtttaygygggtaatttgtyggaaagttttgtttgtttttttggaaaagtygttgtaatggatatagygttgygyggtttttttgygygtttggggygttttttgttttygtttttygtggatggaggttgagyg

SEQ ID NO: 6101 - DNA, 1667 bp, synthetic construct
  misc_feature 1..1667: note = Description of Artificial Sequence: Synthetic polynucleotide
  source 1..1667: mol_type = other DNA
tyggggtgtaatygtaatattttygtaggttygagttttttyggagttgagtttttgyggttaaatgtygggataaaagyggttttgggttyggaaaaaygyggttagatttggattggagggaggagaagagagagaagyggagyggttattttattygtttataggtatttttatttttattttygttggtttttttttttttygtttygygagtatygtygygttttggagygtygtagtttttagtygygggttggggtagyggagagggtttggaggagggggtygygagygttttygygagagtggtttggttgtaggtggtaaggaaggtgaagtgtaggtattygaggggygtaaaggaggaggaaggygtggggyggggagtgtaaggagatagggattttaggggygggggtggyggtgggaaggaggaggggttgggggagggyggyggaggtgttgggttyggtyggtttaygagggagttgtagaagagttggtttagattttaattagagttgtygtyggttttttgtagtygtygtagygttttygygaaggaggaygtgtygattyggttgygygtttaaggtagaggttygygtyggygttggttgggygtgagttgggaggtygagttgtgagygygaagggagttggagagaygattgyggtattttyggtygtttyggagtatataygattatyggggttgygggattaagggtygygtygttyggaggtygtttttgagygggtttygtagtttygtygtttagygttttttggttttttttygtagttaggttgttaatttattygggagttyggggtatgaayggttayggttttttttatttgtatatgggyggttyggtgtygtagtygttaygggygtttttgtagygtaygtttaagtgygygygttgtygtaattatggygttttgttttggtttaagggttataagygttattgtygttttaaggattgtatttgygagaagtgtatttttattatygagyggtagygggttatggttgygtaggtggygttgygtyggtagtaggttaaygagagtttggagagttttattttygattygttgygygttttgttagggttttygtygtygggggaygtygtygtygtttygtagtygtygttagttttttagtygtygtagtygtagtygtygygttttgttgtygagttggtygyggtygtygtgttgygttggattgtygagtygtagttyggggttttgtaggygtagttygttaagttaggtaagagygtttgaggtgygggagtttggtygggygygggggtaatttyggagtgttagttgtagttttatttgggaggattggaggtaaagttttgggaygtgggtttgtyggggtttttttttttatttttygttaggtyggggttttttttttygggagaagtyggttgagtttggatttagygygagtggtattygygttygtagggaaggygttttygggtagttaaaygaygggattgtgygttagtatygttaggtgtttttttaggttgaagggttyggaaygtgttagattgagtagggagataayggagttgagataggataaaattaaaatttaygtgygtatatttattayggtggggtyg

SEQ ID NO: 6102 - DNA, 433 bp, synthetic construct
  misc_feature 1..433: note = Description of Artificial Sequence: Synthetic polynucleotide
  source 1..433: mol_type = other DNA
tygygagataaatggtgattttttttttgtaggtatygttatatttygggtttagattttggataggygagtyggttgtatygaaggttyggtaggyggattttggyggagygttttagagagaagagtgtagatygygggaggyggagggttttttgttagygtgtttyggttaattagtatttatatygtttgataatyggttaattagaggaygtaaagtttyggggtttgagyggatagtattaggaaggggagygtagtttgtagattgaagttagtggygttgygttgaatgtaattgygygygttygtygggtgagttagygatttgagttaggygggggyggttygatttttttygtttagtttgggttagaggaagtygaaagyggttttagtaaggtgaggygttygaggttgtagaagatyg

SEQ ID NO: 6103 - DNA, 896 bp, synthetic construct
  misc_feature 1..896: note = Description of Artificial Sequence: Synthetic polynucleotide
  source 1..896: mol_type = other DNA
aygaggattaaaggtaygaatttgtttttaygttayggttygggatttagggtgyggggattaygyggagygtagtagagtttagggtaggagtygggaggtygygtaggtagagttygggtagggyggaggggaggtygyggagggtygggtggaggtttttatygttagttttaaggtttgtagtatttttttttggtttttgtttttagggtygatgtgttttygagygaagtygtygtgtttgggtagaaggygttttaggaggygygaggttttagtygyggygttgttttygtygttattgttgttgtttyggtttygyggygtttagtayggtttygattttttagttaggyggyggtygttttygatttygyggtttaggygtagtttttaygttttggtataggattgtatggtygyggttatygttttttgtttyggttygtaagggttagtygygtttttggttttttttttggtttyggtttttygggtggyggttgygttyggtttggagtttttttygttggatagtyggtyggatagatggatggaygttygygggtaatgaatgggygttgygtttaattaagatattygygtaaagttgtggttttatttaaggtatttgtttygtatattttaagyggygttttggaggygggaggtgggttggggttaggaagtttttggttaatgaaagtagatagagggggagggggyggaatagttttygttttygttttttttttttattttttttttagttttttygtggagtttygttttttttggatyggaggttgttatttttagttttatttatttygaygttggttggtgtygggggtygggaygtttygtaygtygttygttagggtgtggagtyg

SEQ ID NO: 6104 - DNA, 1494 bp, synthetic construct
  misc_feature 1..1494: note = Description of Artificial Sequence: Synthetic polynucleotide
  source 1..1494: mol_type = other DNA
tyggggtttttttaagyggagtattttaaaagtygtatygygtagtagaggtttttaggggtttttattygtttttagtgattayggagyggtttttatttttygtyggygtttggttattttttttttttygtagttttygtttgatttttatgtgattgtaggtaagaatagtttagtttttgtgtttttgtaaagaaygtaaataaaaatgtatattattattatttaataaaygygtaatttygtaagatataaagygttttttaaatatygtttttttggtaatattyggtattttggggttgttaaatygtagataaagaygtttattagygyggggggtgaggagattaagggagagataagattaaygtgtttttattaaygggagyggyggttaaaagggygtyggtgttaggggtgagggayggggtatyggtattaattagyggttygtttyggggttttygyggttaaggygagaaygtaggattaggagtattgttgtttattttttatygtaattygtatatttygggattaygtaayggyggatggggygttygggagyggtttttgtaggggagagtaataggttttygygttttggaggtttggtttgygtttygggtttttaggttaatattttatttttagtttttygatattaagattgtgtttttttgggttaaggaaaaggaaaaatttttaaattttttagttagygagagtaaaagaaaggggtggygggggtgttgaaaggtttaggattatttatygyggggttggggggagtggagatttgygagtagtaaaggaaatttttagattttatttttttaaaaaagttatagtagyggttttygygaagygtygggtygygyggggtggggtaagygtatygttttatygttttayggttygtygttatttttatttttatttttatttttatttttattttygtttttatttttatttttaagygtygagtttagggygttygygtatttttttygtyggygygygygtagggygygggggygygtttyggtttttgggtyggggtttaagygtygtttattyggttygyggygttygtttagggtygygaygygagggggyggaggattggggagtaggggtygtyggggtttttggatgtttygtttygtttaygtttattgtttttttttttgaagtaaygattyggygaggagtttyggattaaaaygtatagatatttaygygtgattgagaaatttaatttygyggtggttygaygttagtttagygtttygtygygtttttttttttagygygygtygtatttgygtygatyggggttgtygyggaggyggtggyggggtttaggttgttggggttgtygtgaygtttgygatyggyggggyggygggygygttttggttaattaggggaygyggtygagtaggtttgtgyggggttttaaattygtttttgggtygttyg

SEQ ID NO: 6105 - DNA, 828 bp, synthetic construct
  misc_feature 1..828: note = Description of Artificial Sequence: Synthetic polynucleotide
  source 1..828: mol_type = other DNA
tygygattttatyggggaaatatygyggatagtygggttagtagygttyggagtttattttaggtttttaaatttgtagtattttttagagygygygygttyggagygggatttgtttgttttagtgtaygtygyggagygaattatygggttggygggggtggaggggtgtaggygtgggggttgygggtygttygggttttgggttttttttgtygtygtygtygtttttygttttyggttaggagtygygygtgaygyggttygtygtaggagtttygaaggygyggygtyggygagttttttttyggtaggygygtgggtggtagyggttaatttgatagtttttygggtygggyggttagygyggaggygttaygttygggtygggggygggttgaygtygtygtygtygygggaggagggataaaggggtgggttttygygggtyggtatttyggyggttgggttgygggttagagtattgttyggtggtgtttaggaggagtaggagtaggagtagaagtagaagyggggttyggagttgygygtttaygygggatttgtgttygaaatgtyggtgygaggagatygygggtttttatttyggygggagttgttaggttggtttygygtaagtgtttttttgtgtygygyggttgggaggagggtygtgagygtgagygtgggagygttgggggttttgttygygtgttgttttgaagttgtttttygatgygtygtaggaagttgggatttttttattyggaygtgggaygtaggggaggggtaggttttatygttygggttgatgattygtggttttyg

SEQ ID NO: 6106 - DNA, 2705 bp, synthetic construct
  misc_feature 1..2705: note = Description of Artificial Sequence: Synthetic polynucleotide
  source 1..2705: mol_type = other DNA
tygtgtttggtggttygggtggggygtagttgygggaaatgtattyggagttgtgttttttttyggygaatagtttgygttattygtygtatygggaggtggttgggggttgtygagygagtggtgaaygygatgggtggagagygttygaaaygaggtggaaaagggggygggggygaggtayggygtttttttgttttttttttagttatagaygyggyggyggyggttgagttttttagtttyggttatgtgatagtttygaagygttagttgygggggtttyggygtttyggggattattataaaaygtagttaggagagygygtygttgttattgtygtygttttttttttttaagataagttygggagaaaggyggtagttgyggygyggayggttgagttttttyggttagtatttatttagtattygtagaygttttttttagttygtygttygtttttagagttttgygttttatattttttagtagaatttgygggygttgtygttttagaaattattaaagttttttttttttagygatagtttagggttgygygttttttttaatttyggygaygttgygagtttyggagaaaagagaggygttttagaagttaattttttttttttttattttgattttttattttaggaaaaggagaattttagygyggtttggttaagtgtttggttaggggtttgygtttagggtattggaagttttgttgttattggtttttaggatagtaggygtaaatttagatttaaagggttagagtttttattgtttagattttttttttagttattttggtttgggtttttttyggatttagaaaaagtaaagaggtygggaggaaatayggttttttgttatttttttttgtagttagttttagtatttagtttttggttattygggggaagaygtagagaaggyggyggtaaatttggtgtatttygttygygattgtgygygttagtyggtaatygtyggggttagaagttgttagttttygagagttgagtaggttygaaaggttaaggtyggagatattaggtaattyggagaaggtaggagagagaagtagagagggtttggagggygagagggtaaagtggygggattggaggggtygagtgggaattagtgggggtagttaggttttaggaayggagtgyggagagattttgtggtttagtgygggtyggagggyggtggaggagtygggggygatgtygyggtyggggaagagttygtatagygattaaaaatygttttatttttatatttygttgatygttatggtaatttagtattyggtygagaagatgttgtygttgagygatatttataagtttattatggagygttttttttattatygygagtatatatagygttggtagaatagtttgygttataattttttttttaaygattgttttattaagatttygyggaggttygattagtttggtaagggtagtttttgggygttgtatttygattgyggggatatgttygagaayggtagttttttgyggygtygtaagygttttaaggtgttgygygtygattatatttatttgtaygygggaagtattaagagygygtygggygtyggttygggagggtatttttatttttattattattattatttttattattattattattattaygttgtygtatattattattattattattatttattttagtygtygtygtygtygttttygtygtygtygtatatggtatattatttttattagtaatygtttattgtttygtagtygttttygtatttttygttatagttttygtagtaatygttttagtagtygtagttttagtagtygttttatttyggtaagatgtaggaggyggyggtygtggyggyggyggyggyggyggtygyggtagtygyggtgggtagygtgggaygtttgttttagtttttattttaygggttgggttyggtygtygtygttgtygtygyggtygtggygtttaygttaggttttaagtatttttttgttattgagaatattattggtygggattataagggygtgttgtaggttggagggttgtttttggygttygttatgtattatttgggttatttygtgttyggttagtttggtaaygtygttagtttygtgtggtygtaygttggygttatggattyggtggtygtygtygyggtygtygtagtygtagtyggagtttttgtaggttyggagtatggggttttyggggtttyggttaagtttttgtgttattyggtaagttagagtttgtttgttatgtyggtgtttattaagtttaygtttgygttgtygttygtgttygygttgtagtyggggtttattgttttygyggtttygtagtagttttyggygttatttatygtgtgtttygyggtygyggtttygttygttgtttttttgttggagtttatagtttttatttyggtygaaagtaagggyggttttttgtattyggtgttagtgtatttttaggggattyggygggygtggggagattagyggggtgagagaygtygggttyggaatygtttaaattattygayggggagagggygttttggttaggtygggtagagttggygagttttagtttttgttggaayggaaggtatttaaatagaygaataatttyg

SEQ ID NO: 6107 - DNA, 704 bp, synthetic construct
  misc_feature 1..704: note = Description of Artificial Sequence: Synthetic polynucleotide
  source 1..704: mol_type = other DNA
gyggaatgtgggyggggygtagttggggagtttgyggggaatgtgggyggggygtagtggtgggagggygtaggagtgtgggyggggygtagttgggggagggtgtagagatttgagggtttgaggttgtttggttggtttygtttttagaggygggtgtygygttgtygtttaggtatttggggtttttggtgtttgagtgttttattgtyggygygaatataattgttttagttataggygaggtttggttaaggtgtgggygtatttggggtaggttttgagaggtttagygttyggtggtgyggatagaggyggggtatygyggygttygtygtygttttttygtaggtgattatttttttgtaggtgttttygggttttaggtggttgygtgtttgygttatggttgatattttgggygagyggtatttggtgatttgtaagggygygayggtggaggtygaggyggygttgtagaataaggtggtggtattgtatttygyggyggttyggtgygygtygagtygygattttaygtygttgttttgygatttttatayggygttggtggtygaggygyggyggttygygtttttygaagtggttttygtgttagtygayggtagtttttaggagatgttggattttatgygygagttgtatggygtttggttggygttgtttttttaygatttttatyg

SEQ ID NO: 6108 - DNA, 950 bp, synthetic construct
  misc_feature 1..950: note = Description of Artificial Sequence: Synthetic polynucleotide
  source 1..950: mol_type = other DNA
tygggayggagygggttattygagtggtaaatttttttttaatggatgygggaaaagygtatttgtagttttttttttatygttgttaagygagttgattgttaaggagtgygtatttgtttgtttttaaygtgatagtygygggagygtttygtatttygggttttagggaatgaaggagtttgtttygaattggttttagaatttttagtttttagggyggttygygttygtatttattttgattaygtaggtgatttygggttttagtatttggtygttggygtgyggygtttttygagggggtttgggtagyggttygtygtygggtyggttttttttggyggygtttatggtyggggygyggggygtygagggygtattgtygttyggggyggttaggttgggygygttgtagttgttygagagtygygygttygttygttttygggyggtygaygataggtygyggaggttygagttggagagttttaggtgggatattttgtggagtaggtggtttaggttgtygggtttatygtygggygttttgygtagygtttygtyggatattaagtagggagtygtygtyggggtygygygygtygtygaaattttgttttygtygtygtttatygataggttgtggagaaggttatygatygatgttatygagttatttttgaagyggttatatttggtgygtggaagtatgttttttygtgggttygttgtattygttygggygttgttggtgtyggtttyggygygggttgtygygtatagtaggygagttattgttttyggagygggayggagagtgggggtttygggatagttttttggagaaygagagtagagtaagaggatggtgtttttttatygttaaaagttagtatagyggyggtygygtagtttyggttygggagatygttgtttggggttgtayg

SEQ ID NO: 6109 - DNA, 4861 bp, synthetic construct
  misc_feature 1..4861: note = Description of Artificial Sequence: Synthetic polynucleotide
  source 1..4861: mol_type = other DNA
gygtygtygttttgagtattttgyggaaaatgtgagaattttggggagttattgttgttgtaaggattygygggygggttatygygttggtgggggggttttgtttaaattttgygttttygattttttattygttttataaagggttggtgaagattattttaaggatygtaygaattggttttttaagttttaggaaatygaaataataatygaggyggttttttgttygggttattttyggagygagttttgyggyggatttttggttttygtttttttgggtattygyggtgyggttagatygtttttgttagygattttttggttggtaagggagaggaggtggagtttagattggttttttaygtttagagtggaagygatttttaggattttgtagttatygagtygttygtygtgtttagttygggtttgatggtgaagagtatagttgttttygatagagtyggaggaaaggaagtttaagaagtaattgttygygtttygtttattttgtygagtttatttttatttttatttttattttttgyggatttagaagttgttttatygagttygattgtgttataaaatattttattggaaaaaaagttatygttttygtaagagggggtaggggttttagygatatyggggattyggtttttaggtygagtygaygggttgtttyggggtaattttaggtygttgtggtttgagtttaatygttgggttttygaygtttagaagygggtgtgtgtttggaggtttttyggtygggagggtaggttttagayggggtgggggtgtaggygaggagyggggygtgaataygygtggagygttttgygttayggagtttagggtagagattgtagttttygtygggttggatgygagttttttaggttagagtttagaagygygttgggatttgggtttggtttttgggtttgtgttttttttygtttggttttaattgttygtatttaagattataataaaaaggtttaggaagtaaattttttggaygyggaagggtyggttygygggttttygtygagtgagggggttgygggtggygygggtattttaggtttygtatygtatatygtttttagttttygyggtttttgtygttgggttygttyggtattttygtyggtttttttgtatttttggygygtttttgtttagtaagttgttygttygttggaattgagttttttttgggtygttttttgggtttggtgggagattttaggtygtygttttgtagtatttgtaygggggatygttagtatttgggtgagttagtaygtggattggggattttygaggagatttgaatttaggtaggattaaggagtgtagggtttatatgaggaaatggtggggaaatgtttygggaaatggyggttatttgtttaaatgtygtttggggagyggttyggtttggggagtataagattgttaggaggtttgaaggtgtygygggaaaggaygaaatgttggtttatttaaggggtagaaaaaattgagaggatttyggtgygtattaggtatygagggaatyggggggttgggtagagttttagtggggagaaagaggagagtagttttgtatgtatyggggtatggtttaggaagttgaggggtgggaagttattaggtatatttattatttttttttattttatttttygattttggtattaygtttttatttgtaattggtttaggtttagggatttagtaagatttattttggaaagagtagggygtatttttagtaaggtaagtgattatatttttatagttygttggttttagttttgtatygttttatttgttyggygtggaaaggtatttttgtttttygaagygtttttttaggtttattagttgtagttyggtgaatatagtgyggtttygaygtttttttttggttttggtgtttggttttttagggtttgtygtttttagtttttygyggagttgtaattygagyggtaggtgtggygtattygyggygtygggtagttygggttttgtygttagtaaygtagagtttagttttgaatagtttagyggygttagtgggaatttgaatatygtygtttgttyggtttttagtayggttgygaagaaagagaatgaggattygggtgagttayggtygygtttttttgttttagggattgtygtattaygtgtygygggggtgttygygtttggttagtgttttttagygtaaaatttttaygttttgtyggtyggygtyggtggygtagatggagattttttttaaygttgtygttttttagatttgggagggagtattttttygattttgttygtgttttgttttggagttttttaggttttagttgtttttgagatttyggggtttttgatgaatatgtttgtagttgygagaaattyggagtgtgttttgtttttyggggaaagtagaaattaaaaagaaaayggtagttggttttaagaagatggygtttgttttaattaaattagttttgttgygttagaaaaagaatatgtayggagygtgtatatttgttttttygtgygtggtataatagttatgyggtggttaggagttatttgggtyggagttgggtgtttttyggaaattttaaagtattttgagaatttggaaattattgtttaygttttttatttttagaygtttttttatgtagatgtttttattttttttagttttaaaatgattgtgtgttygttttaaaygaattagtagtaatagagtagatggagaygaaaggtagtygaatggtygagttttagttggatttagaaggagygygttggttttgtygtttttaggttagggagtatygattaggaggtgggggggtgtagggaaggygatttgaagggttggggtttyggttatagygtaggagtttttttttttygataggtttgttattgaggtgygagttttagtttggttggagtyggaaagggtagggtaaggygtaggtaaatgtggggtagaggattygtagggaaaaggtgggagatgggaggtaggtygattttaatgagagaagygagggaggtygatyggtagayggttggaaagygagatagggaaagataagaygagggtggagtgygatggagatagtattattagggtagagtaggtttygttaaattagaagaaagggtagaagttgaaaaggtttgygtaggtygtttaagttttgtagaggtttagtygatttgaaattagaagggatagttaggtagttgtttatagttaggtttttggttttaaggtaaggtygaagtaggttygtattgyggttaaggtygygtttttygttygttggagttttyggggatttygggtyggtttgggttygygttagtatttagttttygggagygtaggttttttttttagaggttygatttttttgggttgggtagtygyggttattttyggttatttttttgyggygaagtttaggygttygtggtttgaggtygtttttatttaygagagttygtagtttggtagtgygtttgtattggggatgtttattyggggttttygggttggaggtygaagggaagtagtgaaggaaagagygaatatttttttygggyggttygygggtaygaggtttggtttttgtgaggtttggagtttgtatttttygtttttygtttggagggtttygagagayggttttagaatttgygtttttagagtagtttttyggggttgtttygatgtyggaggaggttyggggygttttygyggtttagttygttgtttttygttaagttyggttygygatttygyggtygttataygtatttaggtggttgtggaagggtygygtygttagtagygtttgtaygtygaattttagtagttygttygtygyggtagyggyggttgygggygyggygtttttgggttygggtggtttygtgaggatttttttaattatgaagttgygatagyggtgyggtyggtggttygygtagttttygggygggtygaagygygyggygttyggttttttyggtygttgtatygyggygtttattgttgygttygyggtttggyggyggyggyggygayggtttggtttyggygyggggttygygyggggttttaggtyggttygtagttyggggyggygygygggygtyggtttatgttttttttttygtyggtyggtygggyggaggygtagggygygggyggggygygyggggttyggtyggtygaattygggattgygttttttttttaygtygtygygttttttgttyggttagtttygygttatygtttygtttygtttygtttygygtygttgtttttaatttttaggttgagtyggagggagggatttagaagggagggaggyggaagggaggttaaaaaggagggggttaygtgaaagaggtyggtygatygagatygagggagattgagyggagygtaygttttggaaggagagagtyggagagttygggaggtaagatttttagagaygagagtyggagggattaaaygatataggtgagagaaggggtagaggtagayggygtgggttaaataagattttagatagtgatgtgagggtattagagaygttatygagatgtgygtagagagattaaaagaggygtgagagttagygggttgtgaygtgayggagggtatagaggtaggyggggtagaggaagggggyggtaaagaaatgggaatagttagaaaatyggyggtttgatyggtttttaggtagtttyggaaaggtygggaggaggaggggtaaaggtygyg

SEQ ID NO: 6110 - DNA, 999 bp, synthetic construct
  misc_feature 1..999: note = Description of Artificial Sequence: Synthetic polynucleotide
  source 1..999: mol_type = other DNA
gygtaayggtttgtttgygttttttgyggttatagtygatataygttygtagaygtaygtayggatatttygttttttattagygtaygaagaygggaygygygtttatagttttagggttyggttttgtattaygagttaaygygyggtttttagggaggtggygtagaaggtatggygtttttgtttayggygtttyggttttggtagtttttatagagattttygttgatggtttaggtttaaaaggttttttttttygagtttgygtttttttagttttttygttgggttagggtttattattttttttygtyggygagygtgggtttttttggaggygggggtggttttgtagaggtagttttaggtgygygttggagaggtyggttygtygygygggagatattttttttaaagtggaagygttgygtgggtagtagygygggtygggttttyggattttagtttttgttgttttygagattttygtttygygtygtatttttygagtttagygttttygggttgygttgggygtagtggttttyggttagggygtagtyggtttgggygttagagttttttttagttttyggtttagggyggggaagygttagttttygtagtttttgtgaaaggttttttgtgttttttgtttaggtgygygttgtggtatttttggttagaagtatttttggyggtttgttgggtttttygtagtttttggttgagattttgtygtyggygttaaygggttgygttygygttttygttttgttttygttygggtttygggtttygygtgtatattattttttggttttttttattaaaattttttgatttttagttygatgttgtygtygyggttttyggaattgttgtttttagayggygagtyggggttgggagyggtttttayggggayggatttttttyggaggyggaggtggtttttttgaygygaaaggtaggggygygtttyggtttttagyg

SEQ ID NO: 6111 - DNA, 1750 bp, synthetic construct
  misc_feature 1..1750: note = Description of Artificial Sequence: Synthetic polynucleotide
  source 1..1750: mol_type = other DNA
tygyggttttagggttyggygatttttaaggttttygttttaggygttgygggtaaatagggtttgggggtttttttttatygygggttgagttttygttatttgttttttttgtygygggtatttaagtttyggaatttgygagttaggtagygttttattttygyggygtygtttttgatggttattttgtggatttttygtagtttttagttttygatgtggtattttygattygygtatttttggtttatggagtttaggagygtttggtttaggygtttttygaaattgaagagtttttttatggtggygattttttagaygttaattattygttattgagtygtygyggtttttygtggtttttttatttygattaagttttaaattygygatttttttttttatttygttatttatttttaaatttaagatttattattaaattagtaatttatttttaaatttaagatttatttttaatttygygatgtagtttagaattygygatttagttyggtttattatagtttttagtagygatattygtagttttygattttttagatygagtgagtttaattaagtygttattygygtgttagtagttgggygtttygattttttagatygygtgagtttagtaaagyggttaggygygygtttgtagttyggygttagttyggatttygggagtygttttygagttygygtggayggtagagggyggttgtagttygggygtaggygtygttggtttgygggtttttttgggttygygtaggatatttyggaatygtaggygygtattttttttygtttgagggttygtttggtygtgattttygttttttttttttttygaagagagatggggtygttggtaggggtttttygtagttatyggggatggggttgagggtyggtttttgtttyggtgtagtygtygygggtagatygtttggtttggtygtagttatagygatatttagtttyggttttgygaggttgggygygttagttagtttgggagttgtttggygtttgtagttgggygtttaggtggtggagtatggtttgggyggtttttggatygygagtgtttttggtttgagagttygttagattttgtttttattyggttttttttttgttagagttygagatttttagttaggggttttttgtaattatyggggatggggttgagggtyggttttygtttttgtgtagttgttgtaggatagatygtttggtttggtygtagttatagggatatttggttttggttttgagatgtggggagtgygggygggttygagagttgtttggaggttgttgtttgtatatagaaggyggttgtagtttgggtgtttaggygggttggaggtgtatggtttggtyggtttygggatygttagygygtttagtttgagggtttttaggtygtgtttttygtttatttttttatttgagggggattggggtygttggtatgggtattyggtagttatttygtgtggggttgagyggygggttttyggttttgtttttgtgtagtygtygttgggtagaatgtttggtttggttgtagttattgggatatttggttttggttttgygatgttgggagygygagygggttyggaggttgttaggtagttgttgtttgtatatagagggygattgtagtttgggygtttaggyggyggagtatggtttgggtggtttttggaatgygtgygyg

SEQ ID NO: 6112 - DNA, 391 bp, synthetic construct
  misc_feature 1..391: note = Description of Artificial Sequence: Synthetic polynucleotide
  source 1..391: mol_type = other DNA
gygtaggtygtagaattttttygygaaggtgtygtaggaggagtygtggygyggtatygtttygtyggygttygtgttttttygygygygttttyggggttttyggtttttygggttygtatygtygttygyggggttggttgygtaggyggygggtttygttagtagtagtaggagtagygaygtttagattttygggtgttgtyggggyggtygygttattygtgygtatagatttygtagttaggtygttygggtygtagygggggygtygygggygygggtygggattgagttttygtygaggttattagtaygygttygygtagtygyggagtttttygtattttygtttttttgtttyggtttgygtattttygttttagtatyg

SEQ ID NO: 6113 - DNA, 817 bp, synthetic construct
  misc_feature 1..817: note = Description of Artificial Sequence: Synthetic polynucleotide
  source 1..817: mol_type = other DNA
tygggatagagaygggtaggtagyggtgggtygaagggttyggggattagggttygggtygggaggggygggygttttatygyggtttgttggaaggygtttttggtgtaggtgtygttatttyggtaggagatggtagggattttttggaggagtagygygtatttgtgttggygygygyggygggtggagatgtaatygaygygyggtattaygtagtttttggaygagaaggttaygatggttaygygygtggtygtgggtattayggggaagtyggatagtagtttgyggaygaatatgagttygttgyggaagttgatttygtttaygttggaygaattatttattaggaagataagttttaggygttygttgagttttygtagtagtygtaygygtygtyggaaygtttggtttagtygttttattttgtttttygtygtttygtygttaggagygggyggygyggggatattttygggggtttygggygyggtttyggggaagaggyggaagttgaaattgygygayggggatatttgttgaaaggtygtttagttygaaaygagygttagattttagtaataaaaggttaggygaggttatatygygttggagatagagyggttgtttyggagygtaggyggyggttygggygggaagaggygttgggyggtyggattygtagaggggygtgygyggagttgggygyggggtagyggttaagagttttagygtttttttatttgatattggggatagatataatttagattttttagtagttygggaatttyggagggaayggygygyg

SEQ ID NO: 6114 - DNA, 814 bp, synthetic construct
  misc_feature 1..814: note = Description of Artificial Sequence: Synthetic polynucleotide
  source 1..814: mol_type = other DNA
gygaagaaagtygaggygtygaggtttttaaagttggtagtttygggtggyggtgtaggggygaagggggggyggggggaatygtyggatatgyggttttggagttgggtgttgtatttggggttgttgagygtygygttgggttgygggttggtygagygttttygtygggttyggagagattygygggtyggtygattttygygtttygtygtyggttyggttatttgygttattygggyggttygyggtygtygygtttygtygtygtygtygtygtygtygggyggtgtttgggaagtygtgygygtttttyggyggyggtagtagygggaggygaggggygttatygaggagtygagttygtygagtygggygttttattttagygggygaggygagtagttgygttttygggtygatttygagttgtttygggaygygtttaygttgtaagtgtggttgygagyggaggggggttagaggttttyggtagtgattataggtaggtgagggygtttyggygggygttgtatygtttttgyggttttagaggttygygggtgtttgggygygggtggygggygggtygggggtttgygggygtgtttgtgygagagttgtttygygagyggygtagagatattygggygagttgagagttttattttgttttatyggtggaatgggtatattyggaaggygtagttgttttatttttgggaggaatttggggagtttttttggyggtttygyggattttyggttagtgagggttggttttyggagtttagggtaygtaattygtgtttyg

SEQ ID NO: 6115 - DNA, 1429 bp, synthetic construct
  misc_feature 1..1429: note = Description of Artificial Sequence: Synthetic polynucleotide
  source 1..1429: mol_type = other DNA
gygygtataatgaagtagttgtttgtagygttaattagttggygattttgaggttattgygtggttttgttttggtygtttttaataaygggatagagygtygggtatygygtattgattaattatttttttttygyggtygttyggtttttttttttttttttygtygggtttggttttatttttttygggyggtttgygtttttttttttygyggtttyggtttygtggygtyggtagtttygggagtttygggaagtttgygygyggtagtttygtagtyggtagtygggagtttygtagttttyggggagygtyggggttggtggtttttttgttggaggaggygtggagggagygtttttgttttgagttagttayggtggtyggttggaggttgttattttattatgygtygggtttgtttgtttgygaggaagtagatggtggggaggtaggtagyggygagagtggttagatttgaatttygtttatttgttattttttataaaaggtaggttygggggatttaggtattygttgttattttttgggggagggggaggtygaggggtygtygttttyggygtttgygaaggtttygtatttgtyggtgttygttttttttattttttgttttttttttggttgtagtttttygtatygygtaaatgttatttaygtgttaggatgtgtgtttatagtttgtttttttgtttgtttagtttyggyggatagggtttagyggttgygygaygtttttygtygttgggggagattagtaaagttattygtttttggatttyggggtttgggtttttagatttygtttygyggygggagatgygtttgagttttttatagayggagygygttttagtttgaygtagagggatgaatagataagygtatygggygggaatttygattgtttgtgtatttggggtyggtttagygttggaygtgggttgttggttygagaggtggygayggaatygygtgtttatatgtatgggggagtggaaagtygtagggtgtgtttttaygttttttgagtagttygyggtaagagttgttgagtattttatttttygtttttagattttaaggtagtttttygagttttttaaaygtattgtatttagttttttygagagtggagttgtattaaggataaatattttagygttattataaattttttttgttttttgggygatttttagatgaattttggtgatttttagattggatttttattttttattttttttgaaagaaagtgttttagatgygttaataaaatatgtttatgtattygtgtaggygttygtatgtttgygygtyggtygtgtgtaggygtygaagtataygtttgtgtgaatataygggtaygygygtttttgggtttagtggtttttttttygyg

SEQ ID NO: 6116 - DNA, 7708 bp, synthetic construct
  misc_feature 1..7708: note = Description of Artificial Sequence: Synthetic polynucleotide
  source 1..7708: mol_type = other DNA
tygggaagagygagaagttataygttgggttgtagattgggttttagygggtttggagygtggatatgttggttggttttttttttygggagttatagttttygtyggtttygttatttaggttttgtygggtatttaggaggtttgtayggtygtttgtagttygttgtgtagagttygggtygaaggyggagttygatgggaaayggtyggtygaaggtttttgtaattttgttataggtttgttttttygggttttttaggygggtgtttgaggtygyggttttaggtygaggggagatygtagtgagaygagtatttttttgttgygtttttttaggatagagggtttaatttttttttttgaagatatygtaggaagttgttygtattttaaaaattttaaatttygygtttttttttttttttgttttttttttattttygttttttagtttygtttattagtttttattatttygatttttttttgttttttttgtttttttttttttttttgggtttttygttttttyggagtaygygttgttagggtttggggygtygagyggttaatggtayggyggtaggaygtgatgttaggygyggttgtagaaaaggygyggaggtttgygttggygyggattgtagagtyggggttgggttaggygygygtttggagagtattgygygyggttgggttygyggtyggyggtttttttttttattttgtttttttttttttttttttttttttattttttttttygtttttttttttttttttttttttttttttttaattttttyggtggttygattyggttygtaggtttyggagaaatttttattttagtygtygatttagygtttaagagggtygttttgggttgggggygtattttagggaggggaggggtttaggtagttgggtygtygyggatatttagyggttttagggtgaatttygatygtagtygtygtygtttygggtagagtttgygtttttgttttgygtttygggygttgaagtygggygggygatgttygyggygtgaaagygttygyggygggygtygatttttgttttagttttttgtttttttygtttygtttgtttygtgtttttgtgattttggttttggygtygtygtttaggygtttygtaatgtagttgtttttgygtttyggygggaggygttttgtttygygagygttyggggttyggagttyggtttgggggtttagtygagttygggyggggtyggggtygyggtggygatgtatygggttygttagygttaggagygttaggtagttgaggyggggggtaagttttttttyggaggagtygygttttyggtttygtyggtttygtygygatgttgttttatagtttgtygggtttygaggtgtayggggttatygaygagatggatygtagggttaagagygaggttttygttattagtttygttatygatygyggygatatygagayggtaggygygyggttgtggggtyggggttgagagttgggatggggtygggttagttagygtttttgtttttygaagtttggggagygtttttygtgtygtaygggattgggtgttggggattttyggttagaatgtaaggtyggtggttttyggttygggggaaattyggttgttgggaygtagaagggaaataaggttgaaatygaaatttyggttttgggggtagaggagagygtttttttygaattggaagygaagttttattygyggttyggggyggttttttttttattttgttyggtgtyggggtygatagtttygygtttttttttatttttyggtttyggttgttggyggygtygygagyggygttagggaagggygaattagttgggagtattggggttttagtyggtttgggtygtttttagtttttyggtaatyggggattttttttaatttttagygtagttttagaggtygaagttttyggggttaatatttgtygttgatygygtttttagatttttgattggttagatttagttaggttagggttgggagtttaggtttyggtttggttttygtygaaggagattttatttggatttttatatttggtttygygggtttagttttaaatagttagtttttygttttaggtttttttgggggttagaygagtagatattgttygattagygggtttagaagtgatttttaggaggtygyggaggtggggagtaygggagaagtttttttgtttygggagtaggagtagyggygttagtgttttttyggtttttgagygttttttyggttagattttttttgttggttagtttggatagggaagtatttgggttgaatttgttttttatttayggattttgagggtgtttttgtattttatttattttattttyggatttaagagggttttagttygtgtggtagaggagttagaagttggttgatttgttttggttttaatttttggtttaaggatttagggattattggagttggggtttaggaatttygttgtttttttaaagaggattttgtgtggagggtgatttaatggttattttatttttygggtggtttatttaagaagtagtttagggaaagtttttggagggtttgattggagtagttgttttggtttttaaatatagttygagtattttgggggaaaggatagggaggattggaaggaagagaggtaagtattagagttatttaggttaggagttyggtttgggttygtggttggygagggttgygtaggtaggtttgggttttgaatygtttagaaatggaaatgggttttttggggtggggggaagygygtygtatgttttggtagtttttttygygtttagggtagttaaggttatagagggagttgtgggtgtyggtttttyggyggyggaggggtygttggttgaygtaggygttgttgtttttygttttttttttttygtagattatgtygtttattagtagtgatygygtygygttgtgygtyggttgygggggtaagatttyggatygttattatttgttggyggtggataagtagtggtatatgygttgttttaagtgttgygagtgtaagtttaatttggagtyggagtttatttgttttagtaaggayggtagtatttattgtaaggaagattattataggtagtttttttatttaattgttttttaggatttttttttttaattttaggtatagttttatagtttggttttttttttttygtttagttttaggagagggtttattatttaggattttttygttttttttttaagttttttaagttattataagttgggtgataattttttaaagtagtaatttggggagtttttggaaaggtttaygaagtaggagaattagaaaaaaagtagaagttgtttttttgttyggagtttagattataaaaaagtttgagttgggatttttgtttttttttttttttgaagttttttgagttaattygaggttatagaaataggtatttttaaatttaggtagtttaagttggagtgaaatatagttggaaagagagttgtgggagtgggtgtatttttaggttttttgagaaaatgggaatgaaaggtggttaagattaaagaattagaattattagtagattttaagttttttgtttttttttttttttagttttaggattagggtttatgtatattttttttgtttttgtttttaygtttgtgtttttttttttttttttgtttttgtgttttttttaaattataaaagttagtaggatttttaggygttggtttggagggaggagtaaaggttgaggagggggtaagtggtaagtgtttttttttatttttaggtaaaggtttttttagggtttgyggagattttgggtgaagtagaagtttttgtaggtataagtgtgttaagggaaattattttaggataggattaggtttgggttaaaatttagtttttttttttttttattttttaaataaaggtygggttgttygttttgaggaggggattgtttttygtagtagtagyggtatttggaggaggaaaaggggggtatttaatygtgtgtttttatagtttttttttttatggtttttataggygtttttttgtgtagygttgygttygttgttatttgggtatttyggtttyggagatggtgatgygygttygggatttggtttattattttaattgttttaygtgtattaygtgtaataagatgttgattaygggygattatttyggtatgaaggatagtttggtttattgtygtttgtatttygaggygttgttgtagggygagtatttygtatattttaattatgtygaygtggtagyggyggtygttgtagtygyggyggttaagagygyggggttgggygtagtaggggttaattttttgggttttttttattataatggygtgggtattgtgtagaaggggyggtygaggaaaygtaagagttygggtttyggtgyggatttggyggtttataaygttggtgagtgygyggygtaygaagygtttttatagggttgggggaaagtgtgyggtttygayggtygggagttggattgaatttttgtgtgttgggtaaatagygagttttaagtatyggayggtttygtagaagggatattagttttttgggtttttagattgtgygttttyggttggagygggaggagagggtgtagtggttttttgttgtttygggtgtagggttttgtttttgataaattgtttttttggagatggttttttggtttgggtttttgttttattttgttaggtaggaagtggtagggatggagaaagtaaggyggygttgaygttaaataggttttgggttggygyggttgagggtygggaattggggtagygaaggaaygaggtagggyggygagggttttaagagaaagggttggttgtggttyggggygtygagttyggtttggagtgyggtttgatttygtgaaatgttttaagggyggtaggtttggggaattygggtttggggaatttaggaaagtaaaggttgyggttttttttgttyggttygatttttttttaaagataggttttagttttttyggattttttttttygagttttttggygtttgttggggtgagggtygtgattttyggaagygagtttttygggyggggaygagatyggagtaggtttggtttygygttggggtggggtggggtggggtgaggtggggggtttggttyggattttyggtatttttgaattttaggttattttyggagaagttttgttttttttygygtttttttttgtttaggatagttgtagaggttttgagtttyggtaaatgagtygttaatatttgttygaagtttgtaaggttyggaaaggtttatgatttttygggttttygaattagagtttatgtgtaattattttttttttttygtttgtaatagaattagatttggagattttgtgttttttttttttttttttttagtttaatgtataagtagaaaaaagtaaaaataaaaataaatttaagattgtgtagagggtgttayggygggaagaagttagttatttttattttaaagaatttgagttgaatagagagggaaatgaggggygggtgttygttttaaygaaatygtttggaggattatggggygtgtgtttttgtgtgyggaattgggaggaaaaygtagtttttagtttggtaaatggtgaagtagyggtaggtyggtyggtggygyggatttaagatttgttgaaggtattattatagatgtagttttttggaatttttatttttttttttttattattttttaaaaaaagataaaatygagtttagatyggtttttttaatattaagtygtttttatttattaagtgggttaatttttattyggaagtatttygyggggttyggttttagggtatttggtggttggggagttgtattgtttttttgggtayggaggttyggygtyggttttaggattgtgtaaaaagagagtagaaggtatagagatttatttttgttttttgttgtttagtygtygtttgttttagygaggtgggttggaggttgaattttaagttttgtttaatttttataagagatattttttatttagttattttattttttttttggtttttttttttttttttttttttttygtttttttygttttttttttttatttttgtttttgtgtgtgtygtgtttgttttygtgttttttttttygattttggtyggggtttttagttttgagagaaayggygttyggtgygtyggyggtggttatgyggttggttttttyggggttttygggattaggttggggaaagagggtattttttyggtttttyggggtttagtttagtttttttagatttggygttygttttttttttttttttygtattggtaggagagaaatggtygtagtgtgggtygyggggtagttaggattggaaagyggggattttggagggtgygatygyggayggggtgtgygggygygggtygtgtgygtgtgygtgtagggtttygattayggggataygagtttgtttgtggtagtgttttatattttgtggtttagttaygaygattttttgtaaagttttttgttttggggatagttttttygaggygyggyggtattttattgaagggyggygagttgggggtygagtggggagggggygtygtyggggygtygggygttgggtttatagtagagtygygggtygyggggtyggaaagttttttyggggyggggtygtagyggttttttttygtagtttttygggttygggtttyggtggaayggaaatttttttttatttygggaggggttgttagygggttgggggtgygaaaayggyggtaggagygggygaggggttygggtygygtattttgygtttgggtttgygygtygyggtygygggagtttygygyggatyggtyggaygttyggttttttttagttttagttttttgtgtgtgtgtgtttggyggygtaattattgatttgattttaatttattatttagataattgaatttataatttygtttttagtaaaatgaggygaagttagatttgattataggtttagttttagygataagagttygaaattygatgggttaataatagattaygagtaaattatttatgattttaygagttttttagttttattgaatyggtttaattgagaggaaaaaaaaaaaaaaggagagagaaagttygggtttttttttttttttyggtttttygttttttttyggattygattttggggaatttygattygttttygggtattgggggygggagtgagggggttyggggygtyggttaaatttgggttttayggttgtttttttygtygtygttttttgtttttgtttttggtyggtttyggtttygttatttagggtyggtttttttttttttttttttattttttttttttttttttttttttattttttygttaataayggtttyggaaaaggtttttttygtagggatygggtttttyggagtttygggatttagttyggttatyggattttygttataagttgygtttgttttygggattygttttttttttyg

SEQ ID NO: 6117 - DNA, 3969 bp, synthetic construct
  misc_feature 1..3969: note = Description of Artificial Sequence: Synthetic polynucleotide
  source 1..3969: mol_type = other DNA
tygggagtgtgggtgtttygggggygtgggtgttttaggagtgtgggtgtttygggggygtgggtgtttygggagtgtgggtgtttygggggygtgggtgtttygggagtgtgggtgtttyggaggygagggtgtttygggagtgtgggtgtttygggggagtgggtgtttygggagtgtgggtgtttyggaggygagggtgtttygggagtgtgggtgtttygggggygtgggtgtttygggagtgtgggtgtttygggggagtgggtgtttygggagtgtgggtgtttyggaggygagggtgtttygggagtgtgggtgtttygggggagtgggtgtttygggagtgtgggtgtttyggaggygagggtgtttygggagtgtgggtgtttygggggygtgggtgtttygggagygtgggtgtttygggggygtgggtgtttygggagtgtgggtgtttygggggygtgggtgtttygggagtgtgggtgtttygggggygtgggtgtttygggagtgtgggtgtttygggagtgtgggtgtttyggaggygagggtgtttygggagtgtgygtgtttygggggygtgggtgtttygggggygtgggtgtttygggggygtgggtgtttyggaggygagggtattttagaagtgtgagtgttttaggggygtgggtgtttygggggtgtgggtgtttygggggygtgggtgtttygggagtgtgggtgtttyggaggtgagggtgtttygggagtgtgggtgtttyggaggygagggtgtttygggagtgtgggtgtttygggggygtgggtgtttygggagtgtgggtgtttyggaggtgagggtgtttygggagtgtgggtgtttyggaggygagggtgtttygggagtgtgggtgttttaggggygtgggtgtttygggagtgtgggtgtttyggaggygagggtgtttygggagtgtgggtgtttyggaggygagggtgtttygggagtgtgggtgtttygggggygtgggtgtttygggggttgtgggtgtttygggagtgtgggtgtttyggaggygagggtgtttygggagtgtgggtgtttyggaggygagggtgtttygggagtgtgggtgtttygggggtgtgggtgtttygggggtgtgggtgtttygggagtgtgggtgtttygggggagtgggtgtttygggagtgtgggtgtttyggaggygagggtgttttaggagygtgggtgtttyggaggygagggtgtttygggagygtgggtgtttygggggygtgggtgtttygggagtgtgggtgtttygggggagtgggtgtttygggagtgtgggtgtttyggaggygagggtgttttaggagtgtgggtgtttygggggygtgggtgtttygggagtgtgggtgttttagaggygagggtattttagaagtgtgagtgtttygggggtgtgggtgtttygggggtygtgggtgtttygggagtgtgggtgttttagaggygagggtgtttygggagtgtgggtgttttaggggtgtgggtgtttygggggygtgggtgtttygggagtgtgggtgtttygggggagtgggtgtttygggagtgtgggtgtttyggaggygagggtgtttygggagtgtgggtgtttyggaggygagggtgtttygggagygtgggtgtttygggggygtgggtgtttygggagygtgggtgttttaggggtgtgggtgtttygggggygtgggtgtttygggagtgtgggtgtttygggggagtggatgtttygggagtgtgggtgtttyggaggygagggtgtttygggagtgtgggtgtttyggaggygagggtgtttygggagtgtgggtgtttygggggygtgggtgtttygggagtgtgggtgtttygggggygtgggtattttagaagtgtgagtgttttaggggygtgggtgttyggggggygtgggtgtttygggggtgtgggtgtttygggggtygtgggtgtttygggagygtgggtgtyggggattgtagggatatgggtttttttttttatttttgtygtttagggtattttttgtgaggattyggagttygtgagtttttatttttttgagttygattttttggtgttttygtttgtatttttagtttttttttaaattagattagttttttaggggygtygaygtgtgaaattgattttaaagaaaataggtagtggtttttttttyggttttaygtggtttagtagygtttatttttygttttttttttygygtttagtaattaatttaggtygtttttgtagaattygggtttttgtttatyggtttatagygtttatttgaggtttygtttttttagtaaaggtygttttttyggaaygygttttttgyggtttttttagagtttttttygygygtttttttagtttygttygttttttttyggggtttttttttttygtttgtttttaggttygttttttttygygggttgaggtaggttygggtagtayggtygtttyggggygggggttattttttattatygygtggtgtttatagtttayggygttttygggtgayggttttttyggttgtagggygttttgaagagyggtttgttyggagttgagygtayggggttgtttygttttgggygtttttggtttttattagtttygtttttttatgggtaaaayggyggttttgtttgtttataagtaatygtyggggttayggaggggttaggagttgyggyggggggttgtgtttttaggatyggttttaggaggattygygygaggtttggagtttttaggggtygygggggatagaggggttttaagyggaggyggggaaggyggtagaagtttaggatygttaagagttggygaggaagttyggggttygttgtygggggagtygggtaggggtygygtttyggattaggayggaggtttggggaaggyggatttggtygtyggagaygyggtgygggtggagaygagggatttggattttygygggyggttgtayggatttttaygygyggtttaygtgggttttagggggttgttyggtattyggggtygygtygtttttttttygtyggtatygattygtagttttaygtttaygyggyggygttygtagtttttttyggttyggttttygygygtgttttygagygygttttygggattagttttyggaagtagagaggttaggtygggaaggatgggygaygggggtggttgattygggagtayggtagggaggatatttagttaggttygygagtagygtygttttttttttttaggaygggygggaatttgygatgttttygtygygtgggtygtggggyggttttygaggtattgggyggggtaygyggtgggygttttayggaattygtattttttagttttygtaatttaggaggaagtttayggygttttgtatyggygtyggygygttaaygygtttttggaggagttgyggtygggttttttggagagggagtgtaaggaggagtagtgttttttygaggaggttygggagatttttaaggaygyggagaggayggtgagtttagtttyggggygtttygygtygyggatattgtaggyggyggtgaattaggtygygtggggtygtttgygtttttttggttgyggttgtgggyggygaataygtagyggygttygygyggygttttttgygggggtygtttttygttyggggtgatttygtttttttgggygatgttttttatttttaggtaygygtttttttygtgyggtygtatygygtatgtyggtttttatattagaaaataygatttgtaaagtatatttagggtgttttttttaattttttaagggagtttttttagttttygaagggtttagggtagtttgygtatygtagaygygygyggttygtagaagggayg

SEQ ID NO: 6118 - DNA, 2490 bp, synthetic construct
  misc_feature 1..2490: note = Description of Artificial Sequence: Synthetic polynucleotide
  source 1..2490: mol_type = other DNA
gygtttttttttygttygaggtttatttagygttagygttyggtttttttgtagygattgggttttaatgtygtaygaggggttttygygaaggttaatggtattatttttttagttttttttttatttttattttttatttttttaggttgtggggggttaggggtygaggttygygyggygygtattttttaggygtatttttatygttaggtatttttggaagyggtagaagggatagygtttgygttgygttttgtygattttgtagttttggttttyggtgtaygtgtagtgtttgttgttttgtatygtgygtttgaagaagttttgygggagttgagagttagygaggtttygtagygttygtttgtygtatttttgtygygygttygtygtttattttgtagtttttataygtgagtagttygtagtggtagtyggatattttgttttygtatayggggtatagttygtttaggttttygtygtaygaatagtttatgttygyggygttygtttgyggagggatagygggttagggagggtyggyggagatyggtagtttggggttttygyggtygtygttttagtygttgtygtyggttygtygygtaattttttttttgtgtttaggygttgtygtyggtatttatygagygtttygygtagygtttyggggtgggttyggtgtagttttygygttyggtttttttttgttaggttttaygttttygtttygttyggggggtttttttygygyggatttygtygygttygatttggggttttygggttygatgygtttygattgggattygtttgtttgagaataaaatttygattttgagaaaaagagatgggtttagtygyggggaagaygttaggggatttaggagygttggggygttyggttygggtgttttgggaattygatagagaygaaggaggtagagatagagttygggggagttagagatgggaagaaattttggygagagataaygatygaygttatygggygtagataygaggttagttygagagtgttagagatatagatattgagaygtttagttagagagaattyggyggggaygagatatagggagggatggagagagatagggagatagagagagagagagagagagagagagaygagagagagagagagagagagaaaygaggggtgggggattggattagagattyggagagatagyggaggttygaagagaaaatttaagagagattgaygtagagttagagatataaygatagaygatagatagagaygtygagaygagaggagtttyggagagaygaggtyggggagttatagaaatayggagagaaaatttggaggyggaagygtttagttygagggtyggggataggggaygygyggaaatttgtygggtaggagtttaagygttaaggygaggtttygtagggtyggatttagaygggggttygggtygtaggaggyggaaaaygayggygtygggatygagagttygaaaaygtagagtygtygggatttttttttygggggagataaagtygtagtagygayggtaaygggaggygtagttygagtygtygttgttatygggaygtygggyggggagatttygggygggggtyggygggtttygggaagtygagttygaggygagggagygatttygggyggagaggygaagttyggaggagggaagygygaagagttagggttygggaygygagagggggygygayggyggttgyggtyggttyggygtttatttggtygtttttgygagtagygtttygygtttygttygygyggagttygtatttttyggtygygtygtygtygtyggygaggagtygtattygggygtagygtygttygttygygatgayggtygttygggtyggggayggggaggygggggygyggggttggyggygygggggtttyggtttttttttttygttttttygttttttattttgtttttttgttttttttygtatygtygtyggggtygtttygaggygtatttgggattygggttttttagtygttatttygttttgygttaattygtygygttggggtygggggtyggtttttttatatyggygygtgyggtattygggggyggaggttyggtygtgttttttttttaagttyggttygygtyggtatttttttygtagtttagttygagttttygtttttattttttaggttttttagtygtagttyggtttttyggatttygagygyggttagagagttgyggagttygagtgtttygygatttgggtaggtatagggtagtgggggttttgggttattygtttgtagtgggaggaggtagtttttgtttgtgaatttagttgggtygtggygaatgttaygygggtggttggtygtattatagygtggaagtgggtaagggygagtggygatygtggtygaggttyggatttayg

SEQ ID NO: 6119 - DNA, 5370 bp, synthetic construct
  misc_feature 1..5370: note = Description of Artificial Sequence: Synthetic polynucleotide
  source 1..5370: mol_type = other DNA
tygtgttygagggaggygggtagygtagaggagagggtgtaaggttttaagaagaggagyggggggattagggyggggtttaatggagttggggygttygtagattggaaggagtygggattttygttttagagtttttttttttattttygttttttttagtgatttygagttttygatttagttttttttttaggtagagagaattygaggttgtttttgtygttgaaatttgagygggagagtatttygaagtygtttgygtggagygagtagttttygygttatgggttagaggygttygggagaatttgygggttayggattatattygtaggggtttggyggagtaaggtgtygttygtygtttgygggtaggagtyggttttgggtttyggtttttgttgtgtygtttagtyggtygttttttygttttttyggtaagggaagyggtggagaggygygggagtttygattgtgttggagagatttgggatttttgygygtttgygtgygaaggattygagatyggttaatttagttgggagtaygggataygaggagtgaggataaagggtaaggaayggggtttatagggagggtgtgtgtgtgtgtgtgtgtgtgtgtgtgtgtgtgtgtgtgtgtgtgtgtgtgtgtgtgtgtagggggaatgaatggatagyggggaaggtatgtagaggggtttaaggggtgtggatttagtagttttattttagattagagaaggtagttaggttttggygtttatygagttagygtttttatttgggygygggtygtatggyggtagattattttatattygttttggtggygtgggatatgattggtaggagygyggaagaggygttgagaatgtatgygtattyggatagattagaygyggtayggagggggtattttttataagtttttttgttttgagattaggttttygagtggttyggggaatgygtttttgggtatagttagyggttttagatyggtattggaygttaattygagttagagaagtttgggagattggatygtaggggtttttatttagttaaggagggggaaaggagagttgtagggtaggagaggttaggtatagggaaggtggggaggggatggagttttgygttaggagttgggggtgtagggtttgtgaygagagagtattattatgtgtattttgaaggagagggagagggtttgggtttggaaygaggattttygtttgtaggtagtygtttagtttyggttgtagggatggatygygattagtagagggtagaaagtgtttggttygttygtyggtttygagtygygtttygygtttygggattttggttttgtgygtygaagttttgttygttyggtttttttttgtagtagtygygttttygttttagatgttyggagaaggyggtttaggtttagtttaatttygygggtttaggtttggggtttttaggttaagtaaagaggggatygagatgtgggagagaaattttatattgattgtttatttttttygatttagttatataaaggygtttagaaatataygaaggtataaagttttttattatatataaatatatatatatatatatatgttaggagataygygagtatatagaagtatttagaatttyggagataagtatagataygtaaagttgatagagatatttatatagaaaaggatygtagatataatatagaggttgagataygtataaagatttaggttttygtatgaaatgatgyggatatatattttagatataggtaygaaggatttatatatttatatatataygggtgtaggggatttagatatagatttatagatttatttttgggagtttggaaggttgtagggatatatatatygtgtgtgtagagttaaggagtatayggaggtaagagtygtagaggygggggttygataygtatagatatatatagatatttatygatatataygtaggtagggtagggygggagtttttaattttttataaagtygggttttttygyggggtttygyggygtagggggttatttttgattaagtttttygtaggttttaaattygattygttttttygtttttagygaggttaggggattygttttttatgtttttygttttygttyggtttygygtygttgtttygtttygggaggggtyggggtygtttygtagyggatygyggggggttagttygtygttatttygggtygtaatygtttttttgtttttyggtgagtygygygtyggtggggattaygggtygtagatagtyggttygaygttgtggtttttygtatyggaygygggtgttaggttyggttggygyggaagtyggtagttttatttygttagttttygygtttygttgtygaggtttattttgtttaggttggttagagtattgtttttgattygygygttttagygatttttggtygggtattygattygttaaaggatttygattttggtagttaatttaatttttttagagtygttattttggggttattatttttttttagygttttttattgtaaattttaggaggttygggttttgtttattgtttttgtttttgttyggggattttttttttagttttagttgttttttaaattttyggtygtttgaatttaggtttgattttttttgtygttttagtgttttttattttygatttyggggttttaattttttatyggtttagtttttygtttaatttttgttaggttyggagtttttttagattttttatttatattttaggtttatttttygtttttgggtttgggttttttttgtaygagtttagggttagtygttttygttttttgttygttttygtttttygtttttgggagtyggtttttttygyggattaagyggtttygagtaggygtygtygttygggggatttygatttagttttygygatttatttyggtygatagtygggggtttttaagyggttattttyggtyggygtygttttttggyggagtygtygygttttttgtygttygygtagtttggtttygttyggggttatttttygtagygttggagttttataaaatattaataataaagaaggtagaggagaaaaaagaaagttttygttttttaatttttaaattaattttttaagggggtggagtagagggatttgtttygaagaygattaaaatttttgygaggggttygyggggyggtygggtyggggagtyggggtttgagttyggggttaggygyggygyggggygygggttaggggygyggagtttyggggygygygggggggygggayggtattatttgaygtggagtyggyggygtatttyggygtagggatatyggtygyggggtttaaatgttaggaagtttygggaggtgaggyggttygtattttttygtygttagttttagttttaaattyggyggtttagygggygtattatggtattggagtagygyggggagygygttyggagtttygyggttygttgygtttygttygggatttygttgygtygygygtttttttygyggttygyggggtygtttttgtatttttattttttttttygtttgtygtygtygttatygttatygtygtygtygtttttttttygyggtttygtttgtagtagtygtygtygtygggtttygggattgataagtaggtgatagaggagtyggygygygtggttgtaagtgttygggagagygyggygygggttgtagtygtttyggttygttygtaygaygtyggggttyggggttagygygtygtygttttaygatygtygggggtyggygtaatttttgttttgygggggtygygttttttyggttttagggtygyggtggyggagagygggtggaygggtyggygggygagtagttyggtyggyggggttygtagygygtttygygttttatggatatagtaataggtttygagtygttggagaggtgtttttttygygggtagayggattgygttaagatgttggayggtattaagatggaggagtaygttttgygtttygggttygttattttgggggtgttgttgggtgagtgyggggtyggaaygttygagtggtttygggygtgggatggggygtygttyggttgtggataygggygttggggttaayggataaaggaaatgggtttgtaggatatggggaggaggtagagataggatttttggagtgatygttagagggtygtaagtaygttttyggtaggygttttgaggggataggatagttttagtygttatttattattttttttaggtttaggttttagagttgttatttygatgtggtaggtggygggtggtaggggtgatggaggatttagtaattattttggygagtttgggagaggygtaaggttatttggggtgggggagattttaagagaaaaaygtttttttggttatttaaattatagattttggggagatyggggatagaagattaygaaygttatygtggggygtgttagttagygagygttttagttttatttygtttgttttggttttagtyggttattttgygtygtgttygttgttatttgttttaatayggagygyggatttttyggagaaggggagagtatagygtygagttaaggttygaggttygyggtttttttaygtyggagttygaggattgggayggattagtyggggtygttyggtttttggygyggyggttyggggagygtaggyggtaggyggtgatttygggyggttygagttttyggggtygagggttgtgggttyggtgygatygggaygtyggggttgggtygggyggygttgayggtygggttttygttttgtgygttataggtttygattgttygtatttygtygtttgygagggttgttagyggtttattttygatygttttttgatgygagttaaygagtygttttggtaygaggagtgtttgtagtgygyggygtgttagtaagtttttattattagttgttattttygggatyggaaattgtattgtaaataagattattaatagtaagygtttttygtttttttttttygttatygttyggtattygagttyggttagttttttgtygggttyggttygygttygttttgtygtyggttttgtgygyggttgggtygggtagttttaagggtttygagagttgygygttttggggttggggyggattagtttagtttagygggtattgatggggttttgggagttttyggayggtttttagttgttattygttgtttyggaattttgygttgggtyggtyg

SEQ ID NO: 6120 - DNA, 3120 bp, synthetic construct
  misc_feature 1..3120: note = Description of Artificial Sequence: Synthetic polynucleotide
  source 1..3120: mol_type = other DNA
gygggagagtttttttygaygttyggataygyggatggggyggtttttagyggtttttattygygtatttttttaggtttatttttyggyggttygtgtagtatgttttttattgggagtgggatgatattatgtataggtttttgggtttygtagtygagtygygggtattagyggyggttgatgaatttyggtgttattaggggtttagttyggatttgggaatygygygttttaataygygtatayggttttgttttttttaaagygtagtttttttatttagtagttgatttatggaggaattygattttgggaygygttaggttgaagttyggagtttagggttttgtagtagttttygggttttttagygtttyggggatttttggtggttygggggtttttttgggttggggtyggggtgtttygttaggtggggttttaygyggtttagaaagagttagtgattttttttggagttattgtaggttttygttggagggagtaagattggyggggagagttggtatttttattttttgttgagtatagttttygtttttttttaagtttttttgtygattttttygggttggttaaaagtagtaagttygggaggtttgtttattgagagaatagaaaattaggggttgygggggagaatttaagatttttttttygtttgagaaaygtgygaagttttttagtttttggaggtaattaggyggttygaaagtygagttttyggygyggatgttagggtygattttagtttttttttttttgygttttagttygagggyggygagtggtaggtttttttttattttgtttttttttttttggatttggtttgtaggggggaaatgtggttgtattaatttataaatatttatttttaatagatttgtatttgtggagatttygaataaagatagtttagggggattataaaaattttaaatttygtttttttttyggatttggtgttttaaatgttaattataggygagttatatttaatagtaayggggaaaggygagtaggtttyggggagggaggtggggggagagttyggttattaaatgtaattttttattatgaaaaggatttygtyggttttattttttaataagattatgttaygaatataagtatttaggatggtgttgagtgatagggttttgtygtttaattagaggttgtgtygtttaaatygyggggttttttgttttayggagtgaaygayggaaatttgttattttaatttttttatttatgttaagtatagaaaagaagtygagtattttataatygtgttttttttatttttttygaggayggygggaagagggggtttyggttttgtagttttttgaygtttttygttttygagygygtttgggttttaggagtyggagygttgtygtgggggygggggaaggggtggttttgygggtgttttaattggtagygtttggaaaatggggatagtgattttaygattagaggatgaatggggggagggttagtgggatgtgtttgttttttttgatygagagtaygggttttgttttgttttttttttttaggaaaggtggtatttygggtgtatatttattatttttattaaagygggattgattagaagagagaggtygaatggagatgttaggttggggttttyggyggggtagatttygttggatttttgggattaatgtygtagygttygtatttttgtaggtttttagggttggttattttyggttgtatgttyggtttttttttttygagggtgaatttttttgttttatttttayggaaattttttttttygttaggttygtggygtttttttygttattttygtygtygtygtygttattttygttttatygtttgtagggtttttttgyggygttttggtygtagagatttagttttgtttgtygattggtttttygaygtygtygtygtgtttgagtttygttgtttgttyggataagtagaatttyggtaggygtagygggygtygaggtttgggttttagtygtggygttygtttyggygtagtggggagtygygggygtyggagaagyggtygygttgtttygggttattgtatyggttgaaaaaattaaaagtaaaattaatatttagaaaygaagtttgygtgttttygggggtttygttttgttttttttatggatatgggggtggggagttygtggggttttagtttaaaggttttagttagtggaatyggagggggatttyggaggaatttgtttttgatgtttyggttttttggttttttattagaattygtagaggattygttttggagttttygtgygttttggtagaggtyggggaygttagagtgtaygtagttttttgygygtygagtttaggtttygggygtagggaggatygggttgagagtagggtgttatttygtaaaagygataggtaaggattgttttatggggagggagaaggagtaggaagtgatgtttttatttttgatagtatagggatygggagtttygatggaggaaatttttttygggtaggaygagtagagggataggatatggtyggggattatgggattygttgttattaagtatgggaygggtaggygagagyggggaaggggatygatggagttagaagttttgagtttatttttygttygtttttttttggagttttttttgtaatttyggtttagtyggtaatyggtttttttttttaggttaggggtgggggagagattttttttttygaaatatttgatattaattttgtttttttggtaagaaaaataagttttgtttggaaaggggtgggtggggggygtygagygagygagggaaggagtaaggaggyggyggyggagtaaattttgyggattaggttttagygttttygttttatttttagtttygyggyggtgatttgtgtgygggggtttgtgattttgtaagtattaaayggttygygggaatyggtygagtttagagggatagtgggtygaagggyggtttaagataaygtagatggtttttattagttyggtygggttygtagygttygtyggttygttyg

SEQ ID NO: 6121 - DNA, 3120 bp, synthetic construct; identical to SEQ ID NO: 6120
  misc_feature 1..3120: note = Description of Artificial Sequence: Synthetic polynucleotide
  source 1..3120: mol_type = other DNA

SEQ ID NO: 6122 - DNA, 7861 bp, synthetic construct
  misc_feature 1..7861: note = Description of Artificial Sequence: Synthetic polynucleotide
  source 1..7861: mol_type = other DNA
tygttttttyggaagtygtgtttttttttttttgttttttttattttygagtttttgtatttttgygttttygattyggttttttatttgttttttttatttyggtatygttttgttttagtttttttygatttttgtttygttttttttgtttttagaagtttgygtttttgttttttttatygttyggttttttggtgttttyggygtttttttygtygttttygtygttttgattagtttgggttgtggygttggtatygttggtttggggatyggggtgtgggygatggaagggggttygagaggygtaggggaggggttttttttttttygtttttgggygtttggggagattygygtgttagttatttgtyggtyggggygtygatttygygtttaygtattttaygtgggygtttyggggygygtttttgtttttttygagttttgaaagttaattatattgggaggggataggggtggggtgggagagggggtygttgtttttatttattgagtygaggtygttatttygtyggtagtttygygtaggtttggtttygagttaygtttgttgaaatygtttttttyggtttygtttttattygttttggtagttagtygygtttttgtaygygtyggygggggygttttggaattttgaatygttttayggggaaygggggtggggggaggggagyggygygggttttaygygaggaaggaattttttgggttattgygaaagattgaggtttagaaagttagagagagaygtgygaggaggaagyggagagggtgtgygaagttggagagggagtyggagygttagygaaagaggggagygttggggaaggaggaagagaaggagagggggagaagagagaygyggatgttgggygygygayggtagygggyggaggaggggagyggtygggaatttgygygtaggggaagttaggayggagygtagtatyggtaggggagggttgtygaggggttgtgtygaggagttygggtgggggyggttggatygygggtygygggatttatagatagtgygaggyggygygggggtttttttttttatgyggggttggggygtaggggttgggyggggygggtgggygtttgagygyggygygggygtatttttygttttttttttttygggtttatttyggtygatygatatttgygygggatttgttttygtygttaatatttttttaatgagttygttaggtttaaagygagygygatttgttttttagggtggattttttttyggtagatgtttygggaggaggaggygygyggagttttygggaggggggataaattttttttttygaggggygagaataggagatttttttttaaagtttaaaagaaagaygggtttttattyggtttttaaaaatgtatttttyggyggataatgggtttttttttgygtttttgagggtyggyggggygggtagggyggggattygtgygttttggtttygtttgatygattygtatttttttttttygtatttaggttygggttttagagygagggygtaggagtygygaagtyggtygttttttygagygtttttttgaagygtattgtygggatttggttttttyggagttaagtttyggygtatyggygagaaygaaagygtygtgyggggttttgggttgttttataygttttygtttttataggtgttttagtygggtygaagggaygygygttggtgttttaaggggaggaygaayggattttygggtttgggtygyggttttttttttttyggygtttygttttgagyggggtaataattagaaattagttaatttygggyggttgtygggttttgagattgttttgttygtttyggtttagttattttttygggtygtttttgttttttttttttattttttttttaatgttttttygtggggtygtyggtttgtygyggyggttttttttttattttygtgggtttaggggaagagggtattygggyggygaggatgattttygaagagtygyggtaaattgattygtttygttyggagtyggggtygygtgaatgggggttygggyggyggyggtagyggagaagaggataaagatgttttttttgaaagggggagggggygyggagygggaagyggggttatttatttttggttyggtttttygggaagtygygtygaagaaagggggtygaggtttatttaagttttaygagtygtttataatggatygatatattgagggtttttttattaaygtttatgaatattaaagagatygttaagtggyggttagygggygaggggggygayggagtttgagagtttyggttyggtygaggggagggggtttttgygygagtatatttygygtttgggtttygyggaaaatgataaaataataygggttattygttgggaaagttyggaatgttttttttygaaattttttttyggggagatgtgagtatagggttttgttttttattttaatgtattttgagattgggygttatttaygggttttttttttttygggygggggtttaggtgggttttgtygttagattagaagtataaaatgtgagygyggtggagatttgggygtattagttgggaggaygttttgygtttygtttttgttyggtttttagtattgtttttygggtttgygggttyggaggagaggaatgggattttttggtygtagttygagttygtggttattgygttagyggaatttaagtttttaattttaagtyggggtttaggatttaaaygttgtattttagtayggaggatgtatagatttgagggtttttygtagtgggaygtggttttggagagggtaaaattttyggggttgtygtggggtaaagtgattttatttaaagagagattaagtaaagaaattttagtttataaagtttaatttaaattattgtatagatagggatatygaggtttagagaggaaaggggtagtttataggatatatagtagtttttatttttttttggtgttttggaggaattgaggtygttttyggggtttgggagttgtygtagygtttggtttttggtagygtttttygaygtygtttttttygtttttagtattttgttttttttatttaggtttttttagaagttaagaagtaggtttyggtgaggtttttttgtaggagttatyggattttataygtttttttagattygagttttggttagggagtygatgygatttataagttgygtygaaaaatgagtggagggttyggygattttaatttatttttttttttagtagygttgttttttgttggygttttgtttaayggttttgttttttgttaggtgtgtttttttttgggttttagtttygggyggattyggaygtagggtttgaaggttagttatygtygtttttttttttttgygttttaayggggaygggggatgtyggagattattggtaggaattggggattaggggtttggagtttggaygttaggtgtgagatttttttagttaaggygygttygggtggtggaggggygtttatgttaataggygtttggatagggtttygtttatgggaggttagttygttgtttttttatttaagtttttygygttgaggagaaggtttagggagtttatatagtttagyggagattaattygtgagtttgatttaygtygagagggtttaggtatttttgttagyggtatttgaaattgtaggttggtgatgggagttagaagtgyggtaggtggggtgagtttttttatttagtatgttagggtttggggttygaggtttgaggttgatattggggagtygygaagtttgtaggaagyggggtttttygttgggtttagtagttatttgtttygggagaggggatygttgggtttygaggtgtttygaaatygtygtaaagtaagtttgtttttgggatgatgggtaggaggaatagaggagaggaagggaaagaagagagaggtagaggagaaagaaagaattaggaggtaagaaggaaggggygtygtaaygttatyggtttttygaggttgtagtttagtaaggagtyggaaagtygggtygtaagtygaattygtattgaggtttttygyggagttgtttgtagtttttgagggatttygtttttaggtaygtttgtttttatttaggaagggtttygggattttttttaatttttttatatttygtaggaaattttttttttagagataggttgttagggygatttttgttygtttatttygattttygatttggtttygtaagggtygggagtttggttttttatgaagttgttttaggtygggattagttttagtttygayggtygttgyggtttygtttyggtagtttygtgagttygyggaggagtttygtattygatygtgtatagygatygagttggygyggttygtatgaagygaagygtyggttttagtagygtagtttgagtaggggattygygtggtaattagggttgygygygagttyggggygattgtggyggttyggggagtgtagggtyggagagggaagaggaygygggttttggtyggggagggagagyggtgtagggttgggtyggttagtyggggtagtaaagtaaaggtgaaygtygggttgggttaggtyggtgaatatagattaggtttgaggggagygyggggttygaagttaggygtttttttttgtttagtttggtttttggagttttagagagtttygtygtatttttttttttttttygtttttttttttttttagagtyggttgagtttttttttttgttttgygttttttayggggagagaaggaaaaataggaggggggaggaaggattaggaaggggagagaggagtggaggggtattgtttggagyggttygygygttttygtttttygygttttygygaygaaggtttttygagtttagtygggtataataagtttgtttttygaygttagggggttattaataattaattaggagggttattgyggtttttataaaggygttgagattttgttaaggggaagayggtttyggtygagtgtgygagaggttagygygygtttgagttttttgttgtygtttttttgtaattattygttttttatttattttgtatttttygtattygttttygtttttattygygtttttttatttttygygtygtttttgttatttttatagattttattatttttttttttttttttttttygttygttttttttttagtygtttttttatttttygtttttttttgygtttttttttttttygttttttttttgttttggttttttttttatygtagygtttttttttygttttttgggtttttttttygttygtttatttttttygtyggttyggtygtttttyggygtyggggagtttygggtygtttatgatgggtttygtgttttyggttgaggttttggtgtttaagatygggttgaaggygtygggattggygttggtygaggttattattttygatattttgtatagttttttgtayggtygttggygtaaygtgttyggggagtagtttttygaggataagagttattaygttagttttaagatagtttttatygtygaggtgttggygtagttttttttyggyggtgagtttagtygtyggagttyggygtaattttttttttyggygatttttattttygttttggygatgygygagaygyggttgggatattyggtttygttgttattygygttaatttgggttttttyggygttyggtgtattttagtttttttatgggttaaattaggaygygagttattaagtagtttygtagtttattyggtttaaggatygatttyggygatttygtygttyggtttygaygttttygtyggttttttttttttttttttgygtttgagttggygggttttyggtatttatagttttattaggygtgtaatagtagttgatttaaaaagaaggggttttaaatttatttagttaatttgggtttgatttaygaaagtttttatttaaattaagaattttaaaaggtagtyggggttggggagggggtggagggagggygggyggggagaaaaagtygyggggagagygagggagagaaagagagagygagaaaagttttttttttttaagatgttttaagtttttattttttatttattaattygtaaataatatttttttttggttttggtatttttgygygtygtttttttttttttttttaygatttttgttttttttttaatttatygtgaagattaattttatttttatttaygttatgttaattatttaattttttttttttgtaaggggaatttttyggttttttttaaataagtttttttygtattgagttataatttattgttatagtatttttttagggttaatgaatttagaattagtaatttttttygaatggagtygaatgaatgygattattttaatagygtgataaattgttygtygygtygtaatggatatygtttaattttttttttttagtyggttygttygtygggtatttttttaggtagtttagaggggaattttgtaagatatggaggtygtttttgtgygtttygtygtttttagttttgtygtagatgttygataggggaattttyggggagttgggggtygtygyggttttttttygtttagagagatgatatyggggtttgtttgagttygggygtygttttttttggtattttagggtttgggagtagagagggattygggygygttyggggttatatagygagygtagagtttggttagttgttgtyggtgtttttttggtatttttaatatttgttagttygaggtttgtttttagygttgattayggttyggtttttttgttagtgtttagagtttggatatatagtgggttttyggaagtygattaggygaaagagttttyggttggtttttatttttttgtaggatttggttttagtttttttgtgtataaaatygttygttgtygttggtttattaatttttaaatttattyggggtagaggatggaagaagttgygaatgttttgagaattygyggagagattaaaaatttatttttaaaaatgatttttaaygtattattygttttttagggtayggagggtttttaggttgtaaatagaggagaggtygttgagttttygtatattygattttttttatattygggtggtttttttggatttggggtygatttgggtttggttggtttgggtaggatygaagtyggggtttyggyggggaaggaagggtygggtttyggttgtttygggttttgatyggtttttttggtttygtygtygtagaagtgtagaagttgtttagtttggtgttgtttgyggaggtgattatygtttagagttttatttttggygagggtttyggtattttttttaagaygtggattaaggygggaatygagatgggtttttttatyggtygygtgatygtttyggagtaygtggatatttgtaagaataataattttatgtgggaggtaygygygggttggggtagaggggygtaagggtyggygaggggygttggtygygggtaggattygggygttyggtygtygtygtttttattygggttgagagyggyggatatttttggtttggaygttttttgagtygggattttaagtygttygagtttggagtttatttygtttttaggttttttttaattygtgtygaaaattyg

SEQ ID NO: 6123 - DNA, 1434 bp, synthetic construct
  misc_feature 1..1434: note = Description of Artificial Sequence: Synthetic polynucleotide
  source 1..1434: mol_type = other DNA
tygggtgtgygtttttttagggtttttattgygtatygygggttayggtagattattttagttttygttttgttgtgtaggtgttaggagtgtyggttggtttttttttttttaagtaaggttttagggtatygyggttgttttgggatygtaggggygtttttagttttttatygatgtttygaygtttttttggygttggaggttttygygagtttggttgtttttyggagtttgttttgtttgttgggttttaggygayggtttaggttggttgggattttygaattatygyggaaaagggttttagtaggtaggayggygtygtttttttgtyggtaatttttgttttaaagyggattttttgyggggatyggagagggatgtttyggygtgaggatgggagaagtttygggaygggagggtygygggtygtgtttttagttggagttttygygtygtygtygggtattttatgatttgggggtggtggtgtgttygtttttttatgttattttgattttaatttttgggyggattggagtttgtagatttygttgttagtagttagggggyggyggggagtygagygagaggaaaaatttatttattttttgggyggattgygtyggtttygttyggtygagtttygtttttyggtygyggttttygygygtagttygygtagygtttagagtyggayggygtttttyggtggyggyggaggagttyggagggaygtagtygggtaaggtagggygtagggygggyggygygaggygtagggygyggygggtagaggttatttggttattttttttggygttyggggaaggtgyggygatggtyggggygygyggggyggyggyggyggygggygggyggyggygggtygagggggygyggggatatagttaggygtttttgttygtygyggtgttygtygtttgaaggtygtttgggygygggagtyggtgttagttyggagygggygttggaggtagttygaggygygatgtyggtgtygttgtttaagatyggggtygtgttgagtattatggttatgattattaattggatgttttagaygttgttttygttggtgggttttaatattattaagttttyggyggtyggyggygggaygttggatygtagtatyggygtaagtgygttygtyggtygttttggygyggttttttttttttttttttttttttttttttggttyggagtttygggttgggygggygtygygygggattygagtygtttagggaggyggyggggagtagggygggtaagggtaggygtygygggtyggygtagyggtggygattttgtttttygtttttttagtttgggttattttattttygttygygygtttttggggyggygtttttttygtttgggtttttygtygyggggtyg

SEQ ID NO: 6124 - DNA, 5053 bp, synthetic construct
  misc_feature 1..5053: note = Description of Artificial Sequence: Synthetic polynucleotide
  source 1..5053: mol_type = other DNA
tygygggttttttgggatttttgygatttygtygaygygygttygttttttttygagtttygygattttttygtttatyggggaaggagattttagygtygttgttttgttttttttgaaygttgtttttgttygatttggagtygtygygggagygttttatgttgyggaaatattgtttttagygttgtyggtyggygtttttttttagttttttttttttggttyggyggttttggaattaaatttgggggyggggyggggtgagyggtygttyggttttgygggggtttttaaggtygygggygggagggaagtaggggygagygttgatttgtattaygygtatgtttaggttygtttyggaygagagttgttygygtaygtggygygtyggtttgggygaggtgttgtaagygttttttagygtttttagttgtttggyggtgatggtygtgygyggtygtttggtygtggtttyggtttttgygyggygggygagyggtgaggygyggtagttttttyggtttyggtyggatttttagtttttttatttyggtyggygyggggaygtyggggttttaggtgtttatttttatttygttttataggtttttyggaaggygygggygttgggagygattggtaaaaaygggtagtattygggttggggtggagggggygtyggyggagggygggttttgtygygggggygggggyggygttttttttaaaatygtatttttayggygttttygtttttagttttggtttttttttttaagtattttgattttttygygggtttttttttattttaagggtgtgggtatggtttagttttygyggttaagaatttagggygataatttygattaggggygaaaagtygtatatttyggatygaaygaagyggttygggaygygggtttgttygtgatttygtygttttyggtttyggttttttgttgtttatatygttttagtttaggtttttttagtgagygtttggggagagaattttttyggaygtttttttgggygtggttttagttttattttttttagattaggaaaggtgggagygtygttttttyggttgatttygttgtttggyggtttygtagttygttttgtataygagtyggttgttttttatgaggtagaattygtygttygtggttagttgtygtttgtataygaygtaggtaaagtagtgtaggtggtataygaagttttgggygyggygtattatttgygtgggygggatgtttagttggtaygyggygtatttggtttygaagygtttgygggaygtatagggtygggtttagygyggaagygygaggtttatttygtttygagygggttggagagaggtaagyggttgtttgggaaggyggtttyggaggaaggttttgttyggttttgtagggtggtygttagtttggtygtyggggtagagttgtttatttttattgagaagggaattttaattttagaaagatttyggggagtttagtygttattgtttgtaggatttatgttggatttgggaaggtgaattyggagggagaggatttatttggggttagttttttatattttatagttggagttatgaaggttattgggttagagtygttgggtgttagtattaggaattaaaatattattaatttyggaggaattaagtttagtagaattttataaataggggtgtattttttttaatgattgtttttgtgatttaggtaataaattgtttttttttttaaataatatttgttgatgttttagttaggtttagttatttagggagtatttatggagaggttttatttttaatttggttaggttatagggtgttttgtttgggtgataggagtgggttgggattgygagagaygtaggtttygagggtttggttttggtgattgtgaggggaggagtttttggggtaggygtgtttttygtttttatattgaggtgaggtttyggggtttatttgaaaaagtygtttttgtagtaaaygtttttttttyggttgaagtagygttyggttagtggygtgtggtagtygttgtatttgagatatttgttgtgttagtggyggtttagagttttgaggatgaagyggtttaggatgtgttggttatagttagygtatagygggatttttgtgggtaygaggaagttttgggttatttygtagattaggaggtagtgaagttatttttttattttaaygygagttagtttttttttyggtttataggatttagggttgtygaggggtttttttttttttatatatttttttttttagttagtttaagtggtttygtaagtttygggagtgtgtaggtatygtattttatgttaggagttaaggggaaattgatatyggtttaaaaatgtgtgtgagtaagaaagtagtttaggttattttaygaggttgaatatttaattataaaatgttgttagtgttaagaagggtgtatgtggagtttaaatgaaaattttattttagggggatttgttttttgaagttyggtaggaaatatagggaaaygggtttttattattatttggagttggggtattttatygggttttttttatgttaagygttatggttattttttttagggatttttygtaaatgtggttgttttgtttggtggttttgtttgtaggttttyggggtaaatattaatgttttttttattattgggtagtygtaaaattatttatgagtggattggataagtygatttattgtttttgtgttaggygtgggtgtttttaatatygttagagttatttaaaygtttggtttttygttgtttttgttttttatattttatttyggtattgtaggttttttggaggaattatattggggaggtttaagggtgttttgtgggagtttygagtttgtgagygggttttttaggtgttaagggttgaggattttttttttatttagaaaaagtttttggaagagaggagtgttygttgaagggatygggatttattgatatattgtattygtttttttggttgtggatttygtyggttttagtttattttttagtgggtgagagatattaggaaggggttttttygattttyggyggaaaaaattgggttgygtttttttaygtagtggygggaaatyggygatgaatgygtttygtattyggtaaaatygtagtttygggtgyggagygtygaggattygttgygygttyggggtttttatygtgggtagygatygtaggygaggattyggttyggagyggggyggttygataggtygatatagygyggatttagtatygyggatyggatagygtttyggtygtagttygtygtyggygttygygtygggtaaaagtygttttagtttatttygygtygygttygygattttagttttaygttgtatggygattttagttttggygggggtttttgtgttagggatggyggggtyggyggagtttggaygttagttygttygtttyggttagttttttygagygygggygygtagttttttttttttttttttttttttygttttttagttttygyggttaattttttttaggaatygtygaaaaataaataaataagtagggaatygygagtttttatagtttggatgtaatttttttttygtyggtyggttttttttattttttattggtttyggggtttttttttttattttgyggttttagttggttygggagtygaggagaattgtttaggttttttaagaattaaagtgttgggagttagagtggtgttattaggaagttggggggtttggagaagagaggtttttttttatagaygggttttgagyggggataaatygagygggtgtttgtgggygtagaygttgaaatttgatttyggggagatygayggtyggagtttagttygattttggtttttgtatttgattttgtttygttggaaygtggaaagagttyggttggggyggtttttttggggatttttttgtttygtggttattgtttygttattgttttttgygttttttttagtttagggagttggtttygggttgtagaggttttttaagtttattttggattttygagagttttttggtyggagtagygtagtgttataattttatttattttttgataatttaggttaggggttttgtaataaatataggttgaggygtttaggygyggaygtttyggggttttygygtttattttygtttagattttttagtttttgttagttttygyggttaggttyggaaaggtttgaggattttttggttttttyggtgtagttattyggttygggtatttatttyggygtaggttygtttttygygttagtagtgttagtagtaggtygtttttygtygattttygggtygggtttagtttttygygygtttttatgggtttygtygttyggygtygttattttttagtttygaattttttygggtttagygaygttatttygtaatagtttygaatyggygtttaagygatttygggtgttgttgggygttgygttygygggtygttttggggttyggagtttttggtygagyggagggyggagyggtyggggggyggggtygyggggyggggyggggtygggggtygyggagattagttygggttattgyggattttgagygtttttgygtygggatttgyggtgtttagaggtygtttygygtgttyggttygagggygggtatyggtaagggagggtttaggttagggtttttygttagygttygtttyggtttygtagttttttgygtyggagyggtttagaggtagaggtttgagttggagtataygttaggagggttaaggttttygggagaggggtygagaaggtagtagggttttttygtygttgaggtttggtttygggagtagtagatggtyggygggagtttaattygaaaygtagaaggggtgagtgtggygtygagggttgygtatyggaatygtaaggtgtyggatyg

SEQ ID NO: 6125 - DNA, 6343 bp, synthetic construct
  misc_feature 1..6343: note = Description of Artificial Sequence: Synthetic polynucleotide
  source 1..6343: mol_type = other DNA
tygttttttattgtgygygatyggaggggtygttttgtagtgggygttgtgaygggggygtagttattgaygttttttggggtaatatttataaataaggtttaaatgyggttygtttttttaattgyggatattagagggygtagttttaggattaygtttttatttttttattttattyggaaaggggtttattygagtygatttygtygttattagtygggggaggggaggttttggagttttaygygggagttttygtygygggaattataattayggttaagtttttttggttygttygttttatygtagggagaggayggggggaygggtaggaygggygtttggatagttgggtttttttygtaggtgtttttgatttyggtatggaggaagygttygygttttyggtttaggttygtagttagggttgtttygttygttgygttttaggtaagtygggttagygtgggggagtagyggggtttgggttgyggagggggtygttttgattygygtttttttttagggtaaaagtttygtaaggtagtgtgagttggagtygttagtttggggattttttttaagatgattygtayggatttttyggatttgttggtgtygatygtgtattaggatattaaggtggygatttygggattygygtttaagtgttygttatgtgagygattygtggttyggtttgttgagttygygttttttaataagygttattgtygtagtttygattttttggaggygttggaygggtyggttatggagattttgtyggagttatygtygtyggagttygttgtgtygygygttyggattygygaagtygagttaygtygtygygttygttttaagagtgygtttygygygttttygggtttgaygttygygttygtttygtygtyggtgttgtttygtygagggygggaggtttagygtgyggygygggtygaggtatygtygygtygggagttygygtattyggygtttygygtttttgttaaygagttgtattttattaagttgtagtygtagyggggyggtttyggtygygtygygtttttgtgygtygtygygggtygttgygtatygttygagttattygygggtttygttttttaygtgygttgtygtttggatattaagttagaygaygtagtgttttagtaygttattyggggttygyggttttgygggtttatygaggtygygtattgggttygtttygtttygtagttttayggttttayggtgttygggtttygttatatggygttgtygygtatttygaygtttagygatttatattgtgyggattttygggygttttattgygaygggtttttgtttgggtttygggattaygtygagygtygtagtttgttttttattatttygtygggttttatttagtttttttatatagaggagttttaaggttttyggggtagttttgtagttagtttyggtttaattttygaygtttattattttaggttttattygttygaggagttttyggggtttagtttaaggygtatgggyggttattaygtaggagaggtgygtatttttttaatttaggaatygttttttygtttttattatggggaggttttaygagtttayggtttgttttaygggtttygttatgttttygaggagtttygggtttattttatygttygttttttttatayggaggatttyggaaggtatygygagygtgaygttttggttyggaygtattygtattygygtagtagttyggtttgggyggattggggttygygatygtatygtattttgtaagtggtgtygttttttgatttygattygttgttygttttttggtayggyggtatyggtattagttygtttyggttggttatygatagtygttattattygygtttttgggataatattttggtttyggggtygygtygagaagattygttgggtygyggtygtagttaygagaatttgttggggygygaggtgygggagtygygaggygtgtttttygaaggtyggygttygttygtygtygtgaatttgtttattttttttagaygttaygtygtattgtttttgttygagaygtygttgayggagaagggtygygygggygagggtttgggtygtaattggtaygtgaygttygagattattattattgataatgatttgygygttatygagygttygagygttagggtttgggagttgttygggggtygtaygyggttatttttttaygyggttttygayggttttatttttggtygttagyggagtttagagtagttggaygagtttattayggatttggttatygattygygatttatygtyggttaggttttagagttygyggtygattgtttgggtttttaattgygtygattgttggattygyggttygygggtttyggggttttygygttggygtygttaygttygtttttygtttyggtyggtagygtygaggagttygyggtttygggagaggyggtygaygygtttttygaatttagygtygaygaggaygatttgatgatttgttttaatgygygttgtyggygtatygagattatgtttaaygtttgtttttattttaagttttgttatagttgttatatttattattgttygygtttgtgtygtygygaggattgggaygtttataaggygygttgygtgtayggtygygtgggtagygtgtgtygttaygtattgtagttttgtygygatagyggttyggtgtatygygttttttygygtatygygygtgtyggttttttgtygygyggtygyggygtgttttttttgggttttttaagtttaggttyggtygataattttttgygttttggtttggaggggttgttgttattttttatttatttatygttgygtgagttggttatataygyggygtttttgggtagttaygygygygagttggyggtygttgggygtttttaygaatyggtagagtgttttttgtttagygtgttygtggtygtgggattyggtatygygttatyggggatatyggttttgttygygttygygttaygtagttaygggttaatagtgygtaagttygttaaggtagygttggyggtyggtagtttygygyggtygttttyggygyggagtygygagttygatatggagaygttgattttgaygttatygtygggtayggygggtttggattaggayggygaggygggtyggygygygygygaggtggtttttatttatatttagygygagttgyggttgygyggygtttttttgygttaygagttttygygygtttaygagtagttttgygagttygtygaggttaataggygttttaygtttattattatttattttayggatyggygtatyggtygtttttttatgtgtatgattatggtygttttygagtygygygygttygattgggtggttagygttaatttgttggaygatattatgtgaggygtygggtttattaggtttagtttaggygttggttygaattttgttttgtttatttaggtttygttyggtttatttagggtygttttygagtttygttagggttttatttygattttttttaggtttygtttttaattttttagttttttaagtttygtttagttyggtttttagtttygtttaggtttttatttttyggtttttygttttygtagtgttttttataggtttttygtttttttatttttagtaatttttttttttttttygggtttttttttttttttagttygttttygaggatttttagaagaagtyggttttygttttyggtgtttttygttgggaggyggggtgggtttgaggatygtygagttttgtttttattyggaggggttattattgtatagattttattygtagagattyggttttygtyggttygyggggttttygttggagttttttygatttyggttttttttygtttagaagttygaygtaattaaagtttagtttgttattttaaataygtttygtttygtttttygyggttgtgttgttttttygttggagaatattttggtygatttttgtgygttygtgtgygygagygygtttygtygaggyggtgggtagggyggayggtgygtagtgygttttygttggtyggagttagtatattaattaygttaygygttttgtygttttttygtttttagtygttgtagtttgggttttgtaggagttgggaaaaatygtagggaggtttttaggtygatatgtaagttttttagtygaaggggtaggggatttgaataggggaagtagagtatttgggtttggttagagttgatatttggttaggagaggaaggattaagggayggggygtttttaggtgggagtttggagggtaaagygtggtgygagtaggtgagggagagagttagttggtaagygtggaagtttattygagggggtttgatttgtttygagaggttttygtatattygttttggtygtaygtygtattgygggygtggaggygtaagttyggyggttyggtttttatttgttttttaagtgtattttggttygygtttagagttttttggagggtggggtatgygggagaggggtggaggttaaaygtaagggtttttttggagtttttagttttatttyggagttaggggagggggtattaagtgagagaaattgggtattttygttttygtttttgttttygtattyggtaygtttatttygttttygygygtttgtatyggttaggygtttygtttgtttattygtygtygygtttygygttttttattttagggtttttgtattyggttttatttttgagggtyggtygggaaygtttttggatyggaataatttttagggggtaagagttttygaattaagtaaaatagaatttgaatgtagyggttgtygttgtttttttgtatyggtagyggggttggggayggaagttttyggtyggtggagaggagaaagggagaggttttygggyggtggayggggaagagagggagtttttygggyggtggagggggtggagagygaggttttygggyggtggagagyggggaggggggaggttttygggyggtgggagggggagagagggaggtttttgggyggtgggggttayggggagggtggttttyggattaygtgygggataggaggttagggttggtaagttttttaggtttttttygttgttttagtttygygggtygtttaattgtttygttttaagggtgttatyggatttygttggagaggaattttttygttggttggattttattattatttattttygattttaygttttttttaagyggggttggyggagtygtaaggyggtaaggaattggattgygattggttagtaygtgtttyggtyggyggtataattggttgaggygttgggttttgggaagtatttttygaygggattggtygtygttttygtagagttygtttttygtagtataagyggttttygggtygggtgggaggaggggatttygggaggaggaatatggyggtggyggatttygtttttatttttgatgtggatatygatttygayggygtttttaagtatgtgttgattygagtttattyggtttttygtttyggggtttyggttgtagagagtaaggagatygtgygyggttataagtgggttgagtattatggtgagggygggatttgygggtatgttaggggtaygtttggygaggygggggyggggttggygggayggagayggggttgaygaggtaggggyggggttggyggggygggggyggggttgygggtygtagyggattgygttttgtttygagttttgtttttgttaggtttgatttaggttgaggttttgggygggaagggygtgatayggtttgatattttttttagtagttttttagttttygygtttttttyggttttattttttttygtttatttatttttgttttagttttaaggggtttygttttttttggggaaggggttgtttagagttgggattttagattttttyggttgggagtttttttygyggtttttaagggyggttagggtaygttttgaggtygtttttttattttagyggatatttaygataaagtgtygggygatatgtagaagtaaggttgygattgtgagtgtttgggyggygggygtattttttattagagttaggataagaagatttaygtgtayggttattttatggtgagtygtagtttygtttygttttgtyg

SEQ ID NO: 6126 - DNA, 1089 bp, synthetic construct
  misc_feature 1..1089: note = Description of Artificial Sequence: Synthetic polynucleotide
  source 1..1089: mol_type = other DNA
gygggaaaygtygttttttttggygtttgagatttggggttttttttttatttggttttttygttttygttttagtttygtgygttttaggagggtatygtygagygtygggttttygtagggttygggagatttygyggatyggaggagggataggattttygagttttgggggygggaagggagggtggaaggaggaggggagyggggttggggaaagttggagtttyggtatttttttttygggttaggtygttttyggggttttgygttgygtttttaagtgttgggaagatttygyggggaaaggtttgaggaygyggtyggttggtataggtgtggyggttttagagggtyggggagaatttatggtttygaggttgtggattagaaatgtttttgattagaagttgagaatttttggttagggaggtggggyggyggggaggggtygttaagtyggtttagagygygtttatttgygttataagggagaagaggtgtttttygttttttttygtttatygtygttaygatgygtygyggatttyggygatttagttygggtagaagygygygttttttttttttagtttygtgygtyggtttttgtttygttagtttygttatggttttttatttattttygygggagygtttttgtttttttattttgtattttttttagagtygygygttagtttttygtttygtggaagygtttttttttygatttyggttgattttygttygtygtttttttygygggtgygygttyggtttttttttygttyggggygggtttgygtgggyggtgtttygggtyggygggyggagtttyggttttttagttttgygtttyggtggagttygagtyggagtyggtagaggggygygggygyggaygyggygtttggyggggttttgggaggttyggayggggttttggygttgagttyggtyggttyggagygyggatttagtygtaggggyggygatgggtatygagggattttygttttyggtygtttttygyggaygttagggttgtttgttggtatttgygygggtgagtgyggttttttagyg

SEQ ID NO: 6127 - DNA, 1020 bp, synthetic construct
  misc_feature 1..1020: note = Description of Artificial Sequence: Synthetic polynucleotide
  source 1..1020: mol_type = other DNA
gygggygtgaggtttygttttygtygttttttgttygtttttagattygyggttygtttggtygttttatttggtygatggygttggtggtgagtataggaaggttattatagttttaatttttgaggtaatggttgaagttyggyggggygaagtygttgtaygaggggtyggtattggtggygatayggttggyggygttggttgttagggtagygttggygaygttgaygtygttggtattgggaggttgtttttagttagaggtattaggggggaaggtttygtagtggtaatgtagygggggygttagygtgaagatggggttygaggttatgtttagagttaygaagagtatyggtaggtagtagaggtygagttgtagttgttggtygtygtttagygtttttatttgggygagtagygttttaaagttgagggggtttgggggtayggttagygataggttgttgtttagttygtygtygttygygtttttttttttttttygttygygttttygtttattttgtagttgtttygtgggtatygtattttygagggtttygatttgttgttggggggtagggggtggtaggagaagggtgaagyggaggaaatygtagagtaagggtagggggtaggtgggagggagggttaggaaggtagttaggggygagggatgygtaggaggaaaatgttagaygtttygygggggygggggtgttgggagaggatggygtygttatttggggttygggtatttatttygttggaggtgggggtgatttttatagtgttgtygattttgtygtygttttygttattgggttygggggtttyggtggttattyggggagttagtttgtygatygtaggggttttgtyggttygygtygaaaggatgygttgttttttggtttagttgygygtyggttgttyggatatagatagttygaagagatttygttttgtagttttgtagtygygggygtttttttggtttttgygatttttgyg

SEQ ID NO: 6128 - DNA, 6343 bp, synthetic construct; identical to SEQ ID NO: 6125
  misc_feature 1..6343: note = Description of Artificial Sequence: Synthetic polynucleotide
  source 1..6343: mol_type = other DNA

SEQ ID NO: 6129 - DNA, 1109 bp, synthetic construct
  misc_feature 1..1109: note = Description of Artificial Sequence: Synthetic polynucleotide
  source 1..1109: mol_type = other DNA
gygaagttatagtygtatagttaggggttttygtttagaygtagggagygtagygygggtagygyggttagggyggttaygttgaggttgygtaggttgttgtygttgagttttagtatttgtagygattttagggtttygaaggygttttygtgtaygtttattaggttgttgttagttaggttaagttttattagtttttyggtygagyggaaggygtyggygtttagttgggttaagttgttgtagttgaggtygaggaataygagtttggtygagtygttgaaygtgtttttttttagygagygtagygagttgtttttgaagtttaggtagattaggtygtygtagaagatgaagaagttttyggggattygttggatgyggttgtyggttattagtagtttgygtaygtttagggggaaagggtttggtaygttgggtagttygyggtygyggtagtttayggtgtgygggtyggtgtaggygtagttygyggggtaygygtgttygggygygagtagtagtagaaggttgtagagttygagygtygyggyggygtaggttggggttygggggygtatggtyggggggttygygtyggtygyggygagaaggaagyggttttyggagygagttttggygygggayggygyggtgaggtattggttgtygggygyggggagttagagggyggttygggyggggagggygtgygttygggygtgygggggygatggagygyggygyggayggattggggagtygggatagtagggatggagaggggaggggyggggagggaggggygagggatttattaaagggtttattyggataggaaattaattygttagaaaaattttttgggagaggygggagyggtaggggtggtygagtggtygtygttaaaaygyggttttattttggtagttgattttygagatttggtagtaagaygtygygygtatygggygggttgtattygaygtttaagtttagttattaagtttaggagyggtttttttaaggygtgtttygggygtgygttttgttttttygygttygtttggtgttaaagtaygttttttgtaygttattttatgtyg

SEQ ID NO: 6130 - DNA, 1109 bp, synthetic construct; identical to SEQ ID NO: 6129
  misc_feature 1..1109: note = Description of Artificial Sequence: Synthetic polynucleotide
  source 1..1109: mol_type = other DNA

SEQ ID NO: 6131 - DNA, 1384 bp, synthetic construct
  misc_feature 1..1384: note = Description of Artificial Sequence: Synthetic polynucleotide
  source 1..1384: mol_type = other DNA
gygggagtattagyggtttaygtygaggaagataggygtttttttttggggtgggtagygtaggtttggtttgygggtggggggtggagagtgagaggtaygyggggtattagtttagtttttttttggggatttygtattygtagtttaaggaatyggtggagtaygaattttatttttgagttggygtaagygttttttttttatggagatttatttyggtttttttttgaggttttttttttaagtattttttttttygagtatttagtatttttttaattttagtayggttyggggtattagttttttagggygggggttgttttatygtttaagggaggggatagagggtyggtttyggtttaggygatttttgtttttygttaggggygttattttggttttttttygattgtygttygtygttttygttttttyggggggtgtgttttygaagtaygggggygygggaggttaagggtgtttttagttttygatygagattttttttygagtyggyggygaatggtaggttttatttaaagagtgtttggtggygygyggtgttttttttggagtagttttyggygttygttygtyggggtttyggygatygttgttttttttttttttttttttttttttttttttttttygtttttttttttygtygtttygttatygtygyggttagggttggaggygtygttgttatttttgtgtyggaggaatyggygttgtyggtgtttgggggtyggggygygggygaagtygggtygyggaggatataataggtagagtygggggtgttyggtygygygtttttygygtattatgtagttttttgttatttttttygtttttaggttaaaattttgagtatgatggaagataataagtagttygygtttygtatygatggggyggtttagtyggttagttaggaggtgattaatttgygagtygaatttayggttattaatyggagattggyggaattgagyggyggyggyggtttyggttygggttygggagtygyggttagygtttyggyggygggggattyggyggygaygaatatggagaatttttagtttggagygtaaggtaggatygtttyggygtttagggyggaggaaggygagtagagtaygttyggtttyggaggtggtyggggattyggggttttttatattyggggygaaatygttttgtattttggtttgtaatttttttygttyggyggtggttatygttgtttttyggttgggagttgtaggttgttgttatttaygaaaattygagygtagtgtgtayggggttatayggttatatyggtttyggttagtttgagygaggygtagtyggygggtttttttyg

SEQ ID NO: 6132 - DNA, 1384 bp, synthetic construct; identical to SEQ ID NO: 6131
  misc_feature 1..1384: note = Description of Artificial Sequence: Synthetic polynucleotide
  source 1..1384: mol_type = other DNA

SEQ ID NO: 6133 - DNA, 835 bp, synthetic construct
  misc_feature 1..835: note = Description of Artificial Sequence: Synthetic polynucleotide
  source 1..835: mol_type = other DNA
tygtgaggtygtgtgtgagtttttgygtgggtygtgagtgyggtagggagygyggtgttygggggtygtttgtyggtgtgtttgtgygtgtttgtgygttagtttttgtttttgygagtgygtatttttaggatygagtttgtttatatgagtttgtgtttgtgtgtgtgygttttyggttttgygtgtgtttgtgagygtttgtyggggygygtgtgtgttyggaatttygyggtggtgtgygggtgtgttygtgtgtttgtgtaygtgtaggygagygtttttatttgtgtgtgtgtatttgagtttgggttatgtgtgatttagggattagtttatgagtttgtttgtgtttttgagtygatatttgtgtgtgatttagggaygagtttatgagtygatatttgtgtgtgtttgggtgtttgtgtygtggtgtgtttttgtaagygtttgtgtttgtaggtgttggagtgtgtagttgtgggaatgagtgygtgtgagtgtgyggaaggggtatygygygagggagygtyggtgyggaaggttaagygagttygygttttttayggayggtgtygttatttttttttttygtttygygttatgtgtttttgtgtgttygygtygtyggggtygtttttgggtttygggagggggttgagygagyggttttttttttttagggatttygggttygtygttagttttgggtatattygtttttttttttagyggtttygttygttgatttaygggtattygatgggtattygggaggtaatggtyggagaggatgggtagttagygggagggattgagtggygtyggttttayg

SEQ ID NO: 6134 - DNA, 2248 bp, synthetic construct
  misc_feature 1..2248: note = Description of Artificial Sequence: Synthetic polynucleotide
  source 1..2248: mol_type = other DNA
tyggttttygggyggtygtttaggaggagatttattygttgggtttttgatygttttttaggaaaattttaagtayggaaattaagttygatatyggtttyggtattttttttaygtygttggtagtttaaggttygttttgaagaagagttgtagaggaggaaggtggttttggttyggyggagttyggttygtttggtgttaggygttggtgttggygtygagtgaatttaggyggtttaggtgttyggtttggtggygggygtagggtttgyggtgatggaggtttygttttagttyggttaggtttagttttgtyggtygtyggttygggatatgygyggygtttaggtttgtagggtgttttgggyggttataataaagttaaagatyggagtaagagttttyggygagaagagaygyggagaagtyggagtttyggaaagtygygygtagtttygttagtygtygttagttgyggaggaattygggttaattttaaaaatygttggygtttttgggtygtttgttygggtygtattgggyggtttttatygttttttttttttatttgtattgttttaggygggagagaggttttggtttygagggattagttgtagygggtagyggggttttgtttttttaattttygttttatggtayggggttgaatyggtattatygaggttaagggygattattaggagagaagatyggttgttttygttatgygaatttgtgttttgygatttygttgyggttgttygagttatgttagaggtggggaygaagggttygyggggagtgaggtgggtagaggagagaagttggygttttttttagggtttttattttgyggagaagttygatygtagaattyggtyggttgyggtttatgttggtagttatygygaaatgygttttygattygggatygtattggaaattttygttatattgtgttaggtttgattttttaggagygygttaagggtttttygtttattgyggttyggyggttttttttttaataagtaaggttygtgatttygattttggaattttgtttttatagggaggagtttttggtggttatygatyggtttagtagttyggagagaggttaggaaaattttttyggaaygygttgggaggtttttttattttygttttttttygggygtayggagattttyggttttagggagygtttatygattyggatgaygtggggtatttygygygagttygggatttagaaggygtataygaggagttyggtttagtatttttaaattagatttyggaggygtygttagggagyggttatygttgggygtygtygagygtgttyggggygyggtygtggygggttttttggggyggtagttttaggygygggygygtagtagtttygaaggygtygtttggtttagtygttyggttttygagygtygttgtaagtggggggygtttygyggygtygygtatattttattggggggtygtttygtyggygttygtttygtttggttgtygtttaygggttgttygygagygaggtttttgggtttygttyggatttygttyggattyggtttyggtttygattygygtyggttyggttttygygygggtttttatttgtttyggttgtygggttttggygggygggttgtaygygttttyggtygttttttttttagtygtygtygatgttatygttygggttygtataaagtttyggagtggagttgtaygygygtatatttttttttttagtttttttttttgygttttgtttttygtttttygygtygttygtygttygygtttttttygygtattttttygtgtatatatattttatatttatatttgtygaggygtatattygygygtttatatttgygyggggggyggggaaggggattttggttttattgtagggggaygttyggagaaygaggatttttttygttttttagaygtttttattygtttygtyggttttagttttttttattgygagggtayggagttygggagttaggygtggagygygagagttggtatygygagttgggagayggyggtagtttagyggtyggattagttggaggagaygygttygtygggagtagygagatygggagttygtygtttgyggagtttggtttygyggtttttaygyggygggygttggttggayggyggtggtagygggagattgattygggaatyg

SEQ ID NO: 6135 - DNA, 3541 bp, synthetic construct
  misc_feature 1..3541: note = Description of Artificial Sequence: Synthetic polynucleotide
  source 1..3541: mol_type = other DNA
tygyggggagtaggggtygygttatgyggyggtyggtttgtagtagggtagaagttttttttygtttgggtgtgtgggagygtagattttttyggygtggtygggaattaagtyggggttyggatgaaaygaaaygaaaaatgaatattygaattttttttgttagttttttttttttttttttgtttttttttggggggagggtagggtagggaaatataaggggaaaaataaattaggttagattaaagttttggttattttttgtttttatatatagaygyggttttygygatttttttttyggggtttygataaatatagtatattgygatttaaattaagggygygggyggagttagaaggattttaggagtygagaggttttaygaataaataaaaatygtaaaaaattaagttyggagaaaggggaaagyggggtggggygtatttttataggagagaagaggygtgtagygaataaagtgatagttttttattttggattygtaggtttaggagtttaygyggggagaggggatggagaatttttttygtttygttttttttttyggggaatttttaatttygtattgygttatttgtygttttggggaggtygttgtygggattyggtttygaatagttygggggggtaggggygggggtygtygaggggatgggggtagagagtaggyggygggtaggatgttyggggtgagttggygagtttyggattttygtttttttttttyggggttygggygaygtagtttatygggttgttttygtygtttatyggagagggtygttygggtgtttggttttgttygaaagtttttgggtttttttttttttttgtaaaatttaaagtaatygaataaaaagagtttaggtygygygggygggttgygygttygygttttgtagygygtyggygggggttyggttygyggggttattgtattgagtygggtagtgtgtggtggtggtggtggtgtagygtygtyggygggggyggtgggggygyggagggtggygatgygtygttttygttaggttttagttttttaggygygtatatatygtttatgggygggtggttygygtyggtygtaggggttatgygtttttttttttgtygtyggttgtagaattagaygygtattatttttttttttagttgtaggttgtttgttaagtyggtgatttygtgygtygagggtttggggtatttgagaaagtggttttygagygygtttttgatttttatttygatggaygtgygttttttgygtttgyggttttgygtygygattttgtttaggttggtggggttgtygttggaygagtyggttttttttagttatttgttgagtagyggtttgagtttgtatatgtttttgaagtttagttgtagggtttygaagyggtagatggtggtttgygagaataygttatygtagagygtgtttagygttagttttaygtyggtttgygtaaagtttagtttgatgygtygttgtttgaattgtttggygaattgttttaggtygttygagttgggygtattttygttygagtgttygtttatygatgagtygtygtygttygygttygggtgtaggtgygtygtygtygygtgtaggtygttygygtgtgtatgttygtgtgygtgttygtgggygtttagatgyggyggyggygayggttttagttgygtttygtggttattttygtgtagygygtggtgtaggttyggtttygygtygttatygttygtygttagtatttyggttaggtygtygtygtygtttttygggtaggtygtttgygygtatagttygagyggttggggttggtggttttygttggtttygggygagggygatatggtygggtttaagtggtgygttgtgttgttttgygtttatgtygygttygygtgggtygttttttggtgtattaggygygygtggaaattttygtygtygtygtygtygtyggttyggtyggtgtygtygtygtttgttttgtygtgttttaggtgygggtygtyggtttaatygtygtygtygttttttttygtgggtagttattgggggtgygttaggtttayggggtggttygygttygygtttagttattygtggtgtattagtttttgtatttygyggtaygyggtttttgtatgtaatygtttygyggtygtygtygtygtygtygtygtygtggygttygggtgtataagyggttyggtgttttyggtttygttatyggggtttygyggtaggtattgygyggtggtggttatgtygtttygygttttgygtygygtygtygtygtygtttygtttygtttgygggtttygtygtttygtttygtyggtttaaagtttygattygttyggygtttyggagttttatttygttygtygtttattggttgttygyggagttgtttttygttttttttgttyggttttygtttygygygttygttygttattttgttyggttgtttagagttttttattgggygtygttttyggggtttygygygtyggtygtgttgattggtygttggggttttatttayggtttttttatygttygygtatatatttaygtttygggggygyggtygttaygtggggagtggygygggggtggttttgggatygtattttttttygttttggttgtgtgggtttygtttttttttagygttggagatttygagttyggtyggttttatattttaygygagttgaattttygttygtatttygttygggtagtagggattgtyggtttygggaggygttygggtttygagaagyggtttagtttygygtttttttttttttagtatygttgtyggyggattaggattttygygggttttggyggttgygagygygaggyggygyggattygyggttyggtttyggygygattgtttatygygttygtttygtttttygyggttgttagygtgtattgggygtttttyggygygtttgttyggttygtttyggtttttttttttttttttttagttttagygttataatttygtygattttttttgttttgagagygygttyggtgygggyggagtyggayggattttggttttaygtttygygygggtatattttttttygggtattgaggtttaggtgagtatygygygggtagttggggttgggayggygggyggtagyggttttatagttttaygygagtttttggtattyggtygygtttyggggttttagaaggagaagatttygaggtggagattgtggtttyggggaaaaygttgttggtaagggygttagttgggggtggaygttgggtttaggggtatttgatttgygtygttgtagttttttygtttttttttttagtttgaayggtttatyggttgtggtygtggtgggattaygtttygggagaggagaaggatgggtttagggaaggggttygggttttttagaaattyggygtgtaggtygggagttgtttagtttyg

SEQ ID NO: 6136 - DNA, 1513 bp, synthetic construct
  misc_feature 1..1513: note = Description of Artificial Sequence: Synthetic polynucleotide
  source 1..1513: mol_type = other DNA
gyggggygggtyggggygtygttgygggayggtatttaagggygygygttgygtgttgttttygyggtttttygggygttatyggttyggttaggtttygggagttgttygttttaggtygygggggygtttygggttygtaggattygaaaatttttttttygggtyggggygggtgagtaggygggygttgggttgygttygaygtttttttaggtygtttaggagagtttygagggttgggagaagtygtyggggyggttgggttggaygagygagtttaggggttaatygtttttattygtyggtygygttgtagagyggtgtttttagggttggggtttgyggygatttygttgggaggaagggagagygagaattgagaygtttgttttaagttgtttggagttaaaggttttygagagygtggtygtggggttgggtygttggagtggtygtttyggtttagatattygtattttyggyggtgyggyggtttttaygygygtatttatttagygygttygggggtttgaggtygtygttayggygtttygtttygggtagtagtaattagtaygtaggtatttttggaataggygggattgttttttygaygygyggtttgygtttaggyggyggaggggtttagtttttttttagttttyggttttagggygtagggttaygagttttygtttttattttyggtttttggtattyggygtyggtttygtygtttttttttataygtatttttggtagggtttygyggggygttttaaagtttgggggtagtttttaggtgtttttgggaagggaaagaaaggttataaagtaaaagaaggagtaaagagaaggygagggaggagtaggggttygggttttgtggattygtttgggttgggagtggggatattgagagggttgygaaggtttygggggtygygygtggttygtaggtttatttttggttygyggttgttttttttttttttttttgggtttttggttttttttagtgttgttttttttttttttttttaggtttttttttttttygygtagggtttygttttggggattaagagaaaggagggaggggaaaggggaggggaagggaaggggyggaggagaaagagggaygatttttttaaaggygggtgttgagttttagtttaggattttygggtttaattgtttgtggtattttttatattttttattttygtttygttttggttttgttttagttttyggygtttttttttttyggatttygttgtatgtttygtttgyggtggttygatyggtttttttygggagttttttttttttygttaygttttygttttttyggtygttttygygtttttyggttttttttttattagttttatatttgttttttttatgggagggagygygygtttttygtttagyggggtttttagtagagtttttttaattttyggygttttttttatatagggttygttgggtygtttttgyg

SEQ ID NO: 6137 - DNA, 3541 bp, synthetic construct; identical to SEQ ID NO: 6135
  misc_feature 1..3541: note = Description of Artificial Sequence: Synthetic polynucleotide
  source 1..3541: mol_type = other DNA

SEQ ID NO: 6138 - DNA, 558 bp, synthetic construct
  misc_feature 1..558: note = Description of Artificial Sequence: Synthetic polynucleotide
  source 1..558: mol_type = other DNA
tygagagygtaggattattaagagaggtygggttatttttttygtygttygttgatttttaggggttgggtyggygtatagtaagggggttggaggtggggtygtttttttttaygyggttgggtttttaggyggtgttttgggtygagtygtttggagattttagattagtatgtgggtgggaaagggygtttygttttgggttttttygtttttgygygtagagtagagaygygtagattygtttttatttygtttggtttttttggagtagtttyggyggyggtagygatgggttgggaggggtyggtaygttggtttgygygggtttttagtygtttttygttattyggaattttttttttttaagygttgatygtygatttatagtttttttttaattyggggygagyggggtttttattatatatttttttttttygttyggttttatttttttttygtttttttttaggttttayggtttgtaagtatttttgtaaataatttttagtttatttatatygtttygttygtatttttygagagttaggtayg

SEQ ID NO: 6139 - DNA, 7244 bp, synthetic construct
  misc_feature 1..7244: note = Description of Artificial Sequence: Synthetic polynucleotide
  source 1..7244: mol_type = other DNA
aygtttagttagggygtagagagagygttgggygaagaggggtygatggttygygggaatagggttggggtttttgtttggggatyggtyggttgttaggtttttygttttattgttttttyggagygtygttgattataggttygtataggtygtygtygtaggtyggttttttgtgtatygtygtagtagyggyggtygagyggttaygtatgagatygttaaaggygtagtttatgggtgggyggaagtygagygtgggtattaagtyggtagtggagtagggygttatgaaggttagatygyggttgtgygtygtygtygyggagtaggttaggygtagggggttgaggtygagyggygygtttagygggtaggygttygygtyggtatygaagtgattggygttgggttgtagyggygagaaggtygagyggttgtttagygagtttagygttttaggygttatggygtyggttagtaagggtttgtggtgyggaggtgyggygggtttygtttgtagyggygtaggtagtttaggtttttyggyggyggyggyggyggyggyggyggygtygaygyggttgggttaygygtygtttgtagttgttgtagtatttayggyggttttatttgggggygtygtagggtttaggtyggtygttaggtttttayggtggtggtttagtatttgttygatggtttgtattaygtygtygtygtagttttgtaatattagttttaggaygtttygtyggtggtttgggaataygygtgttaagatatttagyggygttygttgtygtggattygagttttygtttagttttggygtyggygyggttttatttttttttttgttagtttttgaatyggatttagagtttagagggttagyggagttygggttgtttttttygtygtygtygttagggttagygttgtttgggtagttgttatttgtttttttggaggttygagttaggggygaattagaaaaggattygttatygtygtttttygagtttgagtygggtygtatttttggggaygaygtttygggtttygagtttgygtygtygggtgataagggttttatyggyggyggtagygggttgttygggyggtttgtttgtagtagygttttaggaaataggttaaatttttgtaatttggtttttgggaggggagaaaaygtgtygtgaggagyggttagttagaagatagtagttatagtatttyggttttttggattttagtttttttttttttagttttatagtttttatttattaggttttagtgtttttttttttttttgttttagtatttttttygttttgagtttttatagttttgattttagggttttttttttttttgtattttttagaattttaattatttgtgttttgtaaattygatgtttagtgttgttttttttaygtttgtgttttaatatttttatttttaattgtttttttagttttgttttgtygtggagaagtggttaggtttagggtttaaataagagataatataatttttgtttaattaygttgtatagaagagtttattgtatagaaaatgtttgttttggtagtgtagtttgtaaggaaaggygttttggttatttaggaggttttaagtttttttataggtagaagtatagtttttgtttttaatttattttttttaaaattgagatttgagaagttttttttttttaagtttagagyggatttttttttttttttaayggttttggtttaattttttttttttttataaaaagttaygggggtttagaaaaagagggtggtgttaggtaggtagtaggaagygaagaggaaaagatataggaaagtagatttgagaaattagggagggtgyggaagaaattagaaggagggagggygtagtaagyggttgtttagagggygttaggaaygygagaaggggaaaagaaattagggygttttagaatttagggygttttaaaatttagggtgttagttaaagggggggggattttttaagggagttgggaaggagtagagggaaagggtttgtggagaagygtagagygaaygaagatgygtaggtttttatttggggagaagaygaagtaaagaagtagggatttgtttgygtttgggtagaggygagtaaaaaaattaaagygtgtatatttyggttygatgtaggagaaaggggtaaagtgtaaatgttttagaagygggagaaaggagagtttttgtatttaygttttatattygaggttgggygagyggtgaattttagtagtygyggygattggataygggggttttattttttttgaatygagataagtttttgggtttygtgttttagagttaygattttgttgtttttatttgyggtttggtygygtttttatttgagttttttgygttagttgtttygttttyggttttygygggygttttygttttaggtttttygtygtyggyggygtatattgaatygaagatttygtaggygggtttyggggggatgatgtygttggyggyggttagygttagtttttyggtagtgtygtagagtagttgtagttygygygtttygttttttttttgygtttgttgtttgygtagygttatttgygtygttatgataygttggygtttygygatgagygtgtatttggygtataggtagtttttttagygatagtagygtttgtggtttttgagggtygatattaygttatggttgygatagygygygtatttgggggttygygggtatttttyggttgttygtagtaatagtggyggttttygtagtaagtygtttgttaygtttatyggtagygatgtagyggtygtygyggttgtygttatygaygttatygaygttataggyggtttygtygttgttgtygtygtygtygtygtygtgtygggtaygttgggtagtttygagygtagttttatgataggatttgaygggaaagaaggtgggagaggggagagatttggtgaggagtatatygygygttaggttaaagygtygttttgaggaatttaagttggagagggaaatttgggtygyggaggttgggttagaggggttagaattgttgggaggaggtgtagtyggaatttttttgtgagttttagtatttttattttagtttggttatggttgtttttagatttgatatataygttaggggtaagattttgtttgaattagtgatttygttggaaaaaataaagagatatgtaaagtgtgaaagttattgatttagatggttgtaatgagaatttggaaaagttaagatgatattttaaagtttagtttaattggggtgagaygggtgagagaaatgttygtttgaygggattgggattagagygatagttttggtttagaagttaggttgatgttaagggtaaaataggaaaattyggagtaaaayggttagtttggtggaagggtgaagaggagagagatgtgaaggygtagatgtgaaggtyggttgggtyggagttttgtttttttttgtttgtttatttttaatgtagtttggggtagaagttttggagagaaaaattaataatagaaagaatagttttaggaagtagagtgaggaygaggaaataatttgggtaaagttaggtttagtggttttgggattygtaaaaatgtgagygttaaaagttttayggtgagggtttttagagagtgagagataaaatgtatgtggaatttagtttaggattgggaagtattaaagagaaaaattyggttaaagaaattttttgtataggtaaatttagtttaaagatgagttttatgggtaaggaaaatagtgaaaagtagttgatttgggtgttygggatttaggggtygygtttgggagaggggaatgtgtaagaaaaaattttataggtaaatgttgggggaggggattgggtaaaatttgtggtgtagttttttagtttygtagtttggagtagtagtyggggyggaagaygtattttgygaaaagttaggtatttygggagggggatttttttygaagattattttatattgtttttttttttttttygggtttagggatagagtygttagataygtttttttygttttggggttttaggggatttttttygagygtaggtttttgygttttgattttagagttggggttttaggatayggatggtttagtaggtygtattaagttaggggagtygttttygtaattggttataaayggatattagagttttttttaygtygtagttttataaggtttaagtaggtttagtttttygtttttgtygyggttttttttgtttttygygtttttygtttttgttagagttygygatagagtttttgtgttttygttygagagttttagattttttttttatgagygttgtttttttttttagatttttygggygtttttaaggtttayggggtttaggtttttttaataggggtygtagattaggtttttatttattgttttttttgyggtttttaattatttgttttgggtttygggatttttttttttygttggygttgtaygygtttttyggttttattggygaygttggagtttttggtygtttttttttgttttyggttttttatttgattaygttatttttttttagttattatgttygaattttyggattttttagaaygtagygtagtttaattttttttttagaaattygggtyggaggttygtttgygggtygygtggttggaattygygatttgattttygtygtgtygggttttttygyggtgygygtyggaygttgygygtagtyggggtttagttgttyggygttgttagatttttaatgagtygttygttygttttattgttggtttttagggttttattagatagaattggataataatgtggygtttgttattggttaggggaggtagayggygttttgattggtygggttygygttyggggagtttygtattttgtagtgttygaaagattygaaattttaaaagttttattgygtgtttttgggaggggagggggygygttaggaaaggagtggaaaaaagtgggygaggaggagygttgaaaattttttgataagtagttttygtgygttygagagygtgtgaattgtttttaattatygtgttyggtgygtttttttgygtagatttgtgtaatttttyggtttttggggygtyggttyggttgtatygtttttattggtttggggygtttggtaaagtygagttttttaagtggttttggagttttgaggygggatggggggtaggtgataatttaattattgyggtyggggtaggggygggataagggtgygggggtggggaagggagggtgtttaaggtataaatgttaggaygattttttttgttttttttttgttatgtttyggygygtttttaaattygaygagtttggggtagttgggggttgttttggttttttttttttgtttttttaaagtttagttattttattttaaaagttttgataygatagttattttggagggtaagtgtggtttatgaagattttygtgtttaaagagaagtttagygaagagaaatgagattgtattttttgtyggtgttygttaygtttttygygttttgagtttttttttttttygttttttttttygygttttttagttttttttgagtttttttttttttattttttagtatttygatttttttttygtggtggtgggattttttttgtygttattgtaaatgaataaatagttttttttttttttttttttttttttaaaygaaagtaaaaagtggtttttgtgttttygtagatttttttaaatttaggaygygtatyggtttgttygattttttyggtaagagataaagttattgttgggaggttttttyggatagtttttagttttaattttygttttattttygttttgttttgatgttayggttttgaggaatagttygttttgtagaagaggtaataggttttagattttgttttttttttgaaaggttgttgttttttaaatatttggaattaatgtygyggttttygggygagtygttttyggtttttgtagttttgattttatttttgtgtttttttttttttaatttttaaagttttgtttttttttttaattttgtttttttttttaatttttaatgttttgttattttygtttttgttttttattttttttttttttttttagaataaagaaaattygtttaaataatgaggaaaatgagygtttttgtygttttttttttatttttgatygtgygtttttgygttgttttttygaatttttaggtyggygggaatttgggygygtagattyggttygggtygtygyggttttaggaygtagtttatttygtttggtaygattattgggtygygttttgttagtttattagtttttgagtttaggaatgggggtgggggaaggayggtgygattaaygggtttttattygaagatygtagaatttggygtttyggaagagttttggaagatgtttatygggaggttgaggttggagggaggagtgggtgggggtgattygttggaggatygggyggagagtttttagaaagtttattaggtttyggygygagggygtttygatayggataaggtttatgatagygataaaaagttggttattygtttttagaaaatgttatttgttggagtttgtgaatgggtttaggagagagaagggtgttagttttygygagggtttttygygtgaagtgaggataagggagtgttttagggataatatgttttttaggagygtaggatttagattttattttttaatatttggaggtttygaggttaagtatgtttagtttyggttgtatttgggtaggtgagttatggggtygggggaagagygtygataatygtyggatttygygtaggggtygttaggygtttgtttttagagtttttttggataaagttttygggaaattttattaaatygaaaaygaaataaattatataaatttgtttagtttttgagggggyggtggtttaggtatttttttygtttgaggttaggttatygtgagatttttttatttyggatyggggatttygtagaagttaagggtgtagttaygaggattygggaattygaggyggtttagtagatgyg

SEQ ID NO: 6140 - DNA, 824 bp, synthetic construct
  misc_feature 1..824: note = Description of Artificial Sequence: Synthetic polynucleotide
  source 1..824: mol_type = other DNA
aygyggattgagygaggaaatgtttaagattataggattgaatttttyggaagtttygaygttgtttagttagttagagtttagtygtygaygyggatgaagttgttttttygggataggaagggttaaatggttgygygttaattyggtttygattggggtgttagggagtaagagtygtttgtttygggggatttygtttggggggtttttaggggtygttttggygtttyggttataatttgggyggttttgtgyggyggttttygtttgygtttttgygygttatttaaaattttgygtatattgtagtygtygttttttygtttttygyggtgagaygygygtygttaagtgtygtaggtagttttttatagtygtygyggtagtygttgtttggtttttggttttagattttttttttattgtttttagtttttatttaggaggttttttygyggtygygagagttyggygttygatttatagtaggtagtgygggtatagtgttgtagattattatttygttaggttygggtagygtttattagayggataggygttygyggtygtttttatttyggygygtttatttygagttttttaygtygyggygggygggygtaatatatttttttatttttagtygtygaggattatatttttygtttagttttttygatttatttttyggttgtagtagagggygagygggtttygtttttgttttttggggttggtaggttygtgtggggttagggygygygggagaygtygyggagttgggtatttyggagaggggatgtttatttttagyggtttyg

SEQ ID NO: 6141 - DNA, 824 bp, synthetic construct; identical to SEQ ID NO: 6140
  misc_feature 1..824: note = Description of Artificial Sequence: Synthetic polynucleotide
  source 1..824: mol_type = other DNA

SEQ ID NO: 6142 - DNA, 1415 bp, synthetic construct
  misc_feature 1..1415: note = Description of Artificial Sequence: Synthetic polynucleotide
  source 1..1415: mol_type = other DNA
tygygttgttagaagtygaygttagygagggaggtgtgaagagttggttagaatgattaattttttttttatatttattttttttattatyggtggttygttgttgttgttttgygaggaagaggagtygtgggygggtyggygtatttyggtgttatttttgtattygggtttggttatygggggtaygttggttaayggtatggttatttatttygtgtygttttttygaaagttgtagattattagtaaygtttttatygtgaayggttgygtygtygattttagygtttgygttttttggatgtygtaggaggyggtgttygggtttttgtttatyggttttgyggagtttttygtagattgggayggygttgggggtagttatygtttgttayggggtgggttgttgggtttyggatttayggtgtttttttttttttattgtttygtggttttgaatygttatttgtttattattygggygttygttatttattaggygttgtattagaggygttatayggygggtatgttggygttgttttgggygttygttttgggtttygtgttgttgttttygttttgggtatygyggttyggygtygygttatygygagtttattattyggygttgttggtygtygyggygttgttggygtagatagttttgttgttgtattgttatttgggtatygtgygtygygtgygtgttagygttaagygggttagygtgtttaatttttatttgttgtattagttgttyggttgygtygtygtygtygtygttttttygggygtttagtaygygtygggtttyggtggygtygygtattyggygtaggtttagtttttgtygttygygttgtattygyggygggtatagyggygttttagyggtttgtyggtgttgttgttttgttgygtttttttgttggttaygtagttattggtgtgggtgagtttggttagyggtttttygttgtyggtgttttggggagtgtaggyggttagttggtttttgtgttgygttttgttygygtttaattygttgttttataygtggaggaaygaggagtttygtygtttygtgygtttagttttgtygggygtyggygaygyggyggtygttgtygttgtygttatagtygtgttygtagtgttttaggygtaattgggtattygygtygygggttagtattggtaatttagtyggggttygagggaagyggagattttyggttttygaygtttttgggtatygtygttttttttttttttagggtattttttgtttgaaygaagattttygtygygaagttygatagatygggggaaaatggggttttygattttagygggttatttgaattaaggygtttttttaagtggggygttygaagttattttggayg

SEQ ID NO: 6143 - DNA, 1415 bp, synthetic construct; identical to SEQ ID NO: 6142
  misc_feature 1..1415: note = Description of Artificial Sequence: Synthetic polynucleotide
  source 1..1415: mol_type = other DNA

SEQ ID NO: 6144 - DNA, 3039 bp, synthetic construct
  misc_feature 1..3039: note = Description of Artificial Sequence: Synthetic polynucleotide
  source 1..3039: mol_type = other DNA
tygygggattagttttggtttttatatttygttgtagttttgtttygygtygtattgtttttttyggttattgtggggttattaagygatttgtagaattygttgaggtttaggtttttgtagttttygtygaagatttaaagttagagtggatataaaygtygtgggtaggatttyggtgaggtttyggtgttttttttgggggtttttagygttggtttagaagttttagttygggtttaagaatttgggatttttttygattttggygatyggtygggttattyggtttagggttttagyggtagygggtaaaattttagtaggagttttttgtygagggygtgtttygaygttagagttaaattygggatagattagttaagygyggayggygygagagtggttggtagygttagtaygtagtttgggtttagagtaaggttgggygtttttagtaaagggyggtttggggttgygygggyggyggattgtaggygggagaagagygaggtgygttaggttttggggygygtaattgtttagtttygtgaaagatygygtygtagatggggygtagttgygygtttattygtgtggattggaaaygtttygagtyggttattttaaaaatygggaaataaggygggtttttttttygttygttattttttattaagtaggttgtgyggttttgggggttgattgtttttaagtagttaggttttatygygygtygygttgygtygaggttygttttgtygtagggaygttggtagttygttgaatatyggtaagagygttagaggttagyggtygttaggatttttattaggttttgttygtattygtttgtttttttttygtttggtttgtttttygtttaattgaaatygttaatttttttatttttttgtttttattttgatatattttaygttttaaatatgtttygtttttttttgtttagtttgttttttttttttttgtttttttttttttttttagttattygtttygttygattttgtttttgttttttttattygttygttttttatttatttattttagtttattttagttygtygattgttatttattttttygttttygtygygtttttygttgttttgtttaatttttttttttttttttttggttgtygttygttttttttggttttttttttyggtatttygttgttaaggttatttttgtygtyggatttyggggtgttgggtttttttyggtygttygtttygtattagygttttttgtagttygygyggtatyggtgtggttygggggttygagttgtyggtgtyggatgyggygygtttagtagggaygygggtttgggggggtggtttttgttygaygyggagygttgagttaggtygggtatttgtttttggyggtgtttatygtattgygyggtttttgtygtttggttgggattagaggagttaggttaattgttttttattaagttttaattgtggtttttattaggaaagttttttttaaagggtatagataygaagtttygyggattygtttatttttttygttgatttatatatattttttygtttttttttatatatttttatygtttyggttgggygaaagtyggagatgttyggttatttygtggaggttygygaggygttagtygggyggyggtagggggttgaggyggattttggaggatttagttttgggtttaggttgygggatatggtagygtagataaggtgggtgtagtgyggaagtygagaygttttataggttatagggtgyggyggayggtygtagagttgtygattagtttgttaggtttttgtttttaggygtattttyggatgtyggygyggtttagtyggttttagtatagggtatyggttygtgagttygyggygttagggggttaggttgtttagggttgtttttgattgtttagyggtgatgatttagygyggggaagttaagattgttagaagggyggttattatagtgtataayggtagggaggttagtttagtatgagaaataagaatatagttatttygttttgaggatagttttggtattgtaygattagtygyggttagattgtgttagtttgtygtataggtagtattttttttgtgaaggttaggttyggggaggagagaygggttaagattaggtygtagtttttagtygatttygatttgattattttaggttgaggtttagttttagggtttttaaagggygttagatataaaagtygygttttttygttaggttttagtgtggttttatagttttyggtygggtttgggttttagggtaggtggtagttttagtttaatttyggtagagtatgtttttttttttttaggtttaattgttttygggtttygattggatttygggtygtygttattgtattttttttygatttttygttttttattttygtygtygaggaayggtggtttattttttygttttatattggtttttgtttggttygggttagygttaattyggttttygtggaagtygtggygaaaggygagaggggtaaaaagttgagaaataggygagygggagagataagtaggaaggttygggtgggttygggtaaggaagaagaagagagggtygggttgygygttaygtttygygtygygygttatttttygyggggttttygtagaagtggtygtygttgagggtygggtygggttygaggttttgtaggtatttggygggyggtttggtyggttttgggaggtagggttttaggggttygtaggtyggaaagygggttagtygygggtygyggggyggygyggggtgtaggtgaggygtagyggygggggttttttgygggttyggaggttygtttttygaggttatataggggtygggtgtaggttttaygyggaaaggygygtagtgttyggggtttatgtyggtttagggygtataggttttyggggtttyggggttygygttgttygygtygtttgtgagygttyg

SEQ ID NO: 6145 - DNA, 1277 bp, synthetic construct
  misc_feature 1..1277: note = Description of Artificial Sequence: Synthetic polynucleotide
  source 1..1277: mol_type = other DNA
tygttttaygtttatttttttygtttaygtyggttattagagtttygttygttgttygagagtttygtattgaygtyggttygygygtgagttaagtttgygttayggygtttygtygttagggtggtttttyggaaagygagggaatagtgygygtagygtttygtttagtttygttttgtttygtagagtyggygttgttagggygtagggagggyggtattyggttttagttttygtaatttygygygtttttttygtygtgggatttgggttttygygtygtttttttgagtttygagygygyggygggygggagttaggttgggattggtggtgaggtagggagtgaggagygagyggagtygygtgygtyggygygtagtttygggtygttttagttttagtygggggtttgtggttygggggaggagttgtgygttygygattygtyggggatygtagttgttyggtyggagtgtaygggtygagtttgygygattatttaygygtgataggtgagtygttggtygygtttygtttggttttatygggtyggttattgtaattttttttgttttggtttygttttagttagggagggttgaggattaaggtgtgaggyggygttgttttygtattygttygattttgygttygtttygggtttttttygtygttttagtygtygttgtttggygayggagtttyggggttygttttttttygygtatyggggtttttagyggygtaygtaygggttggatatygggttttagtttttggtgtttagaagggtttaagaatttyggaggaaattgggtttagttgyggaggtaagygttygyggagaatyggagggggtttgttyggtttattygyggtttgaaattgygygtttagggygtagttttattgggagttttttaygtagttggagattttagttttagtygttyggttttaggtttgtgattttgatagtaatattggtaagygaagtagaattgttaygttygagatgaatatttaatttttagttttggggttggttttygttggattyggagttagtagagagttttttttttttygtgggaagygtatttggggaayggaatggttgagataggggaygtgygtgtggtgtttatttggagggggygtygttttggygggtygagaggtttttgttgtatttatgtttgtgtgygtygtgttttgaagygatgttggatgttygtagtattatgggtgggtygttttttaggggygyg

SEQ ID NO: 6146 - DNA, 2394 bp, synthetic construct
  misc_feature 1..2394: note = Description of Artificial Sequence: Synthetic polynucleotide
  source 1..2394: mol_type = other DNA
gyggttyggtttgggttgtttyggtgtagygygtttygtatttggtttygtyggtttattttyggagaaattttttttgttttgtygtggtttatagggttgatttttyggtattygaaaygttagtagttttgggagtttagyggagagtyggagttattttggggttagtgaygtttttygttgataagaattttaaagttgttttagttttttttttttttttttttttygygtttaattttgatattattatttttttattttttaggtatttttttaaagtygtgtygggattgtaattygtttttygatttagttggggtygggttttatttagttagttaaggggygagttagygatgygaatatyggtttggggggtaygattttygtttaygtttttygtaggygygtaggggatttaattttatatattttattttygaattaygaggaaaaatattttattttttaaaaaaataatttgttttttatataaatygttatttaaaaatatataaataaggtttaagtataaaatttaattttggggttggyggtggagggaaggtgagggagggggttttggtataygtttttygtgtgtgtttgygygayggttgatgagggygygttagggattttggygtttaaggagatggggttgtagggaggyggayggagagygttttaggygttyggtttyggttttgttttaatygtagagygygttttaaagtygagggtagttttaggtgtygttttgyggttttattagttttaggagattagggygggggatgttaagtgttggtaggyggggaagaggttaagygtygagtygggatygaaggtagggtagttyggtagagggtaggyggyggttggaggggygtygtattttttttgggtygyggyggtttttatttygttatygtygtygtygtygtayggttgttygtygygaataagtatyggtattattaygygaygtagtaggtygggygyggygtgtagttyggyggatgttgttaggttaggygatttygtygtttttggagygygagygygttttagtttgtagygatgattttggaattagattttgatttgygtgggygtgaggygaagtaggttygttagttgttygygttygggygtagataggtatygttgttgtyggaagygtygttttaattttagygtttgygttttggagaatagtattygtygttttttttttttttyggygttygagttyggagaygygggtttagyggayggtygttgygaygagtttggygggttggtttttaggttgttttygttygaggttagggatagtaaaggagataygggtgggtgagaygtyggattttaygagggtttgttgtttttttggygygggygtggaggtattggttagagggtaygtttattagttygagattttygggatgaggttattttttgagtttatatttggatatttattttttygaatgyggtgattttatttatattatagyggttattagygggtttgagatygtgtttygaaaaaatttatttyggggtttttttaatatgttygtatyggtagttgygttggtygattagtttattataagttgggttattagygtyggttttttttaggtygattgtattgtagtgtgtygaggtttgyggagttttgagtgggaayggggtgggggtaaattygttaatattggttattttagayggaggtttggagatygtggtygtgtttttaggtatggagagggggyggggggtggggtgggggyggtaggtggyggygygttttaaattttaattatttygatttttagaaatygttagatatagaaattttaaatttyggagtattagtgttaggtagggatttgtttttaggatgtgtygatygggatgaatgygttaggggttygaggatagggttttygtttttaagattgaggaaatttagattttgggttgggatttyggtttttyggtttttygtgggttgggtttttgattttgttgttttaygttttttattttttatttygtatygtaatttattaygtatttataagggtagtggtygygtttygaatttagttaggyggygtaggggtygggttggggggygygtggttttggttttygtttyggtaggtgttgygygttttgttygggtaaatttagaaggttgygtayggtgaagtttaggygtttagaggtggttatggtygaggaggggaaggaggygggggtagggtaggttgggaayggaggggyggtygggaygtygtttttayggatgggygtgggaggygttygttatgygttggtagtygggatattagygtatttatagyg

SEQ ID NO: 6147 - DNA, 1627 bp, synthetic construct
  misc_feature 1..1627: note = Description of Artificial Sequence: Synthetic polynucleotide
  source 1..1627: mol_type = other DNA
tygtggggttayggttaygttgttttgygttttgggtattaygttttttagttataaggtgygttggagtaaggtggagtttggggagtttygggaaaygttgatttttattattaayggattgtaygttygggggtatgggtttttgggagggygygttaggatgyggagggggtatygattagaygtttttttggttatygygggygtgygtttggaggaygagggtyggtatygttgygagtttattaayggtatygaggaygagagygtggygttgattttgagtttggagggtgaggttttttygttttygttttatttttgtgtagtagygggttygtttygtttgggttttttagggtttttttttagtatttttttygtatttttggggattttagtttttttttttaggtygygtygtttttttttttttttygtttttattygttggttttttttaggattttygttattttttaggtgtggtgttttygtattaatttagtyggggtyggtattagtttaattattaygaggygaagtaggygtgygaggagtaggayggaygtttggttatttatttttagttttattagggtgagyggtygaatttagtattttttaagtttygyggagttgttttaggggttygagagagggygttaggygagtttagtttggtttttgtttatgaygttttttattttygattttygtygtttttygttagtttggatygagggtttggattggtgtaaygygggttggttgttygagggtttygtgygttattttgtgtttatygtaygygtttygtgyggyggtygaggtyggttygggattygtagttayggatttygygatyggatgygygatygttaygaygttttttgttttattttygygttggygggtgaggygygggaygaaggtagggttttggggaggggtttgaaaaatgtgggggaygaggagtggattttagtttgagattagggtagggttttygggtttttttaaggtatygtttttttattagttygttygttygtttaggttttagtttatttttttaaattttttttgtatttttgtttygattttttaattttttttatttaagttygatttagtatttttgyggtttygtattttaatttygttttttgggtgttagtygttttttttygtttattttgttttyggtyggtgattygttgtggtttttaggttaagtgtttttygtgttygggyggttgaygttgtttgaagtttaygyggygtgtyggygaygyggygtygtggtggttaaggttgggtatttttaygtygtttggaagttttyggggttagattagtgygayggyggttggttggttgayggtagtgtgygttttttaattattaygtygaggtygygttgyggggggttttyggatttyggagtgygtagtttyggtttttttaggttttaataggtagtttatgggatttattgttaygtygagaattaggygtttatygtgttttttttagygygygygaagaagtttgggagtygtggygggggtttttygttattttttttyggagagttttttttttttttagattyggagyg

SEQ ID NO: 6148 - DNA, 271 bp, synthetic construct
  misc_feature 1..271: note = Description of Artificial Sequence: Synthetic polynucleotide
  source 1..271: mol_type = other DNA
tygttyggtggttgtygyggtttttttygygttgttttttaygtttggtttattatgtaygaggtaggtaatttgttttttttttyggggatttatttyggagataagaaggtagtttgttttttgtaatggtttttgttggagtgyggyggggtttaggygygagygggggtaygggyggggagttggtagygaaggatgygttyggygtttttyggyggtygttyggagttygaggtyggygygggaggagygttgatttygygggtyg

SEQ ID NO: 6149 - DNA, 884 bp, synthetic construct
  misc_feature 1..884: note = Description of Artificial Sequence: Synthetic polynucleotide
  source 1..884: mol_type = other DNA
aygtyggttgtgaaatttattgaagtgagyggyggygttaggatttttgggatttygatttttttgtagttygtatagttaagggygagggygtttttyggtagaagtagtaaatygtyggtaagtttagygaggagggttgtyggggtttgggtttgggaattggttggtatttagyggaaagggaygtgagttgagyggygggggagaagagtgygtaggttagagggyggygygtagyggygtttygygaggtttttaygtygggygatatggggtgtttgttgtttttgttgttttgggygtttttttaggtttggggaagygttgaaggtgggtggaaygagggygtttgagtgtattygygggagggyggagagagggagttgggtagggayggggagggtaaygtttgatggggattggtgagattygggaygtattggygygatttaggtagaaaattygttgttttttggtttyggggagaggtagygyggtatagagttygttggtattagtygttttttgaagtttatttttttttgttttttttttttttttttttatgttggttgttttttyggttatttgttataygtttttaatttttatttttttttagtttygtaaaggttttttttttttygttgtttttagatttygtttttygttaatagtagttggaygygtatygayggtttggygtggttgggggagttgtagaygtatagttggagtaaygattyggatatygttygttttttgaagttttggttttagggtaygtttagygattagtagtgggagaygttgtagtatatatttygggtttatygaagtagttttattagggaygtgaaggaattygttaaaatgttayg

SEQ ID NO: 6150 - DNA, 1007 bp, synthetic construct
  misc_feature 1..1007: note = Description of Artificial Sequence: Synthetic polynucleotide
  source 1..1007: mol_type = other DNA
gygayggtgttygtgygtttttttattagtgtatgtgygaggagggttggaggtatgagygaaagagggaaggtaatttyggtttttaaaaaatttaggggatttttttttttagtataagygtttataygtgygttygygyggatatatatatatatatttatatttatatataaataaatttttagtatttgtttyggaaagttttttttygtaggttggttygaaggygyggtttygttagyggagagtttttggatttatygtggtattatttttaattaattttgyggygyggygyggggagygtagggtgggttttaatttygggttygtttgaygttatttgggaaygygyggyggygyggggyggygyggattygggaygatttygtygygatttggtttygttttygttygygyggggttttgtttygygggaattaaaggaaggagaaatgttagtatatttttaattggaaatygagttttttttttagagyggtttgtttatttaggattgggtattagaatttaggggaggttttaattgaagtgayggttttggagattatggggaatatatggttttatygtygggttttttatttgtatttttttataaaattgtygttygtgtgtgtttttgygtttggttttttgtatttttaaggggtttttgaagatagggtygaatgygygygggggttttaggtattttgygttttayggygggtttygtagttyggttygagtyggttttggaagtttygttttggattagattggtatygaygtygtttttagtttgagygttgagagggaaaaygagagttagaaaggaaagaaatyggattggtgattgtttggtaggggtgtaatttaaattgttgtgagtagayggtaggagggagttgttaaggtaaygggtgatttttattygtygttttttygttaaggttggggagagggaagttttygygtgttgggttagggttaagttygyg

SEQ ID NO: 6151 - DNA, 2191 bp, synthetic construct
  misc_feature 1..2191: note = Description of Artificial Sequence: Synthetic polynucleotide
  source 1..2191: mol_type = other DNA
tyggaygygatygttygtagtttgyggtttttggyggttgaggagtygyggygatttttggtttttatygtagtagttaagttyggygygtattaatyggygttgttgaaagttggagagtttttagttygtygatagaattyggyggtgggygttaggggaattttttttagtgtygtaattaggaaagttttaaaaagtaaggattttagatagataagagatttatttttttttttagtataagaaatatttygygtygygttagtygaaygttgttygtataaggttattygttttttttggtygggaygtattyggtgttttttagttttttattagaattggtttagggggygyggaaatagagaggtaattgtgttyggtttgtggttttagayggaaaygttttygggttttttggttygggggataagggttygaaattttaatagtygygagggtaaggatagaattattaattttygttyggatgttygggatttgtttttttaagttygtttyggtttttttaaaggaygygyggtatagtttatgygttttyggtattttattttatttttttatggttttttttaaatttttttyggggagttttataaagtatagayggygttttgaaattygttaggtattygttagttatttttattttygtttttygaattttttttgtygygtttttttygtttygtattttttttttygygtttttgggaagttagaagtaaattaygagaaaatgttttygtaaggagtttttttatattygttttgttattgaaataaaagygtagggaggagggaggtgggagaggaggygggaggaaggtttagaaagaygatggggatagtagtaggaaggagttggggaggggggttaaggtggtaagtagagttgggggtttagagttygttttygtgtygygyggygagtygtttatatgtttaggtygttgtaggtgttgaagaattttatttgattgtaygtttgaatttagtttattatttaggtttygtggygggggatggggggtatgattaygygggyggaggttttgaagtagggggttttgtagygtaggaygatgggygaggttttttygatgygygtggggtattggtygatggtggygtatatatygtatattaygatgttttygygtyggattygygttttgtaggtgatgttttggatatagtttattttgtagttyggtgtyggtayggygyggygtggggtagygygggggttygygygggtagtygggggygttygttaygtyggtatggygaygygtygttygttttyggttagatttagttygtatttaggagyggggagtygtygggtatttttggggaagttttttttttttgtagtygygyggggttttygttgtttygaygttygtttaygttygttttttygtttyggtagggygygyggagggtgtatttttaggaggyggygggtgttttygtyggttttagygttygggyggagggtagggaggggagyggygttgygaggaatggtgtttatttygggtyggagtttttygtttttygtyggagaggaggaggyggtagyggyggyggtatggagtygggggagggyggyggtggtagygttyggtttgtttgttttygyggyggtagtagtagtagtygtygtygtygtygtygttgtatgaatttttgtattayggttgtttttygygtgtagygtatttagyggygggygagygggyggtttaagaggtaggyggaggtagtagyggyggyggyggygatyggagttttygtyggtttygtttygtagtyggattatatygatatttttyggttyggttgtttyggttyggggggygttaggaggttgtggttyggggtggagagttttaayggttggagtagtataggaygtgtttygyggaggaaattggttgtaygttatgagttttgtttttattyggttgtygttygggtggggggggggtaatgtgtaagggtgggggtgtttaaagggtygttagygtyggggtggggtttygtaygtggggttgaggyggggyggggttttggtaggtggtgttttggggtgggggtgggggattagggygggtttaagygttatygggtgggtgaggtygagtagggygyggyg

SEQ ID NO: 6152 - DNA, 859 bp, synthetic construct
  misc_feature 1..859: note = Description of Artificial Sequence: Synthetic polynucleotide
  source 1..859: mol_type = other DNA
aygtagaggtygtggtatttggtygtagttgggttgtagtgygtgygygtttggtttggtggttygatgggaagttyggggyggggtagtygyggggygggggyggggygtygyggagataggttaygtttttgttygttygygtaggygygttgygggtygttagttgttagagttaagyggygggttggyggygggtttygaygtttgygttaggatttggttggttgagttyggygtagtagtagtagttagggtagygyggtttttattttttgttaggtygtagaggygagtagggattagttggtygtyggtttttygggtaagatggggaatygggagatggaggagttgatttygttggtgaatygtttgtaggaygygttttyggygttgggatagagttgtttgttggagttgtygtagatygtygtggtgggyggttagagygtyggtaagagttyggtgttygagaatttygtgggtaggtaagygygtagggygyggagtaaggatgyggtagtggggygatttygttgygggtygttggaaygtggaygggtagygggagttagagggtggatggattaggygttgyggtggaatggggggtagagtggaatggggggtagagtggyggtgttygtggggygggyggggttttttagttttgggtatttttygttttttgttatttttygtttggtggtttttttgtttgttttttatygtgygatataaagttattttttttttgttttttagtyggggagtygggggaggggttygtttygggttygatttttattttttyggtgygygttagtttygggtagtttttttgygtagygygtyg

SEQ ID NO: 6153 - DNA, 791 bp, synthetic construct
  misc_feature 1..791: note = Description of Artificial Sequence: Synthetic polynucleotide
  source 1..791: mol_type = other DNA
tyggggtattygtgtgygygygaggattttttttgtagagaatgaaattatygttttttttygttygtggtttatttyggggtttttattttaygtaagtgttgtggaatttyggggtgatgagtttygggggaagttagtattttttgttttttagtgtyggygttyggtagagtttygggatttttagtttttgtygtygttgaggaygyggygygggttgttggtygygtygtygagggagggttyggatagttttgtagygygttttagyggagttttgggggtygygtygtttttttaaatatgatttagaatygttygttagttttggttttagygtttggygygagygaatygggtttggttgtttyggtttygtttgaattttgygggtygygggttagggygygtygggattygttgygttaggattttgtagattyggtygyggtygggtygagtgtttttygtyggggttttaygtttayggtttaygtttgtaatattagggttgtayggygggttygtagttgggtttgygtttgggattyggggttttttgygtttttygtgtygtattttttgttttaattttaagyggaygggttttggggttttatyggttaggtyggagttttagttttataatttttttttttttatygtattgttttttttgygttgtggygggagttggggattggggtyggagaaaggagaygygtyggtttttaagttttttgagttatttyggtttygggygygttttttagggttgtagtygygyg

SEQ ID NO: 6154 - DNA, 586 bp, synthetic construct
  misc_feature 1..586: note = Description of Artificial Sequence: Synthetic polynucleotide
  source 1..586: mol_type = other DNA
gygaagaggagggagtttygaaaggagggaaaygagtyggtaaggggygataggagygagtygggaagggagagtagyggagggttgtagagttgygggygttyggatygtgttatatatttttygyggggtayggagggtattgyggggggagatatataaagatatgygaagaggggttgaaygaggttygygtataaagaygtyggggygtayggtagttggggttgtatttatygttttygygtygygtygtgtyggggtygggttagygagtagttyggggttgagygygtggyggyggyggyggyggyggyggyggygggtaggygygggattygggtygttygygtttttygggtgattygggttyggtagtaggygygygygggggyggyggygtttaagtttaatttggttttygtttygttttttgtttagttygtyggtgttttttttttttygygatttygtttttttttaygttttttttttygttttttttygygtttagtttygttttttttattttgtaaaataaagtyggggaaaatgtttgttygtgtagttyggagygygtagttyg

SEQ ID NO: 6155 - DNA, 1678 bp, synthetic construct
  misc_feature 1..1678: note = Description of Artificial Sequence: Synthetic polynucleotide
  source 1..1678: mol_type = other DNA
tygataggygaaattgtaagaatygggaggggyggttgyggygtttaggygygaggtatatattatattttttygtagttttttattttttttagaygtaygtgtttaaagagtttttgttttaatyggtttygttttattttygttyggtttttagttttgtttgtattgttggttttaagtttttttygagaggygggygtgtatagttgtagtggyggyggtagyggttattaagygttyggyggygtttygttatttatttttttttagttttyggygttgtagttttygttygtyggggagggygygtttagyggaataggagtygagggtggggygtygagaggagggaatttygggtygtatygttatagttttygtagtggtaaaggyggyggyggyggyggyggtagyggtagtagtaggtggagygagttatagygtttggtttgaaatttattgttgtagttattygggttggagttggttygttgggtggagttagtgttygtttyggttygattttyggttttygggatatttgggttgyggaggtyggttggtyggagttayggttggggaygggygygtttyggagygtayggttgygttggaagtygygtttggggygtaggattaaygggatttattttttttyggttatttaaagattttttttttygggaaagagygttgttyggttttgggatttgggaggagttyggaggtygttygggtatttygttggatattattygtttgygtttyggtggygygggagggttyggagyggagygttygtttttttttagyggtttagtggagaaaagtagagagttttttttggggygaatgggattttttttttyggtttttygtggagtygtygtatygtttgtygtgttggtttygaggggtttatagtttggtattaatttgtaggtgttygttgttgatttggtttttttttygatttgyggayggttttttttagygattttygatataygtttttttgttttygtyggagggtygggtttggggtygtyggagtttgygggaatttagygtttattygttgattttygagtygtttygttagttgtgygtttttttgggtattagtttggagaggagygtgtagaygyggttttttggagggagtgyggttttttagggaggtatygggtttttaggggttttttggygtgtgtggtgggattggggttygtyggttatggtttttattttygttgygttttgttatatgttgtttttggtgttgtgygttgygtttatttttttygttatttggtaygtgagtaataygttttggttttttttttttygttttaatttygttaaattttttygattttattttattttttttattttgygggygtgggygaatyggaaggttggattttttgtygttttattgtttyggggtaggaggtagttygttgtatttygtygggygygttttyggtgttttggttggaggygaggggtygttggtgtttaggtaggatattttttgtagggttygattgggygtttygggtttygggygtyggggagtggyggttataattataattaatttttttttttttygtttygtttttttttgtyggygggaggygaaggagaagygtygtygtyggtttyg

SEQ ID NO: 6156 - DNA, 1600 bp, synthetic construct
  misc_feature 1..1600: note = Description of Artificial Sequence: Synthetic polynucleotide
  source 1..1600: mol_type = other DNA
tygaygatattgttattggaaaagtgttggttayggttttygttttattttttttatttaygggttyggagtttttaggagtagttagatygattatygtttttgtagttttatttgttttyggagagatatttataagttagtttayggagagtttggattygttygttttagtatttaygtttttttygygttyggttttagygtygttttygatatttattygygggtagttttttatygtyggtattttygaagygygggggygggyggtttygtagygttgygttttagttygygtyggtttygttttttttyggtttttgtgygttyggggygyggggyggtggyggggyggtttttgggggtttygggggttygygttygtygttygaggaggyggtygaggaggagygygaggyggtygaggtgttgtagaaggggttttygtygttgttygggtyggattygtygaataygtygttygagatgtgtaggttttygtagygygygygggtagtttygagtagygtyggygttttttttygygygttttygtygttttyggttatggtttyggtygtygttygygygttygtttttatagtgttttttagtygtataygtygggttttgggttygygtygyggttygtygttttttattagygtagttygtagtatagygttygtygtttygtgttyggtyggttygtygttttggtygtttygggtttagygttyggggaagygttttyggagttygggygtygtaggttgygggtygyggygggaggygagtygygygyggggttggtaggggygatttagagygggygggaygtagaggttgyggtygagattaggygtygtygtygttatygtygttattatygttattatygtygtygttgtgttttttyggygttygtygtttttttgttygttttttttayggttttyggygttyggttgtygattttttygggygygagtygttagaggygggttttgtygttttttatttttygttygtyggttaatggggagttyggttyggatagtygygggggagttgggygggttyggygyggggaaygtttttattttttttygyggggyggggyggggygygyggtyggggttggyggttagggggagggtygtyggyggtagtgtyggtttttttttatagggaygygtagttygggatygttaygygtagygygggagggggagggygggatyggggaataggaggggagggggattygggtgtttttagyggttygggttygyggayggagtgygggtygatttygtttattgttttttttygtagttygygtgtagttttagggagttgttygtttyggtggttttgaattaggygtygtygaaaygttttaggtaggyggygggttygaggttattatattygyggyggyggttgttgtygaggttttttgggggttattgttagttgygtygtatgtttttataaatataggggttgtttagtttttgggaatttygttttaattaggagttygtttygtyggtttattgttggtygttggttagatgttaatttygtttyg

SEQ ID NO: 6157 - DNA, 2394 bp, synthetic construct; identical to SEQ ID NO: 6146
  misc_feature 1..2394: note = Description of Artificial Sequence: Synthetic polynucleotide
  source 1..2394: mol_type = other DNA

SEQ ID NO: 6158 - DNA, 1160 bp, synthetic construct
  misc_feature 1..1160: note = Description of Artificial Sequence: Synthetic polynucleotide
  source 1..1160: mol_type = other DNA
gygygttyggtgttttaaggtttttaggyggagygygggygygaggtgygggtttyggggyggagygtaygttygggaggygggaagtgggtagtagygttttygtttggtttttgtgygtttygattygaygttttttygttygattaggtgtttygagagygtatagttgggagggttttttyggtygyggygagatttaygtttgyggtgtgttagggyggyggygayggtgaygggygtggggygyggygttgtttyggttgtygggtygttgyggygagygygygggtyggtttggagttatygggttgaatygtygygtttgtatygtgtygtaygtygyggaggygttygggtatagatygygygggygygtataaagyggttyggggyggtyggygyggygtagattttyggtgggtagygtattttagtttttttaggttagyggttgtagggagtttyggttygyggttttttygttttaagtttgggagttgtyggttttattttgtttttgtttatggggattygagagttttttagyggygtatttaggggtaagagtattgtygtgtgagtagygtttygggygtgggtgagygagtyggygggygggaggtyggagygtyggggtagttttttgtagttgggatattgggtagtttgaggttyggggaagggyggygygygyggtggagttgttygggaagttttagttattttttttttygttattygttttaattygtattgtttygagaygtttaggatagggtattggggatagttgttyggggaagtgggtgagtggyggygggaagggaggagygygggttttgtygyggygttygttttyggagggtttyggtygygtttttgttttygttttgggatttgttttttaygaatttttttttttttgtttatgttttttttgtttatttatttgttygtggygtttgygatygtagtggtatgaggaggttatyggaygttagttttyggagattgttygatattagtttttagtttyggtagtttaagtatttggtggtggaygaggygattaaggaggatttgaaatggtygygtttygtggaggattttattagygggtyggtggggtttaygtttatygaggagyggattttgyg

SEQ ID NO: 6159 - DNA, 588 bp, synthetic construct
  misc_feature 1..588: note = Description of Artificial Sequence: Synthetic polynucleotide
  source 1..588: mol_type = other DNA
gyggggttgggygtttyggggaggagggyggagtaggtgagttgyggggtgggagtagggagtgtatttgtaygtgaygttggagtttgtagtaatttttaagtaggaggttgtgygygygtgtgtgtggagtggttgygyggtyggggaggatgtgygttgtagggyggtygtygtagtgagtaaygyggtaatyggagttyggygggtagtyggggaggtygggattgagaggggygagtygttggtgtttttyggyggtagagggtygygtyggttaygggttygggagagaygygttttagtyggttttaggatgtaggygatyggyggtagygtttttgtaggyggtyggtttattatgaagaagtattyggttygggtggtttygtttagygtttgtaatagttyggttttgatttttattaaagtggaaggtaatgygyggtygtttygtttygggggtttttgtattttagtyggggaatgttgttattttgaggggggttgtttggttgyggggygtyggggttgggggtattgtttttttaggaygyggtttygtagtgtagagygtygtygtttgyg

SEQ ID NO: 6160 - DNA, 878 bp, synthetic construct
  misc_feature 1..878: note = Description of Artificial Sequence: Synthetic polynucleotide
  source 1..878: mol_type = other DNA
gygattygygattgtagtygttttttaaggttagtttttygttygtagtttgtttygggyggtagtygtgttagtttttygttaggattygtttagggggaygtgggtatygggtaggaygygygttttgggygttggggaygttygggatattyggggtttygttttgygttttagtttygggtygyggtatttyggttttygtttygygtttttggagggaggtatygagggaygygtagygaaggggttttgttaattgttaaagtaggaagtgagttygtggaagaagygaaggaggagaagaagaagggaggggaaggyggaggagggtaggggygygtagagttayggtttgttttaggygygtyggaatygtaggattttttattttygtggttttayggttttttygygtttyggaggtttgttagtttygttyggaygttygtttgtttttaattygtygttatggttttatyggaygattttttgygygtaggtaaagggatatagygtygygttygtttttggagygagtatygyggggygggagttygggaggygttygtagtagtygtagggttatygaggtygggtttyggygattttygagggaggttygggaattattttygatttaggygttagattyggagtygtayggggtttttagtttagtttygygagyggttgttgatygtttttttygygttygttagggtttttgtttygygttagttatygygygttttttttttgtttatgtygtagttttygtggtttttgttttggattygggatgttaggttgagataygttttgtaaatttttggtagaaatgggygtaagggggtggatttygttttygtttttyg

SEQ ID NO: 6161 - DNA, 561 bp, synthetic construct
  misc_feature 1..561: note = Description of Artificial Sequence: Synthetic polynucleotide
  source 1..561: mol_type = other DNA
gygygggtttaygttggtygttagyggygttaattttatttattygttaatttgttagtttttggattgagtaaaatagtttttaaagaygygggtaaaygtygttttaaagtttattattatgtaaygttaggttgttyggagttaygttggtggtatttttttttygtgtttattttgtataggtatttttagaatttygtgtaaatgaattttatygggagaygtaggtgggtaggtygggtyggtagggattaagagtttgaaagggaatttgttttttttttttygtagttyggttattaaggtaagaaattgtaggtagagaagttttygaattygatttaggaygtyggygtttgttaggattttttygtttgtttttygygtttygygygygtttatgttattattayggggagggtgtatgyggtaggtgtttggtygaggttttygggagygagtygtttttaygtgttttagtttgtttttttttygaagttagaygttggygttgtagttttgttgtttgaygttgttgtagaagttygygtttattyg

SEQ ID NO: 6162 - DNA, 1235 bp, synthetic construct
  misc_feature 1..1235: note = Description of Artificial Sequence: Synthetic polynucleotide
  source 1..1235: mol_type = other DNA
gygatygtagggtttygtttattttttttttygggatagtttggatgggagtagttggygygagggttygttttttygtttttgggtaatttttttggtattgggagaygagatggttttyggagggtggaaggtagtgttagttyggtyggttattggggattgyggggttyggagaygygyggggttttyggggagtttttygtygttttygttttatttygttygggttttttaaatatgtygtagygtggttgtttattgttttttttgggtaagaggaggttttagatatttttaygggatttgaattttygagygttttgtayggagtagttatttygttagtattttaaagtgaagttgtttataayggataagttyggagattttatgagaggtyggggtggagaagtygggggtgaaggggggtaggggtyggygygttaygyggtttttattttttygtttggattttygtttttttttttttttggatttgtatttgagttgattgtttagttttttagattttttgtygttttttaggatygaggttatggtygagatttaggygyggagtttagagtygttttttttttgtatttgtatttgtttttttttyggtagtygtygtygtygttgttgygaagtttgaggttgtaaattygggagyggtttattttttaggattgagtaggaaagygygtttygtttttttgtttttygaattgttttttatgatttgtttttattgggttgggggtttyggttgggygtttggagygagttgttttttggttagggagggyggggaagggygygyggygttttgagtgtttygagtttttygygggttttgttttttgttttgggtttttagygtagggaggttatttttgygtttttgttagttgtttggtattagttattttgaagttaattaygtagggagtttgtttatttgttgtagtagygtttaattagatttaattataattgttttttggttttgatattagtagtagtattagtygtatygtygtttggtygtttgtaaatttagttttygtttggayggtgaagtttttaggatyggyggttggagggaggttgttttyggggaataaggaygyggygygggtgygtttgggagagatygggggagtttttaggagggattttgttygggaggaygaggttttttgtygtagtttygyggatagtttagttyg

SEQ ID NO: 6163 - DNA, 5964 bp, synthetic construct
  misc_feature 1..5964: note = Description of Artificial Sequence: Synthetic polynucleotide
  source 1..5964: mol_type = other DNA
gyggtaatygagttagatttaagaggggtyggtttygtttaaattggttttttattaatggtttyggattagtygyggttgtgttgygggagtttttaggaygyggttggggttggtgygyggggtttyggaattttaaattyggttyggttyggtaaggtttagggagataaggtagagaaggttggggtgagygagaagtygggyggtygatygttagggttaygagtttygttttgtttttttggaattttatttaattttaaaggtttaaagattttgaaaatttygaaagygaaattgygagttggtttttagaagtttgagaayggttttttaggttttttagygtygtttygggattttyggatattataaaygttattaattaygagtatyggtgttygtggttattgtttygaatggtttttattygygttttygggaattttttyggtttttygygtatttaggtttttagttttagttattggtgygtttygagtttttaggtgttagagyggtggtyggtygggtttttgtttagtttyggttttttttttttttttattagaaggaaaaatttgggtttttygagaattttgtggaatgttttttgtaattaattgtatattygtttttayggtayggtttygtgtaaaatygygggtttyggggttttggagtaaattgygtttgttagyggygaygttaggaggataaggggaggggttygyggttgaaattgtagtttygtagtatagagttattttaggttgttttttatttygyggggtttatgggaaagtyggtttygggagggygygtttaaaygtaggttggaggagttayggaygygttttggtyggygtgtygttatygtttagtttygttgtttaggtgggaggggttatttgtygyggggtttttaagttagtgtygtttgttttyggtttttatttattgatagtayggygttygagtgattttgtttagtttygttttgygtttttgtaaattaygttgttgygttaattataaatttggttaatatgtttttgtaattttattatttaaaaaygtttttaggtatttggtygttgttagattaggttygygggttyggaggaggtttttttatttgttttygttagtttyggggatygtgygyggttttygtgtggttttygtttaygaggtttttygggtaggaatygtygygygatttttgtttagyggtygygttttggttaygggygatttttgtygggaattttgttttyggttaagttgygttttygtatttyggtggtttttattygagttygygtttgttggttttttttttggtttttttgtttgatttygattttgttttygaattttatttttagatttttttygttttggaaygtygatttttttttygtatttygtygtttatttatatttttyggygattgttyggtttttatgttygttaagataagaagatgttttttttygatgygtygagagggtttttaagtygagtaagggataattttttttttaaaygttgtttttattttttattttttttagagygygaaatttaaaagtaaggaaggtaatttttygtttygattttaygtgtttgttttttagagtygygygttttygtttttttgttttattttattattattattattattttggttttttttaagtttyggtttyggttttttattttttattttagagyggygtggaggaaagtaggagtttattattaagtgtagygygttttttgtatataygaaattyggttggygtttgtagttygattgtatttaatattygggatagttagtttttttaataagtattttttygttttatttattyggggatttattygygtaggatttagtatatataaggygagagttagttygttttttagaaagataaaataaattattttttttgtttttatgtattttatattaygtgttygtagtttgttaygttaaattatggtagggtttggttttaagaygtatatatatattyggggtggttttttttgatatatatatttaaaaaaattgygtataygtaggtttgtatattaatttataggtatataygatagttgygtttyggtgttttggttygggttaggggtatttttttattttttttttttttagtaatggatttgatatatagattttaattayggaaaaaaaaaatyggatagtttattttttttttttttttttatttaattygttaaagygttttttggggtagttaaagagagtygaaattaaggggtggaaattttagttgggtttttttttattttaaaatttttatttttagtttttaaaagttattttagttygttatattgaaattggtayggtttttaaagatttttttttygtagttgtggygtttttaagaaaataygagtayggattaggttttggatgagtgttyggttatygagaattagttattttttattttttaggattttttagttttttttagtttttttttatygtttttggttaaaattaataaatatatttygtagtttttatagttgtattttggyggatttttgtaaaatatatatatatatatatatatttaygtaygtatattaaaaaataaattttagaattagtttaagttagtaattttgaaagggggtygaataagaggagataatyggaaagtttttaagtgataggatattattttaaagagaaaataatgaataaaaagattattttygttggagtaygttttaaaattattattgttaattttattttagttgtttaggtaaatgtttttaagggagygatttygaatgtttgtaygatttttatttttatgtyggttttygatttttygtttttattattttttttttttatttaaattaaaagaaaggggagattttagygyggaggagaygygggagygyggggtaggtagtagyggyggttgygtygttaaaatgagtgtagaaaygaggaaggtgggyggygggaggggataggttgygttyggggaaggaggatattttgtaatttyggayggattttygtayggttyggttttttygagttyggagaygtaggygaaggggattygggaagtaaaaatgataatttggagygtatagaggagtttgaagtttygtttaagtgtagtygttttttttttttgtttttttttttygtttttttgtattttttttagtttttttttattygttatttttaattttagtttttttaggtttttttttttttttttttttttttttttttttttaggttggaaaaagtttttgattagygtatttaatttgygggtygaagggttgtttttyggttagtttgggygtyggggatagtagtyggygyggygttttatttggtgaagttygttttgttttyggygtggatttaggtttyggtygtygttygggagggtatyggtttygttygtttgttygttygttygtttttgttygttygtttttygttygtygtttttttygygygttygtttyggtttttyggtttttattatagtttattttaatatggtattttttttgtgygtatgttyggygtttttttttttttttttttttttttttttttaagattttgtgtgtgtgtgtatgtgtgtgygtgygygtgtagygaatttttttaaygattttttttagygtttgtaaaattttttaagttaattagtttgygggaygtgatyggttttttttttagttagtttygygttattttttgygtttaagtaggygggtatttttaggattttgggattttttaygtttaygyggttttttttttatygygttttttttttttttttttgtgagttttttttatatatgatttgtagaaagtttttatygygggygttttygtatattttttygtaaggataattgggtaaattttygtttttttggttgyggttygtgagttgggtttttaatggtttagtygatygtgtgtataaatttgygttttattygtyggggatygttgggagyggagataaatttaatttttagggtaattttggtttygttygttttattttattttgtgtttaaatagagttttttttgaagttgygaatatttttaggttttttgggtagggttggaggggtygaggagagttattygagggaaaggtgtttygaggggtaggaaattaagttggggttgttygggygagttgttaggtagtygtgttygttayggygttttatggggtatttagttagtggygggttttatagggygggaaaagaatygtygtttatattttagtaaaaygtggttttygayggttygttggagagtttyggyggtygtgagtttygggtagggttggaygtttgyggagttttygggtattttgtttygggygtttggggaggaaygyggagtttttagggttttaggtgtaayggttgygtagagtttaaaygaaatgtttttagtgyggaaaagtyggtgaygttttggtagtaagattaagagttttygaagaaygttgygtttttaattagggggtttygtagagatgtttgtgtgggtttgtattgtatatttttgygaaatagygaatggataygtttgtttagggtttttatggttgttaaagggggtaaaattatttagttttttaaatttgtgttttatgaattttttttatagtatttttttttagggggttaagaggttttttaggttttygtgggttygtagttttattygttttttttygttttgtatttttaaggagaggtgttygttttgaagggttaggggttagttatggagtgaggggatyggggttgattaygygyggtatagatagaggtttttaggygggtttttttttggayggtggggtyggagttgatttagaagaaatayggagggaygtgtygagaagtygttttttttygtygygattttggagagygtttttttatttaaaggatttgtygagttgagagatttagggygggygttygtagtygtgaggttttttgygtygttagtatgggaagattttgtttttttatattttggagaaygttgggygaygattaaagygtttttygtyggtttgttattttatgtgatataggagttaygtgagatttagaagagtttagygattygtygygyggygtattttaaattttagtttgagtttgygatttttttagttttttagtttttagttgttggggatattaagtyggagttttgggttttttgttttgtgggtygttgaaagtagagattttttaaattaatygaatygggygtattaattttttygtttgtatttygttgtttttyggttgagtttygaggyggttttaggtagaatttgttggattgattgyggygtttagaaatttggagtgtgggttttagatattttttayggtttggtttygggttttaatatttaagtygttttttttggtttttttattatatagyggggtttgtggaaagggaggggtygagagattygtyggygtattattgttttygaggggtttttattttgtgtattgttgaagygtagggygygtygyggtaggaatggtttygagtgyggattttttgttttgagttttttatttttggttygygttgygtttatttagtggttttggtttygtagggygatagyggttgtttttttttatttgygttttagatygygyggtttygtttagttttygggagtygataggygtttgttttggtgttagygtagggtttttygggggtttggggtaggggtaggggtgygggggggaaggggagaaygtaatttttttttgtaggagtygtggagaygtgagttgtaattagttatygyg

SEQ ID NO: 6164 - DNA, 5964 bp, synthetic construct; identical to SEQ ID NO: 6163
  misc_feature 1..5964: note = Description of Artificial Sequence: Synthetic polynucleotide
  source 1..5964: mol_type = other DNA

SEQ ID NO: 6165 - DNA, 5964 bp, synthetic construct; identical to SEQ ID NO: 6163
  misc_feature 1..5964: note = Description of Artificial Sequence: Synthetic polynucleotide
  source 1..5964: mol_type = other DNA

SEQ ID NO: 6166 - DNA, 703 bp, synthetic construct
  misc_feature 1..703: note = Description of Artificial Sequence: Synthetic polynucleotide
  source 1..703: mol_type = other DNA
aygygaaataaaygattttaggtttttagtaaagaagtagyggygygtttttttttttyggtttagygtgaaaatayggaaggygaagggttgtygttagtygtttttttgttatygygatygggaaataaagatatattattttttattttttgygtttttaagggattygaggaatttttggttgtaagyggttggtatttyggaaygggygttttattygttygggygaaggtttttggtttattaggyggttttggygttygtagttggygagttttygtttygttttygtygtygttttygtygtgggttttyggygttagtttatagttygttygygtttttygygtygagtttggttyggygttagtgagtttygtygtyggttygtttttygttygygttyggttygtygtatggtgygtttagygygtttygagttagttttyggygygttgttaggtygggtgttaggyggttatygygygttatygtygtygttatygttygtygttygattttggataataatgygygttttygtttttttagaaagttagggaygtttttagtygtygttagagttggttyggttttttagttttttttygtggtattygtaggygagataaagttygttttyggtgaggttgygygygtttaaagygtgygggatgtttagtayggaggtttttaagyg

SEQ ID NO: 6167 - DNA, 1315 bp, synthetic construct
  misc_feature 1..1315: note = Description of Artificial Sequence: Synthetic polynucleotide
  source 1..1315: mol_type = other DNA
tygygttttttttaaatataygtatatttttatatttattygygtygttttagtttgtttatttttaaygagtttaagtyggtgtagtygygttttatgttyggttygtagttttygagttttagttygttygygttgggygtygttgtatttgttagtggygygyggtatygyggtygtygggtttyggagygtttttagygttgygggggtgtygtgggtggtttttttgtttttttttattagaattttgtatagtyggggagaaaatttaagttgttatatttygtygggagttgttggttgaaaggttgggagtygygttttttgtttggtagggagatttygtatttttyggtttttaggttaggtttttagttttagagttggaagagttttagggygggaaggaagagatagtaaggattagaatggggagtatgagattttgatgyggaattygayggtaggtttygttttatagttgtttygtttatagygatgygygttagagttttygtagttttgatyggtttttttgttttttagtygtygtttatyggtyggagggtygtttttttgygatttttttttttattttatttttaggtygtygtygttygtgggttgtttttygtygyggttaaaagttttygygttygaggggaagygatgggyggtttgggggttygggggygttaggyggggygygyggygyggggygyggtyggygggtgggtgggttatttggygyggtygggygygtttgtygggtattagagtaggtgtagtagtagtagtagtagtaggttggygagtagggygagtagtgygtttttyggtygtattttgagttataggygtygtygttatygttgttgtyggggygaagtatagttygggyggtttygattygyggttttygtygtygtygttatygtygtygtggtygtagtttygygtatttatagygtttataggyggtagygaggggygttygtagtttattyggtagagttttygyggygggyggagaagaagtygygttygggttygtttygggttttyggtttyggttygyggagygtygygatyggttggtagatgaygattygtygagttygtygtttgttttttyggaggygttyggagttgttgygggtttyggtygtygttgttattgttgttgtygtygtygtygtgyggggttatttgaaggttggggygyggaagtttaatttygtgttgattgggttttaagttttttgygttttygtttygtttygagtgttygygaatttttyggaygtttayg

SEQ ID NO: 6168 - DNA, 1316 bp, synthetic construct
  misc_feature 1..1316: note = Description of Artificial Sequence: Synthetic polynucleotide
  source 1..1316: mol_type = other DNA
gyggtygtyggtttttagttttgggattattttggtttygatayggagtgataggggatttttaygygttttygtatttagggygtttttttagttgyggyggaggtatagagaggttttggyggygttgtggtttyggtyggtatygggtttygygtagtygggttttttattttgagtggagttgttttttaagtatttagtttttgttaattattgtgtttaatattaagttttyggggygttttgttttgygttatygygygttygttygttygttygtttaatttatttgttgaagattaggtagtttaggtggttgattttgtggtyggagyggtggyggttgtagtttttttataggtttttgaaggtygtgatggttaggatgaagagtatyggygttagtgttaggtygggttggaaggygtttatygtyggtaygaagttgagtagygygatgaagataaagtataygttggtygggyggtggaattgttygaataggtttttgggtaggaaggatagtagygtgtatttggtagttttgagtyggttgtyggttaggtgttgggtatattygygtygtygtygtygttygtttttggtygygttagtygtagggttttyggygttygggggyggtagtaggttggagygtatygtgygygttttgttttttyggygttttygtygtttyggaggttygggtttttyggttttygtyggttttygttttatggtygygtgtygtygygttyggttttttygtygtttaygttygttygygtyggttttttaggttattattattygyggttygggygyggyggtgygagtttttygtttgygggaygtayggagatygyggttagygygtygtttggtyggtttagygygtttagttygygtttagtttygtttattttygtttagtttygtygttyggtygtagtttttagggygtaagttgggygggtgtygtatagagtttttttgttttygtygttygttttyggttygggtygttttygtygyggtggttayggtttygttttygtttygygttyggattgggttaygtyggatagygggaaataaaaaaagttygagttggaaattttagagaggtttagtttygttttttagaagtattagttyggttttaaaaygttgtaaaygygygttgtttgtagtaggagagaggaaatygygaagygygagaaaaggygttttygtttttaagtagttygygygtttttttaggggttagatttgttttattttggayggygaaaygatttygggagatttyg

SEQ ID NO: 6169 - DNA, 1110 bp, synthetic construct
  misc_feature 1..1110: note = Description of Artificial Sequence: Synthetic polynucleotide
  source 1..1110: mol_type = other DNA
gygtygggtttggtttttgtggtttygtaaattttttagtttgtgtgttayggygaygygtagyggttgagtyggagtttaygyggygygygtttttygygaggaatttttyggtttgtaggttgtttgttattttygtttttygaygygtttttttttggttygygttttyggagttttttttttttttggygaggatttttttyggygttygyggtttygattttygtygygttgygttygttttttyggtttyggttgtttygttgagggttttttttttttaggtatygtagtygygttttygygtttygtttttygagyggttygtttygttygatgtttyggtttygtttygygtattgagygtttggtagtagggygtygagtttyggggygttgyggggygttgygtygagaayggtygggtttgagttttgggyggtttttagagtygattagagygyggggaggygggggygaggaggaggggattygtygtygggggttggttgtttygtttygagtygatttttygttaatggtttaaagggatatgtttaagtygttttttatagyggyggyggyggtggygtaggagatttagatggaattgttagagaaygtggttttygygggggygttyggagtygtygtataggtagygagagygyggygtttttttttttttttgtgagtygtygggtagggtatygatttygggttttttyggygtttttattgtagggatttttagtttygtatttttttttttygtygtttgtttattttttgttttttttttggygtyggggattttgtttttttgygtttttttttggttttgtttyggtttttatttttttttgttttygaaaagttagtggggaagggygggggagatttgttagtttttttagatttttttygggttgttttagttggtttttttygttttttttygggagaggtatatggagagatatgaattaggggagtggattggatttgttgaagatygtgagttygggtgggygggagggggttygtttttygtagygttttttaygatgtygatttttttggttaygtttygagtyggggtgggyg

SEQ ID NO: 6170 - DNA, 1655 bp, synthetic construct
  misc_feature 1..1655: note = Description of Artificial Sequence: Synthetic polynucleotide
  source 1..1655: mol_type = other DNA
tygttttygttttygttgatattttgtaaagtygyggyggtagyggyggggattaygttgyggtgtattatttttygttattttttygygttgggttggggtygagggggtttygtagagtyggtaatygaatyggttttggtttgttttttttattttttagttattattagaattagttttygygaaggggygagttgtggttaattttttygtgtttagggagatttygttagggtyggggyggggygygatygtttttygtagtygggygygaaggyggttygggagttaggtgggtgtggggygtagttggyggagttgtttagggygtgygagtaggttgygaggatggygtttyggyggygyggaggtatygtttygygttttttygatagtttttyggtttgtttttttttttygygttttggggtagtyggttgtttggggygtayggggttggagtggttttttttttttttttygttaggttttttyggtttaatttgttggtygygattttttagttagtttygaggaaagtgtagttattggataggtttgtgygggttgtyggttttagggaggaaggtgggagaagtttggaggagygaaggggagggyggagggaggagggaggagggtgyggyggtagatttggtaaattgygagttgttttttttttttaaagtgtggagaaggagygygggggagygtggygayggtagygtttttttygttattaaatttttggggtttygygggggtttggggttatttttttttgagttyggaggaattttttttygataggttttagygtgatttttttttattttattttttttttttttttttttttttttttttttttttttttaaatatattttttttttggtttyggattttagattgttgtagttttaatttttttagggtttagttttttggagttgtttattttttyggttgygagaaaggaygygygttttgygtygggygaagaaaagaagtaaaatttgtygggagggtttygttattaatttttttttygtaaatttaaattttttgtyggggttatttttagatagaggaaagtttttgtagagtygattagttttagtggatttggggtaggtagyggygttggttgtggaattagatttgttttgaatttagtggagygtatygttggggttyggaagttatygttygygggtatygggttggygttgttygagtggaatygatagtttgygagtttyggttgtaagtggtttttttttttygyggttgttgtttagtgtygggtgagggttgygagtgtggtaagttgtaaagagagttttagaggttygaagagygttgygtttttattygygttygttttttttttttttyggttttttattgtgaaatygtagygatatttataaaggttttygggttttatygagatygattygtagygtttggttyggtygtgtttattgtatygggagttttygagtatyggygaaggattggygggtggggtagggaggtggyggyggyggtatggygaggttttygaaggtygatttggtygttgtaggagttatgttattttgttatttttttayggattagttttagttygtygatgggaaattyg

SEQ ID NO: 6171 - DNA, 1655 bp, synthetic construct; identical to SEQ ID NO: 6170
  misc_feature 1..1655: note = Description of Artificial Sequence: Synthetic polynucleotide
  source 1..1655: mol_type = other DNA

SEQ ID NO: 6172 - DNA, 304 bp, synthetic construct
  misc_feature 1..304: note = Description of Artificial Sequence: Synthetic polynucleotide
  source 1..304: mol_type = other DNA
gygggygttggaaggggggyggggtaaatgyggtyggygtagaggtggggagtaggtgggaaaggtggaggygggttygtttttggagatttatttttgtttttattgtttttygtttgttagttttatagataggtttgaaygygtagagagttttttggagtgttttgattttgttttygagagggtttttaattttygtatttttttagtggttgttttggtaggtgygygttttgyggggagttgygtttygggggttatygtygagygggagttgttttttggaattttgtttatygyg

SEQ ID NO: 6173 - DNA, 1666 bp, synthetic construct
  misc_feature 1..1666: note = Description of Artificial Sequence: Synthetic polynucleotide
  source 1..1666: mol_type = other DNA
gygtattttttttygatygttagtagtataagtggygatatttttatggagyggtygygtygtagtttgtygtatttagygyggayggtttggtygygygttttttygttyggaygatygggygygtttgatattaatagttygyggtttaggtaygagygggygtygtatttgatttaatttaatttataatyggtygygtttgtaggtgtygttttttgaaatygttatttaggyggtygttgtttatttttygttgygtygygggttttgtagaagygtaagaatggggttgattatttyggtgtttatatgtygtttttataygtttttattttygttyggygtaagattttttttggttaaaagaggygtttaattagttttggggtygyggagagttagygtggtygataaagttyggttttttaggtaattygggttttttgyggattygggagggggygygyggggtyggagtatyggttttgggttgygygtttttttyggygatattgtygtttttttggttttyggttyggtttttygtaggttaaaggtttatttgtygggtttgggtggttygggttagygtygtttgyggttttygagtgyggttggttttaaggtyggygtttttttttyggtttttagtgtttagagttaggttagygggaaagaaggtagtatggttygtaaaagataggtggtagtggtagttttgtatgatatttgttttttttttttgttttttattttggggaaatattggaaatatttttttttttatgygtattygygttttagtatygagtgttttaagttttgygygtagygtygggtttggaaggyggygaatggttgtttagtygtygtttttattagtgatattyggtygttagttttygtttaggatgtgtatatttgttggtagtattggttygggtggtagttatygggttatttattttataggtataatygtatttaatttaatttggaattyggagggttgtgygygtygagttgggatygygttttagygagtygggtttttggttgygttagggtttaggtygagttatttygtygttygygtygtygygaggygggatatygtgtgatatttttgtygtgggttgggygtyggtygyggggyggagagygggtgttttatttygttttattatttgattttygttagygtttgaggayggygtatttaattygttttattygttgygttttgtgaattagyggygggtagggygggggaggtygggttgggggagggtagggtggttttaatttttygttttygtttygtyggtttygyggagtataagtgttgggatttttaygggtaggygtgttttgyggttggaggttygagygtttagggtttaggagaygtggyggatatagaggggtttgtaggtayggtgattttygtgtttttgttttgaaagggtttgaaaggagyggtttatggtgtattattagttaagggtttaggtattagygttttgtgtygggaattygggyggtygttygtgttgtaggtgtttgttatataaaygtttygggagggggagggtaggtygtyggattgggggtyggggaggggttttyggtttggtttgtttttgttattygygyggtttyg

SEQ ID NO: 6174 - DNA, 5030 bp, synthetic construct
  misc_feature 1..5030: note = Description of Artificial Sequence: Synthetic polynucleotide
  source 1..5030: mol_type = other DNA
gygttaygtggagagttataygaattttaagygttttygttttttagtttttygygggaaaayggattagggtgttaatgggttttgattatttgtattagygttatttgygagtygagggttaagagtattttttyggttttggtggggtaygggttgttayggtgtttgtaaagttattgtttgaggggtygygttatgttttgtagggtttgtygtttgtgttttattttttygttattttgtygggygttgggatatggggagaggaggyggttttggtgagygaygygtttgttygttyggaygttttaygtttyggttaagttygggtttygtatttaaattgygtatttttgttttgygtttttgttttgygygygtttagagtgtttgggagaggtaggaagtgggagttatatagtttttggatggggagattatttygataggtttattttgaatagggggatattttgaatttaatattttaaggttagaggtttagaagaygaaggttaagtgatttgaagaatattgttattttagtygygtatttgggtagyggggttaattgttattttttttttattygttggygtygtattttygagtggttttggtttggtaggtttggtagggtatgyggttggttttygaaatttttttyggggattttttgtttgtttttagaggtttttygtygtttgtggttaggggaaaggtygtygattggatatagggaataaagtaaaggagtattgtygtttyggttttttttaagttattttttttgattttttaggaaaagggggaaattttttaaaggagttggtggtttgtggaggaaagttgtagaatttaaaaatatygtygggtygtttttygattaagggagggttaaaagtayggtaagttttgttttattatgtaaggtaaaaagattttaggaaaagtatatttaaagggggaggaggtagaggtagttaggagtttggagygtggtttggggygttgygtttttttaygggttygggaggtgtygygygyggtygttagygagtttagtygtttttygaggtttgygygtttgygtyggagttttttgggtttttgtttttttaaatattttgaaatgtaattttattygaaaygattggtagtaatattttgaygaaatygaatttttgttttattaagtagygaygtygtagaataagtagttgatgtaatygtttaggtggaggyggttaggayggtygttttttttyggyggggygttyggggagtygtyggatygggttaggtagagtttgttttttatttatyggtagtttgagtagttggtttattygtaagttatygttttttttagtatattttttatttygttaaatttaaattyggtttygtaggttyggggttttttttttygggttygtygygggtttagtygagtygygtttaygttygggattttttggygggaggygattttttygattttttgggttaggygagtygyggggttttggygaggggttygagtgatygaagagaagttygyggagtttgagtttggatttttygattgttyggtttygtttgtttttttgtatygagtttagtttttttttttygtttttagtygygtatyggtatttatagttyggagaggggtaaataatttttaatttygaggtttaggtagyggagggtygaggggtagtttttggygtttttagtttttattaagttttttggagttgtttygaygaattgattttttatgttttaagataggagttttttaatatgagaatgygygagttttggaggggtagatttgtatttttagggaatttygggttttttttygtttattygttygygttgttaygggatttygttatagtttattatttttattttttygggtygtaggygggtagggtttttaggggagtgygtatattyggtttttyggtgttttaggtygaggttgtttttgaggggygggtygtygggaatgtttatttyggggygggygtgaggattgtttaggatatygttgtagggtyggttatttygttttygtttygaggygttttygtttttaaatagtatygtatygttgagtttgttgaagaygatggtgtttatggtgtyggttggtagggaygygyggygyggtygtagagtttyggggttgggtygtygggagtttygtagyggggttyggtttttaggagaggaaggtgtatttygttatttattggttgagagtgtttagatttttgtaggtttagggttttgaatttggtygggtygtygggttgyggagtygaggggaggagyggygtygtygtaattggtagggattttgyggttttttttagttggttataygttttygtttttgtaggtttttyggataggtatttgtttttttttttgtttgggygatygatttttttaatttttttattttttagaattataatygggaattatttattygtagaggtaaaggaaaygaatttttaaaygagtttttgggttttagtttgaatttgggagaggtatatttyggattgyggagygygatyggygtgaggtygygygtggttttttaattatagtagaagattaaagtttttaggaattttaattyggggygttaggaggggttggatggaagggaagatttggggtaatgtgttaatygtatttataagattttttagtttatgagttttaggttatatygggatttgggggattttygtgttttttagatygtggatggtttggttgaaattttygtattttttgttygttaaggtttttyggggtgaggttgggtttaaggataggaaaaagttaagtggygttaggaygaaagtattatttttttttttttttttttagaatttttttattattttttaaygygtttygggaagtgtatggttttaaggtttaaggygttaggatttaggtttttagagtttttaattagtgttattttttttygtagygygggtgttagtygygagttygtagtttttygatattygtttttttttggggttttyggggatttttttagaggttgtaaaggtgttagaagtttaaggtaggaggtagtttggtyggygtatttttygggttattgttgttattgtyggggagagttagtagtttatttttggggtygyggaggttttgagtttttgtttgtygygtatyggygttaggagtaagttygygyggtygyggagtygtagagttatagttttaaggygygyggyggatttygttygttttattttttygtttygygtttygggatagttttygtttttttygagyggttttagtttygttgttagygttttttttgttygtttagtygyggtatgggttgttattttattaatataygygygygygtatatatatatatatatatatatatatatatatatattttttgtttygttaagygtttatattygttaaygttttygtttygtttttyggttatygtagtagaggttaygygtgatatttaggattaygygtgattatygygattaaaygayggttayggtttgtgttygtagggaagtgaagttagatttttgttggatgtygtgtgttttttaggattgygttttttygygtagataggtaygtgtttggggtgtgtatatagtttyggtgataagtgttaaagagaattttygtgtttgtagtttttgttttatagttaagattygygttggtgtttttttttaaaattatgtttttagggatgtgtgtttatgttgttttatttgtataagatattttttttyggttyggtttttttygagttattttagygygtttttttagatgygaygaygtgttttttttagygaagttattaygaggttagttatttyggatattttttyggtagttttaagtttaygtagagatygtagatatagatattyggygygttgtaggtttgtaggtagtaggtttagaggtaagygatggtaaaggttygagygttgttttgtygtaaggggttygggggygtgtgaattatatttgttgatttttttaggattttygygygyggttattygygtttttttttaaattatttatttygatttattttagattgtggtyggggaggttattttttgtagaagtgttttttttttttaaygtyggygaataattttaaagtaaaggaggygyggttaggtgggtttttaagtttygygtagatttttgggttagttttggtygttattygagygtttttttattagattttggagggaagttgggggaagggygggagagtatyggygtttagggygtaggggttagagygagtttggygtttygtygtagtyggttgagattyggygaygygggggttgtatttgtggttgyggggtygayggtyggttgtagggyggttggttttttygtttygagattaggygtatttttattttygtygtatgttttttaygygggttttagygygtttattatygttatygtygtygtttyggttttatttatttagttyggygygygtygttygggaataggaatagygaggtttttttatgttttttgattgtyggttttagtyggygaatattttgygggygyggtatttaygttttygggygggtggagaggaagygttygygttygttyggtygygggggttgttgttaatttttagtagaggagtygttgtyggggagtttygggttygtygagtttttyggagtygggygyggtttttagattygtyggttttgtagtygtggagtagayggggttttttttttygtattttaggagagaaattggagaagttgtygggagygttyggtttyggttttagaagttgagaggttgyggtgtaaatttygtgttttagttggttygattgtyggaaattttattgygygtggttaggygggagaggttattgtgaygyg

SEQ ID NO: 6175 - DNA, 2868 bp, synthetic construct
  misc_feature 1..2868: note = Description of Artificial Sequence: Synthetic polynucleotide
  source 1..2868: mol_type = other DNA
ayggttttaygygaggaagagggyggggagygyggatygggtgtgggaggtygaggtgatagtaggtgagggtygggtgyggatggggaagtgagataagtatygtgtgggtattatttatttygttttattaaggaggttgttggtaagyggaatttttagttttttttttaatttagttgaagtttaattttattgaagttattttttatttyggttygtttggggggaaattaggygtttttggaagggaagggaagggagttygggttgygygggttaggtagttttttttyggtygtygygtgttttygtygtttttaaatttgtttttttttttattaagggaatttttyggggagtttagatygygatttttttttttggtttyggggtgyggggggyggataygygaggygtgggattgatggtagttttgtttttaggaagtaggtaggyggggatttttgggygttyggaggggtagtttygagggtatagggtatagggagaattagttagatttttttttgtttygggtagtygyggygggtgtggttagygyggaggtaggaygtygtygagtttttaattttatttttttaatttygatagttygtygtttttttgatygygtttttayggtttttyggtattygtttttttttttttattatatttgaggaaaatttttttttygttttttaatttaaatttagtagtgtttayggttgtygtaaatygttyggtttttagtaataaggtttyggtygtagagygagagtttttaggtgtaaggaaggtgatgtygtaaagtygggagtgtygtaaattaggtgyggtggggaggggggaggggtggaggyggaggggtgggggggaagggggagggagggggaggaggtgattygagtatttagatataagygagaggattatggyggatggttttaggtgtaagygtagaaagtaggygaattygyggygtaataayggtgagtggyggaggggatyggggagyggyggagttagggggagttgggtagtyggggygttttygggggtgaggggggygagtygggttgggggtagtyggggtagggayggtaaagtggagtgggaaagtagaaagtagtgttttttgttttttttygttgtygtygttgtyggagtygygtygyggtygttygttttttttgaatygttatgttttttatttggttttttttygtttagyggttttygtygtttttgtygtttttttggatygttagtyggygtygaygtygtygtattttyggygtagggygggyggtygggaygtattggttatttttttggtttygggtggagyggttgttgttttttttygtatttttttttatttttgtgtttttyggygtttttttttttttttttttttggtttttttagygygatttttttttagygtttaggttttygggagtygyggaataaatttgtgttyggygttgatygtgtaaagtggttttygygygtygyggtttyggtyggygtygtygttgtygttygggtttygygattygggtygggttgtgggygygyggtaggygggttgyggyggyggygggayggggyggtygygggttgygtggggtttgtgygygygtgtgygygggygtyggttgtgygygtygygggyggatagggttyggtyggyggyggtaaagttgggattygygggtygggygygttygygtaayggggattagaggygygggggygygggtttttaagygttttttttttttggygtttttygttgttyggtttagagtttyggtttggggatttygyggygagtttygygagtggggtttaygtttggyggggygyggyggggyggygyggggaataaggtaggaaaggtatttatttaaygtygtygggagtygygyggatgggggygagttgggyggygggtgtgtttgyggagttgttatttgggtttagagatygggaagtattatagatagatttttttttyggggtagaygaggtttttgygtygggatgggtyggtgtgygtgygtttygygtttttttttttyggtttttggggaagttgttatttgggtyggaygtayggagygttgaagtyggataatggggtttggatggygttttgggtttygggtggaaggagggtgggggagggggyggayggatygayggaygygyggggttgttatttgtatygtagttgtagtgtttattgatttgtgttgttgtgttaagggaaatatatatttttttgtttggygtgagagttaaaaaaaaagagagatagttygagggatygagatttgaatatgtggtggtggttgtatagtygttttttttagtttggagagaygttgtaagttgattgtatttttggttatttyggggygatgttatgttttttttttttttygtgtagtagygaaatgtttgttgattgttattgtttggatagtttttgtggygagaggggygagatttgttygttygggggyggygggagygtagggagagtagttttygtttgygtygtttyggtatttgtttgtataataatgggyggtaayggttttgtygtyggtygtagtttaggttatataaggaattataygtatatttyggatygaggggttygttttggtttttgygttatttttaaaaygatttttaagagaggggtaataaatgygtttataatgggatygttgtagygtygagaaaaygaggaaataygtgtttaggagaaaattttttygtgtttttttagttttatttttygygtttgggtttttttttttttttttttttgggatgygaaaygyg

SEQ ID NO: 6176 - DNA, 2678 bp, synthetic construct
  misc_feature 1..2678: note = Description of Artificial Sequence: Synthetic polynucleotide
  source 1..2678: mol_type = other DNA
gyggttggaygygygtttaggttygygtygttgyggatygyggagttgtgtagaagygyggtttggygggtggtataagttygatagttgygtygygtagttygttygygtttggttaagagtttygygagggtgtggggagaggatyggtttygtagggagyggaggttgygyggttgtatyggattttatagttttaagtygyggtatgaggygaattttgtaaagygygttttygttatgtatygttygatttttagtattgtgygtagtaggatttyggagtttattygtttgtggaaatygagttygtagygggaaggtagtgggtggagggtgggtaggtaggggtttggggttygyggttttttattttygygttttttygygttagtttygaaygtttttttggggygtttttgtttagttgtttyggttgatttygttttgtagttagtttgaggttaggyggtygttttttgtaggttataaattttyggygtaaaagtagggttttgaaygygatatygtattagagygtttagttaagygagttgtttttatttttattgtgtygggyggygtaaattgygggygtaggtagaggagtygyggttttgygtygggygggagtygaagtttagagtttygttagggttttttygtygagygtatttatygtygttgaggtagagygyggttagtaygaggattagtaygattaygattttggygtttatggtgygggygggygggygggygggyggaygagygygggtygggggtyggaygtygagygggtaatgyggttgayggagagtgaaagtgyggyggtgggaggygygygtygggygttttagaggggagagttaggyggggyggggyggggygygyggtgaggggygggttyggagtygagtgttggtygtggtyggggtttttgaygygygattttttyggyggtattttttatttatttttttygtttttttttygttttttttgtgttttygaggygtagtgygtttyggtttttgatttttttaggtttygttgggtttygtatygttggttyggtttgtagtgaggttygtagtttgagygaygtyggttggagggtygtttattgtttttgtgatagggttttattggagagattgaggattttaggygtaaagtggggygygygtggaaagttgygggayggggtttttygatggygggaattgaatgagaattaatgaaaagtaaataagttagtttygggyggagggtttgttggyggtggyggtttaaggtagtygagggggttttgttttttgtgygtgggggtttaagttygttatttgttyggtttgyggygtagtygtyggtagagttygatttgygggaatgagattygtttttgtagttagygtggttyggattttaagtttayggygttattagtygagttttagttttttygtttgtataaataaagtagaaggygtyggyggtttttagtaaaagygaatgtagtttttgtattttygattttttaatggtgaaatgagttaattataggtttatttygyggagtgggaygggagatttaatgagattygttttaygtygygaaattttttgtatygtgtttgataagtagatagtatttaataaatggtagttgtaagtaagttttttaaatttaagtatttattgttttatttaagaaaagtttygtgygatttaaagagttgagaatttttttatttygattttygatttttaggatagtattattggygtttgttttttgggtttagaaaattttttttayggagtygtttttyggyggtgtttagtttttyggatattttygagatattttagatggttttagttyggtggygaagggagggtgtaggtyggtatttaggagaygtgggggtgaggagagygtttttttgggtttygttttgtgatygtaggttgttttagttatttttttgtgttttttttagtatagygtttagygaagtggggttagtygtygygtttatttaggggtttgttttggggataygtttttgtttttggggagttttggtygtyggggagtgggyggttagyggttgtattaggygggagyggttaataggaggttgygagggtttyggaatttygttggtgggagtaggtgttttttgtgtattttttttttaaaattattttggtygttagatggttgtgggtyggtattttatttatttatttatttatttatttatttatttatttatttatttatttattttgggtattgggtttggagtygggaattttattgatttggttttgtttttaaagaattgaaggtagtgaggtttagtgaagaaggtagtygtygggygtttttaggtttttgttgggttgggtyggggagtttggtygtttatyggtygtagygttggggtttyggygttttttggtggyggygttttttttttygtttttagagttttggttagttttatttttgygtagttgatgaaattygggagggygaaggggttygygggaaatttatattygggtggaggggygttttggagttyggagattygattttgygggagtygygygtagtttygtttgtttttaaatttggttaaagtaaaygttatygtttttyg

SEQ ID NO: 6177 - DNA, 2756 bp, synthetic construct
  misc_feature 1..2756: note = Description of Artificial Sequence: Synthetic polynucleotide
  source 1..2756: mol_type = other DNA
gygggagggyggtagyggttaggttaatattygygatttygattggggygyggtaatttttgtttttagtttttataagttttyggtygygattygyggtygagaaattttgyggaggggtyggtgggttagagttaggttaggtagttgttgagtttttttttttttttttggygggagtgtgtgtgtaaggggttagggggyggagtyggagaaagggttgggggtgttygtgtttagygttttttyggaygyggttttataatttagttgygagaatagatggaygtagyggyggtttatttygggggttttttgttygttgtgygtygaggtttaggttgaagyggagatygtaagtttttggttttygttttttttaaggggtttygaggaatyggttgtygygtttttttttttaagaggagaagagygggygttgatttygygagttttagaatygygggyggggggtaggtagggggyggggggtagagggttagttatyggygyggaaygtttattttaggggttggtttaagatttttatatygagagttttttttgggtttttagttttggagtatttggagagyggatttttgttyggttaygtttygttttyggttttygtttygtygaygtygtattagtatgagygaygtaagtggttygggtattattygggggttgggattygtygygttatagtttygagtggaagggaaaaaaaaagaggaggyggyggaggaggtaagagtygaygygaggggaggggagygtagyggyggggttaaygggygggtaagygggygggyggtaatagtatgtttttyggttagygygggyggttttttagygyggygggggttgttttgggygygtttygggygaagtgygtttagttttyggtttyggtttttyggygygttygatttttyggtygtttttgagtttagtagtygygggtttygggatyggttaagagtagttgtaaygtttygtyggayggagtttttttttttttygggaygttgggttatgagtttygyggttatttgaggtataggggagtttgttyggttaggatagttttttygaagtttygtgttttygtttttgtattgygggaygttagygttyggttttggyggaggygttttyggaagagtatyggggtgggggtatggaattygyggaatttgygggttaggttygggyggyggttattaagttgtyggaggttgtgggygyggygttgtaggagtttyggyggtagaggygtttggtgtttgttatygtgtgygtggygttgttattggataatatgttgtatatggttatygtgtttatagtgttygattatatygtttatatgygygggggyggygagggttttattyggattttygaggtgtgggagtttattttgtygttgtttatttyggttaatgttagygtttatayggttaatatttyggygttttygatagttgygtggttagygggtttagtttttyggtttygttattttayggagagygaagaygtgaagatyggggtgttgtttgtttttaaggttattttgtagttgttagtgaattttttgagygggttttttatygatygtatgagttaygaygtgtygttgttgatyggtttgggygttatgttygtttttatagttttgttygttttygtygaggattaygttaygttgttygyggygygtagtttgtagggtttgggtttagttttygtygataygtttggtatagttatgatygtygataagtattyggaggagtyggagygtagtygtgtattgggygtggygttggtttttattagtttyggaagtttagtggtttygtttttygggggtattttttatgagttygtyggtaagygygtgttttttttggtgttagttgtygtgtygttttttgaygygttgttgttgttggtagtggttaaatttttttyggyggttgtaygggttygggttaatttgttagtgggtatttttatttatygttttatgttagatttttatattgtygtggtggtyggygygtttattatttgtaatatttttttygtttttttygaatttattattgttaygtggatgaagtataygatggyggttttygagtgggagatgggtatggtttggttgtyggttttygtgttttatgtgttgggygtttattttatygtgygtttggyggygygttatttatatttgtagtggttgtayggygygtttgggttggttgtgatyggygttagttygtgtatygtgttygtttgtygttttttygygtygttagtggttttattatgyggtttttgttttggtatagttttagtygatatagtattgttgtttaygttygtttttttggtggaygtgygttatgttttagtttatggtagygtttaygttatygtygatattttttattyggtggtttaygygttygggtttatagtggtaggttatattgtgtattygttgggttttgagtagtttagttttggtatgggattggttaatttgttttatgttttygttttgttgttgtttygtaaygtgggttttttgaygygttttygtttygagygygatgtgttgtttgatgagttatygtaaggtttgtaygatgyggtgygtttgygtgagygttttgtgtttggttaggayggygagtttygtagttygtttggtttttttgatgygtgygaggayg

SEQ ID NO: 6178 - DNA, 990 bp, synthetic construct; identical to SEQ ID NO: 5948
  misc_feature 1..990: note = Description of Artificial Sequence: Synthetic polynucleotide
  source 1..990: mol_type = other DNA

SEQ ID NO: 6179 - DNA, 829 bp, synthetic construct
  misc_feature 1..829: note = Description of Artificial Sequence: Synthetic polynucleotide
  source 1..829: mol_type = other DNA
gyggtgygaygaggttaggttygygttygttaagttttagggtygttgtygtygayggttatggaggaygagtagttygatagtttggagggttgggygtygtttygggagggttttttygtygatttttagaggtatyggttgygttttttggtggtttggaayggygyggagggtaagtttgttgtgatttgttaygatygtatygygtagtagtygtagyggygygagggggttyggttggggttggagtataagttygaggtygtygtgttttygtttagttgggtyggtyggttttyggtygyggggtttygyggygygygtyggtagttagyggygttgtggtygtttttggaatattgttttttayggttgtygtyggagttggaygtgggyggyggyggggtttgaggtttggggttygggyggtgggygttgttttggtyggygygygtgggtttyggygaggyggygttgtaggagttttgygggtagttggagygttatttgggygyggyggtttayggttgtggyggygttatygtgygygaygtttttttygyggttaagggtygygyggtygattgygagagttygygygagtttygggagygggttttgygygtttgatgggtygaggyggaygygyggttgygttaggtaagygaggtygggtygtyggygtttgatygygtttgggtggtttgggattttgtgggaggttttttyggygtygagagttttggttgayggttgatggggaggagtyggygggyggagaaggttaygggttttttagtatttttatttgygygggatygttgyg

SEQ ID NO: 6180 - DNA, 4119 bp, synthetic construct
  misc_feature 1..4119: note = Description of Artificial Sequence: Synthetic polynucleotide
  source 1..4119: mol_type = other DNA
tygtgatggtgttaaatygagaggagagttygagaagggggtgggtgatttttyggttgttttttattttyggygttttgtgtttttttttttttttttttttygttgygttttagtygagggttgttggagygaatgggggatgtagaggaaggagttygtaggttttygtgtttttttaatttttttygtttttttygatagtygygygttttygttttagtttaaggttagtggttyggtttygaggaaggygygggggtygygagagaygattttttatagtatygttaaggaaatyggygtygtyggtgttttygygggtttttttyggtagttygggggttgtttttygtygttgygygtttttttttattatttattygttgttttygtyggtyggagttttygttttattaatttttttaatttygygggyggygggtaggtgggggygygtttttaggtygtaagaagggagygtttygagattttttyggggtyggttttgtttaggagggagttatygaygtttttttttggygttttttygtygttyggttttttaggygygtagtttttttygagagtttygaattttatygttattttgtttttgtttygggagaggggaggtygaagtgttgtyggttagagggtttaygtaagtttygaaattyggggggaygttttttttatttttatttttgygttygttyggggttgggygygtyggggygtaygtaygtyggtttgttggygatttggygtatttgttygygygttttggttttagttgtygtaggttttttttgtatttatttttagtttttaaagttagtgtagttagtatygtttatttggagttttaatttttttttgygattttygtatatttattgtattttatttattattttygggtygygtaggttygggtttgygaagataygyggtttattttyggttatttygtttatttggttaaaggggttttttagttyggtattgggaaagatggttatygaygtggyggygaggttttttatygggtagatgttgttagatagttggtgtataaaattattgagagttattgggattttgtttayggttttggyggttattatttgtttttygtataatttggagatttaattttttygttatttggagtgttagaaaagtygttttggagaggggttggattgagtttgggatggtatttttttttgttttttatatttaaaaataattattatatatattaagaaaaaaaaattaatagaaataaaagtagtaaataagttgttgttttttaagaaataagaaaaatgtttatttgttattgatttttttttgtttgtgtttyggttgttgggaagttaggagttgttggtgtagtgttattataatagttagtgagttttttygtygagttattaattaattgtttttygtttagttagayggaaagtgttgttttaagtatttatgggtaggtttttaatattygtgaygtygttgtttatatatggattgaggaatagggttgggttaggyggtttttgtygttatatggttgatttgtatataygggttyggtygygyggatttygtygggttygygatttttagttygtaggyggyggggatygttggggtttygggygygyggttttagttgtagtttgggttyggggygtagggatygygggggagagggygygttatggatttagttatagttatagtaggagagygagttgttttaggttgyggtttagtttttyggggyggggaggaatttyggttttttgggattttttaaaaaaggygaagattyggtgtyggyggtttygtttttttagtttttgtttgggagttatttyggaaaattaaatttyggaaagaaatygagyggagtygagatattatagttaaatttttatttatttttttggtagtttaaaatygtaagtaaaaggaggtagygaagaaaaaaaaagttatatgtatttayggaagttgattgtttttttttgaattatttggtggaaagaagtggttggtgataagagtgaatgygtattgtttttttggaaagtttgttttatttatataggagygaaaayggaataggtttgggttgtttgtttgtttaagtattttgggtattttgggattgggagggtaaattttaggaggagtagaattattgtggggagtttygagagaaatttttagtyggagatatttttttttttttgttygygygtttttygtttttttttagttgttgygyggagygggygtttttttyggygygtttgggyggtyggttgygtgggggygtttagatggaagtttggatatttattttgtttttttagatatatatatatatatatttatattygttttattttygttatatattttygttttygttgttttttttatatattygtttatatattttatattatatatttttttgttgattgygttygygygtygtygttgttagtagtgtttyggyggtagagygggtttygggttygttggataggaggttttatgaagatattggtttaatttttattatyggtttttgtagttatagaatttttttgatttttatagtttaggatttaggatygygttttgttygtattygagttagaatataygtattagaataaatattttttttttttttttaaaaaatatttyggtgagtttagygyggtttttagtgayggtygaaagtatttttaattatttttaagaygttatttttattttttaatttattygttttattttgygagatttyggtagaaatttttttgtttygtttttaaagtaatttttaaaaatttttttaaagtttaaatagtagtaggttttggtttgttgggygtaaagtttttattttttagtgygttttagttygtaatggatagtygggtttgttyggggttttataggaggttggtttygggtgtttaagtttagygtatygtygtttgtatgatttatttatggtygtttgtgtaggttgygaattgttttagagttttttttygttttaaagtygyggaggttagggataaygygtagggttagtttygtaggtttgttttgttttttttttatttygggttyggagyggttttagtttagtgtgggtyggggygggygggagttayggygttaygtygtggaggaagygyggygttgtaggygggtttttagtygtttatttgtttygatygttgtagtygtgygttagttttygtygggtttagygtatygyggttagggttttgaggttgtygggagyggtttttttttttgtttttttattgaagygttgtttttttttttttttttaaaatagtyggtatttagyggtyggttatttttttgatttaagttatttagagtatatttgggaaagtttttygttygygttgtgygtttttttttaattggggatgaaaaggatatggaaagaaatygtagtaaggttagtattttagtagatattttattttagtaaaaatgtgtaaagttttattttttaagaaagaaagaaagaaaagaaaagtaagaaaagatagttgygtttttattaygtgygttagtttatttygtttgygttttggygggtttygyggttttygygttgattatgggtaagaygaygtttyggaagggagttygattygtatttygggttttgagttygaaagaaygggggaaagtygaattatgtaaatgyggatttttgygatggggttygggttayggttttygtyggttttttaggtgaggtatttatyggtagtaagygygggygaggygattgttygygtttygtttttttttgygtaygtgggyggatyggtaggygggygagttgttygggtygtttygygattggygttgttgttaaattygtyggyggtygtygygygttatttygagggggagtttttggaygttygagtgttyggttagtagggygyggagggtaggatyggggttgggggyggggyggggtgtttgagygagggaaaatygygaggttttyggttgttatttttttyg

SEQ ID NO: 6181 - DNA, 1575 bp, synthetic construct
  misc_feature 1..1575: note = Description of Artificial Sequence: Synthetic polynucleotide
  source 1..1575: mol_type = other DNA
aygygtttatggaaggtggtgttygttttatygttttygtggaaggttaaaygagttttyggtgtgaattyggagaaagagagggaagtgtagygttagttttattttatattttttttttgtttataaataattttaagtgttattttaaagaggayggggagygyggtagaggggttttygggtyggygggttggggtygtyggatttgtttattaygttttttattttgggygagtttgtataaataaataaatttaagtygtyggtttygygggaggtggaggaggagtgaygaggaggaggaggaggagggaggggggagggagagattagtttgggaagtagtayggattgtttattygattygtgtygtygtagggagtgtgttaagttatagaggygtyggaatyggtttttgygtttttygttagtygttaygatttatttttgtttatggggtttttygtgtgygttttttygttyggggattgaaattgattggttygggagataygaggygtttagaaggattgatagygyggtattaattgttttgtagatatttgaagggaaagattgggyggagagaaggagagtyggttagatttttttaatttttttggatttggaaygtttttygaaataattttttttttatttaggtgtattttaattatygttggttgtgttttttyggtatttttttttttattgttaattttttygttttttttgtygggagtagyggaaagggaygttttttagygatataagttttttttttttgtttygtagtttggatagagttttttggtagyggttgtygtttttatttattttatttatttatttattggtttttaagaygygagaggatggtagyggagygtatttataaagyggtagttatyggtgttygyggttttggggagttgggygygttygggayggtggttttggtggyggygygggyggagygyggygtayggttgtygagtttagggtygtgygggttgttgaygttggttttttgttygttggtatttagtttgttygtttattttyggayggtygagttgtaggttygggtgttgygtttggaagyggagygyggggagtagtaaatggagayggttattttgggaygagttaattaattgttggaygaggtttgtgttttttgttgttggtttttattttttttygyggygttttttygygtagtttttagattgtttagtyggtgttygygggygttygttttttgygagttttaggttygygygagttgtttgygggaggggtyggggatayggatagaygttgttttattagggattyggaggatttggtgggtaagagtatgatttagygattttygtttygggtaagygttttyggtttttagygttgggagygttttgggtaygtygggtaggtggaggaaggttgggygygyggaggttygyggaggygggtaagttttatttttttttttygggattyggttagggtggtgtgatagtygtttygygttygygtagyggtaagygygtttagaggtttaggtyg

SEQ ID NO: 6182 - DNA, 2401 bp, synthetic construct; identical to SEQ ID NO: 5958
  misc_feature 1..2401: note = Description of Artificial Sequence: Synthetic polynucleotide
  source 1..2401: mol_type = other DNA

SEQ ID NO: 6183 - DNA, 1579 bp, synthetic construct
  misc_feature 1..1579: note = Description of Artificial Sequence: Synthetic polynucleotide
  source 1..1579: mol_type = other DNA
tygaagtyggggagygggagygtaygtgygygtgtttattttgttttgggtttttygttyggggaatttygggggtgttagggtatttagggttagggaagtaagatgtygggtygtttattttttttatttygtagttygtttygaaaattttttaaatygagatttaatttggatgtttagtttygtttttttttttttttttttttttttttttyggtygaggttttttttagtttagtttttttttttatttttttttygtygtggatttttattagtatgtttatttgggaggattygttggggggygggagatattygaagttatttatygttagygttttttyggyggttttttygggygatagygtttygggagttttattygtataagtgttgtttttaattaattgtttgggygggggaaggaaaggggtttygtygtygttttygttyggaggttggagtgttgttygtygggtygtgygttygttyggtagyggygtgtattagtattatttttgygtgtaagtttgaaatgtgagttgttttygatttatattygttygygttttttygtagygaagtggttgggttgayggtttgygygygygagtgagtgygggyggygggttggggggyggggtgyggayggygaggttygyggggyggggagggygygygygagtyggggttttttggagaygttaaggtaggtttgttygttttttatttttttttygygtttttttttttttttttttttttttttttgtygyggttggtttggtttttttyggagtttttagttttaygygggtataygtagggtgggtggttaygttygtagggttygygagygyggygtagagygygggtygtgggaagttttttyggygygtttygtgygttttygtttttygygygttttyggtttattttygtttttggagagttgtygtttgygttygggygygyggttggttgttttttyggyggyggyggyggyggttttattagyggagttttygtttatgattggtttygttygggaagttggagaygggygatgaataattgatgtgtgyggtgyggtagtyggayggyggyggyggtggygggtagtagygagygggagygygggagtyggagygttttyggagygggtagygyggagygagygggygtyggattygttygggttttygygtygtygtygtygtyggggygyggagyggggatgtaggyggygttygttgtttgygygtagtttttgttyggygttggttgaattttattyggagtygttygtygyggtygtygtyggtygggttttaagttttygagggygttagggygggatygygatyggtgtaatttttaggtaagtgyggggtyggaggggtyggygtttgggygtttaygggtygggttttgggtttttttygggygygggggtgagtgtgygtgtttgtgtgtgatagaggagggtyggtgtattgtgggtagygtygtgtgttgtatggtgttagttttaggtttggtygygagagtggtatyggygtgtatygggtyg

SEQ ID NO: 6184 - DNA, 919 bp, synthetic construct
  misc_feature 1..919: note = Description of Artificial Sequence: Synthetic polynucleotide
  source 1..919: mol_type = other DNA
tyggggygtttagtgtggtttttttattygggagtttggaagggtttttygtagttygtaggagaygtagygtttttygtttagggggagtaggaggatagttggtygttttygggagttttaggygygaagyggttttttttygttttaggtgagttttgttygaygtttaaggtttaayggttagaatygtttttgttygtyggatttagygaagttaggggaataaattttaaaaatagttygggttttttyggtgygtttatttttatataygygtttgttygttatttaggagyggygtttygttgttaggtaaygagagttygygttttaggagttagtgtaggygtygtaaagyggaaggggygygyggataggtgagtagagggtaygyggtgggtagygaagggggaaygygtagtagagaggagagggygtgtaggagtaggagtaggyggtagagtagagggggygyggtagagtagagggggygyggtagagtggagggggygtgtaggagtaggagttygtygtagagtagagggggygyggtagagaggagggggygtgtaggygyggggygttyggtagagagaaggggtygtgyggaagggggygygygttaggggagggggttagagaggagggggygtttaggagtygggtttgyggtagagatgaggyggtgtgtaggagggagagygygtaygagggggtaaygggtagagaggagagggaatgaaagaaggggagygtggtagagagaagygggygygttttagggggyggggtttagggaggagggggagygtaggatyggggygggaggtagagaggagygggtaygygggaygggygtgtgttygtgaggggtygaggaaaggygtatgtggaggygygyggggtgggtgagtyg

SEQ ID NO: 6185 - DNA, 944 bp, synthetic construct
  misc_feature 1..944: note = Description of Artificial Sequence: Synthetic polynucleotide
  source 1..944: mol_type = other DNA
tygtyggagygygyggggayggyggyggyggygttatttggaggygyggtggygggtaggtgttygaattgtayggygatgtagaggtygttgtttagggggaatttgtggtagtgtagtattttaggttaggggaagtygtaggtttttatgagyggygygtagtyggygygtayggtttygtatagygagyggtaygggtagatgggtyggtygagatagaygggygtaaagagygagtataggaagatttgygtattygagtggtagygtttggttagtagyggtagttagttgttygtttgttgttttatttyggttaggttttygtgttttagtaggttgggtagtygtatgygtttgtagtttatygtgtggtagagyggtaggtyggtagggatgttaaggtattgyggyggtttggagtaggagyggtygtgtagyggttyggtttgttagttatagtagtygtatttttygtagygygtyggygtttagtgtagygtttttagtagtagygttagygyggtygttygtaygttttttttygtygtygtygttygtatggttgygttttttttaggtgygygtygygtagtttttygaygttyggtgttyggyggtttaggtgtttyggygtgygttttyggttttgattttatttagtygtygtygtygtygtygtggaggtygtttaggtgggtggtagtttgygttgygggygtttygattgattttggygttttttatttyggggttttagttygggtttygtygtgygttttagttaattttyggtygtttggttttagttttaaggyggggaggtagtgggggyggtttttagtttttttygtattttgttygagygtttygtttagygttaggttttgygtttttttttyggttyggtttttttgtygtagttttggtttygtttagyg

SEQ ID NO: 6186 - DNA, 1096 bp, synthetic construct
  misc_feature 1..1096: note = Description of Artificial Sequence: Synthetic polynucleotide
  source 1..1096: mol_type = other DNA
tyggttaygygttgggttyggggaagaggygyggtygyggtygaggyggggatagggaggyggtagttttttttgygtagygayggygygggygggyggaggtyggggygttttagtttttygttttygtttttttyggtygtgaygttagagtyggayggggtaaattgagyggyggyggyggggygttggggyggagattgygattyggagtygttyggattgayggagtttattgyggtgygggygttggygygggtayggaggattygggtaggtatygtaagygatttygaggtaatayggtttyggttttttgttygtagggygyggtgtyggaggggagygggttygggggaggtagggaggtagggaggtttttagagttaygygggyggggttgyggggatttyggggtagtyggggygtagggygtagggygtaaggtgtayggggtygagygtgtagtttgggaggtggtatagttgggggyggyggggattagggtagygttttgggggttttaggttgggtttttagattgggttttygayggygttygygggygttttttttagggagygygggttttygtggggaygygttygaggtaggtgagtygaggttggggygttygggggtgttttyggatgtyggtgygygyggttttttgattygttttttygyggtttgggggaygggagaatggggggtttayggtygttttgggtttttatygygtatygygttygtagyggagtttyggagttatggttttgagygagttggygttggttygttggttgtaggagagtygtygttygyggaagtttattttgtttatygtgtttttggygttgttgttggataatatgttgtttattgtygtgggtaygtgyggatagggtatttttgtttyggtattttagttttagygtttttttttyggtattttatttatttttgygyggtttyggagtttygttaaggttygggaaagttggagaattygttttgtaaaaaagatattttttttaggttgtygygtyggggttaggaggagtygygttgtgtggtttygtttttttgatgttyg

SEQ ID NO: 6187 - DNA, 4048 bp, synthetic construct
  misc_feature 1..4048: note = Description of Artificial Sequence: Synthetic polynucleotide
  source 1..4048: mol_type = other DNA
aygttagagatygtggggygagagagggagagagttggaagtttattgtttyggyggggtyggtagttttyggttttaattygtaaaygaaygagtygggttaagaatygygaaygtatygattttgggatttygaggttaagygtggttgatggggtgggaggatttygtattttttattttaggattttttttggtttaggaaatygttgggagttttgttaagtgtggggattggtataatygaayggygtttttagttygggaattagtttttgttygtttattttygyggtgtttttggggygattttagttttttygaygyggggtygygtaaggtagtagyggyggagygttaggttagaggaatttgtttgtttttttgttttattagtttgggygaggtaggttygggatttagggggtygtagyggaggyggygtyggttagggattttgtagggatyggggtgtttyggagggagtggtgttggtggaggaggaggyggtggttgagggggagtaggtggggaaagaggaggaggaagaagaggaggaggaggaagaagaggaggaggaggagaagaagaaattggaggaagaggaggaggygaaggaggaggagaagtygtagygggygtygtaggagygagtgagttgggagygaggggygaaggygyggagaagttyggtygttyggtgggyggtagaaggtttagtygaggyggyggygtygatttygttttattttyggttyggatttaggttttygggtttttaggygtttatttttttttgaygtattttaaagagtttttttttttttattttagggygagtaatagygattaattattaagttatttattaggtttyggaggaagttgtttatgtgattttygtattaattaggtttatgaattaataaatygtttgtataatttgtgaagaagygaatatttttatggattgtttttggatttagggygttttgttygttttttgtagaggagaaaaaatttttttttttttttgtttttttygagaatttttttttttttttttttttgtttttaatttygatttttttaygttatttygttaaaaaaaaaaaaaaaaaaaaaaaagaaaaaaaaagaaaaaaaaagaaaaaaaattattttaatttaygtttgtaaatttttttggaaggatttttttttttttttttaggttgggygygtttggtgtaagattttygggattttyggttttgtttttttttttttttttttttttttttttttttttttttttttttttttttttttttttttttttttttttatttttatttttattttaaataaaygagtttttaattttygttygttttygtygygggtagygggyggyggaggtagygtgyggyggtygttaggagttgggagtttagggygttygtttttyggygtagtatgttttagtyggygtttaagygttgttttattatygagtygttggtggttaaggatagttttttgttygtttygygtttygaggattttattygtttygyggtatttagttaygttaattttagttttataaattygttttttaayggtttttattyggtygtygtygtygtygtyggtaggggygtttattttaattyggatttggtgttygtygaggyggtttygtattygtttaatttygtygtgttagtgtattyggtgtygtygtygtaygttttggtygtttattttttatttttttygtattygttatattttttattygtttygtagtagygggattygtttattttttatttttggtttatttatygttatygatatttgggttatygtttttaaggtaygtgttaygtygyggaattgtagygygtygttttygtygtattttttattgttttyggtttgtttygggtgggygtttggtaaggtttgggyggaggttttttyggttygygggttagygygttttgttgggaaattaggyggygyggggtygggygtggtgtygatttttagttttygaagttaygattggtttggagtgatggtttgygggtygtttgattttttgggaaggggtgygaayggagaagttgttttttagtgygttygaattagagtaggttgggttgtgygtgttyggygtygyggagtttagagttygygggatttttaggtttttggtattttyggtaatgtttttaatygttttggtttygaggggygyggataggattyggtygttaggtttgttttygattgygttygattttgtttattatttattttgygtttttttagtttagattygyggttttttagttttttatttttttttggaggygagaggattttygygtttygggagaaaagtatgggatttgtttttttttttttgtttttyggaggtttggggaggggygggaattygtgygggaggaaagttttagggtttggygttttygtygygatttgtttaattggggygtygagtagttatagygggaaggtaggttyggtttggtttttgtttttttttttttttttaaaaaaaaaaaaaaagaatttggttaggaaattgttttagagggaaatatttgttygtgtgtttttattttttgygatattttttatttgtttgtttttttttgggtayggggtgggaggaggagagttaaaattttagaaaaaggagtaattagtttayggattggagttagtaaaagatttattttyggyggtagtygattaatatttygyggtttgtttatttattaatttattgygtttttgtyggagtttagaatygggtagatgttatttttttttttatattttaaaaaattaaattaaaggaaaaaaaatttaaaaagttttttatttttaatttygaattggatttgtttgtattttgtttggattgtyggtttgtttttttttgtttgggttttyggtgaatygattttttatgttaatgagtgaatttaaaattttgaggttttgtttgaaaagtttagggttgtttttttttattygttattagttatgtttatggtttttttattagattyggagtygttgggatttttttgygttatagattgttttggyggtgtttgtaagtyggtaatttttygggtttygattttttygttygygttttttttttagttttygggagtygggagtttyggagtttagttygygagaggtagtagyggttgtagttaagtatattygtyggttagatttttgtttygatygggttttaaygattygtttygtttttatattttttyggaggggtaataaaataaataatttaaaaataaatttttatgaaaattttggagagtagttygtygtttttttatygtgggttaaagtttttygagaggttagaaagaagagaaagtagttttttygggttgtgggygttaattttttggttaggttttgyggtttttttttttgtttttagygttyggygaggaggtggygaggttygyggygttagggyggttgyggagtyggtygaggttaggagtttggggattggtttttttgygatagyggttggttgggtgtygtatyggtggagattyggygtttygggtygggtagttgagtaggygtttttttygtgagtttttgggaggattatyggttttygtaggtygagyggygyggttatgygaaggttttgagtayggtgtygggttagttyggttygggagaagtgygyggtttyggttagagtagttttttttaatgggatttttgttgtgtttttygtagggaaygatattagtttygagagtttttttttgtataaygygttggttygaaagtttaagyggattygaatygtttttttttygttttagtttttaaggttggaataygtttttgagaagaattattaygtggtgggygtygaaaggaagtagttggtatatagttttagttttayggaaatttaggtgattgyggttygggygygaggaatttatttaggygtgyg

SEQ ID NO: 6188 - DNA, 3292 bp, synthetic construct
  misc_feature 1..3292: note = Description of Artificial Sequence: Synthetic polynucleotide
  source 1..3292: mol_type = other DNA
tygttgtygtygagaygygtagyggatgtygttgtttgtygyggyggaggaagttaygtygttgygttttyggtttattttgtttttattaaagygttagttagatagttttaaaygttagttggtyggagagattttttgggagaaagtgttgtygtyggggttatagattyggagttgattygygagttttgggtatyggyggttagagtagaggggtgttttttygagagtagtygtyggtgtygagaagttgttgttttagtagttttatygagtgaygygygggttttggtygggttagygygtataygtatataggtatatttatttttggtttygggggaaggtttatttttyggttttttagggttaaaggttaaggttaygyggatttttgagttygaagaygtagtgygaggatttatatttggatttttttattatyggttggatggtgggtggggaatttaaatttttttttttttggtttygttttttttagtaggttttaggaaaaatatygaggtygtyggattttaaagggtaggaaaatgatgagtttttygagggtygaggttaygttttgttttttgggtyggygttgygtggttttttagttgygtgggggyggygggtttttgtttagttttagggggygggggagyggtagttgygagygtagataatttygaggtgattygggagggtttggttygttttttttttttttygtaggtttggyggygggaagygggtttttgygtygtaggggggagaggtaggygyggttttygggttygyggtygttagtgygtttyggttaagggygtygtttgtttygygtttttygttygttttttgygttygtaggagygtttygagtgtttttttagygggagttaatatttttttgtgttaataggtttgtttttatttgttgtttaattggattatataaagttaataaygggygggtttttatagttygaagttaaagygttaaaattygagggaaggygaggagggggyggtggyggaggyggttgyggggtyggggttyggttgagttttygtttgtttaattttatttgttattgtaygygtttaatygtygtatatttttygtatttaatttggatgatattttgattttattattagtattyggygtyggattgaygtagtttygagtyggggattgtttttgttgtttttttygygggagtygtagtygtagtygagtygtttygatttttyggtgtygyggtagggtygtttttygttttttygtattttttttttatgygagttygttygtttgggtttttatttygttttttygtygttggatttgygttyggggyggttttygattttgygtttygtagttgagtttygtttatggtttgattttyggtttttygtttgttygtttygtygttygtttgtttygttttttttttttyggggattyggaggagaggggattatgtyggaattygggtyggaygttgtyggtatygttagygtatagttttaatygtygtygttttttttattygtttttaaggagttttygttttttattaagaatttgtttaayggagattattatyggtygttttttaagttttagtygtttttayggaygtttttygygttagtttyggttgtygtygtygtygtygttgtygttgtygtggyggttaagggggttttggagggygtygygggtttygygttttygtaggtgggygatttggttttttttygttttgagatttyggygtagaggtttgttttgttygygtattatttggagygttttttagtttggtggtatttttatattttgattttygtyggyggttatttttygygatttgaaggtatygatttttttttgaattttygttgtttttttgygygttygtttygttttygtttygygttgttttttttygtagttttgggattttagtattygtaaattttttgttyggttagtttttttyggtttttagtttgttttygygttgggttgygttgttygttaatttaattttatttggtgagaaaagaagtggaattggagtttygggtayggtgtttttygggaaaagtggtttygggygtgaatagggaggtttyggayggtyggggtttgggatayggtttggaaggagggggtgattttaatgygtttaagtygaaagggaatygttttgtyggtttttggygaggaagttgagggaatggaaggaggtggtygygttattattatttgtttgtttgttttygggaggagggggattttaggattyggygttttttttttggtttagtygagaaggaggtagttygygggaatggtgaggttttatggtttgggatttggaggtyggygygggttgagtttgtygtttttaggygtygggtttygtttaaggttgtgtyggtgtgtatgtgtgtgygttygtttgtttgtttttttagtttyggagaaggttttgttgagagatttttttttygttttyggtatagatygygatttttyggagttattgtttaaggtygatttygattataaggagttggattttaagagttyggaygagattattttggaggagagygatttygaggaaagtaaaaaggaaggygaagyggygttaggygyggtyggggygagygtaggggyggyggyggttatttygggygtagaagattggaagaagggygttgaaagtttagagaagaagtyggygtgtygtaagaagaagaygygtatagttttttygygtagttaggttttttagttygagtttattttygatatgaagygttatttgagtagttyggagygagtyggtttggtygygtttttgtattttatygagaygtaggttaagatttggttttagaatygtygtaataagtggaagyggtagttggyggyggagttggaggyggttaatttgagttatgtygyggygtagygtatygtgygggtgtttattttttattaygagaattyggyggtygagggygyggyggttgtagtygygggggtttyggtgttagttagttagtygttgtttattttttygtatttygtttattattygtattyggtggtttttttygtgtygttgttayggtyggtttgaggttttagaggggtgggggagggagygttyggtttttttgttyggatttyggaggagattgggtygggtygagggygtygagaagtttagyggtttttaggaattggggtttgggygyg

SEQ ID NO: 6189 - DNA, 3753 bp, synthetic construct
  misc_feature 1..3753: note = Description of Artificial Sequence: Synthetic polynucleotide
  source 1..3753: mol_type = other DNA
gygyggagattygtygtttgyggaggygtygagttattttagtttygagtttygtatygtttttgtttttggagagaagggtttaaggggtttaaggagtyggagttgtygtagtygttaggaattygggttagaatttgtagttgtttttagttttggttgtttttggttagaygtygttgatgttygttaggttttyggygygttttgggggygtatyggtgttgtgtgtttggtyggagygttttgaaatttttyggggtygttyggyggygttgygattggtygygttygggtaatttttatgtaaatgaggtygygtygttttygygtygtyggagattyggygagttggygggygaggaaggggtatttgtatyggggttgggygggygtatttagagttaggygggtaggaatttttgygtagttattyggtgtttgtatgtttttggygyggaagggaygttttattagtttyggygttttttttttttagatttttttttygtttttttttattgtttgtttgttgtattattttttatttagattatttagatygtttttaaagggagtttttggtttttttygattttttatgaatttaggatgggtagtaaagaagatgygggtaaggggtgttyggyggtyggtggygtttttagttttattatttagtttattttgggygggggtttttyggaggtatygygggagttygtyggttggttagttaggaagygtagtttgttygtgttttyggaggaggaggagtyggaygayggttggaaggygttygtttgtttttgtttagattagtayggttttaaggagtagggttttaagtattatttttttattttttttttttgtttgggtaaggatygtaygtygttagtgtggtagygagygagygygaggggagggaggttgagygtttygttaagattttygygtygggttttttttggttagagttgyggtagtygggggttygggatygyggggagaggggygygtattgtggtgtttttttygttyggtgggtttttgggagtaggygaatatagattygtgtyggtttgggttttttggggaaggttgagttgttgagagagtggattatagygagagggataygyggtyggttttatattyggttgtttttaattattgtatatttggtatttttttttyggataygaggtggagatttgtaagtygggtttgggtagtttgtttttatygtaatttttttttgagtttttttttttattygtttygtatttttgttttttttttttttttttttttggaatgattagtattttaagatgattgataatggtgtattttagagayggtttttttttataatatttgaygaaggggagttttgygttagtttttagygtgatttttaaataaayggtttgtgaaatgatgttattttataaagttygaggaatttttttagtttaattattattaagtaaattygttttttaaaattatgttaatgtttttttttttagattttttttttttgttgtttttggtttatttataaaggtgggagtatagagattttatattttaagtagttgggttttttttttgtygtttttaaaggayggggtgttgggtttggggggttagtgagagggataagaggaggggattggtaaggtgggattaaggttgtaggygtttgttaatygtttggttttagggagagttggyggttttygaggttttttaattaattttatggtttttttgtttgttttygttttttaggtatttttaagggtagyggaggttygggttygggyggtttggagygtaygttttttttttttttttygtattyggattttaaagaagagaaagagaggtttttgttygygggttygttttygtyggggttygagyggtygygggayggyggygttgagyggtaggtyggygyggttaagaagaagaygygtatygttttttygygtagttaggtgtattagttygagtttattttygatatgaagygttatttgagtagttyggagygygtttgtttygtttttagtttgtagtttayggagatttaggtaaagatttggttttagaatygtygtaataagtggaagyggtagttttyggttgagttggaggyggttaatatggygtaygygtyggygtagattttggtgagtatgtygttggtgtttygggatagttygttgttgygygtgtyggtgtygygttygttygtttttttygygtygttttattattygggaagtaatttttyggttttatttttttataatttatataataagttygattattgatyggttygtygtttygygtygtttttagttgttygtagagtygggygygtattgtattgtaagtagggtttyggagtaaggyggygtgtttttagaaatatgaagaaatatattatgtgtatttattagtttttatttatggtttttgttttattttttgttttgattgtttygggtatttattggtattttttaagttagagagtttgttttttatttagatygaattagtaygttttgaaaattattyggagtgagatgttttygggtggtggtgggaaagggagttttggttagataggttgtggttggtagggaaaaaaattaggaaaatatttataaaattaggtatattttttttttatatatatatttgtatatatgtatatgtatataygttyggttaagttaggtttttagaggttttggataattattaaattgttttttttygttttttttatttygaggatggtagggaygaaaaggggagagtttagatttgtaaatatttttaaaaagaaaaaaaaataaaatattttaaatatttttgttaattttggtgggtttggttattyggtatgataaygtayggaaggtttttaggtttttyggtggaaagatttgtatgygtttgtttgtggaagtttggttygttttaygtggagggtgggatyggggttaggggttaaaggtygggattttggygtygtttagattgtaygtggttggagttgttygtttatttttttttttaaygtttagaatygtygygygggttggggygtatttyggttggaatttagtttaagagttygygyggagaaagataaagattgggaggtaggtttygttatttaagygattgttttttgggaataagygagttgggtgtttagyggtatattttyggtattgggttygttttgagtttggttatagtagttttygttatgatatgttttgtgtygygtattttttttttaggggtataaagtaggygatggygttgtttgtatttagtaaagtttttattttgttygtygygagtttggygygattagtttgtygttgygtttagttattyggtyggtggtagagttatgtgtttygygyggagagggaattgggygyggtgaggtagttttgyggtttaggagagattygaggttygggattaggtaaagaaggtgagggaggtaaaggygtttttttatatttttttgttgttaatagtttgtattggtttagygtgtggttggattatyggttagtaygyggtygtttgttttgaatggaattttgaygygyggygggggygtttayggattttttygttttgatatttgyggtygygtaggggttgggagggygttgtatygagagaatagtygyg

SEQ ID NO: 6190 - DNA, 829 bp, synthetic construct; identical to SEQ ID NO: 6179
  misc_feature 1..829: note = Description of Artificial Sequence: Synthetic polynucleotide
  source 1..829: mol_type = other DNA

SEQ ID NO: 6191 - DNA, 1328 bp, synthetic construct
  misc_feature 1..1328: note = Description of Artificial Sequence: Synthetic polynucleotide
  source 1..1328: mol_type = other DNA
gyggggtygttgygygtttttttaagtgtgttagygggggaggyggggttggaaaggaaatttggtgaagggttggttyggagtttggggtggggatatttattgygggatagggttagtaagaggattygataygtatygtttygagtgataygtgtaaatgttaagatatagagatatttgtaaatgttatttaagagggtgaggaygggggagyggtttygaggttgtgtttttyggggtaggtattggtttttgtggggttgygggttaagtgtygtttttttttaaggaattggtatttggggggggggggtyggtttygtygygttggaagygtaagtttyggggtttyggagatgygtyggggygygtygtttttyggggtagttttggatttyggygygtttaggygtagygtgyggtgttttyggyggggygggtagygagtygttttagttyggygatttatttygggtttygtagggygygagtagagtatyggttagggygagtaggagggygygggygggggataygggtagygggygygttgttatygtygtyggtttttagtgtagtagttttygggttyggyggygagygttgtattattttaygygggygtygagtyggggtygggygtygygatyggagggattttttgtttyggygagttagtttyggagttttygygtagygttygygtygtygttgagtttttttagttttttatttttaaaaaagttttttttygtgtgtgtgygtgygtgygygygygygygtygttttggtataagttagttttgatygttgtaataaatgagtaaattgttygagttggttyggggattaggaagagygttagtgagagaaggtaggtttgtgaaatggatttayggttagtagttatygtttttattatygyggaataaattattgtttttttygtattttygttagttggyggygtttygygggttttagagatygttygggttttttygttagggtttygtttygagtygyggttygtttattttygagggtgggyggtttagaygtggtttagtggygttygggygttyggagygtataygttttygttttaggatgatgtggtygtagggttyggggygttyggttgttaagygtatatgyggyggtayggtttagttttttaggttgaagttggaaaygatgattttgttattygtttttyggttttttgggaattttyggagtgygggttaggtttttatygyggtttatagttyggygygygatttygttyggttttaagygtttaaaggggtatttttygttyg

SEQ ID NO: 6192 - DNA, 2957 bp, synthetic construct
  misc_feature 1..2957: note = Description of Artificial Sequence: Synthetic polynucleotide
  source 1..2957: mol_type = other DNA
tygtttttttygtataggtgttygattyggagttygggaggygggttttttttttaggtatttagtttagygttagtttgggtttatttttygttattttatagygyggggagtaggggaggtygaaagtygggtagtttggggggtygggataattygggttgtagtaatttygggyggtagtaggattggagagttggtgtyggaygtattgtagagaygtttttgttttyggygygtttttygatatttagtagagagtttggygtttttygttttgygygttygaggttatagygyggagaaatttggyggggtttyggatttttyggtttgggaaaagygatgattgttttgaattgttggggygttygaaatttttagggtttygatttttygtggggtaygygygatttyggygtagatgttagttygttgtttttygggttgagggagygaggattttagaygattttagggtygttgtttaggtttagtttygygttttttatttygttatttygttttgyggttttagtttggagatttayggattttattgygattttttgygtagtgtagtygttttttatttttagtttygagtttygggtaatttaggggtttyggygaggygagtttttttggggygagatgtttygagtygagtaaaggggtygygtattggayggggtttttaagttatagttttgggggttttgaggagtygtggtayggtttagggtagtyggggttgyggggttygtgaagttagaygaggttayggatttagggtttttgtaattaagatygygagygattgtggattygggayggatygtataaaggaggaagggggaattagaggggygttyggtttaggaygtgttaggtttgggyggggyggaaaattgatattagggygaggataaggatttygtttttttagggttgttaggggaggggttygttatygttattttttatgggttttggtttygayggtgtttaaagggyggagggttgggtygggttggtygtattygggygttgttggyggttaagttggatgggtygttagtgagtttyggtgyggtatygttggtttaggttygggygyggttggatatggttatttattgygaygatttgggttttttttyggtttygttyggttaggtttaggttatygygtatttttygggttatgagttaggggatttgggygyggtgggygggggtttttttttgtgggtgaaygygttagygtttagttttaagttttaygtttygggtttygggtttgygtygttttaygyggtttygagttayggggttttyggttygtttttyggygtttygggyggtttggygggygtygatttygtttggttgagttttttyggttagtaggagttgttgaggttggtgyggtygttttatttttattyggygtttatygttatggttatttagagygygtygttgyggaagttgaygtttagttagatttattagtaygtggttggtaatttttttttttataagygtagtaaggygggttggtagaattttattygttataatttgtygtttaaygattgttttaagaaggtgtttygygaygaggaygatttaggtaatagyggygygtyggttygtttygtttaggattttttattttttygtygggtygygggtatttygggggtgggagtattttagataatttaatttttttttgygyggttggggatattyggggaggagggagaaggggaagaagtgtttgggtatggataggtttttagatagyggttgagtttattataggttygygtttatagtgyggyggtttyggggtttttaatttttgtgygttttttyggaggaagaagygggagagttagtaagttgggtgattttgggagtgatttaatttttttgggttttagtgttttatttggtaaaatggggaagatagygtttattttaaggatgggtaaaataaataggatgttygtttggaaagttttggagtttatttgggggtttggygtggtttgygttgtttttggtagagyggttggyggagttttattattagtatttygtaggtttttttttattttaayggggttyggttttttttagggttttttttttttttttttttggattgttattttttttttagttttgttgtggaggtttatygggtatagagtgttygttaagggtggaatgggggygaggatttagattttttgtaagggttagtaggggatttttttgaagttgattttttygttggtttatattayggttygttaaagttygaattttttgaattgggttgtttttttttttgtaggtaaaggtaattattggattttggattttaattgygagaagatgtttgataaygggaattttygaaggaagaggaagaggagagttgaagttagygyggtygtgygttygggagttaggagygtgggaggggtygaggygttagygttggagttttygagygyggtttgtttggatttgtaggtttygttttttttattygtattygaggtygttatttgttttttyggtttygtttttgttatgagygttttggttggyggttttggtatttttttygggggtttggygggygatttttttttygggaggyggttatygatagtygttatttaygttttttagatttttaattttttttttggtttygtttttggttattagatygyggtygtyggttttygttttagttattttttttatagtygggaagggatygaagtttgaagggaggttggaggttagtygggtgygggtttagaggtgttgagtttaggttttyggttttttttggtgatagttttaygtgttggygttgaaggttttggtgttttgggaggaagygtagagtygggggyggttyg

SEQ ID NO: 6193 - DNA, 1860 bp, synthetic construct; identical to SEQ ID NO: 5965
  misc_feature 1..1860: note = Description of Artificial Sequence: Synthetic polynucleotide
  source 1..1860: mol_type = other DNA

SEQ ID NO: 6194 - DNA, 1422 bp, synthetic construct
  misc_feature 1..1422: note = Description of Artificial Sequence: Synthetic polynucleotide
  source 1..1422: mol_type = other DNA
tygtgtagttygttyggyggygttttygggygagggtttggtgttggggagygagygyggagygaggtgtttttttaaataygttttgtagtgtgayggyggtygttyggttggaagagttatttttattttgyggtaggagttygttygtygttatygttygtttyggtttttatggttaygygtttgttttyggtttygggttttygttgtygtygygggaggtgygygtagaggyggyggygttgttggtygggttgggtygttygtgygyggggttgtgatttatyggtyggygtygtagtttygtaatttgttgataattyggttttagttyggtygttgttttygygaatggagagygggttttyggyggggggagygtagygygtttgttttygggagygyggttyggtygtttyggtagtygtttyggttatagtaggtgggaaggaygygygggtttgggyggygggagggaygygyggggtygyggttyggtagaaaagttygygtttygaggtgatattggtygygaggaaagtagtttygagtaattttyggtttygttggggygggaggygttayggataatttagggttttygtttygygygttyggttyggagttygagttatatttaggtagagtaggygtygyggtygggttggggygggygggttattyggtgtyggttttyggtgtaaatttttyggygygtttttggttttgtgtagttygagatggttgagtttggtttyggagtygggagtggggygtagattgatttttaaatatggagaaggagaygtatttgtygttggygygttyggttygagttttttatyggtttttatyggtatygttttygttagttttaggygtagtttttaggtygttygyggaggggagggagygataggggtygyggttgttttttggyggggtyggggttgygagttgtttttygyggggatttttygttygtttygttgatygtygttgtttttatagatgggagtagttttyggattgygttygtttygtygyggttattttgaggttaggggttygggagygygattttttggtygtygtttgggattttgattttttagaggttatggaggttggyggggagtagggygttatttgatygtttttttttggaygttttttttagyggygtttaygttttygtaattttgtagygtttatggtgagtaygggggtttygggggttttgtagttgggggttaggtygttgygggggggyggttattygtatggggatttttaggttggaaaagttgtggaatggygagttggtgatygggttttygggtttagtgtyggggtgggaggttttgtggagtgggggtyggggataggtygygtgtttgggtatttttgtttttygyg

SEQ ID NO: 6195 - DNA, 1479 bp, synthetic construct
  misc_feature 1..1479: note = Description of Artificial Sequence: Synthetic polynucleotide
  source 1..1479: mol_type = other DNA
gyggttttttttaagttygaagtagggattyggttttgygtatttggygggtgtgtttagattgtaattttygtattaggtatttaagaaygtgttttggatatattyggyggtgggagygggtgtttggtttgtattagggatgaggggtggagtagygaaagygttyggagygygtatttatttatattttttaagttagggygyggtygttttgggygygaggttttaagttaagtttygygttyggttaggagtyggggagtattttaggttttyggtttggggtygtygttattttattttgyggygygtatttttgatttggtttygtttttyggyggtygygagtagygggyggagygtaagtagagaggygttttgggttgtgyggtatygttttttttyggtgtttggggagggayggagggatygggygggagagagagaaagtttgatygatyggttggygaagagttgtatgtaatyggtgggaggtygggtyggttgggtttggggttygggtttaggttygtatygtttttyggtaggtttttggyggtgagygyggayggttyggaggyggyggttttgagttggtaggyggagggttgttttttgygttygtttgttyggygyggttygaggatgygggggggygatgttyggggttagggaygygttttgttattaggygttgtagttgttggtygagttttgtgttygtggggttttggagtaygatagttgttaggattttatttattatttgygggatygtgttagatttyggtttygygatttaggtgagtgtygttatygtygtttggagggatttaagggttttgggttgggatttggggtygtatyggggtttgaggtagaatagygaygyggattgggagagggyggggggyggttatygagttaggagagtgattaagaattagygtattgtggtttgatgttgtaattaggyggggattygggyggtggttattgtayggaggtygatttygggtyggttagggtagggttggagggattaygttygttatttgygtttttatygttaaggtttttgggggyggttttttagtttygagttaygttttttatttttygggttatttgtatttagagygaggggaggtygyggyggtttyggagtygtgggaagggggaygaggtygaaggaaattttgggaagttgggagttggggayggtttygggttggggtygaattttatygggtgttgtttatttttttttttaagygtttagtttttttttttggtatggggtgagaagggygggaygygattyggygttgggtyggggatagggtgtttttggttttgggtagaygggtttgaattygttttyggygggtygtayggtatggaggtggtttgggtttgggygttaggttygattagygattatygtyggttaygatggggttygtagattygtyg

SEQ ID NO: 6196 - DNA, 446 bp, synthetic construct
  misc_feature 1..446: note = Description of Artificial Sequence: Synthetic polynucleotide
  source 1..446: mol_type = other DNA
tygttattygttgataataayggaatygtgggtattggttttttaaygtygtttygttygttttttttagttagtttggtggatatttyggtgaaggttgtagatttttagagttattttttttttaagtagygtttttygtatttttyggygtygggaagtttagagggagttggtttgtttttatttttaggtgtyggyggyggtttttgtygtttttygygggataggaaggttttgggtagtagtagygatagagttaggataagtttagaagttagagygattttttgtattgtggagtaygttatgattgtttayggtggtygtaggtgtagaygttagtyggaatyggaatyggaatyggagtaygggttgtygttttygatygaatygygggyggygyggayggygtygygygagggataaggtgygygaggygtayg

SEQ ID NO: 6197 - DNA, 2991 bp, synthetic construct
  misc_feature 1..2991: note = Description of Artificial Sequence: Synthetic polynucleotide
  source 1..2991: mol_type = other DNA
gygygygtagttagygtttttygyggatatagtagtygggtgttggagaggtttggaaagggygtgtyggagagttaagtgtagtygtttagggttgtyggtygttttttttttttttgttyggtaggggatttagygygtaygttagtgtggaggggygggttggttggttagtttgygggtttttgyggttatttyggggatttttttaagtttygtttygtagtgtttttattggtttyggatttttttttttttagttgttygtttgggtttyggggygtttaggttattayggataaatagtttagggygtttggygagaagttaggggtgaggaagttttggggygttgtygtygttttttttaattataaattaggtyggataggagagggaggggtgggggatagtgggtgggtatttagattgttagtattttgttatttatagtyggggttttygagyggtagaaagtttyggttattttttgtygtttgggttgggygaagttaggatygtgtygygttatygttaggatatggagttattgtygttatygtttygygaygtagatttgayggttttygayggttttttttgtttttttgttataayggaygatttttatgaygattygtgtttygatttttyggatttgygttttttygaagatttggattygygtttgatgtaygtgggygygtttttgaaattygaagagtattygtattttttygyggyggtgtattyggtttygggygtaygtgaggaygagtatgtgygygygtttagygggtattattaggygggtygttgtttattgtgggtttgtaaggygtgtaagygtaagattattaaygtygatygtygtaaggtygttattatgygygagyggygtygtttgagtaaagtaaatgaggtttttgagatatttaagygttgtaygtygagtaatttaaattagyggttgtttaaggtggagattttgygtaaygttattygttatatygagggtttgtaggttttgttgygygattaggaygtygygttttttggygtygtagtygttttttatgygtygggttygttgttttygggtygyggyggygagtattatagyggygatttygaygygtttagttygygttttaattgtttygayggtatggtaaggtygggattttaggaagtgaggaagttagggyggygttygggatattagggaygygttttygagggyggggagttggttttgygggaggtttgggttaggatttttttygagagagaggatttttttgttttgggtagttgttattggggtagtttgttttggaagtgtgygggtaagygttygagttgttttattgggggygttattagaatattgtagygygaaygtgaagatttttttttttatttatttttatttttaaaatgtaaatttgygttttttggtgattgttygtttttggtttggttttgtatgttgtagattttattttttatttattygtaattatttttttaattaggataggtttgggttyggaattagagttttaggttagagttagggagggggyggttataggaattggtgttygggtttygagtygtttygygggtttgatttagtygtttttgttgtttgtagatggattatagyggtttttygagyggygttyggyggyggaattgttaygaaggygtttattataaygaggygtttagyggtgggtatttygggtttttttttgttygtttttttttttttatggagttgttttggtttttatttaggaygtttttatttttatttatataygtttatgttttgggaagtggtgtaggagatgaaatattaagtaagtagttttttgttttttggattgtttyggattttaattaaagtttttagtttttaatttgttttaaagtattgggttygggggtgggaggtttgtygyggttttatttttgtttattaatygagtttttttygygtagaatttaggttygggaagagtgyggyggtgtygagtttagattgtttgtttagtatygtggagygtatttttatygagagttttgyggygttygtttttttgttggyggaygtgttttttgagtygttttygygtaggtaagaggttgtygtttttagygagggagagagtagyggygattttatttagttatyggaygtygtttygtagtgttttgygggtgygaattttaattygatatattaggtgttttgaggggatggtggtygtttattygttygagggatggtgtttttagggtttttygygtttaaaagattgaatttaaatgttttttttttaatagygttttaaaagygattttttttgaggtaggagaggygggagaattgaagttttygttttygttttatagggtaaggatatagygyggttttttttaygtagtatttttttyggagatttattgygatggtygtttygtgtttttyggtgggttagagttgaattttgaggggttaggtttagttttttygygtttttttttatgggggtgagattttygtagatttaagttttgtttygggatgtatyggttatttgggggggygtgagatttagtgtatttyggttttaaatgtagtaggtgtaatygtaatttatttttaattygtttttyggtttaggattattttttgtaatatttttgtaatttatttttgtaaataagagttgttttgttagagtaggagtttttggggttgtatttatttttgaggtatggtgtgtggtgttatagggaatttgtaygtttatatygtaggygggygagtygygggygttygtttaggtgattaaaataaaggygttaatttatatygtygtggtttyggttttttttggatatgggtgtgggattyggaggaaaattygtaaattgggttagttgttttttagygaygtttgtaggyggtaggyg

SEQ ID NO: 6198 - DNA, 928 bp, synthetic construct
  misc_feature 1..928: note = Description of Artificial Sequence: Synthetic polynucleotide
  source 1..928: mol_type = other DNA
gygggggygagggggygagggttggtygttygtgaaaggaaaaataaattttaaggaagtaagaaatyggaygaaaggattttattttaagtgatttttttgaaygygtttttttaaatttygygatagtttaaggagttgygyggygyggyggttgyggttaagatttgtgattaatgttatttgatttgagtttatggggttttgtgygttttgttatttattgttatgtygttatttttaagtttatttyggagaaattattygygttttttgttttaaggttgagttttttgtttattttttttttaagagaaaagaagaygggaggggaaaagagagaatyggagtttttggtttggggtttaaggtttttgtttaygttgygggggaggtygtagtagattyggttggggtttttygggtttaggtggttaaagttgtygaaatttgttttggatagtagaaagagygtgtyggaaygtattttgggggtttygtttttttygygtaggggagagygagtatgtttttgtttygggygtygtgyggtygtagtagtagygyggttttttttagtgygagtygtgtttggaatgtttygggtaagygaagggttagtaagygaggygaaayggatattataaagtagagagtggtgtgagttttttygttttttgaaaagatggtaagttttygtttygggaaggttgtaaygttaaggttattttttgtaggtttyggatttttagttttttatgttttttgtyggagtagttaatagagtgagagygtattttggaaagattggtyggatgtygggyggygatagggaaaagygttygaygtttggttttggggtggggggtgtggggagggggggtagggagttaaygggygaggygaaggaggagggttgygaggttyg

SEQ ID NO: 6199 - DNA, 1267 bp, synthetic construct
  misc_feature 1..1267: note = Description of Artificial Sequence: Synthetic polynucleotide
  source 1..1267: mol_type = other DNA
gygaatttygagtaattgtttttygagggggttygtgygygttyggtggygtygtttyggtttgggttttttygaggaaaaatatttattygygagggttyggyggtttttygattyggyggggatgaattgtggtaatttyggtagtttttatygyggtgyggaagtaaagagggtaatattggygattgyggttyggaggggttggagygygtgaagtygtgggggygtygtgygtttttygttttttygtttyggtygtaggttttgggatttygatttyggtgtttygggtgatagyggttgyggygtttgtagtttagattttygtagttttgygggygaaggaggygaayggaatyggtttttagtggggagygtaataagttatagtagttaaatttygygtttttgttygggtttttagaygaaygtagtygtagyggggggtygggtttygagttttaygtygtygtygtygygttagyggtggggggygggttgggggyggggyggtyggggttgttttttygggygtatatgygagygtagtattyggygttgtygagttatttttttygtygttygttagtaagtttggyggttttaagttaggygygttttaggatttaggtttatttgtttttatttagtttyggtgttttttgttaggyggggattttygagagygatgtygatggatttgattttagttgtgtggttttgtgtgtgtattgttaggataggtaagtatgattgtggyggttagagggattygggaaatgggggtgtttatagattayggyggygtggggagatttggagtygagttttgygttggtttggggaayggyggtagygtggatyggtttttgggatttttttgttttgttyggagtgatagggtgaaaatagggatttaygggtttgaagatgttttygttgagtgtttttttttaggggattyggttttaggggygtaggagtgaggggygyggtygagtaggygtatttttttgttgttagtaatyggtttttygttttagggagtygaaattygtagtagggygggttygygtgtttygagttttygaatttgtaaggtgttgtggaaattattttygtygattttygttaggttgggaaggggtagttgygggagtygtattygtagagggagygttttyggttggygggygyggtyggggttygggagggygyggtgyggygagggtagagagttgygggagaattttgggatttygyg

SEQ ID NO: 6200 - DNA, 1225 bp, synthetic construct
  misc_feature 1..1225: note = Description of Artificial Sequence: Synthetic polynucleotide
  source 1..1225: mol_type = other DNA
gyggaagtygtttyggattatgtatggaaggttaattgaaaagattagtyggggygtttgtggtagttttgttattttgtgatagtgtttygtttygggaaattgtatygttaygataaaygggatygtgataaaaygatttttttygtttttatttgtagattatttagaygagattgaattgtatttgtttttttttygaggggagtygygtttttagggtagtygaaggtttggggttgagggggggtttttattaaggygygggtgggggtyggagttttaattygatgagaagtgataggygtttgggggatttgggtttyggtygggattagygtaagtagggattttgyggggatatygtttttttaatagagtaaggtttggtttaygttttyggttttttttaatttttttttattgtttttttttgtttygtaagttttatttatttttttagttatagagttttatttttaggtataggaagtttttyggaaaaagaaaggttgttttagaaagagatygagagagattttttaaatttygggtatagttayggtaatttttagtttgttaatgttaaggygggygygtaaggtygtttaaatttagatttttttttttatttattttaaaaaataataaygtgttagttattttygtagatatygtyggttggtgtttgtttaggagaygttagggttagagygttatttttagtatygaaatggtagagagaaagygtagttttaaatttttttttagaggttaagttttaattattgtgttttttttttagggattgttggygttttygtttattggygatgattatgygtttagaattygatygygaagtaattaataggaaaatatatggtgttaatttggatgtttygygtttygygtatattygggaaygagyggtataaagttttgtyggtyggttygygatttygygtttttyggggtttgttagtygggtygtagygataaaygtttagggttgygygttttggttggggttygttygagagatagtttgyggttggggagtttgagttttaaggggagagtttagtygtygaaggygagtttatyggttaagttttggggttyggtaggttttgtataattattttygtaaagttygttatttttgtgttttttttttagttaygygtttattagtttyggaagtattagggggygatyggyg

SEQ ID NO: 6201 - DNA, 1627 bp, synthetic construct
  misc_feature 1..1627: note = Description of Artificial Sequence: Synthetic polynucleotide
  source 1..1627: mol_type = other DNA
gygtagtagagygtyggagaggagggaygyggaggttatygaggggttagtagggtygyggygttagggtgggggtttttaggyggygttggttayggtttattygygagggygagygygttyggtyggtygygttttttgtygttygtgttygggggtgggattygygtygggagttgtygagtgygtggagggagttaggtttyggttygtttgatggattgatttggagatggatygaattatattatttgtygtgtatyggtttgttttgtttttgttttgttttgttgttgttgttgttgttgtaaggggtggtggygagttttaggattttattaaggaagttaagatttaaggagatagagggatatttatttttataatatttttttttatttttttttttttttgygygtggtaagtttttttttttttttttttttttttttattagtttttttttaatgaggtaagatygtttttaataatttgttaatgtttttgtggygttyggtgggggtyggaatttgagatttygaatygttgtgtgtgtgtgtgtgtgtgtgtgtgtgygygyggtgggggtyggaatttgagatttygaatygttgtgtgtgtgtgtgtgtgtgtgtgtgtgtgtgtgtgtgtgtgtgtgttgttattggatagttgatttattttttaagttgttttttttgtttgtygtgtaagggaygygtaaagggttagagaggtttggyggaygygttaaaattggtaaagttggyggtttagggggaggggtaagtggatttggaggtttttttttattgtgtatttttttggaaaaaaagyggagggggtattaagtaaaagttttttgttaggtagagttagttyggygtttttygtatatagttggggttagtaggggttgtttttttgtygggtatagygtttttaggagttagtyggggagagttgagttaaggtygaaggagtygtttgygggtttagtygttttttttygttygttggttttagagyggaygttgggaygttyggggtttggtagttttgygttyggttaggagygggygggygagtattagtttgygttttggagaaggggygtagygtygtagttgaggtyggagtagtttttygygggygtaggatatttgttagtgagygttyggattgtayggttttygggtagtgtttgtyggygaggggygggagttygggtgatttggttatttttattttyggtttaggttyggagggyggtygttttttatygtttttttttttttattggtagagygygttgygggyggattttygggttyggagtagtttatyggttattttatygtttattyggttttyggtgttttttttyggtygttttatttagtaatttttygtgttttgtttttygattggaaatgttttayggaagygttttggatagggttttygttaggygataagagttyggtgttgagatgtgttaygtttttatttttttattaattatggatggaaataaataaggaagagttaattttgttgagtttttttttyggtaaygagaggygttttgtagtygggagggagtygtygttygygtyggtagtyg

SEQ ID NO: 6202 - DNA, 1857 bp, synthetic construct
  misc_feature 1..1857: note = Description of Artificial Sequence: Synthetic polynucleotide
  source 1..1857: mol_type = other DNA
tygygttgtttaggtaaagggattyggygattaagatattttygygagggtttagggygygtttttttygttaggttttagatttyggttttgygttatttttttttaygtttyggygygggygtagttagttyggttttttttaggtttttaagtttyggatygagtgtggggtygtttttttttttyggaaggagttatygtygttttaagtggaagaggagaggaagggggygggggagyggggggyggggagyggaggyggaggagggggagggggatttttttggtttttaygtggttygggygtttgtgaatygygtttatyggagggttttatagygaaatataaaagtagttgggaagyggyggggattygagtttttagygtygggyggagygtyggatagagtttygtagygtttygyggtygygatggggtygaagygttygaagtttyggagtttataaattgtygggttygtttygtygtygggattygggtgtttgggttyggtttgaagyggyggyggygtatyggtatagtygygggagtatgggtaggaggatgyggggygtygtygttatygyggggttttggttgttggygttgggttygttgttggygttgtggggagggtttttgtygtygyggatygagttgttygtttttyggtygttygaagatygatttttayggygttyggttyggagyggyggtttygygttygygtttygtttttttttgttttygtttttggygtgggaygttygyggyggttttttgaaaatttttygggygttgtttattttggyggtyggygyggayggttygtttyggtagtttyggagygagtttaggtggtaygtgttagttaggtagtttyggtyggaggagagygtygyggtgtaygggggygttttttggagtygyggtttggaggagtaggtgttttygggtttttyggaggtttaggyggyggygtggttggaggyggttygyggygttyggatggtggttttggagygygggggttgygggygtagttttaatygattggttygttttgtygayggtattygygtttgygtgygttayggtattaattyggagtagatttagggygaggttttgttttattatttggygygtttgttgggtttttagygttaygtgtygtygttggtattggttygggtggaggttyggggygygtagtgggygtaggtgtaggaggagttgygygttgygtattggatygagggtagygtggtgagtttgataygttggttgtttaattttayggaygtggtggtgttygygttttggygttyggaggayggtygtttgygtttttttygggatgtygggggtgagttggttaattttagttaggyggagttggtggatttagtataatggatygatttaatttttttygattatttgayggttaatttygatyggttygtaagtaatttttttagtttgtagtgggattygygygttatgtagygtgttattagtaatttgtatygyggttygggyggggygttggtttttttggataatgaggygggtttggtgtayggttatygggtagtaggtatgtgggataagtataaygagtygttgttgtagttagtgtgygtgtttygygagyggatygygyggygygttttggagttgtatygyggataggaygtygyggttyggttgttgygtttttatyggygttaygagtttygttttttygagttggtygtttttgtagatttttaygtttagttgttatagygtygtttygattttttygttaagtatattttgtattgtaaggttaagtayggtygtyg

SEQ ID NO: 6203 - DNA, 2423 bp, synthetic construct
  misc_feature 1..2423: note = Description of Artificial Sequence: Synthetic polynucleotide
  source 1..2423: mol_type = other DNA
gygygygygygtttgyggaggggggtggtaaggatttagaaggggagtttattttttttttygagtttagttttggggagtygggygtttaggttygttaggttgtaaagagagttgagagttgtttygygtttygygtagaatyggyggtggaataattagygttttaagtgtgtgtatttgggattagggggygggggagggggatttgyggtttygyggttaattyggttggtgtagatttggggattttagaagggatagtgttygtttagtygyggygattgagggtttttgttygggygtagttygggttagtygygtgtttyggggtygyggtttttttyggaattttygygggyggggtttgtttttyggagtyggttggyggggggygggyggygtyggggaaggggtygttatttttttagagyggyggggygaygttaggyggaagggygyggggygygtaygttttaaatggtattygttgttattygagtttagagtygtgtgggtagtygygggttatataagtygygagtttggtygtygyggggtagayggygatagtagyggyggygagygtttyggagygyggyggaatagygtttttygagtttygtgtttttygaygggttygttygttygttygttttttygaggagygtyggttygggttygygagggtygtygttatttygtagtagatttggatttttygttyggygagttttyggttgttgtttttyggggggtttyggygtagyggtygttttyggagagtttyggygtttygtygttyggtttygtagaygtyggaggygttatggtygttaagttyggygagttgatgggtatttgttttagttattaggyggtgatgtygtatttygtgtgtttggtygaygagttttygtagttygtgyggttygttaagttgtttaagggtyggggtyggttgyggyggtygygttagtttygttttaagaygtagtyggtgattttygaygagatttaggaggtggaggaggagggggtgttttttatggaggaggagaaggttaagaagtygtttttgtagagtttggagtgtttgygtygtagtaygtagagtttgtygttgtagygggagtagtttagtagttgtaaattgaggaatagtttggattttagygatttygattyggttttgtaaggggygtygttygygggggggaygygygygttygyggttygygyggggatyggygtgtgaatttygagagtgttygygttttgttttygggggattygtaaggattygggatygtygtttttygygygttyggattttygtttygttgygaatyggtyggtgygtttttygtygygttygttttggttygggagygtygggagyggggtygtttttttygtttttgtaaatgtttattttttaattttttttagtgygaattttgttgtgagtgtgtgyggggaggygygttygygttgagtyggyggygggtagttattttatgtttttgttygatggtttgtaatttygattttgtatatygttttatygtgttttttagygtatatttatttatatttaygttaatattttygttgaatatttttataattgttaggygtggtygttgggattttgggygtagygyggttgttattgygtttggaggattgatatttatttttgtattgygatggttgaaggtatttatttaaygatttttttatttggatatgtttgtgaggtttttgaaaggagataaataaagttaatatatttgtatagtgtagttttttaggtttttgattttttgtattttyggggtttaggtttttaagattyggggaggtgggggaggaggtggtagggggatgtyggattagggagtygggagtggagttatttttataagtttyggttatyggaaygaggttgygttatyggtgygygggtyggttgtttgtttttttaagtggatttattttyggtttagtgtgtttttgygtttttggtttattttttatygtyggtattygggttgaagtgaagtygtaggaggggyggaggtagagttgaygatggagagttttttttttygtatagtttattttttagagttggggttagggttttygtttygtattygttatagaagaygtatttttttttgygttgatttttggyggygggtggggagatgtyggagttagtaatgygagatgtttgggygttgggattygagagtgggttggaggttagtttgggttggtygagagtgtgggtgygygttygttgtygygggtaggtgattttttgatygtagttgatttagygtagtgtttggygtttttgygttgyggggaaaatygyggtygttatgtttttagtygttttttgygtttyg

SEQ ID NO: 6204 - DNA, 1146 bp, synthetic construct
  misc_feature 1..1146: note = Description of Artificial Sequence: Synthetic polynucleotide
  source 1..1146: mol_type = other DNA
tygtygtaggatttaygttgattaygtttaagtyggtttygtttattygtttygtttatygttaattttaygygttttygttyggataygygttttygtagttttggagygttygtatttatttataagttttygtgtttagttttygtgttttaggagtttatatatatttygatttttaygaagygttttaggtttttattttygygtttaggtatygggyggtygtttttyggggtttattttygttgtagaatttgtygtygaagttygtgtggttgtagtygtagtttatttygtygggggttagtayggtgtagaggtygtygttggygtaggggttgygygygggygygtatagygggtyggyggtggygtygygtaggttttggttgtttagtagygyggggggtygttygtttagttttaggttggttaagaggtygyggaagggyggttygtatttgayggtgtttagygtaagygtygagaggygtaygtygggygggatgtygtttaygaataggtygttggttatttgtatttygygtygtttggagygtatttyggyggygygggtttygtygtttatygttagygtygtgyggygygygtygygggttagtagtattatgtgttagyggtygtyggttatyggygtgtttagttgtagygtggtyggttyggygtaygaaagygtgaagygtagtygtaggyggtygtttattagtagtagttttaggaagtygtagtygtygtygtygtttaggtagagtagtagygygygygtggygttggtgygtaggttgaagttgagttygtygttgttygtygygttygtttagygygygtagygagtttattgttyggggtygtygtygaattttaggtygttygygygygtygttagygttagtagtagtagtaatagtagyggyggtggtgtyggtygttatyggttttyggaygttatgtttayggyggtttyggtttygttyggttttyggttttygtttaggttttagagtygygggygtatggggygggagggggtygggygtttttygygttgagyggggtttttttgtaggtttatagtgttatgggttyggtygyggggygaggygygtagaggtttagatgtyg

SEQ ID NO: 6205 - DNA, 577 bp, synthetic construct
  misc_feature 1..577: note = Description of Artificial Sequence: Synthetic polynucleotide
  source 1..577: mol_type = other DNA
gygggtatagtyggtttttgayggygtttaaggtttygttygtgyggygttgtttattttttattattagagatyggttygtttagygggtaggttttattttaatgttaggttaaagtttttattttttggattygggtttggygttttygttttyggygygtttttattyggyggaygyggtygygtataaggtttagtayggttygygttttygtagttyggtygyggttgaatatttttagygygaagygggtgggygttagtagtttyggggayggyggtttttaggtttgaaagttggyggttyggggttgggygggggyggttattgygttygggagtagttttagtagygataggagttgtagttagggygttatggygagggygaagtyggyggttyggatttaatagaygttttatygatttatygggtatygagttygyggttagyggggtttgagttttttttttagyggggygayggtaygtygattaatgggygttggtttgyggygtttgygygtttttttgtttataggaggtaygtggggygygtagggtagggagagyg

SEQ ID NO: 6206 - DNA, 1721 bp, synthetic construct
  misc_feature 1..1721: note = Description of Artificial Sequence: Synthetic polynucleotide
  source 1..1721: mol_type = other DNA
aygaagaatyggttggttaygtygaagatgtttattaygtttygttttaygggygagagttttagtaggtttgggggyggggygtaggttattgyggggtaggtgatttttggtttatttygtttttyggtttgttygttttyggggattttatttttggggtggggttggggataaagggttagggttttyggygtagtygtttttaagggtttttagagtttaagttgttttttagggttttyggagtttaagtttgygttagtttagattagtttgtttgtgtaggggattttyggyggtygtatttagtttyggatttttagaygygagttygattttagyggttttttagtttgggttaggtyggggygygtgtttygggttttttgtggttgtatygygygttttgtgtttaygggygaaggygttggaattyggygttyggagttygagtttttgaaggygggaggyggygttygattttaggggttgygttgggttgtyggagttaagagtgtttgygtttttagtttygygttagaagggatyggagttygagttygtttyggttttyggggttttygagtaggtgttygtygagggttttagagtgtgattgagygggttggttyggyggtygttgtttttygttttygttttttygygtttggtygygttatttattgtygygggtgttygygtgygygtygtygatgyggtygtyggggagygtttggaggtggaagtygatgtttaygttgtagtagagtygtygtagtygtttgatgtttagtaggtagtygtyggygtygttttggayggtygtttttttgggttgygttgttatyggtaggygygttaaygagagygttattaggtttttttagyggygttttagttyggtttttagygtgtygttgggtgtagtgggtgyggyggygttttttyggttygtttagggygttagtaaggttagtaggatygtygggagtagygttatygyggtygtttygggtttygatatttyggttygagggtygtgygtyggttaggyggttagtgygttygggaagttggggggtagagttgygtttgtggygtttygygggagygtayggtygatttygggtaggagtgygtaatygaggaggtgygggaggtaagygayggggttttygggygtygggttttatttyggttgtatggagyggygagtygggyggaaagygygyggttggagttgggattttgaggagtagtgygygtttttttgagygttaggttygttygaggtygagtygttatatatatagttyggygtttttttttattygttygttttygyggggggtygttygygtttttttgggygttyggggygttgtggygttygyggttggtygtaggtygtttgttaattagggtygggggaagggaggaggttggggattagygtygygagtgttatttggagggatttyggtttttatttttggtttygttyggtttayggatttgttygtttygttttttggyggtttttatatttttgttttttagttagttttgttttttgtattttgtttttgtttgttttygttttygtttttttttttgtttyggtygttttggygtagttttaattygggtattygaagtttttagtgggygtagaagttagyggttgttgtttgtttttygtttttyggaggtttayg

SEQ ID NO: 6207 - DNA, 1721 bp, synthetic construct; identical to SEQ ID NO: 6206
  misc_feature 1..1721: note = Description of Artificial Sequence: Synthetic polynucleotide
  source 1..1721: mol_type = other DNA

SEQ ID NO: 6208 - DNA, 615 bp, synthetic construct
  misc_feature 1..615: note = Description of Artificial Sequence: Synthetic polynucleotide
  source 1..615: mol_type = other DNA
tyggygtttgtygagygygtagygtygggygaggygygygggattagygggtgttgygggygygygggttagaggyggtyggygttttttgttyggtgggttyggggtygggtygygggggtttggggttyggyggggyggyggttttagtagyggyggyggygyggyggtygyggagggaggttgagygygggtyggttgtgttygttaagggttttaggygtygygttygggygtatttgtattttgtygygggaagtaggtagttyggtttggygttggtttagygttggygttttttttggggtatygygggttyggtggattggttattygagaaataggtttatttttttttttttttttttgtgygggttttygggayggaygttttaggygyggygtygagtggaggygagggggttgyggagggggaaggggttaygygggttayggggtttaatttttgatttttygygaygttaagaatgtaggagggtagagttgagggagattttaggtggaatttttaggtggggaaggttgagttgtyggggttgygggtatygggaaggtttagggtaaggygttyggyggtgygtgttyggaatttyg

SEQ ID NO: 6209 - DNA, 1542 bp, synthetic construct
  misc_feature 1..1542: note = Description of Artificial Sequence: Synthetic polynucleotide
  source 1..1542: mol_type = other DNA
ayggaggygyggygttttttatagtygtttttaatgaagggaagygtgtttygaagttagtttyggtgygtttttttttttttyggygtttttttttaaatttygtyggatttttaaaggttggaataggyggtgyggttgtagttygygttgtaatygtaggatatttgatggggyggyggyggygggggtagggygtagtttggaaagaagggggygaaagaggttaaatggtttygttygtttttttygtygggagaattygtagyggyggggtatagggggtttaagggttygtttaaggttaagtygtygyggggggtagttagggggttttttttggtyggggagtagttygggaygttttagggttyggggtatagtaggttttttattattgtyggyggyggtttaaagaggtygggttttagtttygggggttttygtagtayggaggtttyggyggggaataygtygagaggttyggyggtaagtaagattgtygttttygtgtyggygtygtagtygggttttagtagtttaaagaattttayggttttygygtttttttttaggtygtttaagtttaygttyggtttygaygggttatattygtygtygtttgttygggayggtttygtgaagaaggayggaggtagattgygtgttygtagygggatttttttggtttttgggatygtygtggttttygyggggtttgttaygttttttttygygtttttagtgttygtattttttagttyggtygtyggygtagttattttatttttygtyggttyggtattttyggggaygtggygtagygagtygaagagygyggttagatttyggttttgtaagttggyggtygyggyggtttgygaygtttttygtyggggggtagttttgtygtgggtyggggtygygattgtyggggygttaggggyggttagyggtygtttggttggygtgtyggyggygttyggggagggygggtyggggggygyggygtttatgaggtygttgtagygtttgatttgtttttgtaggtatttgyggtggtttatttttygtttygatttgttyggtttgtttagygttagtttgatgttgttggaygtygagttaatgaagttgagtagatygygggtggtttygygtaygttttttttttyggttttygatagtagygtattygtyggagtttyggttttatygttttygaaatagtagtttttgtttagggtttygaaggygttttttagttygttyggggagttttygaagtygaagggtaygaaagggtgygtgttgaggagygtygtttgtatygttatygtygyggttttygggttgttygtagygttgttygtgygttttygttagtttttgttygtygtttagatttagttttygtttyggygyggygygygyggygtagtttattagtttygggtttggttygttgygttgtttttygggggagtttattaggttttgtaagtaaggggyggagggagggagygygyggygatygtttyg

SEQ ID NO: 6210 - DNA, 1542 bp, synthetic construct; identical to SEQ ID NO: 6209
  misc_feature 1..1542: note = Description of Artificial Sequence: Synthetic polynucleotide
  source 1..1542: mol_type = other DNA

SEQ ID NO: 6211 - DNA, 1768 bp, synthetic construct
  misc_feature 1..1768: note = Description of Artificial Sequence: Synthetic polynucleotide
  source 1..1768: mol_type = other DNA
gygygtygtgttttttatygtttttttttttggttygattggttttggttttttttaygtttttagtttttaaattggygttygttttatggttygtgtaggaygttaaaagtayggtaaattttagggygatttttagtagaygttttygaygtatgatgtygagtygttatyggttttygtygttttttgtygygttyggggttyggtttgyggtygtygttgygttttgaagygtatygygtygtyggggtttygttatttygtygttygtttttygggtygggtttttttygttttttttaggygttgtttttattttaggyggtttttgttagttgtaatatagagataaattttygaggyggggagatttttagggtatygggatgttgaagtttygyggtttttatttttaagtttaattygtgygtygtttgygygtggygtagttaatttgggtaagggaagatygtttggtttatagttggttggaaagtttaggttttyggyggtagtagtttyggtygatttttyggtttttygggtttygttagaagagygyggygtaaagtatttatatttttagyggttttaagtttygggygagttttttgggtttattttttttagyggtaygaattgygygygatgygygttttgaaygttttattttttagtttgtttttttygttaggttggaagttagtygygtygttttygtygatttygggygatgttatygtttttygaatatttgaygyggagttyggtattaagagtttygggttaggaagttgttaggtaggggagggttagygttagttgtggaygtttygggatagttttttattttagtttttgtttttgttttyggygyggygtaaaygtaaaagttttygtggtygtagttttagtttyggtggtygttygattttygtygggatttyggttgtatttattggagaagyggyggtttygattttygaggaggyggyggyggttgtttttagtygtggtygttatagttattgttyggtttygttygtagttgttttagttgtggtttttgttygtttgtggtatttatagtttttgtygyggttttygtagtttttttttttttttatttttttaagtatygttygygtagyggtttttygygagagaaatattttttttaaaaaaagaaagaaaaagaaaatgatattttttttttygtygtttttattattattttatttttyggttttatttattttttttttttatttttttttgttagttttygtttyggtgyggggtttttygttygtaggattagygtagtgggaggaggtagaggtgattaggttttgttyggtttgggattttttgttttgaggtggggaggggagaaatgggaagaggtggagtagyggttttagttygttttgyggttgygaggtttagattygagattaatttttttygygataggtgaagttttatyggagtagaaagttgttttatttgtattaagaatgygygttggagayggttgtttyggaggttttggttygagagaaaattagttttygttgttygygtttttyggtagygygttttttgygtttttttygtyggatatttagtagaygtyggaggtygggaggttaagattgggygygtygtaggtygggatygyggtagaggttgttgtgtygatygaggagagggttttgtygtttttatttgttttgggtgtygagagtttattttagaygyg

SEQ ID NO: 6212 - DNA, 2656 bp, synthetic construct
  misc_feature 1..2656: note = Description of Artificial Sequence: Synthetic polynucleotide
  source 1..2656: mol_type = other DNA
aygtttttttygyggtaggaaagtaygttggtgttattttagagttttagagggttgagggaagattygagttttaaaattagtygtttttaggttyggygtygggaatgttttttagttygtygygtttttttygtygttttttttygygygtttttttttttttgygttaygtttttagatygttagttattttygtygtygaggtttttttttttttygtttttttygttygyggtttgggaggaggagattgygagagataagygygagggggagattggagaggggtttggtygtgygtyggygtyggttgtgatggggagttyggagtagttaggyggygagtagtagyggyggyggttgtagttyggagtagataggagagtyggygttttttttygtaggttgygttgtgaattggtttgyggattgggatttygygtttttygttttttttttttygttgttgttttttttatttyggtttttttttttygtttgygaattttyggyggyggyggyggyggygtttygagygtagagygtttttgttygyggttttagtttyggttagygygyggtgggygttgyggyggtagtagtygggggatyggttygttyggagtaagagygtygagtatygggtgaagaagattaygggggaggygtttygtagagtygtggatygttagyggaggtaagggtgygtggggatttgtagygtgatgatttggttgtttggtgtatygattggagygygtttgtyggagtatagttttagttgttgggtgtaaatgggttgygaggtgggttggggaggygagagtygaygaagygygtgggggaaattttttattttgtaaagttttaattttygygtagtttygagtygtygttgttatygttgtaaataggagaagagggtggtttggtttygyggygggagtygggaggtttatayggagagttggttaagtttggggttgaggatttggggaggggttgygaggggggttgyggattagtgtatttattttyggtttttagtygtttttgtaggtggatgagaaggtttaggtggygagtttgtttggtagtyggtgtttttygggygtagtgggggatgtttagatgtygatggatgatgtatttaggggatttygaggtgtaagttgggttatygttaggygaggygyggygtagagagggagtttagtttttattttygttaggaaagggaaagggttattagtttgygggttygttttttaygtttgattygggtttgyggggtttgtggttagggtgagatgtagtgaayggyggyggyggtttttygattggggaygatattttttayggagtggttggggatagagattgtttttgttattttgataaggagagggaatyggaatgttttgygagagtgtatgatttttggygggygtgtgggaaggttgtttgtttttgaaaagaaagtagygygggtttgattatttttaggagtgyggaggagttgttttyggattgggggygagaaygttaggggtattagtttygagtttaggttttattttygggyggttygggaygaattttttttataggttagtgtgtgtgtagggtaagtgtagggggttgaggggygttggyggggaggtagtagaggtggtttggattattttggygyggygygyggtgagygygaggatttygttagtgggagtygttgagttaaagtgtatttggtttttyggtttgtatgatggygagttyggatatttttagttgtgttgtgatttgaattttttttttttttttttygttgatttttgttatatgtgtttttygagatggtttaatattgaatatgattgggttttgyggaaagtaatttttatttattttttatygttttttttttgtgggyggggggtggygggggygtgtttggggtaaggatgtaggggtggtyggagtttggttgygagttaagagagtygtttgggttgttygggatgagaggaataggggtgttttyggggtgtgggtgtgttggyggtgatattttgaggttgtagttygttggaataatgggtttaaattaggyggtggagaggggttttyggaatggaygtygggggyggggaggttgyggagattttgygaggttttygtgaaggattaggaggggttttygggagggagtggygtttgyggttyggagygtgggyggtyggtggttttggtaygyggaatttggtggatttttagygtttyggtygggagttttagttttatttygtygtygtygygygtttaatgggatttagtttygggtttgggygaatttgtagtagtygyggygggagggagggaygttgggatygyggtaatgattgaagttttttttttttttttttttttttttygttttttttygtttttagattttggygygtttgttttttaagttggattttatttttatttataagtgttagataaattygygagaattttttttaattygtttyggttttagttagattagggagggygtttagggggagggggygagttgtttgggtagtgtttggggaggtgygaygygtttattyggggtttgagyggttggggtttttgtgyg

SEQ ID NO: 6213 - DNA, 623 bp, synthetic construct
  misc_feature 1..623: note = Description of Artificial Sequence: Synthetic polynucleotide
  source 1..623: mol_type = other DNA
gygtygtagygttttttgtttataaagttttgttagtyggagaaggtgtagttgttttaagagaagaagtgygaggtattgggtayggttagggtygttttygygttttgttygtyggttyggttttygtggggttyggtggttygtattaaggggaggagatagagtagtaagaggtgagggattattttgtaggagttattttttttttgggagtttgygggtygggygttttttttygttgggatyggagygygtagtyggggtgyggggygtatagtatataaggtygtttygaggagttagggagttyggaygygyggagtatygygtygttygttattagttygyggtyggtaygttagtttygggtttgttggagtatttttatatttttgtttttattaggttgttagggagygtttttgtttattgggtagygyggygtttttygyggygayggtgaygygttttggttttgataagtttggttttttttattttatygggtggygtygttgttgattttaygtttagtygtttttattttygtttgaaattttttygatagggtttygtttygggggtttagtttttagygygtatatattygygtggtgtyg

SEQ ID NO: 6214 - DNA, 1967 bp, synthetic construct
  misc_feature 1..1967: note = Description of Artificial Sequence: Synthetic polynucleotide
  source 1..1967: mol_type = other DNA
gygygtygtttttgttgtttagtygaatttygttttttttagggttgygttgtayggggttgttttttygagtygttagygttyggygttttttyggygygttygttttttttattttgtgygttygyggyggtgggagtagagtyggtyggtttttggggatttagyggtygygttggtgatgggtagygttttttttttaaaggygggyggyggggygggggaggtygyggttygggtggtgtygtygtaygggttyggatttygagggggaagtggtttgttagtttyggtttygggaagagtgaataataaggttagggtagtygttttagatygttatatttttgggtttaataaagttaggatygttgttttgtttttttygttttagaagaataayggtttgtaaaatggggtaaaatgggtagaatygtayggtygttgttgttggtgtgatygttgttgtattttagtygatatgaygttagttttttatttgttaaattgttggttagttgtaaagtttattttyggtygygagtattgaaggatgggagggtygagygtygygttttgataggaggaagtgyggaggggyggagggygaggagggygtgattggggttgtttggtgtgtgygygygygtgtgygygygtgtgtttttataygygtygygtgtttagtgttgtayggggygggagaagaatggtaggtagtygttygaaatatttygttttgttttttttttttgggygaggttttygattttggtaaagtgtgaataatagggagttgggaggaagatagtagtgatgttgtygygggtggygggggttgygtygtygtttagagaatttyggtagtgtgtagggaggtgtattttattttggttatttttatttyggtttttttggaaaatttttttgtgygtgtttatttttttttttagttgttatttttttatttttatttaaggatttgygttttggttttgatggaygggagggaaggaagaaaagtaggggtygtagagagttgggtgggttgggyggatattttgggyggggggygtgtgttgggaagygatygaggaaagtygggyggaggggttgtgtgtygyggtygtagttttaggtatygttgtatttgttttggayggtygattttyggttggggagygtayggggygggttagggagtatttagtgygtttttttygygggyggtataagagtagygttyggtygtygtttttagttaattygggttttttttayggygattaattagtgygaagttggttgggygggaagtygygagaggtttttattgyggygygggtggyggttaggagttgttaggatagtttttyggtgttttagtttaayggtttygtttatttatygttaagagaaatttygttttgyggtyggtttttygtttgttyggtagttttygaggaaataaaatggagattaggtggttatygggagtgtttttggttyggtygttygtgttygtttattttygttttttttaygtygatttggagtattttatygttttygttagygtttattttygygtygyggaattygggtttgagygygtygtyggggagggtattttggtaggtatatttaygygygtgygttgatyggtygatygygggtygggggttttattgayggyggggyggggtygtggtagggttyggagaggaggggtggggattaagtttagttygtttggttttgggttttygttgttatttgggygggggttatttyggttatgttttttttygyggtgttygtgggtgtygygaygygatttgtttatatggggygggggaaggggggtgtttttgagatattttygttttygggtgggagygtgataatggagttyggatatttggtgggttttttgggggatygtttggyggttttttttattatyg

SEQ ID NO: 6215 - DNA, 2558 bp, synthetic construct
  misc_feature 1..2558: note = Description of Artificial Sequence: Synthetic polynucleotide
  source 1..2558: mol_type = other DNA
tygygatagttaaaaaygggtgtttygtttygataatagattttygyggattttttggtatttggtttattagygttygygaattttgtttygggagatttattgaaattyggatgtttaagtygggaggygygtagtaattaggaggatgagagggtygggtttgggttaggaaagyggttttttaaaatagatgttagggggattgtagtttygagttatgagaaaaaagttaaaggygagatgataygtattgaattggggtaaatattggaagaggagataaaattgygtgtttgagtatyggggtgyggggagggggggataaaattygtatttagtgtaaattaaaattttgggagtaggtgggggttgttgygygttttttatttttagtttttttattaaggattttgagtttttatgtatttttgttttttggttttttttttttttttygttyggtyggtgagaggyggtygtyggygttttagtagtagttagatgttaggygaagttyggagygyggagygtggggaagggaggggaagggaggggaggggaaaggaggggtggggyggggagygygygygggttyggttagtgyggggtggtgggygggttgagttyggggayggygygggaggggggagggaaggggggtagttgtgggtagggagtygggttyggtygttagtattaaagatggagaggygtyggggttttgtaggggagggggttyggygttgaygtgggaygyggyggaggygtagtagtyggtggtgatttgttaatttygtagtagagaggagttgagggygatgagagygggtattgygaattgtygggygatgttgtygttgtygtygtgatayggagagtaatagttttttagtaatattttttttygatataggtatatatttttygataggtaygtatatttattttatagtgttyggttyggttgyggtgagtgaggggtygggaagaggygtatygtttagygagygtygygygtyggggtttttyggggttggagaggtttggggggygygygttygtttyggttattyggtygttgggtttgtgttttttttatttggygtgttttttttttgtygttgtagtygtygtygttatyggttgggggtyggttagaagggggagtttyggttgttagtttgggygtagttgtttttttagttttttttttttagggtayggtyggggtgagaggtggggggygtagyggtgtgygggggttgagggygtgagtagaggggtyggggattyggaggttttgtatygttaggggttggyggagtaatagagttygtgggtgtttttatgtatgyggatyggtgygygggygtaagataaggttgtggtttatttatttgtgtgtttattygtyggtyggttgggaagttagaatyggaggagttgaygagtagatttgggggyggaggggagtaggattgggattgtttaygttttgtttttttttgagaaaaygtggtgggtttttttttgattggatttgatttttattttttttttgtaggggagggagggaagttttagagggtttgtagygttgygggtttttttyggttttyggygggatyggyggtgatatyggagttygtygtgygttttyggtygttttyggtgggtgtyggtttttgtatttgatgygttygggatgttttttttattttggygygttygtygttagttygtatagygtttygtatattttygtaygygtttgaaatgygtayggtttygtyggttygyggaattattyggaygtayggagygtttygtatygattygttygtygttttttygagaygttygtatygtgtttgggtygggygygttggtygttggygtygttggttagaggtttgggatttagtyggtygtttttagggggttayggttttgggtyggagagggagggygggtagattttttttygtttttttttttataattygttgyggggtttttgtgtttttttttygtygyggggygggttygttttttttgtygttttygtygyggagtttagttygttyggattgtygtygttttttttygtttttttygttttttttygtttttagtttagtttttttttttttaggagtttagtttttygggaaaagttgtttttttaagtttgttgaagtygtttttaagtttyggtgggggtygttgggaattgggggggtgtgagagygyggtygattttyggagttygggygggttatygtyggttttttttygygtygtttggttggaygttgtagttagygttagtyggatygygggygtygagyggygggtgggggagayggttgttygtgggygtttagattttttttaggatttaaaaggtttgttttagggygttaagtttttatttttttggttgtttttttttagtttttagaaatttygatgtttgygggaaagtaygyggtggttyggttyggttgaatgtttattttaattttgayggttttygtttttatttyggggyg

SEQ ID NO: 6216 - DNA, 2558 bp, synthetic construct; identical to SEQ ID NO: 6215
  misc_feature 1..2558: note = Description of Artificial Sequence: Synthetic polynucleotide
  source 1..2558: mol_type = other DNA

SEQ ID NO: 6217 - DNA, 1508 bp, synthetic construct
  misc_feature 1..1508: note = Description of Artificial Sequence: Synthetic polynucleotide
  source 1..1508: mol_type = other DNA
tygtttyggggygagaaggagaaaagttagagggttgaataggtgaygttgagtttgttggagygtgtgtgttttattaygtaagggygyggagttyggtygttttatttttygttatttgygygttygggggtaygttttttgygatagtttggaatttagattatttgygtttgtttggtttygatttagtgtttaggtggttttagtyggaaatgtttgtttttttttaatttttygatttyggttgtttygyggattaggtaygtagygttttagtygtaggtttggatatgtyggatatttggatttatttttagtaatttttttttttygggaagagggataygttttttagtttgaagatttgtttttaggtttaattggttaggygyggaagyggagaatttygtattttggggygygttgttygaggtggttayggtggygtattaagtyggggttaaagtyggggtagaggggtggggtagggtygggggagggtgatttttgggtttggagaataaatttgttattygagggatttttagttttygggatttttattatttttattttgtttttagttaatgygyggataagygttatgyggtgygttaatattygygttagggttggggttygyggygggagagggaygtayggatatagyggaggaattagtygtygagttygaggtttgaataagtaaggatttttaggttaagagttayggtttgaggatttttygattyggagggtatttyggggttttagtgttattaagtygtaggaagagggtaaggggttgggggaggggtttagggtagaattgtygtygtgtagggagtagggagatgaggggtttttttgttattatttttaygggygygttttaaaayggtagaygygggtggttggyggagyggtygggggttgatttttattyggtttttgttagggtgtttgttttttttygttgygttttattyggggttttgtatttyggtyggtttttttaygtatttggagttygtygggtatttygtttygtygttagtygygttattttggtttygtygttttygtygtttagtygttygygtaggttttatttttgtgtaaagagtttaggagtaggaggaaagttattagttatatgttataaagaggttttatttttyggggaggtggttttgtggtyggtygtgyggtagygtttttttttygtttagygygtttttagtygttygtattyggygtttygttttttttgttttttagtttagygttyggttgyggyggyggttttttttttttyggtttttyggtttttgttattygyggggttgggttaggyggtygtttttttygttttttygyggtatttygggtggtgagygtygygygagttyggagtttagayggattttagttttataagtttaggaataggagyggyggttygggttagatygtttygattyggtttygttgtttgagaggyg

SEQ ID NO: 6218 - DNA, 1119 bp, synthetic construct
  misc_feature 1..1119: note = Description of Artificial Sequence: Synthetic polynucleotide
  source 1..1119: mol_type = other DNA
tygggygygtaggyggyggttagygttggagttttagttagttttttttttttaygtgygygttaggttttggttattttggtaattygtttygtttagayggtattaggtagttgaatttagttttttgttaygggggaaaatgtttttattgaagygtyggagygtagtttttgttttttattgtaagyggygttatyggattttatttgtaaatttattagtgtgygttygyggggagggggttygggaattygggttygggtaatyggygtygtatgttaattagggggygttygttttygttttgttygtggtttttttttttygatttttygaygtttygggaggagtggggtyggagygtagggttgggaagggttttaggatttaggaaggagaygggtgttttttagagaggattttatttttttygaggttygggyggttttyggtttttttttggggtgtygtagtttttttygattygttttttygtagtygtagtygttygggtttggaggtggtygggtatyggtgtygaygtygygagggtagygttygyggygggaatattaatgtattttaaagggtayggtygtygtygtagtaggtaattagttggatygyggyggagygygyggaggtggttgttggttgtaaggattgygtttagttttygtttygtttttygaggttttygygtgggtyggygggtagtgygtgggttataggaagygggttgattggattyggtttaggatttygtataagggtagttttttgtttatagttttttttttagtttttygtttttttttygtttatygtttttttttttyggygatyggtttygtyggttgygggggggtggggggggtggggtgttttgtgtagtygtttattttttgtttyggtttygtgttttygttggggattgtttgyggtgagtttgtygtaygtaygttagggtygaggtagtgatgyggggtagygtgggaggaygggttgyggagttygygttattttgtttgtggggagygttgtgtttgtttttttgttagygygtttagttgtttyggtygtygttaygygggattgtttgttatgtygttatyg

SEQ ID NO: 6219 - DNA, 1119 bp, synthetic construct; identical to SEQ ID NO: 6218
  misc_feature 1..1119: note = Description of Artificial Sequence: Synthetic polynucleotide
  source 1..1119: mol_type = other DNA

SEQ ID NO: 6220 - DNA, 653 bp, synthetic construct
  misc_feature 1..653: note = Description of Artificial Sequence: Synthetic polynucleotide
  source 1..653: mol_type = other DNA
gyggagaagttaggagygatgaggggyggggyggttttyggygtttttttttttagtttygttttygygttgtygtyggagagggattyggggygtagtygtttygtttttgtyggggttttaggaggaatttaagaaaagagagatggagggaggaaatggtatygttttaggaaggggtaggatttttaggatygaaggygttttttttttttttttttttagygatattgggaaataaagtttygyggttgaaaagaatattaygygyggttaggattygagtagggttttggggygttaagggyggggaaaatagggtattyggagtgtaggagattttttagggtygttttttttttygggggtgttttgaggaatygyggyggggattygtygttggtagtttgygggttttggtgttagygygtatgggygggttgtgyggaygtggttggttttttaaaggttttagatttygttygggtygtttagttttttaaagttgtgttttaaagtttaggggagatagygaggttggggaygtygggaagtttttttgaggtgtggggtttttgagtagaaaygygygggggattgttagggttgtagaaattttggttygaggyggtggttggttygttttattttyg

SEQ ID NO: 6221 - DNA, 1768 bp, synthetic construct; identical to SEQ ID NO: 6211
  misc_feature 1..1768: note = Description of Artificial Sequence: Synthetic polynucleotide
  source 1..1768: mol_type = other DNA

SEQ ID NO: 6222 - DNA, 1101 bp, synthetic construct
  misc_feature 1..1101: note = Description of Artificial Sequence: Synthetic polynucleotide
  source 1..1101: mol_type = other DNA
gygttaagtyggttttttaatttggtttgttgaaygtaaatygttgagagtttgttgtatygttttttggggtttttggttgtygagtttygttaaggtaaagaygttagtaagygaggaagygtagyggaagaaaaataagygggygygygaggggagttttaggagggttgtygagtggttggtaggyggttttygtttttttygggtggtttygtyggyggttgayggttyggaggaygygygtttygaaaagttagatttygggyggyggygygttaygtygygttttttygygtttttttttygttgygtttygggaaaggaatttgttttttyggttttaggattggggagtgtgtygyggggtygagggtggggaatagttagagggagaygygaattaggtygttggyggagggtttagggggagygtagaggygayggtttttatgtyggyggttaatatgatggagaatyggtygttgttygttttgtaggtgttygagtygtagggtgygttygagggtagttyggtttggtttagttygtygatttttaygtttygtygtyggygttttaagatgygtygtatgaagaaygtataggagtagagtttggaggtygggttggttygggatttgttygtygttttggttttyggtaaggagtttttgtagttgtygtttatygagattaygttttttagygaygaggatatttygtggtttaattgttttatatttagygygttttygygtygaaaaygttttttttttygtaagtggttgagggtgagggagyggaaggagtgtagtgaaagtaggtaygttttygtttygttygttttttttttttttttttygttttttttagagtygtttagggtttyggggtattttgggggaaaygttttgggggagaataggagttygttattagaggygtttttggagggygttgygtttggttttagggatggtggtatttagtttttaygygtgttattygttttttaatttagggtgaggggttttatgttgtaygataygtttaygtggggttttaygttgtattttattttttttgattttygtagyg

SEQ ID NO: 6223 - DNA, 1101 bp, synthetic construct; identical to SEQ ID NO: 6222
  misc_feature 1..1101: note = Description of Artificial Sequence: Synthetic polynucleotide
  source 1..1101: mol_type = other DNA

SEQ ID NO: 6224 - DNA, 2341 bp, synthetic construct
  misc_feature 1..2341: note = Description of Artificial Sequence: Synthetic polynucleotide
  source 1..2341: mol_type = other DNA
gygtggttyggagagygtggataaggtaatttgttttggatgttygggagaagggagttyggtygaaagggtttagtttttygaggttgttttaattggggygygyggyggtttaggagggaggyggggaggttttygggttgggtyggggaaygtyggtttttaggttgggtagggaggayggtttagagygygggttttygggttttatttygggaaaagtttgggtttgttttgygttgttgygtgttgygtttttgggatttgttgattgttttagagggaaygtttygyggtagtgttagttttttggggattaggaagggygatttttgtttgggagttagtgtttgggtygtygggttygggtaagygttgggggtttggttygagaagatgyggataggtggtttagggygtygyggattttygttttttgygggtatygggagtttagggtygaggygygtygtttygaggggtttttttttttaataatgygttyggaatggagttygygttttgatagygygggttagttygaaatygtttagaattygtttygatgagtgggtgagtygttttgggagtttgtygygtttyggtagyggagggtttgagtggaaaaatttttattggatgtattttttaatggttggtttgtttyggttttygttygagtttttttyggtagtaggygttgggttattygtagttttagttaattttttttttatattttttttattttatttttaaaaagtttgttttyggttggaaaaagtattaatgaaygtatttgtgggaagaaayggaaagtgaatgagttaggagggttattttyggttaatygttttaggaaaagtaaagaagttaaaggtttttggttttggattttgggggaaggtgatggggggaggtttagatttygggaattagggygyggaygttgggygtggatttygttattgttttyggttagtttttattttttaggagtaagtattttgtgtgygtagygtatgaatgtgtttgggtattttygygtatatttatatagtgtgtgatgygaaaagtaggattagtaggggaggaagagggggtgtggggggggagggaagatgagggagagtagaggggagagaagagagaggagagttygaggygagagagagagagagagagagagagagagagagagagagagagagagagagataggatttttttttygattygtaaagtgaagttattttttaaaattagttgaaaaaaaagttttattyggttaattgtttttttygtttygttataataataaaygtgtataggggagtgagggtagggygttygtagggggtaygtagggagggtttagggygttagggaggtygygtygggttaattygaaggggttgygaggttaggttgtaatygggttaatgtgtggaatattggggggttyggttgtagatttggttaaatggaygggattattaaggtaagyggyggggtaayggaygygggyggyggggatyggtyggggaggygaagyggygggygggtaggtgyggggttygygtttyggaagaygtggtttttttttttttttttygygtttyggtttygygtyggttttttyggygttygggtggygagttttattygygggttagtyggttaggygttygtattgagggygattttttttygaaattttagtttttaaagtggagtttyggttttttttttatttygttgttygtyggggttgtaggaggggayggygggaaatygggggattttagggtayggaayggagttaagggygagagatttyggggtttattatttttatygatattyggggttttygtggttttagygttaggtattgggtttttttttygtagaggyggaatayggygggggygggggttgtagtygttygggttygggtttttgtttggtgggttttggggtgggtaagtggtttygttgtaygagggtaggggtgtaagtgagtgtgtygggggatttatttgagygggtttttttagatggaagtttttgtttatatgttagygttttttttttttttyggtatttagtygttyggttttaggygttggagagtygtyggtttygygggatttttgggtyggtttygtygttttttyggyggggaattttttttagttttygttygtatagatttttagygtttygagttttygtttttygygtttaggygtgygtyggttttaggattagggtttttggagttgtygttttygaaagggttttgygtttttyggagtygttttygttgtaggggtyg

SEQ ID NO: 6225 - DNA, 3857 bp, synthetic construct
  misc_feature 1..3857: note = Description of Artificial Sequence: Synthetic polynucleotide
  source 1..3857: mol_type = other DNA
gygaggggyggggggyggggagggaggygggtygyggygttggtttyggggttygyggtayggttttttttgtygygttgtttagggttyggattttgttyggygttgygtttatygygagggtgttagattygtygygtygtygtygygtttttttagtygyggttttttttttygtygtttttttttgtttttttagtttttttttttaygtgtggatgaygttaaaatttygygaaaaagtygygtggtggtttttygagyggaggygygatttygtygtttagyggttttttttygggggygtttggagggggagaagggyggaggyggtyggtttttttttttttygggaggtaggatttttygaygtygatygtyggaygtttttygttttaaagtttattggaaaatttatttttgtaaagtaaatgtatttttagagttattttyggtygygtgaggygtgttttaagttgaattagataggaagagggggaagttygggttttttaatttttttttttttygaagggaggggagtgagatgttaggtgggtgatagayggtaggygttygtttttttaatttaygtttgtygtatttgtygttttagtaatttagtttygtttaagtygaaattygtygaagggagtgyggatgtataggtttggyggattttgtttttttttagaaygtagyggtttagygtttyggygggygyggttgygattagagggtttyggaagygagtgaatatttgtaatygtattgttygtttttatttattttgttttttygtgtttttygtttttygaygttttttttttttttttgttygtatttttttattttgtttgtattttttttttttttttgatgtgttttttatgtgttttttyggatttatgtgttttttygtattttgttagtygggttttyggttttgattgatygtttatttttttayggagaaatataaatatagttttattttttgggggagtygaggggaaggtagtggtttttatttttgagtttgaatttagttattattygttttttatttggtttaggygtttttgygyggagaaggygggattygaattygygttgttttygggttttgagtygatygyggaattatttggttgggaggtattttttaggtaagtttgggagtatgtgtgtttagtgttgtaggtttttgtagaaaagtgtttataaatatttaatattttgttgtattttttatttttaggttttgtatattttttaatygaaattttaaaaygttagygtagagggtggggagtyggtyggaaaaagaataaaagtttaataaaattggygttygttaaagtttattattagttttatatgggatatatatatatgtattttttttttygtgaagggtgaaaaggagataaggaagaattaataatttattttttttygtygttttttattttygygttayggtgattagtttggattttaaagttagagtataggtttttgygtttttttttgaaatygaagtttatattgaaagaaagtgtgtatttttgtttagaaggtaatatgygttttttygygtgttaggtggagtgtattttaataagatattagggttttaatatatggttggagtggygattaaaagggaaaatttagtttttagtttaagttttttagagatatttttgttaattttygtatttttttaygttttattttaygtgtgagagtttgtaaaattatyggggattggattygatggygagttttaygttygggaatagttagtaatyggaaggggaagtggataggggaattttaagaggygagtttgttaygygggaagygttygaatttgygggtttttatgaatgtagagggygtygggaagggggggtattyggtygygattttttttgttttttttattygttgttttttttttygttggaatttttttgtaaagtaagayggagtagggggagggggagagggaaggggygagagggttttyggtttattttygagaygtgaggattygttatttaggtatttttttyggggtgggttgggtttygggaygattattygtttttttttygttttygttgtttttatttygggagatttagagttttggatgttttttttyggagaagggggggtgtgyggagtyggggtggaagagattttgttygtagagttatattaagtgatgtttagaggttgggagtttyggyggtttttgttttttgtttgtygggttagatttatattttaaaaatatttttygttttttttttttttttygttttttttygttgtaattttttttgattygtttaaaggtggtttaggtgaaattggagtaatttttttatgggggttttaaaatgtaagtgaatgtttttattyggggtgatttaaaagtttaagtygggaagtttaaygtgattaaaattaataggtgattgttyggggtygattgtgtgygggtgtatayggtattyggttygggtgttattygyggygttggattgttttattttgagtttgtaatttgggttttttagygagttttttttttttttgaaagttaatggtttttatagtaattagatatttttttygttygtttttttttttttttttttttatatataggagatgggatatttattttygttgttattgataaggtyggaggyggtygggtttttttttagttttygttygttttagygttygtttttttttygtttttttttggtttttttttgatgtagtggggaaygygttttattaaaaaaaaaaaaaaaaaaaaaaaaaaaaagtaatttgttyggtaataattagygygtagtagtaggagttttagagttattggttatgtaaatagagggaggggagayggygttttaaatttttttttatttttttaaagygatattttttttttttttttttattatttttttygttttattttygtttaaagaggttggtttyggggtttgagttaatygtttgtatttttagtttattygtttttttttttygttttgtagggaatttagtgtayggtttatttagttygygttttatttygttttgttggtttttygygtttttgttygggttttttttttyggtgagggaggtatttagtyggtttyggtgtgtttagagagttygagttaygttatgttygttgtaygtgttagtttggttagtatattagggygttggtttttttttttttttttggagtgaaatatattaaagggygyggtgggggtggggggtgaygggaggaaggaggtgaagaaaygttattagatygtattttttgtaaagatagttttgatttaagtatgygttagagtaygtgttagggtygatygtgttggyggygattttatygtagtyggtttttagggagaaagtttggygagtgaggygygaaatyggaggggtyggygaggatgygggygaaggatygagygtggaggttttatgttttyggggaaaggaaggggtggtggtgtttgygtagggggagygagggggagtyggatttaattttttattygttttttttttttttygggttattttttagaaagttgtatyggtgtggttaygtttagygtagatatttygggyggtttgttagtagatgtaggggygaggaagygggttttttttgygtggtygttggtygygggggaatygttgggagttttgttttyggtttgyggyggttttagaygttgtatygygtygttttayggygttygaagagtttttagaaataygatggtttttgttyg

SEQ ID NO: 6226 - DNA, 1439 bp, synthetic construct
  misc_feature 1..1439: note = Description of Artificial Sequence: Synthetic polynucleotide
  source 1..1439: mol_type = other DNA
tygttattatygttattttttyggaattttttgggttygygttagttttatttggttaygattyggtaggygaaggggtgyggaggyggttttattagttygtttttagttttgtttygagagagaagttygttgagagggtagatagttgagaaattygattttaattttttagtyggygtttttygaatygtttygagagtttagattagtygggtagtggatttyggagtaaagtgttatgtatattttggagaggagggaggygtggagggaaagggyggtaaaaatgaaatgtttttaagttagtttygtaatttttttyggttygagggaygggyggagggtagaggaggtagyggyggttagygygaggtgagggatttatttgaaggtgaggaygtagagyggtyggtaggatttgtggttggtgttttyggttatgtttttgttttagaagtygttggtgaagatgttttagyggagyggggygtygggtygtaygtyggggttgtttaygatygtttataygtygtygtgtaygaattygttttgtagggagyggtygtagtataggtagtttgtttyggttagtagygtygyggtttyggtyggygttagttygtagtttygtygtygggagggtgtgyggttttygtygtygtttygggtagaggtggttattattatygygtygtygtygtygttgttgttttggtttttttygggygtttggtatttttttttatyggggtttyggyggygygyggygtttgttyggaggggggttygggtatggtgttgyggtagttggattygtygygagtttttygygtttygtygtygtttgygtygyggagttggtttagttgtaaataaatagtagttttttygtttttttyggttatygttatttttttygttttattgygtatgttygttygtttttttttttatygttttttaatttygggaygygggtyggttttttygtatagttyggygttttttgttttyggttygttttgtttgtaggtggatyggggttygyggygygyggttgttygggagttgyggggaaggatattttaggtttttatttgyggtgttyggttgtgtttatttttaygttttygtttttatttttttttttygaatggggttgggaaggggtatatttggyggatttttttygggggatttaggagggtttagtaggtgygtagtttggaatttttatatttattttttagggagaaaagtgtygttgtttttygggaagttttyggttttttagtattygggataatagtagyggygttyggagagaygttttttattygtttygygttygygtttagtygtyggttttgtgtttttttgttygggtttttttttattygttyggygyggygtttygtttggyggaggaattygyg

SEQ ID NO: 6227 - DNA, 1288 bp, synthetic construct
  misc_feature 1..1288: note = Description of Artificial Sequence: Synthetic polynucleotide
  source 1..1288: mol_type = other DNA
tygataggttgtagtygygggttatttyggaggttaaggtagttatttttgtaagggagttttgygtttaagtatggtttgttygtttygtttggtttttattaataaggtygggattagyggtyggtggaaygagygagagtagttttagttttataggtgagtygtttttataagtagttaagtygygagtygtttyggygtygttatygttygtatttatttttttatttygggagggagatgggaggygtgggagaaygyggagaggygyggygaggttgggagygggagayggygtygggaggygggaagyggattagagaatgggagaagttyggtaggtggataggaggaaataaaatttaaaygttttattttygaagtygttaggagttgagygaaggaaggagygaggtaggaaagygtggygttttaaatatgtygygggagyggygygggaggygtagaatttyggagtttgtagtttagygygyggggttttagyggagygygaggaygygagyggagttttttyggttatttgtgttgttttygttttggttgtttttgtttygagggaagatgttygagtattttttttattttatttggtyggygaagtatagttyggtgaygatgtgtagagttttttggtatagattgtttatttygttttttttgtggaaatttatygtttggtttttttttygtttttttttttttttttagttagtygttttttttttttttygtatttttaatttttttggygttttaagttatagttygttygyggtgattttggttggagattgygtygttgagagtyggtaatttttaggagttttaygttggttttatggygggagyggagggygtaggggaaggagaggygygygaggaggttgyggttgtygygaggtttgygttaattttttygtygygygagygagtygaggygygttggaattagagattyggtatggagtgttgaggggaggggggagtygtaaaaaagttaaagtaagttttygattygtaagtaygttttttttttttttttagygtattggtgtttttggygggtgtttggyggygaygygtttaatygtagttyggygygggygttaggtgataggyggyggagygygtagattyggtttttygygttttttgaagaagggattygtgagggagggagggagggagggygggyggttyggygtttttgtygaggtyggggatgtttatygttgtttagagttggttygaggagtttttttyg

SEQ ID NO: 6228 - DNA, 1006 bp, synthetic construct
  misc_feature 1..1006: note = Description of Artificial Sequence: Synthetic polynucleotide
  source 1..1006: mol_type = other DNA
gygygtgaagaatttagattttttaatgygtatattatttttataygtagggtygaggyggtagygyggttyggagggggttyggagggaggggtyggattygtttyggygyggtttygtyggggaattagttttygagtygaataaaagtagttaaagattygtatattyggtagaaggggggyggttttaagaaagttygggttggggyggtttygtattttttygtttttttygtygttygaatttgttgtaaaggtagagataatggagaaagtttygggagaygygyggagagattgtttttttggggagggaggggygggtygggggaggyggggtaaggaggagggaggggtygtygagggygaggtyggygtttagygtyggtttttygtayggttttttggatgttaaattyggtttagggagtttaggagtygttgtagttttagtttttttttttttttttttygatgattygggtaatgttaattttttttygggattgaaagttttaaatttaaggtgttaagttgatgggyggtttttgtttttatttttygatttygggygygtgttttgaaagataggagagaaaaaagattatttagttgtaggaggtaaggttggagygagtagygttygtttgttttttaagtaaaggagggaagtttatgtgtattygtgtattgggtttyggagtagtttyggggtgtagggtattttttttttagggygtgyggaggaaggttattaaaataygttgtattgtygaggtggagttgggtaaagtaggtagagattggtggggayggatggygagtttgggaagtttygggtgttttggtggagaggttttttgtygggggyggggygttggagagttttttyggygyggagagtttttygggygyggagagygtagagaatttggttaggaggtgttggatagtttyggaattygygygttttttgttaaataaagygtggagattyggattyg

SEQ ID NO: 6229 - DNA, 1185 bp, synthetic construct
  misc_feature 1..1185: note = Description of Artificial Sequence: Synthetic polynucleotide
  source 1..1185: mol_type = other DNA
tyggttttttttgggygtagtgygtatygtyggygtttttagatttttggattattyggtttgggggygygggygyggttggggagggaggggagagttggtttatttggygttgaaggttggaaggtatagtttyggtttttyggagttyggttyggtagtttygtattgttygtagagggattgagtatttgaaaagtttatygygtttygtagggygtttyggyggggttaatttgttyggttgyggggtatagttttaggggaattgggttagtaggtaggggtyggagttgygygttygyggtggttagggyggtygtygggtygtggggygygggyggttgtagtttgggygttggggygttttygattygtagtaaattttygattaggaaatttttgtttaggttgttaaagtygggygtagyggggaggttgaggagygyggaggaagttataaygttttagtaygtatyggygtgggttgygatygygttggggagtatagtgyggygttaatyggtttgttgygygttygttttgygttygtttgtygttygggygtttygtatygtatttagagtygtagtttttygtygtygtttttygtagggttggagygygyggagttaggtagggaggaaaggttattygggayggyggyggatttggaaygatattatttatttgygttgggygtttttttaagggatgggaggagtgagtgtgggagggggaagttgtgagtttttttggtygatagygtaggttttgggagygtaggggggagtttttttttttttttatgtagatttggaygggttttttttttgttttttgtttttttttggayggayggaaggtgtgtttagtttatttatttatgttattagttttataaagtgatagaygyggttaataataagggtagtgttgtggtaaggggaggggattygtagtgggaggaggtgggygtggaggygaygtgaatygggygygttygttattttttygttgtygtgtagagtygtggtattttygttagagtttaagtagttttttaggygtggggtttggtggaygttggtttggagygttyggagggyggggtgggggtgggggggaygygttgtygtttggggtgttttygygtatttttgttgggygaattttggtttttyg

SEQ ID NO: 6230 - DNA, 409 bp, synthetic construct
  misc_feature 1..409: note = Description of Artificial Sequence: Synthetic polynucleotide
  source 1..409: mol_type = other DNA
tygtttttyggggaaggggtttttgaggttygggtggtygtttgggtaatygtagtttgtttgygttttttttttttttygygtgggttttagtaatatttattgtagtygggttaggygagtyggygygtattatyggygyggggggaggagagggtygggtttgggaagatgttgyggaggaygttgyggattygygagttyggggtaaggyggyggygtatygttttttttygtygttttttttttatttygttttttatygtygtttttagttttttttygggatgagagagagtygygttgyggagtaattttagtggatgggttygygggggttgagygggyggaggaygygggaatttygtgatatygattagttgaygttgttygygtgaaattagagtyg

SEQ ID NO: 6231 - DNA, 1813 bp, synthetic construct
  misc_feature 1..1813: note = Description of Artificial Sequence: Synthetic polynucleotide
  source 1..1813: mol_type = other DNA
gygggyggyggaggagggttggyggttagatatagtatygttggagtttagagagtygggtagaggttggyggagagtygaggttggtttagtttttaggagatyggygagttggggtgtgtgggagygggatgtttttaaggygaaaagaagygttagtttygtaagyggtttttatttgggttgtttaggtyggatgtttaggagtttatagtaggggggatggagygaaggatygaggggttgggaggygaggtygtagygtattgaygtaggttagygaggtygttggtttygaygtagggygttyggtaaggtgtttggtattaygagagttaatttttgygygttattttyggaggttagtgygtttagggygygtyggttyggtaggagggtgggtgttagtttttttttttatttttygagtttttttttyggygtttaygtgggyggagtagygygagggtgtgygtggtaggggtygyggyggygtgtgtygtgygtggggtggggtgygggttgggyggtttygttttygggtttygygtygtyggggygyggtttttagttttattttttttgttatttgggyggagatttgggggattgtgatttattttgyggaagatayggaggggaygggtyggttatatttttygygttatttyggtaggtatygggtgggtttttttttygttttttggtttgagggyggaattyggagaagagtggaaataggggtggygtgaaggagagttgggggttgggggygggatygggagggggtgttgggggaagygaygtagyggttgggagattttgtaagggggtttgaagaggagtgggggatgggtatggaagggtgggggattattgaggtgggatgygagagtggaagggggatttagagggggygygatggtyggaggagggggagatggaygatggggyggggyggtatyggtygtygygttttttgtygttaggttygtttttyggtygtygggtttaygggttttttttggttagygttygtttttygtttttyggygtatttgtatttatttgttyggygtttaggttygagtygggtagtagtagyggaygtagygagygtagtttygygtygtatttttyggtygtttttttttygttgygagtttaygtygttgtygtygtygttatygttttaaaaaggataaaayggaatagaaaatgaatgtatgtataaaaaaaatygtaaaaagtaattgaggaggatggtagtygygygygyggttyggyggggygggagtygagaggtygyggtattggtggtygygattygggtaggyggtyggygygtgtygtaygygggtggttgtagttttttyggtygttygygttyggtttaggtayggtatygttttttttttyggggagttttttygattggtttgtttttttgttagttaggtaggagggygyggygttygtttygtttygttttygttttygttttgggtagatgtygggagtttttttgtygtygtgggagggggagttgagttgtyggagygtgygtattgggttagygggyggtyggggtagggttggggtttyggygttgagygtttttagtygygtygggtagtttggygtttygttgagtyggagtaattttyggtaggagtttttaggttttggttaagtttygggattygggaagttatttttgttttygggggttygagtttggagtggggtttgtaggtaaagyggggttggggtygttttggtygttagtggttaggaagaygtagygatttyg

SEQ ID NO: 6232 - DNA, 1294 bp, synthetic construct
  misc_feature 1..1294: note = Description of Artificial Sequence: Synthetic polynucleotide
  source 1..1294: mol_type = other DNA
aygtttttttyggatgygygtggagygttttataggatygtygttttttgygygttggygygtataygtttttygttagtttgggygtygggtttygaattttyggtttgtaaatttgygtattttttttygtygygttygttagataatttggygaatagttygttygttygtatttygtttttttyggttttttttttaaattttaaaygtatygtygtgttttaaagaaggtgtttaygtygtttttagatttyggagygttttttttttattttygggattttttaggtygtttatttttttygtttttygtttagatttgagagggatygaaaatatattttygattygggtagttagggtygaaattgttaagaggagaaaaggtaaagyggaaggagggtggttataaatagatttttttgtttttttttaaaaggatattgtygttttaaaagtttttttttygggtttttatttttygtattttygtattttgggggagygtatttaattgaggtaaygtagtttttttttagtgtttgtagaaaaattaaagttaggggggtgagttygtyggttgttaattttttygtygtttttttygttttattttgttttygtaagtygagaaygggttgtaaaagtttgtaatatttttggggggyggaggggggaggggaggggggtttttygggttyggggygtygtygtaggttygygygyggtygtyggatttygygtttygggygttygttttyggtygtttttygtttygygttygggttttygtygttttttttttagtttttttttagttttttatttttgttggtgttggaatagttttgtttgygtatyggggtaggyggttygtttttgygggyggatttttggtttagyggggtttttttggagtyggyggtygygttygygtygttgttgtttggttygttggyggyggggtygggggttgtyggagttgattttatgtttttttttaatgtagagatygttggagatggygagtttygagattttttttattttttgtttttagagtaattttatggtattaaaaaaaaaaaaaaaaaaaaaaaaaaaaaaaaaaaaaaaaaaagaaggagaaggygatyggygaaagtaggagggaaaaagtaggyggyggygggygggtaagtaaaagygygagggagygygyggagtgtttgggtggaygtgtgtgtgygttygaaaggggataagaggygggtttggttataggtagygttagygagagtttttttagtyg

SEQ ID NO: 6233 - DNA, 939 bp, synthetic construct
  misc_feature 1..939: note = Description of Artificial Sequence: Synthetic polynucleotide
  source 1..939: mol_type = other DNA
tygatgtygagagtggttttgttggagaatygtygygtttgtagtttttgtattttttttyggagttgygttagggaattayggaygaattggaaggggtygagaagaaaggttttggttattatttttagttttaagttttttygtttttttagattttggatttttttyggggaggatttttaggagttttttggtagtttttygtygtttagggtygatttttttatttttttttttattttyggttttygggygagggaggtttygygtygttttttagattggttgyggtyggaagattgtagtygttttgagtttattttttgtttttttataattaaggagtatggtggagttgggttaattttaggtatagtttagtygagttaggygaggtttagagagatttgattygtttggtagttttaayggatttgttttygtagtygttgyggatttttyggtygttatggygattgtgaaatgtggggtggggygtatgygttggaagttattygygygggtagtttttgagtgtttttttaygtgttttttagygygagtagtattttygtttttgygttttttagagygtgtagttttyggtgagggtagttttaygtatagttttttatattttttttagygtttgtagttttyggtgygygtaggttttaagtttatatgygtagtttttattttgygygtagttttatgtatagtttyggaygggtttttagttttattggygtagaatttattatygtttgttttttaygygttttattgggagtgtagtttttatttygagygygtagttttaygtagtttttttatattttttttagygtttgtagtatttttagtgygtatagttttgttagtygttttttygggygtygtttttgtattatttyggtttataattttgyggyg

SEQ ID NO: 6234 - DNA, 939 bp, synthetic construct; identical to SEQ ID NO: 6233
  misc_feature 1..939: note = Description of Artificial Sequence: Synthetic polynucleotide
  source 1..939: mol_type = other DNA

SEQ ID NO: 6235 - DNA, 899 bp, synthetic construct
  misc_feature 1..899: note = Description of Artificial Sequence: Synthetic polynucleotide
  source 1..899: mol_type = other DNA
tygaaygtagttaygygtttattggttttttgtttttggygtttttgggtaygggggagttggggyggtttygtttgygtayggyggtgtygggattgggggygggtaygtygttttygttttttaygygttygttygttygttygttttygtttttttygtttygagygattttttgttttagttttgtaggtttygtattgtagatgtttgttggtttttttgygttyggyggttttygyggtgtttygtaagttttygtgattttttagtattagtyggttgtgygttttttgtttttaygggtyggttagtygtagatatttatttagtttygygagtttagtygtttagygagtggggtagyggggatygagayggayggtagtygtgttagagttyggggygttttyggatgyggtaggataagttgatygggtttttgaggygyggggggagatgtttgaagyggtagggyggyggygtgggtattattttgagtaatgtgtttaagaagygtagttgtatttttyggatygygtttyggttgttgtgtattttggagtygggtgaggattttagggttgtagatggggygttgtaaagtagygtyggggttgttygygtttttgttttagtttgatttygtttaggtyggggagttttggggaaagttygygtgttatttggtgyggggtatygygttggtatttgtagggagygattggtttggaagggtagagggtagaygggggtttgggtggggtagyggttattttaggygyggagaattygttgtttttatttttttttygyggatttttattttgyggtttgtgtgttyggtttttttygygtggyggggaagtgygggtggttgttygggtttttagaggtyg

SEQ ID NO: 6236 - DNA, 899 bp, synthetic construct; identical to SEQ ID NO: 6235
  misc_feature 1..899: note = Description of Artificial Sequence: Synthetic polynucleotide
  source 1..899: mol_type = other DNA

SEQ ID NO: 6237 - DNA, 547 bp, synthetic construct
  misc_feature 1..547: note = Description of Artificial Sequence: Synthetic polynucleotide
  source 1..547: mol_type = other DNA
ayggtagatttyggagggggtgtttaggatagtgayggttgatatgaagttagyggtgagggatagygttaygggtattgyggttattttgyggtygtttattaggaagtttttggaggtttgttggtygtttttagygaaggygtagtagatgtygatggyggtygagatgattagtatgttygygaatattaygtagttttatattaygaaggtgtygatgtttygtggygtgtttatggtygtayggtygtttgagttttgygygtaaattggtggtttygyggygygtagtyggagttyggygygtattttttatttyggatttttggygygtaggygtggygtttygyggggattggaggygttttttaggtgtyggttttygaaygtatttygaggyggggtgagggttggtagtygtttttgtattygtygttgygagtygygttttttaaatttaggtatgggatttyggaaaatygattygttgttttgagtgtttattaygtgaggaattggagtggtygagttygttaaggygtyg

SEQ ID NO: 6238 - DNA, 2505 bp, synthetic construct
  misc_feature 1..2505: note = Description of Artificial Sequence: Synthetic polynucleotide
  source 1..2505: mol_type = other DNA
tygagttaaygygttttagtggtaggtggygaatggtyggagattyggttttttagtggtgtttatygttaygggttttygttygataggtttatttttttttatgttggagtaaatttyggttgaaagagggtygtattaattggtttgygtattygaagtgggaatagagagggaggaaaattatgttttaggtgttayggggggaaaaaagtgaaatgygaatygtaggggagagagygatygttaggtagatattttgtgaatygyggtggagagtatatttaggtggggaggttatyggtttaatttattatttttygggagaatgygggtagggatagtagtagggggtagtatttaygtttttaygtttgtaagggttttttaagtttttggttattgttttttattttttgtagtttyggtgttygtygggggygtgtgtgaggggyggggtygtatggggaggagggatttaaaaaaaaaaaaaaaaagygaggtaattagtatttttygattttattggtttttygtygtttttgttttgtataygttygttttattggttgttyggggtttgttggggttyggtaaggtttgtagtygttayggtygttgttgygtttyggtgtagggtaggttggygtygagygaattagggtygggaattgggagtygggagtygggagttagttgttygyggagttgyggyggyggyggtatttggggtggttttagttttaygaatatygtggtyggygttyggtggttattgygtttagyggggtttagggaagagyggtttagatattttttattttggaagaaaggggtaagtttyggygggagtttttttttyggtttggttygttttttattgygtttagtttyggttyggattttggaagatgattttagggtttgttttgtatattttagyggyggtagtttygggaggtagtygaaagtattaatagttggtagtagyggttagtggaaaagtgagttaaggyggygyggattyggtttttttygygtttygyggtattygttgtttttygtygttttttttttttggtttttaggyggttgtagtatgaagtggygtagygatggttaggagaggtaagaagttygtggtgagaaygttggaggatttgaygttggattygggttatggtggygyggyggattyggtgygtttttttaatttgtttttgtgttgtttygattygtattyggygttttygtatggygggagttgttggtygtttttagttgattttatgtatagtyggtataatagttttgatattgttaatattgttttggtggaagatttygaggggttggattgygtyggttagtattgttygyggttgttgtyggatttagaygaggttttttggattttttaggagttggaggygttgttgttgygttygygggattttygggtaggttyggyggttttyggyggtttgtttaaggaygygttggttaagttgtygaygttggtgagtygggygttggtgygtatagttaaagaggygtagygtttgagtttgygtttygttaagtgtattaagtaygagatttagagygttatggagatygtgttgttttggggtttggtygygtattgtayggyggttgygttggtygtattgtttttttataatatgagtagygtyggyggygatygtttgggtygyggtaagtyggttygttgyggttttatttttttygtgggtygygtgtatygttggatggtggatagtygygtggygttgygtatttaygagtaygtygttatttatttgatagtttgtatggagagtttttttygggatatttattygygggtygtggttttyggggtgtttyggagttgtagtggttttgggttaggttygggtttyggtttaggttygagttygggttttggtgyggttttygyggyggataaagagygggaggygttygggggaggagyggygagyggyggygtttgtagygtagttagtagygttagygggggtagtagttgttgygtttygtyggtygtygyggtygtygtagtttygtyggtagtygtygttaattattattattattattattatgygttttaygaggygtttaagtttatygtggagattttggagtatayggttaataaygattyggagatttggggttttttgtagttttattagtatttgatttgygggaagaaygttagyggtaagtgtttgygygggtgttatttttttttatttaatttggttaatttttggygtaagtttgtttygygtttttttttygygtttttttagttaygygttgttgttttaagtygttgaggaggyggtygggttggaggtagttagaataagaggttgtttgtttgtttttgtattygggtgygygtattttaygttgttggtgttgttttaggttygggagygygaggtttygttttyggtgyggggyggggyg

SEQ ID NO: 6239 - DNA, 1587 bp, synthetic construct
  misc_feature 1..1587: note = Description of Artificial Sequence: Synthetic polynucleotide
  source 1..1587: mol_type = other DNA
gygygtttygatagtttttaagatggtygttaatgtgggatygatgttttaatattggaagygatttgatttayggygattttaggttagtgygggtagygtyggtygygyggtygtgaggagttttygggygygttttgggygtattggggaggttttygggygggtaggyggaygttttggggyggygggyggyggttgtyggggttygtyggggttyggtygttygttgtttatygataggtattaggaattgatttygtygttgttttttgttyggtttagttatygattagttgtygygattatggagaagygttagtgagttttyggtyggyggagyggtygagyggttaggyggtygggygaggagyggggaaggtaggggttayggtttygggtagggggttgttggygggaattttyggyggttttttttgagtygtattttgygygttttttaatttygyggygttyggggaggtygyggagygygtygtttgttagttygtattyggttggggtttyggygagggagggagggagttggygggtagggaggaggaggaggagaggaggaggaggaggagagaggaggagggagtyggggttggygaggaggyggtttygygtttygtygttygtyggtattttagttttygtygttygtttggttgygtagttyggaygygtygttattygggggtygtygtygtygtygttagagtygtygtygtyggattggtygtaagygtyggtagatttttttttttygggtyggggttttggggttygttttgttttttgtttttattttttygttttttttattttttttttaagtttagatgtagaygggyggtggaggtgggttygggygttygtaagtttgygtttttgtttttagggyggtggagagtygggagyggygtagagtaggtgatttttagttttygggtttaagggaatttttaaatgagagatttttttgtttgttttgttttttgygttttttttygttgtttttttygttttttttttttygtttttgttttttttttgtttttttttttttttttttgttttttttttttttttttttagggygatttttygaaattttattattttttttttattttttttttgtgggagtttgtgtgttttttttagatttggaggtgttttttgyggatttygtaggagtyggggttgggaggtggaattttagagaaygtatygtggaggygyggtttyggtttttgttttttttyggagtgtttyggaygygtttggtaaggttttttagttttggagtttygtaaagtttyggygggtgyggyggggattaggggygggaaaatggtgyggataatagggyggttagagtattttgttttgatygtgatattygyggaagaygygagattattagtttggagataaaaagggatttatttttttttttttttttaattygtyggtaaatttygttaagttttttttgataagtggttttagtattygygtttttttttygttttggtygttttttagttttygttttttygaaygttttatttttyg

SEQ ID NO: 6240 - DNA, 5693 bp, synthetic construct
  misc_feature 1..5693: note = Description of Artificial Sequence: Synthetic polynucleotide
  source 1..5693: mol_type = other DNA
tygyggttgttgggagagtattggyggtgggttgaggtttttggagagttygyggggtggagatgggggtyggttttttttyggygtttagtygaggagtagttgttagttgagtgyggattygagagagaattttygagggatatttaygttttttatygygtttgygtygggygttttggttttaggaggttgtttyggggyggggttttygggggtygagygyggggggyggttyggyggttttattatayggyggtttygttgagttyggggttgggatgygataggggttygttgtagtygttggtgtygtttattgggaagggygggttgggttygtygttgaatatttygtygggtatggggtgtagygtgttyggtaggtttggttyggggttyggtgtgttygggtgygagattatgtyggtgaatttggggttgttygyggygtgygggtyggygagyggyggttttagygtttttagyggygtygagtyggggttagaggtygttaggaagttggagtyggtyggggattgygtttgygaaggygggtygtgygygaagaagtygtagttgtttttyggygygtagtagtygttttggtagtttgtggagggggagygggaaggagatagggygyggtgagagaaggygaagtaggygggggattygggattyggggaggggattygggygggygagagaggggagygygygatatygatttaaggttagagagatttgyggaggtyggygttttttgagayggtggaygtygtaggtttayggggagggttggggagagagataatgagagatttygaaagggtaagagatttagattgttagagattatatatagagaygggagagatttygagatygtgggggatataygyggtaaaaattyggagattttagttataggttttttgatatttagagatggagagagatagaggyggttagagaygtagagatagataatgatttttaagtgttttagggtyggtgagagatatagagatgygggatagygagagatagayggagagatyggtagaggggtagagagaaaggyggaaaagagatttagagatgyggagttygyggttgagattygaaagttygagatatyggagggtygyggaggagtygaggagaygtagagagaggaaagayggtygyggttagagataygygtggaaattttygggggyggtagygagggagttaggagtgagttygaagatggagagaagtygatgygtttagagaaygtaagayggtggattagagatgagttttaggaatttttagagaagyggaggttgataggttyggggagaggaatygggtagggataaattagyggatagagtagagygygaaatggttgagatygggaagygatttggtygggggaaattggattygggtygyggtaggagygattggtgggttgggtygggyggggyggttttggygttttaaattyggtttttgygttttattaatttagtttaagtttttygtttygttaagtayggtygtygygtygatttyggtgagattatttgtatyggtttagtttagtttgagaaagagaaaattgagttttagygatttgggagagggggaggaggataygaagattttttgggttatggttagagtttygygggttttttggggtagaagttyggttttttagttttgtttygggttggttttgttagtatttttaggttttgaagtatttgaggatattgagattttttgagaagttggtgatagttatgggtttttttttaaggaaaatgtaaggatgagaattttgtttataaatttaggaggtgtagggatttyggattgtaaatttattttgttttaataaatttgtattaattttttgatygttttatatagttttttttttagaattttygggatattttgtttttttttattaggtggggttttgaaggattgaygtgggggaygttaygaaaggattattttgtattaggtattygttttgtayggygggaaaattagygagtttagaagtttgagttttttttgtaaatttattttttttgttgagttttgggattttagttaaggggygaatttttgatgttttttgttatttttttttttttttaaattttgaaatttgtttaaatggggggtgtttggaggygtggtttggaggtagtttaagtaatagttaaaayggttgttaattattttttaaaattattaatttaatttttttygaaagtgaaggggaagatggggagyggtaaatttggagttttaaagggatagggatgggagayggtygyggttygyggygagtyggaaaattagygaaggtygttgttttygygtygtgygygtygttttygtttatatggyggtygggtyggaggtaattggaataaaygtygtttgaaaagggtataaaagtygtagttggggttttgttygygtttttayggggagtygtyggtttygtygttyggtttttttttygttygttgtyggtygttatygtygggattttttagygyggattaggyggggttgtttygttgggggttggggagttttttttattattayggggaaygaggggtttttagtatttagttttttattttatttagygygtagggagaggaggyggtgggataggtyggggygggggygaagtggttttyggggaaattttggttaattatttaggyggggaaaaatttygggtyggtatygtttttattatttygttgtttygggtttagattttgtagggaaagaggtaaatttaggtggagagagtyggtgagtggagatttyggaagataygtttattattygggttttttagggttgggggtttgttyggggttgggggtttgtttagggttggggggttgtttagggttgggyggttggggygttttagtttgagttttgttattgtttggggtttttgttttgaaaagtatagtttggtattttgtttataatttttaggggtttyggttyggttttaaggtttaatttttttttaggttttyggatgtgttgaggttagtgatggggttattttttttttttttttgygtttatttgggtgtttagtttttgttttgttaatattgttattgaatttattttttaagagaaattgtttttttttaatttgygttataatttagaagtgtagatgttttttagatatagatagttttggggtttttttaaatttagaagttttagaatagaagaggagaggtgtttttttgagtttttagttttgggaagaataggatagtgagtttggtgagtttaagtaatgyggtttagggtaaggagttgaaaaaatyggatagggggagttgggatggtttattaatttagtgtgagggaagtgagaggaggaaaagttgaggtggtaaggggatagtttattttaggtttaagtttggtattattatttgaagttttttgtaaattggggtttttygttttttgtagttttaaagayggtggaaatttggggttggtttaatatttgtgtttttagtttgtaggaattttaggggtttyggggttggagggtggattatagttttgtttagagtaattgtyggtatttgggttaatattgttagatgttgtgygtatatatttygttatatggaataggagttgttgttttygatgttagtgagtaggyggtttggaatgaatttagatttttattttttttttttatattattttttagygttyggaatttattttatgttaagtatattaggtatagggyggtaggaaggttgtgygtttgttygtgggggtygtatgtatgtggatttgttagtattggttttagtgtgattggtgggagtgtgygygtttgtggagttgtgttttygtgagtgtatttgtgtgtgagagggtggaatttatttataygtgatygtgygatygtgtttagaygtgtgtttttggagtttttgaaygtaagtgtgagtgtattttgtgttttgygtgggtgaatgtgttattgtatttygtgtgtgtttttgtgtgtattattgtatgggtgagattatgtatttgattttgtgtttaggatatgtgggtgagtgtatatgtgtttgtgatygtgtgtttagygagtgggygatgttttggagyggyggaaagygtgttggtygggatttttygtttttagttttyggaataggataggtgyggaatagygaatttyggggygttttttattttygtagtaggtgtayggggtggattttaatattttagattygtttaagyggtygtttagyggaygtatgygtygyggatttyggaagaaggygtgttttygggygtttagggygtttagttgttttattyggygttttttggatygtyggttttgaaattatatttgggatagaggagggggttgtgaatttaggattaggagtgttttttttttttttttttttttttttttgattgggttgtttttgttgggtttttgygtttttttygtattaggattttttygaggyggggtygggtyggattaggtygggaggggtggagagaggtttyggygaattagttaagggtgaaggatttygyggattygtggggygatttataaagatttgggttttttggttttyggttygttygyggtttgayggttttataaaggtttttttttyggtayggttttygtttyggtttttyggtttyggagttagtttttggtygtttgtttgttygygtttyggygtagggagggagggggtatygtttgtttttttgttygaaaggtggaggtaaagagggatttyggattttagagaggtttataattttttataagtaaggyggggggyggaatttagagaggtaaagtgattygtttttaaatygtaatattaggaggatagtagggttagatggaatttttyggtttatagttttygatttygggtaagtgttttattygggygtayggtttgtttttagattagaattaggygygttygtagttaaggaagtttggygggagattttttygaggttttyggtttttaggttagyggggttaaggagttgtgttygtttygggtygtatttggatgaygygtatgttgaggtyggttttttgygttagttgttygyggatgtggygygtgggtttgggygtggyggygaaggtagttttgagygtttttagttgtttggttttgatggtggtgygggggtygygtygtttggtgttygagttttgtttttygttttygttgttggtygtttttttgttygaygaggtygagttgttygtttttttggggtygttttgtagtgygttttggaggttyggggataaattgyggttygtataggatgatattgygggyggayggatygggaaggggatagyggygttagygayggttagaygtttttttagtttagtggygggttttygtyggtttaagttayggtttgtttaggttayggttagtttygttggatttttttttaaatttgygatagttttttttttagggattyggtgttygtttattttttttaggyggggttgggtttttggaggggygtttttaagtttttttygygyg

SEQ ID NO: 6241 - DNA, 589 bp, synthetic construct
  misc_feature 1..589: note = Description of Artificial Sequence: Synthetic polynucleotide
  source 1..589: mol_type = other DNA
tygtttygttttyggggttttagggaggyggygattggagtttygttgtttatttataataaaagaaagtagggttggygtttttataygygtttttatttattgtyggtygyggggagaattttatttygygttttygttagggtttyggggagttttgggttggyggaggygaataagatgyggtttgatagaattaggtygtgtttttgtaaattttaatgtygtttygttagtygyggyggttttttagattttatttgtyggggagtttygagtygygtaaaatttttgtaagttgtgttttgtagaatgtaaagtygggttggaattygttattttygtygttttagtygattyggtygaygagtttttttttgagtttttygggttatttgtygggayggttatttygttyggtgaagtyggtgtatttattatattttttgttgtttttagtagggaagtyggyggtgaggygggggagtaggtatggtggtttyggggtttatgyggggtttattgtttatttagaatagyggttattgttgtttattagggygtatttatygttggagttttygyggyg

SEQ ID NO: 6242 - DNA, 1294 bp, synthetic construct; identical to SEQ ID NO: 6232
  misc_feature 1..1294: note = Description of Artificial Sequence: Synthetic polynucleotide
  source 1..1294: mol_type = other DNA

SEQ ID NO: 6243 - DNA, 1373 bp, synthetic construct
  misc_feature 1..1373: note = Description of Artificial Sequence: Synthetic polynucleotide
  source 1..1373: mol_type = other DNA
gygagygtttggygttttttggggygtagtttygagagagtttttttygggatttyggaygtaaggtttttgagtggttttggaagttggatttttyggggattttgtttygaattttggttatttggaagtaattttatygagygttttttttattgtttagtttygaatygtggyggaaygygtttttyggtttttttagagttttttttgygggagaagtataatttttttaggttttggagayggygtttttatattttaatttygtttagayggaagaagtgagaggtgygggyggtttygttatgatygygggaggagagygtaaggaggtttttygtaaagttggaggttaggtyggagygatgtttygggagyggagtttttttagtttygggtttttagtygyggatagttggtagtgttaaagatttygttattatttgyggttygtagttgygattyggtygtagagtygggtatygaggaaggygtaaagttgagtttgggtaggtataayggtttttagggattggtattttttagttygggttgttygygggagggtagygagttgtgttaagggtttygttattatygttagygtatagttyggagttaagygygyggttgaggaaygattagggttttgtaaagttggagtttgggygygtagattttyggatyggagttttyggtttgaggtygttygttaggaggaaaatgaggtygttygaattaagttgggaygygtagtaaagttygagtttttygygtatattaggggttygggygggagyggggagttttggggayggagaaggggygygggaygtttggattaggaatttatttgaygtygagtygggtagygtygaggttgttttttygygttgygtattygttygttygtttygtattttttttttttttttygggygttygyggtygtygygtttygggttttgaatttttygagttygtygtttygygyggttggagggygtyggttgtatttattygttttttggtaggagtygygygygtttttttttttttttttygttttgtgtttttaagatttttttttatttttttttttttagtttttattttttttttttttttttttttttttttgygtttttttttttagttttagygaatttaagttygggayggaggttgygggttttttyggygtagtgttgggygtttygygygygtttttggtttatttygttygttyggtygttgttygttgttyggtygtttttyggaggagtygyggygttaagtagttttttatttagyggttggaaaygyggtataaatatgtagggattgagtygtgagtttagygagggtyg

SEQ ID NO: 6244 - DNA, 1524 bp, synthetic construct
  misc_feature 1..1524: note = Description of Artificial Sequence: Synthetic polynucleotide
  source 1..1524: mol_type = other DNA
gyggttttgyggattttaggtttaagggggtatygttttaaatattygaygygtttttattattagttttttattggtaggttttaagygggaaygggattgggaaggtttygggtttggggggttttatttygatgttttaggggygttttgaatttagttttagttaggyggyggtattttaggtagygtagggagygygatyggttyggggagggggaggaygyggygttttygttttttttyggttygtttgtttatttttaggtttttttgttygtyggttttttggttttgtttattttggggttggtggtgggygygggtygggtttaggtttatgttyggttttttttattgtttgttttttttttttattattttattttatttttttagtgttyggtttygtttygttatyggattttttggaatgggggaygygggygygaaataygaatttagttatyggtagttttttttttaygtgygttyggttygtagygtagagggyggttyggggtgggggygttttatttttgttttttatggygtgtaygaagtttttttggtatagttggttgygaagttttttttttaggttgaagtygyggaygttgaygattttttttaygttygataagttttygttttygtygtatygttggyggttaatygggygttgygaggatttaaattagagagttygggatattattgtgggggttggaggtygttttttaatttgggtttagtattaataggtgtagtagtygagygttttttgtattttattattgtaatttaagtaattttgygtaattgttaaagatgttgaaaagtaggataaggagaggggttygtatttygagggtttagttgygttttaygyggggtattttttttyggtgttttyggaagtattgaagggatatttggggatttttttttgtttttygttttygaaatgtgttgggtttygtttattyggtygggagtttggttatgtaattygygaagggggtttyggataygggttggyggggtaaatgtaggttttaggaggagtygttgyggygttyggttyggyggtaatagtagttttagyggtygyggyggtagagtygggaagtyggaatygggggtyggyggtatttttaaagttggagtygttttygagttatyggggaagttggaaagttgaaatggaagggttgagattttagtygttttygtygttygttygttagtgtaagaagaggaggtggggggaggagaatyggggtttggaagggggagaggtagayggttygttataaagttyggatyggagattttaaaaygtattagtagttgttttatttttttataagygygygygtatatttattttttaaggagatttttttattatttttygtatttttttgttttttttttttatygtttagygttyggttttttagttttttagatttygggygaatttygagttygtttagtttttttttaygttttttttyg

SEQ ID NO: 6245 - DNA, 1009 bp, synthetic construct
  misc_feature 1..1009: note = Description of Artificial Sequence: Synthetic polynucleotide
  source 1..1009: mol_type = other DNA
gygtttgtagygaaggattygygtgggagygagaaatgtttttgtttagtgtttygygygttggatygygggggygagtttgagggtggagaggtygtygggtggaggygygtaggggtgygtgggtgggtgyggaaggagtgtagggtatggaggggaattttggggyggygygaaggaggagygtttggaaaggygyggtgtttggttatagaggggttyggagtgggagtgtaggggtgyggggagggagtgtagggaygyggggagggagtggaggggtggggaygtgttggaggggygygtttygatagaattggagaaattggaaaagtggaggggyggggtagtggttggaggaatttttgaagygaygyggggaatatgtgaaggagtgttatgttggaatttggaggggaggggggatgttggagaggtatayggtgatggatatggaaggattygggaggtgtggagtggtgggttyggttygtygygggaaggatatagagggatataggttgttttggagaggygttttyggatatttggaggggygtatagtgttgggatttggyggygtttggggyggaggggygygtyggatttagtygggygygttygggggtygggygtagtgggagttgaygggygtttagtyggyggygttttgggttyggttaggygtaggayggttttggtagyggtgtagtagtttaggttagtttttggggggtttttggttttygttttttygygygtttyggttagtatygttyggagttygggyggggaagtgggygttygyggtttgggaagttgttttttygttttggagtagagtygtygttgyggtygttgaggaaggayggagtagaggttygygttgtttggggagaagattgtggtgttatttygtygggaatgaagggaaatgtagyggttgtttgygtttygggattttaagaagtatagtaggtaaagagaatagttayggttygttatttyg

SEQ ID NO: 6246 - DNA, 961 bp, synthetic construct
  misc_feature 1..961: note = Description of Artificial Sequence: Synthetic polynucleotide
  source 1..961: mol_type = other DNA
tygtttttttygatatttaaaagtttyggttttgygtaatattgyggattttttttagtttttygttygttttttttttygyggggtttygtttagggtyggtttttygtttttaygtygtagttygggttagyggggttygtygyggtggygttygyggatgttgtygtattggtygttgyggtayggayggygtagtttygggygyggttyggtataggygtyggyggttttygttagttagtagttyggygaggygttggtttatttatggttttygggyggyggtttttgygtttagttttgygygtagttttygtttttygttyggggtygtygagttttygataygggygagatgttgaayggygtaggtttggataaagtttttaagatgtttttgtygyggaggtygaggattygttygttygtgggtgagttgggaggggygyggygagggagggtgggttyggggygggggyggygyggggygygtttgyggttatgygatattgtttygttygygtttygtttttttttttgggttttttgggttttttgggttgtaggattygtygaygyggygygttggtygtaygggggttgggygtygttgtatttgyggggttaaaaggttttaggtyggggygaggtgagyggygggygttagagattttyggttygtttttgtatagatgtgtgtgtgtgtgtgyggtttttttgtgygygtgttygtgygtttttaygygyggatgyggtttagggatgygatttaggyggtagttatygygatggtgggtayggtttggyggygtagagaagatgtagttttttttgtyggyggtyggtatygttgtgttgtagagtttaaaagtagagggggaaaaaggtattygaagggtttttygagtgatttttattatttggagtttygggttttygygygtttatagyggygayg

SEQ ID NO: 6247 - DNA, 961 bp, synthetic construct; identical to SEQ ID NO: 6246
  misc_feature 1..961: note = Description of Artificial Sequence: Synthetic polynucleotide
  source 1..961: mol_type = other DNA

SEQ ID NO: 6248 - DNA, 980 bp, synthetic construct
  misc_feature 1..980: note = Description of Artificial Sequence: Synthetic polynucleotide
  source 1..980: mol_type = other DNA
gygtgagygaggtaggtatatayggattygyggyggtttgtttgtaatagygttgggaatgtatattggaaaattatattttgtatgttgaaaaygaataattgtttgatatttgggttgttgtygagaaaattaygyggtagyggtaggtttygagttaggggtygttattttygatggaatatttaaatygtttatttttatygaatttttattttttaaaygtatttttygygygygtgtatatttttaaaygtattttygatyggaataaagaggggttttagatttttttygtgygtayggggtagtygggagggttaygagagggaggtgtgtgtaatggaagtatygagatagatagatagatagatgtttatgtattgttgtygattttttggyggyggggaygggagtyggaygygagggggatagatagggtgyggggataggyggttygygggggygggggggttatygagggggttattttggttygtttaggtygagggggttttttyggtgttttygaagygygtgggttattygtgtygtatgtyggygtagttgttygttgtggtaaggggggggyggtygggtttyggagygggtygggagggygyggggygygtatttygyggtaggtgagyggygyggttgtaggtgagtagtagtttyggttygygygtttagtttttttygtygygttygttyggtttataygtttttygygygygygtygttttygtttygygygygttyggtygttygttygttygtgggattttygygaggtygygygtttttaygggttagggttgttttagggtgygggtaggygagggyggtttaggggygyggggygaggggygaaggagttaggaggttgagaattgtatggtagttttgtttgtttgtygygttgygygttttattttagtyggyggtttygggtttgtatygggyggggtaggggagyg

SEQ ID NO: 6249 - DNA, 408 bp, synthetic construct
  misc_feature 1..408: note = Description of Artificial Sequence: Synthetic polynucleotide
  source 1..408: mol_type = other DNA
tygtattttttgaagttygttgggygygttttgggttgtttttttttgagtagtygggtttagagttaaggygygatgattgtygygtaagttagggtttaygyggtyggggtttttttttygtttygggygtattagaggttagaaagyggaaagyggttttgttaggttaaggtygatagaaatygagagtatgtygttatttgtyggagagaattgttttgttaggttgttataggtgatttgttygygygagttayggtttttgygtagagtttttttygaaggggagagttagagttattygygggtttggtyggggttttttttagttyggygtttaygtttygygttttgygttygtttttgyggttgtttatgtttaggtgtttyggaagaggygtygyg

SEQ ID NO: 6250 - DNA, 2190 bp, synthetic construct
  misc_feature 1..2190: note = Description of Artificial Sequence: Synthetic polynucleotide
  source 1..2190: mol_type = other DNA
gygtttygaaatttggttttttgygtttaggggaaygaggtataaattttygttatttagttttattgagtagagattgygagttygaatttttaagtttttyggggttttgattttttaatggyggyggtttaattgttggtaaaattttyggtttttgattgttttatygttygttttttaaaygtttagygaaggttgatttaggtggygggyggattttatygattttttaaattatatygtttggttaaaatygttygtttttttttygttyggattttaaaggttaggtttgtaagttagtaagttaayggtatttgggttttgggttgtttttgtgggttagggttattgatgttygygatayggattggatygygtattaygtttgttttyggtagaggttttattygggtggttgagygtagygtattggggtttygyggttygagagyggyggggaggagygggygttygtygagygtttttygggatagttyggtttggggatttaagygggttatgggatgtyggygttggtttttttttgagatttttttgttttttygtaggtaygagttttttttaaatyggttttttttttatattttygtgaygygaggtygyggttagtgtttaatattattaaagtttyggttttagtttagtttygggtagtttggtaggtttttaggagtttttgttttyggtttygggggattttgygtatttgttttaggttttttgggaatgggttttgggtgttaggtaggtttyggtgygtgttgtttttagtgtttagggtttyggtagtgagattttaattygatagttggataagggattagygattttgtygtaaayggatagttttagygyggattyggtttgagygttgatgttygygggtttaggttagttatttttygaggygttttttyggagaaagggygtagyggttttaagygtgttygttgtaattagtgttttaggttttygtygtagttagttttttygggttatagtttygttttttygygtgtatttygttttggtttyggaggttttgtttttyggtygttttatygtagttygttttaggtttyggtttttagtygygttttatttgtgagaagtagatagttgagtagygygtatagtaggatttyggtgttttagtagttgattatggtgagygygaygyggtttgttygttyggtgttygygtttttygyggttaaygattyggtygttagagttygttttttygttygtygtygtyggtttygygttttgagygttygtttygyggttttagttaggagataattattttttygggtaattttygtygttaggygttygttggtygttgtattygagtttyggagttygtttygagtygtygtygttgtyggggaggagtygagaggagtgttygtttggygygtttygagtttttygyggatttygatgaagagtagtygagggygggggygatttataatttttttttagtttattttttatttyggtatttttttttggtgaygttaaggggttttttattttttattygtttttttatttattttttttttttttttaggttygtttttttgyggttayggagaggggygggggtygaygagggygggtggttyggggtygagygygygtggggaggtgttggygaygygggttygggagygyggtttyggtaggtttagggtttttgtttygygtttttttgtttttgtttttttttttgtttatygygtttaggaaatttttgtagattttttttattyggtttatttagttttgggggtygttygaaattggggaagggataaggttgaagtttygtygtttggttttaggggyggaaagttygatttaagggaagttggtygygttttygygayggtgtttttggtayggaggattgaggygtagttyggttgtttttttttgtttgtttttttygygttgtttygtygtttttgatttttttagattgtttygagaagtttaggaaggtatyggagattttyggtataaggtattgaatttggagygtttgaggggaattgaygtttgtttggtatttttgggaagattgygaattagtttaggttttaggggagygtgttygtgtttttttyggtygtattgatgtattyg

SEQ ID NO: 6251 - DNA, 2190 bp, synthetic construct; identical to SEQ ID NO: 6250
  misc_feature 1..2190: note = Description of Artificial Sequence: Synthetic polynucleotide
  source 1..2190: mol_type = other DNA

SEQ ID NO: 6252 - DNA, 679 bp, synthetic construct
  misc_feature 1..679: note = Description of Artificial Sequence: Synthetic polynucleotide
  source 1..679: mol_type = other DNA
tygagtggagagtagyggtygtagygyggygttaggttygggttgggttggtyggygygaattttygggggygtttgggyggttaggtygggtggyggttgygtaygtaggagtattttttgagtttagtygttyggtyggtttgattygygggtgatyggataygagtaaygygtgygtttygatttgtgttttgygyggggtygggyggggatyggtygggggygtygygygttyggtygggttgattgtygggggygattttygyggggtaaggygggggygygggagtagygygtagttgyggggttattttatttgagygttttgaggttagggtyggggtttgaggatayggygttgggtttygggggaygygggtttaygtyggygttygagygttattttttygtttttygtyggtttaygtagtttyggggttyggtaygtgaagtgtyggygygaggttgtttaggttatygtatgggtygggygataaataatygtataggatatataatattttggattgttataagtttttygtaggaaaagataaataatatttgaggygttgyggygyggttttttygggttgaataaaaattaggaggtggggggyggtggggygaagtaaataatagaatygaagaattgtygtayggagtttgggtyggyg

SEQ ID NO: 6253 - DNA, 2013 bp, synthetic construct
  misc_feature 1..2013: note = Description of Artificial Sequence: Synthetic polynucleotide
  source 1..2013: mol_type = other DNA
tyggtagatttggagaygttttyggttttttgggagtttttgagggtttaggtygggtggggygygttttgyggtaagttttttttttttagttatygttttgaggagtagaaggygyggggatatatatatataygttygggtaygtygtygtatttttttaattgaattttggtgttttttttttgtttgtaaagatattttaggttttgggtttgggagttgttttygygyggttttgtttgattttagyggggttatagtagtttggygttyggagyggttttagygyggygtygygggtttaggtgggtgttttagagagygggyggttgygygattgaggagttggaggygtattttttygttygttagayggttyggttygygttttygttttatttttttygygtttttttttttggaaaggaaggtyggagttgtatttttaaagygttttygtttttatttttttyggttygtygygttttaggggttttataaatttgttgtaagtygtyggggttgtagttgtaggtaagggtgaggyggggtygyggtttgggttgtygagtaygtttttttttagttttaagygtgtaygttttttayggaygygtatttagtattttattttygtygttgttttygaggttttygtttaattagaggtygygygygtygygtygtyggygggtagatatatyggtttttyggtttgygtttttgyggttttggtttygttgtagygtttyggttyggttatatttatygtttygggygygtygttygygygyggtttygtttygggtyggtatttttyggttyggttgttttyggttttygtttyggtttyggttttygtttygtagggttyggtttygygatggtggtygyggyggygagygyggtagggagggygtgtgtatgygygtgagagygygtagygtgtgtatgtgygtgtgygygggagggtttyggtttttttgygygtttygtttttgttttttgttygttaygatgygatgtyggtagaatttttatygygygtttttattgttyggygtttatattygygtatataygygtatatttaggygygtatattyggtttygtattttygattygtttttttggagygtttataaagattttttgtygggayggtyggagtttgyggagygyggttttgggttttttygggattygtyggttttaggtgtttygttgtttttygtagggatttygygggyggttyggttttygtattttgtttggtygggtygyggtygygtttttagttygaatttgggtttaggtgtygattygggtttttygtattttygygggaagygtyggtttttttygyggygtygtygttttttttttttttttttagttyggttttttyggygtttttttgttttgttttatttgtttagttyggttttygtttttttygttgtttttygtttgtttygtygtygttttttttygygtttttttttttttatygttttgygttgttttttatatttttygtattatagygggtgtygttygtygttygyggggtttagggttygagygygtagtgggyggygaggggattygttaygttyggtttygtygtttttttygtttttygyggtttygyggttgttagtttyggtttggygttagggtggygaygtttygygttagtttyggttgtygttgatagtttttatttygttygggtttaaagggatagygtattyggttygatyggttttattygggggtttyggggaagggatttygttgygygggaatagttyggggyggtggtatagtyggggtygtgygggygaygtttttttygtygtygtggagttyggttttyggggttggaggtgagttaaggagaaggayggttagattaygttatttagggggygtttagyggttaagtttttgggtygataatgggtgtgyggyggtgtaggttgagygttttggattgygtggyg

SEQ ID NO: 6254 - DNA, 1501 bp, synthetic construct
  misc_feature 1..1501: note = Description of Artificial Sequence: Synthetic polynucleotide
  source 1..1501: mol_type = other DNA
tygaaagaggggygygggtgggygygttttttygygagtattttatttaagggggaattttttttagygtayggygaagttttttttyggttgttttatttggtagtttttttaggatttyggttagtttttaattggttttagtaatgtttagtyggagtttttttgggttttygagtgggagaaaagtgagagtaggtgtttttttagyggygygtttygttagggttyggtaggatttygtttttaagtyggggaaagttggtyggygtttttttttttygaygaagtygttttagggttgtttttagaggaygygyggtaggtaaagagaatgaatttgagygtttaygaaaygttttgtayggttttygggagttgggagaaataggtgttttttttygaygttygygggygaygtttgtygtattttgttygttgtygygtttttttygggtatttttygttttyggygtttttgttttygtttttagtgttagggyggaggtagtttyggttygtaggtaattattgttagyggagttygtyggggagygggggtgggygygtyggyggtgggygggygggygyggyggggygygggtataaaggggygyggygyggggtttyggagtttggttttygygtagtatgttygttagygtttygtygygtygttygyggtygtygtygtygtygttgtygttgttgttggtgttgttgggtttgggyggtygtygtttgygtgyggagtygggygayggygygtagatttgggttygtttttygyggttttttgttttygaggtygygggttttttttagggtatttttttygayggttttttttgggtygtgggtagygtygtttattagatygagggyggttggtagtagtayggtaagggtgygtttatttgggataygtttatttattattttttggtattttygggagattttyggaaygttagtttgtygttgggygtttygtygtygttgtagttygttatyggggaygtagttagygatagttataataaygtttttygygatayggaggygttgygygagttyggggttatttattatygtttttttatttygtgggygygagtgttttttaatggtagygygggygtttttaatygygaggggttgygttattatyggygtttgttggagyggttgygggagttgggygtgtagttygtggttattttgtattattgggatttgttttagygtttgtaggaygtttayggyggttgggttaatygygttttggtygattattttagggattaygyggagttttgttttygttatttyggyggttaggttaagtattggattattatygataatttttaygtggtggtttggtayggttaygttatygggygtttggttttyggtattyggggtagttygyggttygggtatttggtggygtataatttttttttggtgagtgygaggggttaggyggagggttayg

SEQ ID NO: 6255 - DNA, 668 bp, synthetic construct
  misc_feature 1..668: note = Description of Artificial Sequence: Synthetic polynucleotide
  source 1..668: mol_type = other DNA
tyggggtygttygtaygtaaygttttygggtygggttaggttggttagggtagggyggtygtttttygaggaattgygggyggggyggyggggttaagttgagygttygttttgttttyggygtttygyggttgygggyggagygggttttgyggagtttttyggtygtttttttygtagttttygtttttagggaaggtaaattaygtatyggttygyggagagaygtygtygggggtttttgtggtygygttgggggtygttttttggtgttgttttygtygggttgggygyggtyggggttgyggggttgtagggttggggggyggyggyggggtygggttgggyggtagtagttgttggagygyggygtttyggttgyggttattagtgtagggatgtgtttyggttygtttttattgaaatgyggygtttygtatagttttattttagtttttttttttagaggagggyggyggyggyggyggyggygggygygttttttttttttgttttattygtttataygttttttygttttttttttttttttttttttttgygtgygygtttygtygttttygttttttttggtagggygtatttattayggttgygttttaggttttttttttttttagygttttttttttatygtagtaatttyg

SEQ ID NO: 6256 - DNA, 1006 bp, synthetic construct
  misc_feature 1..1006: note = Description of Artificial Sequence: Synthetic polynucleotide
  source 1..1006: mol_type = other DNA
tygggygttttgttygttygttygygygttttaggatttaaagtygggttttaagtyggygttttaygtygaggtttygtygtagttttyggagttggtygtagataagaaggggagggagygggagagggaggagagtttygaagygagagggtygagygttatgygtygygttagtagagattatattaagtatttgygtggttyggaggagatgggyggyggtttyggagtttygtaygagggttttttgtaygtttygtygtygtttgygtygtattagttttttgtygtttttygttttatgttygtggtttttttggggttggggttgggttaggttgtttgtagygtygttttgtttttttattttagagygtaggtgagtggttatttttttaggggatygyggttgagagygtttatttttttttttygtatttggaaattgagtttggyggtagggttgggttatttagagtttgtatatttyggaagggaaagtgattttagaagggagagaggaagtgttgagtttggggataatttggygtagggttgtygggygtattttgtttttttttygtttaygtattttagtttttyggtgttttgggggyggatttttttggtyggaygatgggtttgaattttatttygttttttygttgggaaataatattggttttttattttttttggtagtgattgtatattttttttttttgttattttttatttgaagttaagaattaatttttgtttaygtaggaaaaaagatgagygtttttatttgggtatttattttttttttttygtttattattyggygggtttyggtttttgygtttggttgttttgtaggtgtgttggggttayggtgttggagggttgygyggagygggaggtygyggtgttygtgtttaggtygtttaatgggtgggtagaatgatayggygygattagagaggygygggttygggatgggggttttgyggttgtggyg

SEQ ID NO: 6257 - DNA, 867 bp, synthetic construct
  misc_feature 1..867: note = Description of Artificial Sequence: Synthetic polynucleotide
  source 1..867: mol_type = other DNA
gygyggaataaggygttgattgttttttagttttttttttttygygttttttyggtagtagygaaaattyggaaatttgattttggttttaggagagtygggttttatgaggtgtattgagtatgttttgtagggttyggygtgggagggaygygttggygttttttaggttygggyggaagyggygttygtaggygttgaaagygagygattttttgagttygggtggttyggygggtaagggyggygygggagattygtagggygygggygyggattyggggaattagggttatygttgygggyggatgggggttatygaggyggttygtttttaggygtatatttygtatatttttttgttaagtgaaggggttaaaatgtatagatgggggagtttatttaggaatagaggygygagaygtatagttatttttgggttgggagtaygagttagtagattttyggagygygttaaayggataatatgttyggtgttgtaaatagaggtttttgttggtagggatattggaaagaagggyggagagggagtatagygaaaggtggggatygtagaatttggaatttttgyggagatyggaaagaaaattaatyggagtattttttatatgtagagttayggaaattgttttggaaagagaaagtggtagygtttgggttttttyggttagttygggttagtyggttgygygtgygaagttttttttagyggagygggatyggtygyggyggtggatygtggyggtttttgtatttttgttttagtygygtttggaaatttgagttyggattygyggttgttgtaaaattygtttttagtttattttattgygaattttgttttyg

SEQ ID NO: 6258 - DNA, 1072 bp, synthetic construct
  misc_feature 1..1072: note = Description of Artificial Sequence: Synthetic polynucleotide
  source 1..1072: mol_type = other DNA
tyggttgygtygttttagtttagggaygttttygttttyggttgttatttatyggttatygagygttygtttygtttygggtttattatgtttgttgtagtttggttygtattagaggygygataataaataagtgtattggattgggttttgtattygtttyggagtagttgttttagagattyggtgttgtttatygygttgttattttttyggygttygggaggaagaygtaattttttyggagttttttttagagttatygggttgttaggataagttataggtatagaaygaygyggttgttgttygtttttttttttttttagaaattttaaaggatgtyggtgatagagagttttaattaatgaygattgtgygtygtatttggggaagggatatagaaaaaaattttgtaaatatygtgaggatgaaattgttaaagggatgtaagagttttttaaatattaattaggggtygyggyggyggygggttyggygyggagatagygtyggygggattttagygyggtggtygtygttgygttggggggyggaggatagygtaggagttgtagtygtygttttygttggagtagtygaggggtyggtgttatttttgttygtttttttattattatgtatagtgtgygttgtaagaagaaggygggagatgtatgtatattttygygattygttttttttggttygtttttyggygtgygttattgattaggggggaatgtggtgaagayggygaggaggagagtygaggggggaggggagggtyggtyggygygaatttaggtyggagggtgygaggagttagaggaggttggagggggyggyggttatagttgggtyggagaaagttgttttttatgtagatggtaattgtgagtatttttgtgggggggagggtgtagygaaggttgttagggatttygygatygygttttaataygtattggagygagtgtgygagtgattatgagtgtgagygggtgygagygttyggyggggttgatygttaygttggyggggtyggyggggttaggtagtttttttygyg

SEQ ID NO: 6259 - DNA, 1633 bp, synthetic construct
  misc_feature 1..1633: note = Description of Artificial Sequence: Synthetic polynucleotide
  source 1..1633: mol_type = other DNA
aygygygtatatatattygttttygtttgtttatttttttttygggggagtyggygygygtttttatttttgtygtatatttyggygagtygagttygtagygttttaggattttgyggttyggaattyggattgtagttttgaatttttatggtggttttttaaatattttttttttttttttttttygttttgattgtatygtttttatttgggggttagaggagtaaggtagtagtttttttagttagtttttgttggtttgttatygtttatttggtttataaaagtttgttgagygtagtttagagggttgygttgttygttttttyggttggtagaagggggtgaygttgggtagyggygaggagygygtygttgtttttggygggttttyggtttgaggggtaaggtgaagagygtatyggtygtggggtttatygagttggatttgtatgttgtattatgtttttttggatyggggttgtgatttttttttttttggggttgttgtttttttttttygtyggggyggatgtgaaggttyggagttgyggagaggttygttaggygtayggtgttaagggatttagtttggyggatattttttattaggagatygtaggtaagygygggygygttgtaggggtaggttgtagttttyggttgtygtaygttttattggtygttyggygtttttttttttttttttgttgttgagttggtgtttattttttgttatygttatgggatttygygttttygtgttgggyggyggatgtttttgyggttttttyggygggggaaggtgtgygttttygtygttttattgtgtgtataygygggagtattttggttttygtttttygttgttttygygtttttttattttttagttgatggtttaggttyggttggttagggagttygggttatttyggggyggttgtaaggygtagayggagagtygagtygggygtttatttygygttttggttygggtaaatttggaagaattgygatygtagtttgtttagygttatagtttgagtggygttttttttattttygtttttgygtyggtaggggyggtggagagaygyggagggtttttttagttttttttttttttattygtttttygggygatagagygttyggygttygggtygggggygggtaaggttgggagggattttygtyggggatttggtttttggaygtyggygttttaaggttggtttggggattttaygggttgtttgttttagatgtggggygggttttttygttagggttttttagtgtttttttagttgttgttggttatttagggttyggggatattttgttattyggtttggagtyggtttygtttgttagygaatagttaattttagygggtggtttagttggggattygggttygggttygggggtttygtgtttttygtatgttyggttattggtattgttttattaagagtttgagagygtttattttttttttyggygttagtgtgtgtagtatttggttttygataatttgygyggtagtttgggtgtttgtttttyggtttttagttttaatygaattygagtttttttggggttttgtgaatgaaaygtgtyg

SEQ ID NO: 6260 - DNA, 1143 bp, synthetic construct
  misc_feature 1..1143: note = Description of Artificial Sequence: Synthetic polynucleotide
  source 1..1143: mol_type = other DNA
tygyggagttttygyggagatttgttggagttaggttgtttatttttatttttttattygygygttggtttagaggtttatttaggtagyggttttggtgtygagggggtaggtgtagygttgtagtgatgtttagtggtttygtttttagttatttgttttttaatatttgttagatgtttaggyggggtaggttygaggtgtygtyggttttgggttttttaagttagtttaggggtatttygyggtaggygttttygatatttaygygtaggaatagggagggygtatygyggttttygygtttyggttaggtyggtaaggattttatygtttygttttygggtggaggygtttttttttatttttttttygygyggggttttygttygtagtttttttagtagtttttttygtagttttagygtttttgagtygttttggttyggatyggttaaggaattaaygagygygtatygygggtttygggygtagggtayggagtyggtygygtygtagtttttygggtatyggyggyggtgattaatttgtaattttagygtttagagttgttatggtgttygygggyggyggyggyggygatagtgggygatyggtaggattagtgttaggygyggygtttagggygggyggggaygygggttttttatttayggyggtttagtttaggtagygygttyggttyggttggggtygyggtttaygttygtygtgttatttattgagygtygtygtygtygggtaggttgggggaggggtgggagtyggagttttygggtttttaaaaaattattattttatttaaatttttaaagttagttttgttatagggattgtagtgatgtygaagggygggtatygtagaggaggttgygtygtagttggtggggagygttagggtyggtattggtagtttttttttgtyggttgttattygtagttagttttatagtaatagttaggtttttatttgygagtttttttygggggtttttygtatttaatagtayggyggyggtgtgtaygggagttygtygggtataygyggggtatatttaagtgtattgttaggaggtygggagtttagygtgygagygtgaggttagattgtgtayggtatyg

SEQ ID NO: 6261 - DNA, 1143 bp, synthetic construct; identical to SEQ ID NO: 6260
  misc_feature 1..1143: note = Description of Artificial Sequence: Synthetic polynucleotide
  source 1..1143: mol_type = other DNA

SEQ ID NO: 6262 - DNA, 1371 bp, synthetic construct
  misc_feature 1..1371: note = Description of Artificial Sequence: Synthetic polynucleotide
  source 1..1371: mol_type = other DNA
tyggttgagagygtatggygttttgagtagtgtaggtttyggtatygagggyggaaagygttttgagtttatagtygtaygatagatygtyggtttgggttttttaggaattttttgtagttttgttyggttttygattttygttatttattagtttttttaggtatttaagagttttttagyggygggttagggtyggttttttttagtaggtttttttggagagygggaggaagataggaggygttttttyggtggagggttttttagygaygtagttaggagygttaggaggttataatyggaggagaggttggygttttagttttagttttagtttygaagygattttttttttttygaggtggttttggttaagtttttagttattttygttaaatgaggaggtgggygggatgtagayggtggagygggaggtttgggygygttagtttgggagttagtgygyggggtagggygaygggtagygyggggaygygaatttttaatttttgygtttaagaygaaggattyggtttygatttttttattattyggygygtattagygttygtttagtgatttttaggtttggtggtggttaggggtgggaggtgagtygaaagggaaaaagttattttatttaagtygtygtygggttggagttagtttgygygggtttygagttttyggygayggygttagtttttttygttygttygygyggtgttttygtyggtagttttttyggatttygygttttttttygggygttygttttttyggagttttaaygtttgtgygygtatttggtagtagagatagtagtagtagtagtagtagtygyggyggygatagtgttaggggtagygagagygggttagagtttatggttggtggtygggttggtygyggattyggayggtygggagygggygyggyggtygtagagayggttttttttygygyggttttagygtagattttagatttggagtygtgygggyggagaygygyggggttttttttygtttygtygtygttgggtttttagygttttyggattygygggaggataggaattattyggagtgaagttgygttaggtgygggygggygggygggygtgygyggggyggggygtaygtgyggtaggggaaggggttttaggttttagtttttagygtygggygagtttttttttygtygggttgggtgtttyggtyggyggygttygattagatttgagtaggtgttgttattattattaggaaggagagggatttagtttttgttttaggttttyggggygtgtgtagttttygtagggggttgggattatygggttaggygggygtygtaggagagayg

SEQ ID NO: 6263 - DNA, 1545 bp, synthetic construct
  misc_feature 1..1545: note = Description of Artificial Sequence: Synthetic polynucleotide
  source 1..1545: mol_type = other DNA
aygygaatttygygggtggtttygggtggtgggttttttttagygygtagttttygttygtttttttttyggygttgtagtygygatttgggatygaayggatatygttttttyggggtttyggyggygttttgatttttattttttttygtygtagtttttggtagggtatttttttggygygaygtygygttttttttygggatygttttttyggttttttagggtgygtttagttgttgttygtgygtttygttagtttgagygtttygggygggyggyggtggagaagtttagtttagttttttttagtygygttttyggttygygttgtttttagtttgtaagtttatgaygtggygaygtygatygagatataaagatygaggttgagatygttaggggttgagggtgaggtygygtttyggggtygttggagygygggygttatgygagattgtttyggttgygygtygttttagaggagttygagygttttttttagtygyggygygttggttttggtygggattgtagttaggtgggygtygygygtgtgagygtygygygtgtgagygtagatttggattygggyggyggaggygaaagtygttttattygyggggtgtaattttgggygyggaattygggttgtygggtgatagtgattagttgattttggagtttatyggaggygyggtatyggaggtygtgyggattattgtygaatagtygttggagattygtagagaagggygggttttgygttyggggygtttyggaggtaagttyggagagttygggtygggyggagggygggagygtaygagtgtgtgtgtgtgtgtgtgtgttygyggtgtgttygyggttyggtgtataygygygygggttgtaaagttaggagttgygggagygtttttttgtttyggtttggtttyggagtattgygggtygyggaggtgtgggggtttttgtygttgygtttagggtagyggyggaaaaggtgtgtgyggatgyggggyggggtygtatttggtggatagagtagggattygggaagagaagttayggaagatgattatgtagtttggggtaagtttttttggttgagtatygttttaggaaayggtgttttgagggttaaatatgtgagttatttgtgtaaaaagtttgatatattagaggygygaagtaagatggaaagttggataagttttaggtggatygatyggtgtatttaatttttaaattgagatttttagttaygttgatgtggaatgggatygttgtttttttygagggtttgataaggatgtttaattttatttgttagaaagtaygggagttgggtttggttygyggggagygtaagttygtttataygyggtttaatttaggtaaatgtagtatgttygatttgttttgtygttattttttygaaagygataatttttttgggttatygaatttattagagtagttatttgttttttygtyggyggtgyggggagygtaatatttgagtagtttaatttttatagygyg

SEQ ID NO: 6264 - DNA, 1545 bp, synthetic construct; identical to SEQ ID NO: 6263
  misc_feature 1..1545: note = Description of Artificial Sequence: Synthetic polynucleotide
  source 1..1545: mol_type = other DNA

SEQ ID NO: 6265 - DNA, 1027 bp, synthetic construct
  misc_feature 1..1027: note = Description of Artificial Sequence: Synthetic polynucleotide
  source 1..1027: mol_type = other DNA
tyggtttyggttttagtttygataaygtttttagtgttygtagaagyggttttyggatagygaggatagttygtygtygtaggtttattyggygtttgatggatatggtggttaygttttggagtataaygtattgtattttattgyggagaggaygggttagagtatttygggtttttyggttggggtaagggttagyggatgaggggaaaaggtggggtaagtygttgyggggagaggattagtgyggagggtaggattayggttagtgtggagygggtgggtagaggtggaagyggttggtgggygtgagggggyggagtygggtagttygtggggyggggtaggaggygagggagggggyggggttgggggyggagygtatttgtggttgygtagtaggygtattagygttttggygatgaygtttattttygttttgggygttaggtggaagtagagttgygttatygttattattatygyggygttgyggttttgtagtaggggtttggtgttgygtagtagtagtyggtggtyggggtttatgatatagggttttygggagggggyggtygyggyggtygtttttttagatttygygtttttggtttygtttttttttgagtygtagaaggtttttttygygtttttttttagtagggatttttggayggggagatygaygggtttgtgggygttttttygggatatatttyggttygttttgtttgggttgggtttatttaygttttgggtggggtttaggaattgygtgygggygtagygggtgagtatgttgatgatgattatttggttttatttttttaygtygattagtaggttatagagttttyggtagtttttgtgaattaggtygatgygtttygggtagatttttttaaaggttattattatattgttygttattagttggggaaagaataaagaygagagggtgaaygygaagggtggaaggtyggttgtyggttattatttttttyggagygtttttatataygtatyg

SEQ ID NO: 6266 - DNA, 693 bp, synthetic construct
  misc_feature 1..693: note = Description of Artificial Sequence: Synthetic polynucleotide
  source 1..693: mol_type = other DNA
aygaataaaygttttattttygggtagtyggygggtgyggagygagtattygtggggygggataagtgyggaagtygttgygttttygtttttttattttygggggayggttatttttagggttttygaggagttygtttygtgtatttaggttttaggtyggtttttaagttttggttygtygttatattagyggttttttattygtaagtataaatgtgatatagatattagtttttygtgtttttggtttttagggttttttttatygygttttagtatttgtagtttttttatttttatagygttygtygtygttaaggtaatagagggatgttyggtgatagattyggygtyggttttyggygtygtaagagaagygttygygygggygttttggattygtagagttttyggygttttygaagtttttggtgtggtygggattygggagaaggagtagggttggtggggttgttgtagtyggtgagtgtgtgttggygttgggggttggaattttttaggttagtttttgggyggtgtygtaggattttgttygttgyggttttgaggyggaaataggggttggggtygagygygggttggaagttttggtttttggagtgtygtttttagtttggggtygaggyggtygtttgtgtagattygggatttttaaatagaaygaattyg

SEQ ID NO: 6267 - DNA, 1496 bp, synthetic construct
  misc_feature 1..1496: note = Description of Artificial Sequence: Synthetic polynucleotide
  source 1..1496: mol_type = other DNA
aygtygagygattagatgtaaaattttttagygtttgaaattatygyggaygtygtygtygtygtygtygtygtygggtgggagtygygaggagygtttagtggygyggtttgtygggtatggtggtyggttyggygatygttgattygtygggttygggggttttggaagygaggygygtttttygatttygagattttgtagggttgtaatagayggtggggaggtaaaaaaaaaaaaggaaaaggaaaaaatggtgttaaagttattaagttttatttattgggtagaattaaaayggatatattaygtatttgtaaaatatatatatttatttttatatatatatatattyggagttygaggaaaggaagagaaggaagatgtagtaggagttgtagtagtygtygygaatggttygtygygyggttgtagaaatgtataagtgtttygagttttaygaaaygtaygggttatyggagygtttttttyggtttttttttttttttttttttttttttttttttttttttgtygyggtttttttttttygtttttygttygggttgggagyggtaggagagyggaattttttttttttttttttttttatattygttttttttttygtttgtttttttttttttttttatttatttatttatttattygttggttygyggttgtagtyggtatygttattygtagtttygyggtagttygttygttttaygtttygtagygyggygttygttagtygtagttygggggaaatygagatygaagggaaaaagttgtatttgagattgygagggtyggggttggggagggagagttggygagttggttgtaygatayggaaaggygtttttttttttattttttggttttygygttattyggttttgttgtaattyggatygyggtaggaagtgaaatgaaygtggyggaggtgattggggagtgtttttaagttttgggtggggggygtttttaagtttgggtgggtggggggygtaggtttayggayggygayggggggtgtyggagygtatagatattttagagaagtatttagagtyggggatygggatygtagaygygtagtttttggtttgaatgatatttattttygtaatttagagtttggggttttggttttggttgggaggggattgygggatatggtaygttaggtgtttttygtgttygttgygtttttttggaggtgggttttgtattyggttttgagtaggtatggatyggggaaggaagaaataggggtygaaagggttgygttggagagtygaggtggtttygggygagttgtgygtgtaagagaaatggtygggggaaattgagatgtaaggggtatattttggtaagygttaygttagtatygttagaggtyggtttttygggtttagttttygggtgagttgagttggttgtygggtgagggggygggygggttgtttttttyggattygggggyg

SEQ ID NO: 6268 - DNA, 5820 bp, synthetic construct; identical to SEQ ID NO: 6021
  misc_feature 1..5820: note = Description of Artificial Sequence: Synthetic polynucleotide
  source 1..5820: mol_type = other DNA

SEQ ID NO: 6269 - DNA, 699 bp, synthetic construct
  misc_feature 1..699: note = Description of Artificial Sequence: Synthetic polynucleotide
  source 1..699: mol_type = other DNA
tygtggtgggygaggtattyggggtttttttttttttggtttaygaatttttaatttygaaygttgtgggattgtatgggtttttgttygggttaatgaaatgygttgtygagaggaggttgyggygyggtttgaggtyggatttttataggtyggagagttttttgtyggtygyggtyggatttttygggaaatgggattagagygyggagggagtttggttaggaggttttttaggatttagtygygaygttgaaaagtatgaagggtyggaattaggtatttatttagygagygttattaattygaagttatagygttaattttttgattyggtygtttttataygtagygtygggattagaggygyggtygtygttygtttygtttttatattttaaaygygttygtttygygttttygaggttgygggtttagggttaattygtygygtygygttygtttggttygagygygyggygggtygggttyggttagttggggygagtyggtttgttygttggttygggygttyggtttygggttgggtaaggagygtttggttatgagtygygggatagtttaggygggayggatgygttttttagggtttaggygaggtygygyggtgtagaatygtygggatttttttaattygggtatgygtatttatagtagyggtttttggaggtygyggyg

SEQ ID NO: 6270 - DNA, 1845 bp, synthetic construct
  misc_feature 1..1845: note = Description of Artificial Sequence: Synthetic polynucleotide
  source 1..1845: mol_type = other DNA
tygttttttygtygygygttgggggttgtttttaggtgttggtttttgtgtygagaaaattttgygaggaggygagggagttggataaagagygggygagggagggygtttgttagtttgaggggtgygtygggyggtgygygtatttttttgggtttagtttygtattyggtygttygyggtggttagagtttagtttttttaggttaggagtggygttyggttgtattttygygttttygggagttgaataaagttaggygggagaagtaaaggttagygtttggaygttggagttggtgggaggaggygagtagaggygyggagtaaagttgttaaattgygygyggagtygggygtggggygggggaagggagaggagggagggaggggtaggygggagtygggagggagygagygggttygtygygtttgagtaatttttgtttgtygttgtygttgtygttgtygttgtygtygtyggttyggattygttyggagygtagggtgtttgtttagttgygygyggygygyggaggtttyggygttygtygttgygtttttyggtttttgtttttygygtyggttygygtgggtttyggygggygygaatttattatgtagttgtagtttyggagttggatgttggtygygtttaygttgttygtggttttttttattttygtagatattttagagatygaagaagaaatygggtaaatagttgtttttaggttygtgttaygagttttggygggatttttttttttttttgtattttttatttttygattttttttgtgtgygtygygtttygttgtagtttygttggagagatggggayggtttggtagaaggtggyggygataggggttygggayggtttggggagaggagggtgggggygyggttgttgtggggtgttttygggyggggtttaygggaagtttttagttggttygygtygggaagyggattygtttattttgtttttttgtttggygtgtttaagygtagtgtygtyggggtygagggagggygtyggggagtgtttygggygggyggaggggtygagagtggagggaggtaggagtttttttgtttttagtayggtygttttttygttttggtaaagtgggtagggggygygtagggatttttgagttgggggaggggtttttggggtyggagyggagggyggggttttgtatgggttattgggaagyggaatgttttttgtatatatagataggtataygygtttttygtyggttygggagttyggygtaggagttggtattattagagaagggttygtatagttggattgagatttttygttttygtttggttttggaygtttagttaagttayggtaatttyggygattttgggtttttgtgygttygtagygyggagayggagatatttygggaaagtttgtatygtygttyggtgggtttttgggtttttaggygggygatttggygttttttttttttygatttygttagaggtagggtgggatygygagttyggattttttyggtttyggattttttggagtgygtatttgaggygygggaygtatyggttgtgtgttttaggggttgagattygygtttygtttygtagttttyggttygtygggtygggttttttttyggaatttttaaagggyggtagaygataggtggggaggtagtyggggttttgaggaggttygaggagagttttttggttttgggtaaggggaaggtgaggttttaaagagggtagaaggtttttttttttgtgggatttgtgttttgttaggygtttttttygagtttygygtygygtgyg

SEQ ID NO: 6271 - DNA, 1844 bp, synthetic construct
  misc_feature 1..1844: note = Description of Artificial Sequence: Synthetic polynucleotide
  source 1..1844: mol_type = other DNA
tyggygattttttggtattttggatagtttttyggggagtagtttatygttaggyggyggttgttaagagaggaatttttttgaygyggagtttgtygtttyggggttygtttttyggtaggttyggggagaggtggggtgataatgggttggggtgygygygtgttttataggtgygagatagagygagtygtyggggtgtgagttagygygttgggggttaagaagttgggtgaatagttayggaattttatttaygttyggtttttttatttatttygtttatagygygtgttttagtttagggygtgygtgygttyggtgttygatttygggttgtgtgtgtttatttggygagatgtygagagyggggggagtgtttttgtyggtgtatttgggtttaggttaggggattttttttttttattttygygtgggtgtgggggtgtgttygggttagggygygtgtgtttttgtgtttgtgygtgygtgtgygggttagggtggtgggatygygtattagggtagggtgtttgygtttgygtttgggtttgtttggtttgtatgtyggygygatttygatttggattygtgtttttggatgtygagaggttagygtggtgggggtgtttagtttttyggaggagtattatgttttgatattttygttttatygttttaaagttggtttggggtttygtagggagtggtttgtatggggagggttygygtgttgtgtttttgggaggggtaagagagtgggggygtagggggygggttaggtttttgggygyggygygggttygggggattygygyggttgaygttaggttattttttaaatagagtyggtagygygtttygttyggtatttttygaagagttagatygyggtyggygttagygttatygttyggtttattygttagttygtatagtygygtygtygtygagygtttygtgagyggygtttygaggattaggaatggggtttygggygttgggygygtttygaattyggygtaygtaagagtttgggagygttygagtygttyggttgttyggagttttatygtttaggatygggagatgttggaaatgtaatygtttgtttttygaggagtygttgttttygggattttttggtattgtgygtattttggttagtagttttyggagaagayggygtttttaaygttygattygygtggtygtggtagygttaygygagttttttaggygatygtagggttatagtagtttagtygtyggtgttttttyggaaattatgattttyggygygggtttatggagttatggtttatagggttttgggtygygyggggttattttagtygyggagggygygtaggttgtttttygtttttaygttttygtttttttgtatttatttgtgttatagttttttgtgttgttgygaygatttgggtyggagtygttttttyggygygtttygttgttttygyggttttagygygggyggttagaaatttttttagaagtttygtttttgtgattttttygggtygaygtttagygagtttagygtttttagygygttygtygtygtygtgttygtttttygttttttyggttttaattatttyggtttatttaagttgggtattaagyggttgttttaagtttttattgtgggygtgaagaaggggggtattygggtygtgttggagtttattygagtatattyggaygtgygggttttgggtayggaattttatttttttgataggaattayggtygygggttggattggtataggtaaggattaggagtttygtttygtgygtygggtttttgatyg

SEQ ID NO: 6272 - DNA, 1480 bp, synthetic construct
  misc_feature 1..1480: note = Description of Artificial Sequence: Synthetic polynucleotide
  source 1..1480: mol_type = other DNA
gygggtgyggtttttygggagttygygggatttttttattttttattttygtttgggaggttyggygtgggttggygatgggggtggaaggttttygggtttgtggatttgyggtaggaggggyggttggtagtaggagtttttgtattatttttatttttaggggygtttyggggtgggtgggggtatttagtgtttygygaaaggaagaggaggagggggygagygtggagatgagtttaggagyggaaagtagygygygttttttygatyggtagygggggtgggygttttttyggggygygggagygtttttaaagtygyggggygttygtagygggtaggagttttgttttgtatttttttayggyggggygtttygtaygtttttttatgttggttttyggtttyggaayggygygygttttttgtttyggaaygtygtttttagttaggyggagygttgggagttgggtttaggyggygggaggagggygaaygggttyggggttygggtttygatggtygygtygtttygggggagtyggagtygagttggtygtygttygygygtatttattaagttygttgagttttttttygtaygagtattagatgtyggtgtggaaatttttgaagaggaagyggtygtygtyggttttttagttgtagagygygtygttaggggggtygtttttygaggyggtggyggyggyggyggyggyggygggggyggyggtgtygttggtygtggygttggygttygagttggggtagttggygygttygttttggtygtagttyggtttggggattygttgygtgttttggtattagtgygtggtgaggaaagyggtggtggygaatagtagygttagtaggtttagggttayggttaggagygttyggtygyggyggttagtttttatgtygttygygtygtygggaygggattgtatygtyggggagtttygygygygaagttggtagttggygtttygygttagyggtygttgttygtygygtttyggggttygggtgtttgagatyggyggyggyggaygyggygygggtttatgttttttttaatttyggggtgggggygyggygyggggggygtgyggggygggttggyggggygggyggyggtggaggagyggttayggygygttyggagttyggagygygagtgtatttyggttaggagtygttggygtttggtagyggttayggygtagggaygygygttttttygtggggagatatttgtaggyggtyggygatattgtttyggagttygttygtayggggagagggggtygttaygtygggygygggygggggtttgggagtggagggaygttttygaaagaaattygagttagggtgagggtttgagaygtaaggagaattttaggtaaggygtttttgagaaaagatttttayggyggaygtggggtaataaaattygtygggagyg

SEQ ID NO: 6273 - DNA, 5065 bp, synthetic construct
  misc_feature 1..5065: note = Description of Artificial Sequence: Synthetic polynucleotide
  source 1..5065: mol_type = other DNA
aygagtyggggatttgggggttygggyggtygtagtttagtgggttgaggtgtygattagggttaygtttyggagttttgtyggggtttagtttttttttttatattttaaaatgtygtttagggygtgggtatttygagtggtattyggagtygttgagatttygtygagattgttttttgtgygtttttttatagtygagaggttagtatygtgtygggaygattyggggattygagttygggygtygttatatygtttygggygttaggtttgggagttttgaggtyggtatygtgaaatatttttaggagtaaggagggattttaggtgttttttttttgtattttaattttttgttyggattttttttattttttgttatagtttttatatataaattttgttttggatttgtttagttttttygggatttatagttgtygtttttatyggagaaaataagtgtttttgttttaggggggattttattttggttggttattygtaaatttggaaaattattttatgattttttttttgatttttttggaagtagggagtattaygattygtagagggygtatatygattagaaagattttggggggtagagggtgtaagtgttgtgggaagagatgyggagataaattttgygagttagatttygatatttttttygttygtttgtatygttttyggaataattggyggttagtagtattttttatttyggtygtaattttagygggttaggygttggygtttygatattagtttttatttttttgtagttttgaatttttaaagatattyggttttgtttygtaggtygagggggagtgtgygtgggggtaggggggygtagygaatttttttaygttyggagtttagtttagygttygaagtaaatttttttatygttggtagtaaggtygggyggyggaggtygggtygggtgttttggggtyggygtygggagygttaggggtttygtgyggttaggtyggggygatttttattygtatttaygttttatggggttttygggttttggtygyggttgggattttyggaaaagtagggayggagaagttaggtyggtatgttygttttttttttttygggaggatttaataatttyggaaagattttgtygggagatgtgttygtttttttyggggtagygggggaaagtttagtaaaggtatattgaaaattaaaaagaaaaaaaaaattaygtygagtggaagaagtaatyggggtygyggyggyggtgaggtagggggygygggggttagtygygtgtgagtgggttygagtgtgygtgagtgtgagtgygtgtgtgtgtgtttayggygygggtyggagtatttattatttygtygggggagygaggttatttyggggtyggattggaaatgttgaggtttygtttgtttttttygygatatgttggtttaaatattagttggggtagaataaaaaattattaaaaaaaaatttttttaaaattayggaaatygagyggyggyggyggyggyggtttttttygttygtyggttygttygtttttttttyggtttttyggtttygggygtagygygtatgtgttttgttataattatgattattaataatgtattgygattaattatagaggggttttttgaaaggygattggtatygggttagygttatttaaattygttygttttaattaattagttygtgatttgttgtagatttttgttttttygygygttggtttaataagtyggtygyggggttggttttgygygtygygtygttygatattgggttaattttttttgygatygttygggatttygyggttyggtygtygggggtyggttttttttttattgygggttyggygtttyggtaggygtttttygttttttttttttttttttttttttttttttttttttygtttttttttataatttygggttgggtygatttaaattagtatgtttttttyggaattgagtygtttygggtggggggtggggtygggyggygagggttggggattygggttgtyggygygttgygaattttttaattygggggygaggygygtyggttygyggggggagggagtttygyggygggattaggggggagggygtttygtttygtgagtgttttttygtttttttaagagttattagaaagtagtttatttttatttttattaaaaaaaaaaataagygagtggggaagagttagttttaygtyggttygtttttygtttayggttyggtttttttttygtttggttyggygttttttygtttygagttttttattttttggatttygggttygygggggygyggagaagaggatttaggaaaggtttgggaatttgatgggtttgtggttggggggaggggtagttttttygttattttatttttttttygttaggggtattgattttttagttttttgtttgttttttygttttttttttttatttyggatatttttaggataattagggttgaagttttygggagaagtagtttygagttygtgggataagggggyggttyggtttygtttaggatttttttyggatttttttttyggttgtttyggttggttgtagggygygttatttygyggggaggyggyggtagyggtggygtygtagagtttygggygggyggagagyggggatyggtttgggtttygagtttagtttyggtyggggggaggggaggggttgyggtttatattgagygtagtagygagtatyggtttagggagatatagttygggyggattyggtattggattgggttagtttttgggatttttgggtatttygttttggggagggggtygygttttagtttttygggaygaggtggyggygtagagtyggaaagyggggtggggggagggyggtggggaggtgttttgttygaggttgtttggyggygtygaagttygtttttattttttgggtatttgtygagygyggygttygaatttttygttttattattattttttttaagttgagatgtaatttttttattttygttttagagtttagagttaggagttygatttttttgtygggtttaggygttygygaatttgagattyggtaygyggtttagtttagtttttttttttygygtttyggggttttttygttttaaggttttygaagttttgygttygaaggattaaattaaattaaatttyggttgagtaatgggggaggaggggggtgtagatatataatttttgttttattttaygattaggaaaggagagggtttataaggaygttttaattygygagygtttttgagtttggtyggtgttayggtyggttygygygaagtgggtatyggtttttygagtygatttygtgtatttyggatttgtattgygtttyggtagaggattttttttttttttttagttttttaaatttttttttttaaggtgtaaatgtgtgtgtgtgtygatgaatgtttttgttttttatttgttgattttatttttttttattggtataattttttttttttttttttttgttygttygttttttatttttttttttatttattttttgttttygtttattttttaatatatatatttatatttttttygtttygttttttygttttygttaggttttgatgggtatagtagattttgataaaaagataaaygaagttattagtggggttgatgttgaagaatgaagataataatgtttttataggtggtgttttaaatgttattattttttattgaatatttaaagagatttttyggtaaagatggatttgygtatttttggggtgtgagyggttygtattttttagatttyggggaaygtgtaygggagtaygtgtaaatttygtattygtttttattttataaataggggttttygtatatttattaatttatattgttttaggtataygaaygygtttgtgtgtatttgtatatttttttttyggaatgtgttygtgtttggagtygttygtatttttttttaataattttggttttttgaaagttygggtttttygggtatygtatgtagttaggaatttagyggagttggyggtttygtaaagttttttttttggtgygygtygygtgygtagtaggaagttttygggaataattttataygtgtttgttatttggtttaygtgtgatttaagattaagtgtaggaaaaaaaaaaattttttttttttaaaaaaatattataataaataattaaaygaaatgaatatgygaaaagtagttaygygatgtttaattaaaaatgggygagtagagaygaataaattgggggatttaaattttaataatttttttygtttttttgygttttygayggygtagaggygggygtttygatttgygtttggygtttttygttaattttttgtttgttttttttttttyggtggtttygggaaaggagatgggaggtggaggagggggggatgggaggagggggatggtyggaatggyggggagaggagaattggtttttattgttgatggtaatatattaattaygggttattgtttyggttttaagtttygtggttygttggtgygggygttgtagtgttagggygttggygaggtttygygtgtygygatgtaaagaaatatattaataaaaatagaagtagagtgggggttattttttatttttgtgygggtygaaagtaggyggygagygggagtgaggtgttatttttggagtttttttaygygttttgtttattttagagatttgygygttttaygtgyggtagtatttttttaattttgggtggaggtggggtgggggggggattattggggaattygggtagygaagtttggatttgtaggtttygttagagggtttggtatttaggggttgattygtaatagygaatggggatagttygaagtgaggyggtagttgygtyggggtygygattttattggyggagaggaatygtattygggggaggygtttggyg

SEQ ID NO: 6274 - DNA, 2372 bp, synthetic construct
  misc_feature 1..2372: note = Description of Artificial Sequence: Synthetic polynucleotide
  source 1..2372: mol_type = other DNA
tygygattgygtaaatttyggttttgatattttagttttaggttttaatttyggaagggtttaggtttaagtttgtaygtygygttgttatggygatygttggttgtttttttygttttgttttttgagtaygtggtattaggatttygygttttttttagttygagagttaggtttggtttagagtygggtttattagtatttygtttgyggygttttttygatttttygtygtgttttattaggttygtttatttagtagygatagattttygtygttygygygattttatygtttttattttagttttttttygagggttygtagttygttttgttttygagygtgtttagyggttttgggtattggygyggttttatttagttatgtagtgtttttttatatattggtygyggttattggttgtagattygtygyggaaagggggygttttgagtttygttygtaggtagygygtttygagagattygttttaaggtattttygtaataattttgtgggggtatttaattttttygtgygtyggttaagatttttttatgttttttgtaatgtattagattagggaggtaaatatygaaggtatttgtattgygtttttattgggatgygttgtgygtaagagayggggatygtttgttgtaaaatyggatgatyggagaygtagggagttaggagtgggtttttttaggatttattttatgtagtttttatatggtttttagagttttgatttygtggttggagtgtttgtttttttttaagtattggtagtataygggtattttgtattgtaygtagtatatgttgtggttttttagttygtggtttgtgtaggtggagattttgygtgggtttagttttyggtttataygattttgggtygggggtattaggyggtgtttggttaggggttttyggggygggtggtagygtaggyggtayggatygtagtagaagatatygtattgttygtatatgayggtggtttttttgggygttttttygtagagttggtatttgagggtygyggttttgttttgttggtagyggttaattattttttttagtaygygatttttggggaagtygyggagttttyggttatttaggatgaggttgyggtgatattgggggtaggtgatataggagttgyggggtatyggggttagggtyggtgataagtgggtggtyggtggyggtatagtygggggaaataygyggaygtygttgggggatttttggtayggggtagtgggggygttggygaatttttygtaggagttatagtygttgttygtttygttgtataggtttattttgtttaggtttagatagttatagtyggagatttyggagttygyggttygatggttttggggggatttagattttggggtttgtattaggatgttgygggygtaygtttgatataaattgtgagagtagggtaggatgatgggttttygatagaaggagtygtatayggggtattttaattttttttttattttttttatggggatyggtttgggaggagatagygayggttgtagygggtgtttgagttggygaggtggtygaygggttygttttgtttagtattttggttagyggyggyggttgtggtggtggtgttttttygygtagtattggtayggatatttagagaggygttagttttgtgagtygtagtygygtagtygtygygtygygygttagttyggatygtttttatttgtttttttagtttygtttyggtttatgagtagyggtttattgggyggggggtaagagatygaagtttttattggttattagattygttygttttttygttttygtaggttatagggggttyggtagagtttgaggatagggtagttttygttygyggttgtaagatttttgaagggggtyggygtgyggaggttaggggatygggaaggaggagttaggygggatgatttattttygttyggtttattttygattttyggtgtagttttttaggagttgggggygtgagaaattttttttygtagygagtgggttgtyggagggggttggggtttttygttagygtttgygtttggtttttagttttgagtttygygtttatttatygygggygagtgttgygtagtayggaggaygttttttttttttygttgttggtagttttygtaggygttttattygggtttaggtttttgtayggtagtggggttttttttttttttygtgaattygttgaygtygtgttttggagtttttttatttygggagtttgayggygttggygtaagttttggygatatttttggttttttttattttgygtttttyg

SEQ ID NO: 6275 - DNA, 2372 bp, synthetic construct; identical to SEQ ID NO: 6274
  misc_feature 1..2372: note = Description of Artificial Sequence: Synthetic polynucleotide
  source 1..2372: mol_type = other DNA

SEQ ID NO: 6276 - DNA, 2372 bp, synthetic construct; identical to SEQ ID NO: 6274
  misc_feature 1..2372: note = Description of Artificial Sequence: Synthetic polynucleotide
  source 1..2372: mol_type = other DNA

SEQ ID NO: 6277 - DNA, 2142 bp, synthetic construct
  misc_feature 1..2142: note = Description of Artificial Sequence: Synthetic polynucleotide
  source 1..2142: mol_type = other DNA
tygagggtagygtttygygtttgattttttygtaagygtttatttgtttttaggtggttaggaaggygtgggtgggggtaaagygygtagagygygggaagttagygygtatatagygggyggttaggtttagtattgygggggaggtgttttttyggtataggattyggtttttgtygtggttygtgtygatgttygttagaaaaggggygatggtygggaagtyggtggggaaattatagtttatatattgygtttttttggggaagttttgagtggagatgatgtygttggtgtttatttgggagaggagagggataaaaaggtgatagtygtttaagtttaaggaygttattttttygygtagggagggaagggaattgatttaggtaaaaagtttttttttttttttttattggttagggagtttggatttagggaaataagygtaatttttgygattgttttagtttygygttgtagtaggtttaggggttttaaaattygtttatttatttttttattttttttataatttyggagttttatgttttyggagaggaagtttttaggtttgaagagggaatattttagtttygtagaygggtatagttttttygyggttttaattgtaaagttygttggtygttttagtaaygttattttttttgtttgggaygygtaygtggttgygaataatttttgtttttttttttaggttatttttgtttttttatagtagyggggtaggtagyggtatygttttttggtygggtattatygtaagggtgttggggggttttaggagtggggtttgtttttttttttttggaggtagggttttygtgagatygattttagggaagaagttgygggaaaagtgttaggagggggttgaatttaygtagaggttgttgaatygggtttygtagaagtgtaggggattygttagttttattayggttgagttttygtygtygtttttttgtaggagttggtttttttaygatttttygtgtgggaagagttygtttgggtgtagygtygyggttygtaatattagtaayggtagtagtagtagtattggtaaygaygatagtatyggtygttyggttattyggtttttttttatgttygttyggtygtgygtttattygttgtataaygygtttygtttyggtttttagtttatttttygygtygygttagtttygaatttggattttygygggygtttgggyggggygggattttaggtttatttagtaagttaattggttgaggttttyggttggggattaattatyggttttgagaaagttyggtagtggttattatatttggttttygttaatttttttaaggtagyggtygttggagtagyggggttggyggggtaaaagtttttggttagggttgtttggagttgttttttttatttygtttttagggagttttygggttatttttttattygggttgtttygyggtttttaaggagttttattttygggattaaatggttygtaaggtttggggtagyggygttgtaggagatgagtttagygtaaagggaatttygtagyggygagtgyggttgttggtttgygygttgtggttttaataggttggtagggygygggygggtggyggggttgyggtatgagttttgttttttgttttggggtttygggygtttttggttttggaggtttggttatyggttygaaaagtaaagggatattgtygtggttttttyggtygtttygttttatttagagaygttttgaggagaagygagtttttgtaygaaggtagagggttgatttttaagttttgtttttttttygaaggtyggtygttagggaagatttggttattttttggaagtattttttttygggaaaatygtagtaggaaagattatgaaatattattgtgtgtgattygtttygtttggggagtaggatgaggtatttygtttggttattaggtagaaaggggygagtygyggggatgggaagattttgattttttgtttattgttgyggtygtyggagatgttttttttygyggttayggaggyggtaatttgagttgtttygtaggattggaaatygtataatttygaaattagttgyg

SEQ ID NO: 6278 - DNA, 544 bp, synthetic construct
  misc_feature 1..544: note = Description of Artificial Sequence: Synthetic polynucleotide
  source 1..544: mol_type = other DNA
tygaatttgggyggtygtygggtagttttttygttygattatggygattgatagtgagtgygtttyggtygyggaggttaggggtggggggaggtygyggtgtttagggtgggaagttygattttagaygttgtttttgtgttggttygyggtagtagyggtygggttttttttygttttttatttttggttgtttggyggggtttgaaagggtaggtggttttggyggygygtttygygagggatgtggtagaagggygtgygtttggygtygaggyggagggattttygatgtygtgtggtagyggggtttgttatygtagtttttygygggtattgtttttaggtttagagttagtttttagygagtygggtaaaygaaggtattgygygtttttggygttgtgagtttaaggttygtttygagttttgggtygggtttgtgygtttgttttttggggattagggtggtttgtatggttyggttgttyggtggtttaygggttgtattygtagygggtagtataaggtyggttggagatyg

SEQ ID NO: 6279 - DNA, 2002 bp, synthetic construct
  misc_feature 1..2002: note = Description of Artificial Sequence: Synthetic polynucleotide
  source 1..2002: mol_type = other DNA
tyggaggttgtgtyggggttygttaaaggttataaataaatyggaygggtgggaagtaygttttagyggygattggatttttaaaaatttgttggtagagtgaaaataaaaattgttttttaagttggtaaaatyggygttttagayggtgygtaggagggttttgygaggtttgttttyggagtttygygttagttttgtaggttyggttgggttygtagttyggtgttttattygtgggtygggttyggttgyggggttttttygtagtygggatatttaggatagtagyggttggggagtyggggttaggggtttttttgtaattttaatgatttttattattattattygtaaaggataaaygyggttaaggtygggttttatagtggttgtgttggttatygygtggaggagtgtgygttaatttaggggygaggggggygygttyggtgtttyggggagagtttagaaggaagaygttttatygtggtttttatagttagggatagtttgggtgttagaaatttttagagagaattygaggggttgatgttttgggttattagtttttggtgtttgtggggttttttgygygtttatttttatttttttttttttttttaggttygayggattttttyggaggtttaggatagtgatttatagtaagtggtgatagtggaataaygtgatagttygttgtatttgttagttggtttttgggtaggtttattygtygggttygattttagagtygagttttyggagtygtygggtaaagttttttttttygtttyggtgtagtttygygtttttygygttyggygttgtyggggaaaagtggtataataggaaagtttygttagagggttttttttagtyggttttttygttataaaaagttagattttagtygaggttttgattttttttaaatataygtttttttgttygyggttygttattttygttygggtttygggttgtgtagtttttttttaggtttgttygggtttatgtttttttygaagyggygggagtyggtgtagttttaatttttattgygtgttttaggtygttaattagttttgttygygtgtygttggttyggaggttgtygygttagtttttgygtgygtttgagygygttggagtatttgygaggttagggttgtygayggygagaggatattttgaggaatayggtgttttagtttygttttygtttttygttygagttggaggttggggygygttgagtygtagygtttggataagtgygygggtyggagtygtttaggtttgtattygggggttygyggtygaygtatgygtaygygyggtggygggtttgtaggttygaaggttyggttttttttttaaattyggagyggggaagtttaggggttgagagtttyggttygggtygtaggagttggggagyggggaygygggtaggttaggtttttttatttgtygtyggggttttttttygtagtagtaaaggggttttagtgttygtggtagtgtatgttttagyggataygttggtttttaaatttagagattagaggggyggttgagaayggggygttygttgtgtgtgatttttgatygtggaggaagggygggagtygggagtaggyggtggggttyggggttaggtygyggtygtyggttttyggtaaaggygttttggtyggggaagggggygagggtgggyggtyggtttttgtygtygtagttatatttgggaygttgaaatgggttttggggatagagtttatttttagygygttttataggagaagttygtagtttaggtttgggtygtgtagatygttgggygggttyggggttygaggagagtaatayggygygaggtttagtygygagtaataatttygatagtayggtttttygaagaygtgtttygggtatyggggttgtgagygggggagtttygggttttgggttygtttggtayggggygggggyg

SEQ ID NO: 6280 - DNA, 983 bp, synthetic construct
  misc_feature 1..983: note = Description of Artificial Sequence: Synthetic polynucleotide
  source 1..983: mol_type = other DNA
tygttttttttyggtttttygagyggagtgggtaagggaggggggtgaggaaggtaygygatgttttygtygttyggygttttatyggtygtagyggtttatygttttygygggttgttygtyggtygtagtygygttyggggtatgttagttygtygtygtygttttttygtyggggttygtgggttygtagttgttagggagttgyggggtagygtatttggagygyggggtttgggagggagggtgtttggggttagggygaggggtttygggaggggttttttygtayggattttagaaagagggaaatttygatttagagyggtgattggaatttaygttygggagaggttyggagtttyggtygygggyggygggggatttttgtaggaaggggtaggaaggtaagtagttyggygygttttggyggtttygagggatttgggttygggtttgyggtygygtygtttgggttttttttgggttgggagygygtygggttttygttttgtaygttgttatygygggagaygtttyggtttygtygygygtagaggggaygygyggagaggttggtttttgggygagyggagagttttgtttattaagttgtyggaagaagttaaattaaaaagttaatttttaagtttttaaayggaaygttattttattagttgggagatagygtygtattgattgataagtygygtatatttattttygygygyggaggggagatttttagaaygtttttygattagtagygaggaagtygagttygtatttygtatttygtatttygtatttagagttttygagggaygaatttagatttaatttttgtttygyggttatttattttagtygttggagtttggygttygygtttttyggtyggtagtaygttaaaayggyggygygttttgatttggatttygtygagttgggagttttaggtagtaggygggygygyggtatyg

SEQ ID NO: 6281 - DNA, 947 bp, synthetic construct
  misc_feature 1..947: note = Description of Artificial Sequence: Synthetic polynucleotide
  source 1..947: mol_type = other DNA
gyggagygygttagagygygagggayggagggagaggaggagygygggagttgyggaggygatttygygaatttattattgtaaatatattygggggtgttaggaggggtaggggtgggggtygyggygtttatattagttyggtygygtyggattgaggtagtagtgtggtttgagtagtttttagatttaygtygggygggygtagtatttggagygagttttgygttygttttygygtagygtygtaygttyggtttygagttgttygtatataygygtyggaggagagttygtttagttttttygtygagtttygggattttttaaattygaggagtttyggygtygyggggtagttttttgtygtttttttygttygttgtattttttttggggttygttggtttggygaagyggagagggggaggyggaggaggagagaaggygggggtygyggyggtygaagttaagagaaagtggtatgttygaattttggaggyggtggtggyggaggaygggggaagaygatgtygtagtttygtaggggaygtaggygagagtaagygaggygagttgggygtttyggtttyggttygttgyggggaggygygygtygttttgaggtttyggttttygtattttygygtttygaygttgygggygatagggtttggttttagtagtygtygtygtygtygtygtygttattyggaggatttagtaaaagtttggatttgggggagggygyggygttgagygggattattattagggttggaaggagatttygagaatttttgtaggtaaygygygtttttaattttttttttttatgtttygtygttgygttttygtttttttttagagttttttttggttttygygggtttggtagaaagtaagagggaggygaagtttaagatttyggggatgagtatygagyg

SEQ ID NO: 6282 - DNA, 1362 bp, synthetic construct
  misc_feature 1..1362: note = Description of Artificial Sequence: Synthetic polynucleotide
  source 1..1362: mol_type = other DNA
gygttttttttattygygtttttaggtttttatgtaygttaygtgggtgggagygtgttttatatattygygygtttaaagttatattygttaygttttygtyggggygggtttatygygygtttttgggtgtygagtttttataggttatatagtygttatttgttgttgtatttttattgyggggataggggtatttagtgttttttttygtttttttygtttygygaaggttttttattttttagggttaggyggaggttaygtttttttygggttttttttttaaygyggagagggaagyggagggaggagtttggttygtagtygtyggtttttttygtattggagttttttttttttttttttttygtttttyggttgtygtagttyggttygtagygygygttagygggggtttttyggagygagtygttaggtaayggggttggtttygtagaygyggggtyggggaagttygygygygttattagtagyggygtygyggggyggggggygtagagattttttttaatttyggtttgttattatttggttygygygtagtttyggtttagaatgttttaatttgygtygattgttgtygtygaggtgttttttttttgtagggatttygaygtygttagttttttttttttttttygtaggtgygtattgttgtgtttgyggtygggtgggygtttygtygttgyggtygyggtygtygttggtaagttgygttttggggtttggggtaggaagtagtggggggygttygaagagtagggtagttayggttatygtggtygtyggatyggttatgtgttaaagtttttggggttyggygtttygttgggygygtagygyggggagtagaygygtygtgggtggggtagygyggtgttgttggygttyggttttygyggggtgtagttttgygygtttttatgttgttttttttttttttttttygygttgttttttygaggttttttygtygagtttyggygyggggtatgaggagttttygggtgtygtttagagattagtaggttgygygtatatttagttagyggtagayggggatatgagtagygygtayggggtttygygttyggyggttagttttattyggyggyggttagygggttaaygttgttygggagaatgaggtaggagtyggyggtagtttttttttttttttttttttygtttttttgyggtttyggygtttygggttygggtygggttgyggttttgttgygtgtttygygygttttttaatygttttyggatgygtttttyggtaagttaggtttttygtttygygaataaagtttttttygtagggttyggaggtyg

SEQ ID NO: 6283 - DNA, 1092 bp, synthetic construct
  misc_feature 1..1092: note = Description of Artificial Sequence: Synthetic polynucleotide
  source 1..1092: mol_type = other DNA
tyggattttgggaggagygttggygtggaaagttaggttatttygattttggtttttaggttygggataaygtgttagttttaagagagygttgtttatagtttygggtgggttgggtttaattgtayggggyggggygttaatagtttaggatttgggttgtaggttggtttttgtattaattagyggggyggtttygggttttagtttttttatttygtttaygaagggaggygattgygagygtttggggtttttgayggatttygtttygggggtggggyggggagtggttaygtggaggggygtttygttygtygagtttygttttatttygtttygttygttttygtgttyggggtttttygtttagtagagatttggagttagaagtttagagatagtygagtgygtygtgyggttttyggaygttygttgtttagttygattttygttaattgtgtaggyggttgattygtagyggtagyggtagtagygaggattygagygttggttgtagygatattatggattttttttttatggtygygtaggtaayggggygttttttttaygygtttygggtygttaagtttggggaggttyggggttayggtttygttttttaygttggggttgggtagtggygttygttygygattygygtttyggttttttgtttygagtyggatatttttatttggtgtaygygtygggggyggygatygyggttttttyggggtggggygggttgygygtttygtattttygyggttygagttgttttygttygggtttttttygttggtaggaaggttgygaggagtttgggtagttygagtygtttttttttgtttattttttattgttgttttttttttggggtttyggagttttttaaggtygggttagtttagattygygygaaygtggatgggtatatagtttygtttttttttattttgttttttygaggygttagtaatttgttttttgtyggtgatttygggygttttttttgtygtygtttgaggaaggttttgagattygttttgtgatygtgattygttaagygtygaygygtygyggtyg

SEQ ID NO: 6284 - DNA, 1092 bp, synthetic construct; identical to SEQ ID NO: 6283
  misc_feature 1..1092: note = Description of Artificial Sequence: Synthetic polynucleotide
  source 1..1092: mol_type = other DNA

SEQ ID NO: 6285 - DNA, 1092 bp, synthetic construct; identical to SEQ ID NO: 6283
  misc_feature 1..1092: note = Description of Artificial Sequence: Synthetic polynucleotide
  source 1..1092: mol_type = other DNA

SEQ ID NO: 6286 - DNA, 580 bp, synthetic construct
  misc_feature 1..580: note = Description of Artificial Sequence: Synthetic polynucleotide
  source 1..580: mol_type = other DNA
tygttygggttygyggattgtygggtyggtttttagttatygtataggtgttttggagagtgygattattttttgtttttygtttygygtyggttttyggtttagtgtttygttttttttggagtayggtttgygtatgygygygttttagggtttagttttgtttttgtttyggtttttgyggggatggatgttttaygtagtaagygagtaagygagttttggagatyggggttttgggtgtgyggtyggtttagtgttaygyggtgagataggtatggttattaatttaygttaaggyggttgtgtatttggtatagaaaatattgttgttgaatgttgtttttatagttattygttagygtttattgatgagaggtgttattayggatattyggttttgtttygtygaagttttggtttattaggattaaagttaggttttagygggtttttttgttatttttggayggtttygygtttttttagagtttgatttttttttatttttgtagtttaagtygyggaagygtagatattyggtttttttygygtgttttatygggtttttttggatayg

SEQ ID NO: 6287 - DNA, 888 bp, synthetic construct
  misc_feature 1..888: note = Description of Artificial Sequence: Synthetic polynucleotide
  source 1..888: mol_type = other DNA
tygtgggaggttagagygggygttgttyggygttatttttgtagygttyggatygtttygtataggtaggggtggtgtttttttttyggggtatagaaaygttatatttygggggygtygtttagaggttgtttttgtttttgtgtttttttatgaggttttgttttataaaggtagtttgagttaggattttaaagaggtttggttatygggatyggagggagtttygttttttaggtyggttttgtaaaygygagtttgygttaaggygttttgygggtttgttggtggtatygaggggtagygyggggttagygttgggagtttygaatttataygtttyggttagttgttygggaagygtttaagtataygtttygagttttagattggattaagttgtttaattatttattttttttttttttaaggagaagtttaattggagaagattyggtttttttygttatggtaggttttttttttttgattygtagttgtaggggttgagggtaggygtaggttygttttggggtygaagttattatygggtttygaggttgtttttttaatattyggtttgtaygtttggygggggygtaatagtgttttayggttygggagttygtttttggtttttgagtaaggtattttttttatttgtygtgtgtttagttgaatttagtatatttttttygtatttttygtttttttttttttttttttgaatttgtttttttgttttgygggtttttaatttttttygaatttygggygttyggttyggtttaggygagygttygyggttggggaygygggtggggaygyggyggtttgggygttgtaggatgygtttggtygyggaggagaygattagggagygggtyg

SEQ ID NO: 6288 - DNA, 1483 bp, synthetic construct
  misc_feature 1..1483: note = Description of Artificial Sequence: Synthetic polynucleotide
  source 1..1483: mol_type = other DNA
tygaatattgatatygttttaaagttgtaatttttyggtttygttayggttttttatgtataaagagagggaattagtygtyggtgatttygayggttttyggattagggatgtttygagttygagygggtagggtgtttagtagggttaggtgatgggaattatggggttatygagtayggattttggttttttyggtggtttttgtgagttttggggttaggyggggattggaggagygttygygtygggagggagygtatygygttaygtgttygttyggygtttygtttttatttyggttaygtttttygygttttttttaaagtttygttttttagtttygttattttygttygtttygtttttygtagttttaagtttagygttttyggaggygyggayggtggggtttygygttttttgtgtygggttttgatygtygygygygtttatttattttagyggtygygggyggaggggygtaygygygygtagttttttyggagggyggtggggygaatagtaaygygygtattttagtttttggttgttgtgttgagattagttygygygttygygygtttttttttygaggattyggagtygttygygtattygttaggggtygtygtttygagttttaggyggaygygtaygygttttygtygttyggattttagtyggttygtttttygtttttttatttttyggyggyggtttttaggtaygygttygygtataygtyggttygggtaygygttygttaagatggtaggggtyggggtttagttgttagtygtygtygtygyggttttttttygtagttagyggtttygaygtttattyggagaagatgagttttygttgtttttygtagtttagttagaygyggagtygtygygttyggggtyggttttttygttagygttygygtttygygtttygtygtygtygtygtygtygtygggtygtttttggttyggygygttygttttyggtagygataatgaggtgagtyggggtyggygtttygtgggaggtggtagyggttagygtyggaggggttgggttgggggttygyggtgttttygagggygggaggggggttttaygggygygggggtttttagagaatygygggggttttgtagagattygggggtatttagagygygggaatggtttygygagagtygtgggggygtttggagagtygggagggtttgtagggtttgtggggggtagtgttttgtaaggggtaggyggygttggttttggttgtttgtggggtttttttaggtttyggggggtttgyggyggtttgggaggtagattttygygggtaggtgtggtygtgtttygatygygygaggatygaagttggyggaagtttttgtgyggtgttttttagttyggaggaggttggtttgaagtttttaggygttgtygaagtttttttttgttagygtttagagtygyg

SEQ ID NO: 6289 - DNA, 3714 bp, synthetic construct
  misc_feature 1..3714: note = Description of Artificial Sequence: Synthetic polynucleotide
  source 1..3714: mol_type = other DNA
gygygygaggttggggtagtttataggaggagygygggattygggtttgagtttgtatttaggtagagygtttattttygtttttagtttyggattttgaaagtaaagtygtygtgttyggtagttagttygaattttttagtttttagggagtyggggtyggggtagggaaggttaygggtggyggtataatygggattttggagtggaggygtagattgygggtttygttgygtaygtttygtggttyggttggggtgggttttggaggtttataggttaaggttgaaygggggttttggagygtgggyggggtggagtgtataggttattgggttttgagygtttttatgggttaggattttaaygygtygtgtttttaggatagattggagggggaaggggttgygattatgttttagtyggaagggttttatagtagtygygttgttttttttttgtyggatattyggtagtagatatygaygtttgggggttagygaggtaggtgggygyggatygygattygattttggtttttaattttygtttagtggygygyggggtygtygttttatatttttagttygygtggttggtgtttggttygtygtyggggyggaaggggygttgtyggygtaggtgggyggggtyggagygygggggygygyggygyggagygagygtagggttygggggygyggggygyggaggatygggggtttgaygggyggttttgygyggtgyggggygyggyggyggygggygygyggttagtgaaygygygggyggggyggyggtggygggaggtattaggggtygtttttygygttttttttttttatggygttgttttagtygttygagtygtttygyggygygtttygtaaggtttttagtttgttggagatgggggygttttgtttggattyggagattattttgggttttattagttattttttgyggygaygaggtaaggtgagggttgtygggaggggggygggyggygtaggygtygtttygttattttgtygygyggttygygyggtygggggtgttgygtygggaaggagayggtaggttyggagtygygtttygtagttygggttgggattygttgtygtatttttttttattagygttgtttaagtttttttttgtttttaaggttgtgttttaatyggatttattyggaggttgtggttagggyggagagygtagygtagggattttygggtttattttgygttttgttaggatgggygaagtagggggtyggggtttttgattgatygtgagttttygaggtgattttagttttgtgtatttygtgttttgyggatatgggatgtgagtttgtgtttttygaagygtygyggyggtagaagygttgaagttgygggtgtggttggttaggggygtaggatyggtgttttygatygttgygtgtttttgtgttgygtgtgtgggtggggggaygggatatagagagtgtgtgtttyggagtagtggagyggygggaggyggtgttgtttgtyggtagtgyggggtggggtttgggtgttgtttttagtatttagatttagatgtgggttgaygttygtttttattttttaggttgygaagagaygggtaggggaagygttttyggttttttaggttgggtggaaagygattgtaggtttayggattttagaaagagtggagagtttttgttattttattttatatttttttgygttttygaatttttaaggttattaaygattyggaaagtygggaggggattatttattttattttttggggagtgygtgygtgggyggggaggtttatttaagtaaaagggggtgggtaaaayggaaagggttattttgaygtattgagtttttgygaaggttttatygtatgtgtyggtagtygygtgttttggttttygtygggttaygattttyggagttttygagtgygttttaggtttgggaygygyggygttgtttttttagtttyggagtygtgtgygtagyggtyggtagggggtattygygttayggggagttygttygtygygttygtttggtttgattygggttttggggttgattyggagtttggttyggagttgtttgyggtygyggatgtyggygatatttggggttyggttaggtatagagtaattggtygttagggaagggygggggggyggttttttagtyggagataaataagtaattaatttyggagttgagtttttatttgttaggtttgttgataataggttyggygtaygttygtaggatttttygtttttygggyggtayggygygtatatttatttgygggtataygygyggttgtaaagataygtgtygttygtagaygygtygaggtatagataygtyggygyggtygttgttyggttygaggygtatatygyggygatattaatttaygygygatagttagatttaaagtggttygygatatgtagagtaygttgggtttgttggaaaggygtttgggagtttyggggtyggggtttygtttttttttyggtttatttygtygtgggttttgggtaagagygtttttttygtagttttagttttttygtttgtagagggaggggygtyggygttttttgggagaygygtagttttggtgtttygggagaggggygggaggygtatgygygygygtaattagattttygtygtygtttttagygttttttttyggggtagggatttatttaataggttggggtttttggagtgygyggggtygygtggggaagyggggattttattttttttaygygtygtttagtattgggtaagggyggggtattttttgggttttygtttttygtygttygtttygggagttygagtttygttttttttyggtttygttttygtttttygagygygtttatyggagttatygygtttttygygatattygtaggttttgygaattttygagyggttgggtygggttatgggggygtttyggggtyggattaygtagtygyggygttttyggagagttagygtggtygggagygtttgtygggtttttttygygtttyggttatggtyggtygyggygtttttttgtgygttgygtagttygyggtaygygyggttyggtttggagagggaggygggyggygggggttygggayggygaagatattygyggtgtgygttggatttttgggggtygggttttttgttgagggtagyggattygtaggygggattttyggggatggagggagtgggtgagygttagggtygtgtttagggtttttaattttggtaagagygttaygttggggtagggygygtaggggtttggattygayggaygttttaggtttattgttygttttygtttttatattttgtaggtggtygagggyggttyggttygygagtygtygtygttgttggaggtgttttttygaaagaggttattygtygggttygattaggatttatgyggtagtygttttgttttygaaggygtyggggtyggtttagagtagggttattyggtyggyggaggyggttggtgtygttattgttataygaagttggtggagtttaagygataggygtggaagttggttagygggttygggattatttttygggtaagtgatatttttttaggtygattttttygagtagggttaygtyg

SEQ ID NO: 6290 - DNA, 1266 bp, synthetic construct
  misc_feature 1..1266: note = Description of Artificial Sequence: Synthetic polynucleotide
  source 1..1266: mol_type = other DNA
gyggygaggagggttgtaggtgaagygyggggagagggaggtygttygtttyggttttttttttaggggttttgyggttggttagygtttyggttgtattttttggtgygygtygyggyggygttataggtttttygattttttgattatygttttygggtygygygttyggtagtygggatyggtgatggygygggattgayggtygtttttttttagatttttttgtttygtttggggttygttggggttgyggygtygtttygagttgtatgtggggygggygygttygagtttagagygagyggttttyggygttttygaggyggtgtttygtygygttagagtaygaggaggagyggygggtygggttaggttttttaygygtygtagtttyggagtaygggtttttyggaggggatttggggygttttagtttaggaggaaggattyggaagtagaagyggagtygygagtygagtygagttattgttttygttgttygygggygtygggtgggggtttyggyggttggatgggtagyggyggygygggtygygggyggygatgggygaggagtagagtayggtgagyggyggyggygggttttaggagtygtagattttggttagtggtattgygggttattttgagttttygaggttttagggggatagygttygggygttttygttgygygtygttttygyggagtygagyggyggtggttgyggaagygattggggttgygyggatattagygttttagagttygygaggagtttggggttttygggttggagtaagagtygagtatyggygtagtttgygggattggtatttatygggttttttaatttttagattttgttattgtagttggagttggaggaggaagaggaggaagttggggatygaaaagagggaggggatgaatagtaggaggygtttttyggygaagagttggagtttaggattygygtgggggtygtygayggattggttttggaygtgttgggttagyggygttygtttttygttaagagataagttttttgtttygtgtattgygtggagagygatttgttygaggttttygtttyggagtagttttygtygttygygtygttatttggggtttygttagtgttgaatttttttagtattygtttttttttttttagttttygattgttttttttaayggattttttttttttygayggyggtagtatygagttggagttttatttggygttygagtyg

SEQ ID NO: 6291 - DNA, 1316 bp, synthetic construct; identical to SEQ ID NO: 6168
  misc_feature 1..1316: note = Description of Artificial Sequence: Synthetic polynucleotide
  source 1..1316: mol_type = other DNA

SEQ ID NO: 6292 - DNA, 10783 bp, synthetic construct
  misc_feature 1..10783: note = Description of Artificial Sequence: Synthetic polynucleotide
  source 1..10783: mol_type = other DNA
tygyggagatatttygagtttygtaggtgtttgagttgygttgygygttttagtygggaagtttttttttatttaatygygtygtttygyggaaagtttgggtattgtagaygtttttatyggtttatygatagttggttttgaagygggggtttagaaaagtaaaggggatagtgtttggagttaygatgtttttgatgtgaggyggttttatttaataattaaygaattaagttggaattgtaggttttatttttgttggggggaggattttaaggaatgttatttttttgttttttattttttgttttaygtttagttttttagaaggtattaggygtgagtagagtgygaggygtttatattttygtgttttttttattttyggatatttttgtattttagtygaggttttagtayggagtgagggttgtttggggtgttttgttgtgtgtggggygtttttgtttttygggttttgattttayggtttgggtyggygaggygtttttttttggygtttggattgtgygtttgtttygtttttaggygaygaayggtaggagtygggggttyggygggattyggatttagggygggyggaaggygagggtttttttttttyggaattttygtttyggaaatttgtaattaaatygggtttttttttygtatygttttygygttttygggtygtttttttaygygggtatttatttttygggttttygtagtatygtttttttygygtttattygygyggtygaygtygttaggggttttgagatygyggagatagygygttttggygtttggtggggtttttttagtggttagagygtttttggattagtyggttgtggtttgtgtttaaataygatggaaatyggggttgggaygggyggtggtaygtaygtggaggagaagaggtatggygggaaaattatagtygaatataggtygattygtattttttaggtattygtygtygtttgattygyggttttttttaaggtttygattygtygttattttttggtattatttatygggtttygattygggtygygagttygttgatgygtagttgttttyggyggttttygggttttgttyggattygygygtagagaygttygggaaygttgggttygggygttttttggyggyggtagtaygyggtataygttyggtttttyggttygagggggygygtggagygtaygygggattygygygygggtttgggttgttggtttatattttttygtttgttyggatggyggygttgaggtttattygtttttttattaataaygatgtttygggagggaaaaaatagagtttttaaaaattagagtgygagagaggagtgtgtgtgtgtgtgtgtgtgtgtgtgtgtgtgtgtgtttyggggygttggtgaaagtaataaaatttagatygtttttttggygagatagyggyggttataatgygtyggggggattaggggtttatttgtagattttggataaaagatgatatatygatayggtttagagtgttattgygtttggttttttagggagttataagtatatattttttgaaatatygtttagtatagtatttaattygttygttatttaatatygggaggggaattttagtagygtataagygygttttyggttttttggttttgggtggggagagtttaaatgagaaggatttggtatgtttagaygtttttttttttggtttttgtttttagtttaagtaattatttagygatgggttttaataaataygtttgagaattgtttttatgttyggtaaatattggattagttttttaatgattaggtttttgaaaaggttygagaaatatatattaggttttaattaagtttaatagttaataggtaaggaaataagttatttttttatttgaggtggggaatgttgggaagggggatttttatttttattaaattatttgattttattaaatatgatygttgtattaaataggaaagggggygtatttaagttttttattagtyggaatttttattagtttagttttgtttattaagggtygagtgattttgtggggaatatatttgggttttagtttttatttttatagagtttagtataaattatttttgtttagtatatatggtttatttggggattgtttatgggagttttgatttggtaattgtaggggagaaggtatgatttaaattattttygattgtttygygttaatttggatygtttagaggaggtaaaaaatgggtaaattttttggaagttttgttgtgtttttttggtattgaattttgtaagtaygygatataggagatattgaaaattaaagaggaagtattttttttttttaatatggggagagaygttgttggaagaagtttttgaagtggttttttatygtattaagaggttagtgggatggattttygygtataatttaaaggaaygygygygtttttagtttttyggggttggtaattaagtggttyggtygggygtaagtygttttggaatyggttgtagtttaagtttagttgggttygggattgagyggtatttttggttttttagaatttttttygyggtgagtggaagggyggtttygygygygggygtttyggggtyggtyggttgygaaattagggggtggatttttatttatttaggagtygttaagttygtaggggatygagtattatttaggttttgggtattttgagttgttttttgagttttaggayggttygatggtgtagagtttttaggtagaagttagttttttgatatatatatagtagtgagtaaagtgygtataagtgagttaaattttgaagaygtaggttygyggatttttattttagygttagagttaaggagatagaagagaggaaggagagaagtgaggaagggagagagattatgagaaaaagagattatgaaagtagagaaagagattatgagagygagattatgagaagagagaaaaagagagattttgagagagagagatagaatgagagagatttaatttttagtgttayggggtttaggyggggtaagygtttttygaagttattaaagataggggtggttttttttttttttttttagttttttttttaatagatatagtaygaatttttaatgygttttttttttatagataataatatagggtttgaaagtyggatataatttaggttttgtgygggttttttttygygttttttyggtttagttggttatatggaatttagtatggagttygtggatgataaagggatttagtgataggtttaataaaattttaaggagatttttgtttgatttygggatttattgtyggygataagygygttgaatggtgyggggtggggyggggggtggggggygggttttttttttttttttttttttttttgttttygygattttttttttgtttttttttaatatgtaygtttttaatattttyggtttttagtttttttattgtgyggttttgtatygttygttgtagattgggygaagatagattgttgaagyggatttygygtygggtgygtttttagggygttggggttagggttatatagggtttygtaggygtttttattgattttatggggattygaggatagagagaggygggygtygggtttatttttygggttttyggtyggttataggagygtatatttagattgtaggttygyggttttggttatagttttaaatttgtttttaatgagtaagtggtggaagtttgttagggtgaggattttttaygtttttttttttttttttggaaatttgagggttttttgtgattatttttattttggaagttttggggtttggaaaagttaaaatggttttaggttttttgatagtttygttttaagagatttgaaatttttatttttttttttaagaggattttgggattaggggaagttgtaagtggatgttgagtggttagtattagggtaggttgggygtttaattattgtataataaattatttgggagaaattygttggtttttaaaaatagtaagatataagtttttaaatattgttaagttagtgtggagaataaagggagattttttagtatttagaaaaattgtttttttttygaggatgagttyggagatgggaaaggatttttattggggtattagaaagattttygagtttttaattatttaggggyggtgtggaaygygggaataaagtgttatygygtttttgggttgttgygtagagtgttatygaygtatagatttggtygtayggataattatgtttgttttagatattgaattaaatttgattattaattatagggagygagaaagttagttgggatygttttttttgttyggtttttttattgttatttaattttttagttttgatggtgtagtttyggagagaatagagatataatttttaaatgygtygaygtttagttttttagygtttgtagtattygttgggttttgagttagagttttaagtatttttagaaattygygagatagaggagaaaggtttattttttagttggttaggttttttaagaygttttttygygtggttaagtgtgygttagtatttgttaaggagatttttttttagtaataagggtgggayggaattygtttttygtyggaaagatggatgygtttttttygggygtgttyggggttgtgtgtttattttttattyggggagtttattttatttttaaatttttattttttagtaatttatttagttttaygtttaagggttgatttggggggatygtatattttggttyggatygtygaaygttggagggaaggaggttygggatttagttttyggagagaggtttggaagttyggaaaggatgggagygtaagggaagggagaggtatggtttgttgggattgttaaagattttygttttttggttttttggggttaaagattttagggagggttgtagtattttttttttttttygagtttagaatttygygtattttttttaagttttttaagttaaagtttygygygttttgatygtttttatttttagttttagyggttttttaggttagtattagttygtagattttgaaaaggagtggggagtggggagaaggtagttagttttaattttagatttttatttatttatttttttagygtgaggtaagttaaatgtaataaagtgaaagttatygagtgtagtggttttaatagttttttaggttgaaggagttatttatagatttgggttagygaggggggtttgtttttttygtttttgyggttttygaagttattttttttttygtagtyggaygttgtygttyggggtttagatagygygygagattaggggagatgygggggagggtgggyggttttgggttttyggtygatygttygtaggtyggaggtygagygttttttttttygttttaattttaggygyggggtgtagtttgtggtyggaggggtttgtatygggagtttygttygttttagggtttyggtattttyggttttttygttygagaggaatygtttgtgggagtttygygggyggtygggttyggtttttaggtttaggttttyggttyggygtagtaggataaaygggagggtagggatttttttttttttttttttttaaatataggatttttattaaaatttttatttaaaaaatygaaagttttttgygttyggygttgttggggaatygygtygaatagttgagttttaagttyggggttgaaggttyggaggatagggtagagggttttttgtttatagggtttttttttttatatttgagaaatgtttgtataataaaataaaaagagaaaggaagaaagtaggggaaaaygtaaaaataaaaataaaataaaaaataaatttaaataagttataaagaaaggagttggatttagaygggaaataggtyggttttgaaggttattttggtaataattattatygatatttataaygaaaagygaaatttgttattagttgttagaaygtttatatggttataaatatttagtatttttttatttttttttaaaaaaaggaagaaattttttgtatttttaaagtgttttttatttgttttagaagayggttgataatatygttatttatataaatatattttataaaatgtaygaaagtaggggtggggggtyggtttttttttygtttttaagtgaygatattaaygttgggayggtttggttttttyggggagaggtaaagaagygaagttgygtaaatattttgtaaatayggygtagagtttagtttttttttaaggtttagaaggagaggtatgggtagagttgggtgggtggaatttgttattttaaggagaygtaggtaatttttyggygtttttttagtggagtygagagttaattygattttataataataattataataataataataattattataaggatygaggttttttygtygttatygtygtyggggtggggtttgggtttggggtygygagtttygttggggyggygtttattaagtttattgttgggtttggattagggggtgtgttgtygggtattggggggtgttggtygagttgtattgggygttgtattgtatgtgttgtagygattgygygttgtaggtagaaaagggaatgttygtttggaaggtggyggttgttaggttttgggttttgagygygtgatatggtttgtygtttttgattaagaygggtayggttattyggygyggygagggtaggggygttatttttatatttttttyggttygggygygttttattttgtagyggtggttttggaattagattttgatttgygtgggygtgaggyggatgaggttggttaggtgttygygttygggygtygataggtatygttgttgtygaaagygtygttttagttygtaggtttgygttttggagaaaagtattygtygttttygttttttgtyggygtttttttygtygttyggggtttttttgttattgttyggtgattygtyggtygagggtttyggggatttggagtttgagttttgagggggygtttyggtagttagatygtgtattggggggagggggagagagaagygygttaggygtttggaggtygygygtagtttgtattagattyggagtattttggatttttygtgygattttggattttygygtttggtagtttagtttygttgtttttgttatgatttttgtttttttttaygtttgaygaagaygtygggattttttagggtaaagagggaaattygtaggagtgggggttaggggttygttttttaaggggtttatatagtgtgggtgagaatttggggggggaagtggtattgaagattatygygggttaagggtttyggygtttttaagyggtttttttttyggygagaygtgggtagatttttaaaagaaatattttataattttagtattgatyggttyggttatttaaggtaggtttttgggggttttygtttttgttttygggttttttagatattttttgtattgtataaagygttttttatgatygygtagggggtagggtgagttatttatattygggttattygaagtttttttattttttattygtattyggaygaggttygttggttatttttagggygttaggttagttttttttagyggtyggagttygggggttgyggttggagttatyggttygggttgatattatatattagtttttgggaggtatagtttttttttttttttttttttaatttttygtattgaaaaaaattttggagattaagttttttttyggaattaaggaggtttgaagaggagggtagaggatattttatataggtgttaaaaatttttttayggattygagtgagggggttygggtttatatggttttttttttttttatttttagygtttaattygggttgyggttgtaggaatggaggggattayggtttyggtagttaagttttgttatttaygggagtattgaaggttttyggtgttggttagttagygygtgtaygggttgtygttgttgtygtagaaggggttttttaggggtaggttttgtatygygtttagggygttttgttttagyggttyggtttttttggttggttygggtttttygtttttttttttyggattttyggttatagagttttttttatygttggtgttyggtaggtttaagatgtttttgatygaaaatttygtttttgtgttggttagygatatggttygagattttaaaatttatgtygtaaagttgtagttttatttggttaattygtggygtttttttgttttggygggygggggaggggggagttggggggagggattgggggaggggaggggggaattggttttaattattgggataattattatttttaaaaagagaaagaaattggggatggggaggaaaaaaatgaagtttaatttagtgtttttttttgttttttttgaaagtaygyggaaatggaygtaggaagtygggyggtttgygygtygagygtygygggtttyggttttagtttttaattttaggaggggtgttaaggyggygttagttygggtttyggyggtygttyggygygyggtggyggttggtggygaggaaaaaatgggttattgttygagygattagtttatataaggttgggttttatttaygaatttggggaggyggggagagggggagaaagagagggagggagggaaagaaagagggagggagggggagygagagagggagygggagaagggtggaaaaaagggggaagagatattaaaaaygtaaaggttggttaygtgtgggygggttttgggagttaagtggatgaagatagtatttgtagatgtgaaattgtgggttttggggagtttygygtttttagttaayggttttttagagtaagatgagaggtgtaaygtgttaattaattgtaaagayggggygagtttttttttttttaaatttagtatttatatataaagggttatygygtygttygygagtttatatatttgaaagggtygttttaataaattgtattttaaaaaaggtgggggtggggaggaggaggggagaaaataaaatagaaattaggaggagggaaaaaattttttttaatatttatyggtttttattttttygttttygygygtttattttyggtaagtyggaaaattggygatttgtggygtttttggaaaagggggagggggygaaggtygagttgyggaaattttttttttttatygttggtggttgtttaaataagattyggtttaaatggtaagagtttaatttttgtaagttttttaggttaatattttggttgaggtttaaggatgagtgttagaaatgataaggtaagtaattgattttagttaatygygagagagtttaaaatttaggagagagtttygtttygggtyggttagagttattattaagygattygtttttttttagtygttttttatttgttaaagatttatttattttttttatttygtttttttttattttttatttttaatttttygtttttatttttttgyggttaaggaggaygygtagtttattttttgttttgygggyggtttyggggagggyggggtaagagtgaggagttttaatttygtttggggtyggattttggttttgttgtttttgggttttgygggttttttttttygggtggaggaaagggtagayggttttgtttttttttgttttttattattttttttttttyggttttttttttttttagtttttggttagaggtggagtagygggaaggyggyggggygggattgygggggtgggggtgggggttgtgtttttagtttgggtgaagatttagaaagttgygggggaggggggtygttgggtggttygaygatgtttygttttttttttagttttttttttttaygygagttttttagtgtggtttttttttggaygttttgggtgygttyggagtaygygttttaygtttttaggttaagttaggttagtgtgaagtttttagttattttyggttttgggaattgaattttttygggatttgtatttttttttyggygttggggttggaaaagattaygtygtatttgttatttttttttttagttaaaatttttttggggggggggtgtaggggtgtagattggttatttgatgttygttygttttagaggagtgttaggaaggagttttgtttgggggyggggaggggtatagaaggttatttttgyggggtttaggtttagtttttttataatttgggttttttygygygggttaagttgagygygygggtatygggtttttttygygygtagttgtagyggaygtygtygygttttagttgttttygggttgttagygttgggtgagggtattttttttygagtygttyggyggttttttgtagttttagttgtttygtttttagtatgtgaygtgggtgataatggtttaggttagagtaagtttttygtyggygygttttgggtggtyggattygggtaaatataaatataaatygattgttaagttgyggataatgagygaaatgtagataaatgtttygttttygttggaagtttttgtttyggttyg

SEQ ID NO: 6293 - DNA, 810 bp, synthetic construct
  misc_feature 1..810: note = Description of Artificial Sequence: Synthetic polynucleotide
  source 1..810: mol_type = other DNA
gygtaygggtyggggagggggttatyggatttggatttygggatatttygggggtttggggggygggtygygygtttatttgygttttygtygtygaaggagtttatgtaygggaagtagatggygagygtttygaaggaggyggatagattgaggyggttttgygagygttttatgttygygtyggygtygggygtttyggtygyggyggyggyggyggyggygggyggtttgggtagtttggtygttttatttttgaygyggagtayggygygyggygtggtggyggyggttyggggtygggtygaggtttygttgyggggttggygggygyggyggggtyggygggygggttaggagttggyggygygyggagttygaggygygttgtgttgttggyggyggyggyggyggyggyggtggyggyggyggtggyggygtagygygttttggttygyggygtttttygtyggtagygygaggygggtttggagyggygtygtagttaattygtgtygtygggggagggggygtygttgyggggygtgggagttyggagggygygggttgyggttttttttagtagttttygggttyggtaggtgygygyggggaggtaggygtygggygaggttgtttgggttttggttygagggttgttttygatttygtttyggtttttatttttagtyggtygatttgyggagaggtyggygtttagttttttatttagataggttttttttagagatattggygygttyggaggggatgygtttaaagggtttygtttaggygggtyggtattyg

SEQ ID NO: 6294 - DNA, 1142 bp, synthetic construct
  misc_feature 1..1142: note = Description of Artificial Sequence: Synthetic polynucleotide
  source 1..1142: mol_type = other DNA
tygggggagaaatttyggtttatagtygggatgygttttygtyggggttatygyggyggygaaygtttyggatttygtatttyggtgattttttgggatgaatygaagtyggattygtattttggtygtaataagygygttttaygtygttaygtattagyggtgattttygagttttttgtygttttggttttttygtaggygggtttygaggttttygtagggagtttagggttayggttaygtgtagtygttttygagttygagtttgtaggttyggggttyggttygygttttggtggygttyggygaggttgtagygygtaaagtttttattttaagttttygtygyggygttttygtttyggagttggttyggtygyggttttygtttttttyggttgtttaygggttyggggygaggaygygagaggggtttggaagtygttyggggagttygttttgtttttyggagtygtygttaaatttyggtttyggggttyggtttagttttygttttyggagttayggtygtttygtttttgtttttyggttttygtygggtttygagtgygtygggagygyggygtagtagtygtygagggagggagygaggtaggaggygggayggagggaggggattgagygyggggyggggagaaggggygggtagtygaaagygtagygtttggtttygtttygtttygggatagtggtagyggygttatygttayggggygtttaggygtttaatygggatttygtattttggattygggggttttggygygtttgttggattgygtttttygyggttagtttttgagttygygttygggattgttygygttaygttttttttttygttgttttttttttygtttgtttttttaggagygattattttgyggttttttygtttgtaygygatagtttttaaggttttygygtttygttgttttggagttttaygtattaggyggygyggtagttttttagggtygygygttttgttagtttttttygyggtgtaagtgtttyggtggtttygggttygygtttttagtagtatygttttagggtttatatgtgttagatattaaaattttatttttygttgtttyggggtygygttttaygyg

SEQ ID NO: 6295 - DNA, 2885 bp, synthetic construct
  misc_feature 1..2885: note = Description of Artificial Sequence: Synthetic polynucleotide
  source 1..2885: mol_type = other DNA
aygttgtagataggygygttgtagggyggyggttttttttttttggtattatygatagtygaggaaattgggttaataaagtyggatattgyggyggggtygyggggygtaaatyggygyggatagatgggttttygggggtattttgttyggttttttggatttyggatggtggtagagttgggagttgygtaggaygggtattgygtagygtattttygtttatattyggyggggtayggggttygtagtagtttatttattygtagttyggttttttttttyggaagggagaggggatyggtggggagggggtttgttggatattagggttagayggggtttttttttgatygttagggttaagtagggygygggttgtgaggatttttttttaygtagtttttygaggtagagggttygtaaagyggtttttatttaattttatttygyggaygttttaggtagyggatggyggygggggggggaggttaggggatatttaggggataaattttttagatttygaggtagtyggygayggygtttaatttttaaataaatagaataaatttttatttggaaaaggtttttttyggggtttttttgygttygyggtttagtttttttgtagayggttatygtgggtttttygtagggttgyggagtttyggagttatygaggtgggaggtgtyggttaygygygtttttaggaatagagtattgttttgtagtttagtaygaagggtyggttggagygggagygygaggtttattgtaagaggattaggagttagtaagttyggttttttttygtttttatttttygtgygttyggggttaggatygtttgttyggaatttgattagtgttygttttygtygtggttttgggatttygyggtggtttttttttggggaygaayggtagtgttygaaggatgttttatttattttygtttttagatttgttgggtttygataatatttagtgggtgtygygagttttygggygtagagtttagygttyggttttygagtttaatttygygtttygayggttttggygtttttygttgygttaaattgtttatygygtataggttggaagygaagtygggttttttttttttggtttgtagggtttttttaggttttttttgttygggtagagagatagttataggggygatyggaggaygygtgygggagggtygggggttygygyggttayggtttttygtgatagtgtttgtaaagygyggagggygtttyggagaaggyggygtatttgttagggtagggttttagggyggygtttgyggagaaggggtatatagtggtttggtygaagggygttaagggygyggygtttaygggygyggttaggttttggttttggttgaggaaggttattaggygtygtatttygtttagggtttgygtttgtatgaggatatagtttttggygagtagtagygtggygattttggagagtttgygtatygaygggttgtgygygtaggggatgayggttygtagttygtttagygygtygtttaggtygtgtatgygtygtygttygygygygttgatgttgagtygtagagatygttgttttygyggtygtygtygttygttygtygygttttttggttygygtygtygtygtygttgttygaaggygtygttttygttttygttttgttygtygttgtttttygtygtttgagttggggygygaggtgtaggygtygyggggaggtygtygttygggttyggagtgtygtagtygygggtygtttygggttttygygtygtttygtaggygagattygtagtygtygtygygtagtygtggtttagtgttaggtaygygtttttygatagygatttgagttyggttatggtygygtygtttgggttygggggttygtygggtgggyggatgtttatgtgggtgagtagttttygaggtyggttygagttygtygttgtygttgtygttgygatgaggttttyggttttgygygtyggtttggtttgtttgygggttttagagtttyggygttygttgtttttttygtttttttttttttttttatttttttttttttttagtygygaygygtagggggygggttttatttttttttygttttygtttyggttttaagtygyggaggygttyggtgggatttygttgttgtttaattaggggggatygggtgagtttttttttttggagtygggttttattagygtygtaggtttataggtygggggtgggggttttggatygaggggyggygyggggyggygyggggyggygygygyggttttggagygttagtatttgtttttygatttttyggtygtygttttyggtygtttyggggatttygttattaaaygtaygygttttaggtgggtattygtttyggttygtttttgagtttgattttagygtaagagtttttggygataygtaggggttagagygggggggygygtygtaatagtagtagygttagygttaatattttgtttygttgaggggtygtttygggtyggggttagggtygtgggygttttggtgtagtygyggygtagygtgtattyggagttygtatattttttgttyggggygttttgtggttaggtttgaggggtagagtgagagggagtttttagaatttgttgaaaaaygttaygagygttgtaggtyggggagggygggaaggtggagggtagygyggtttggggtttttygggggtgggaggggagttttgtgagttgtaggatygttttttttttgttagtygttttttgggtatttattagygaaaygygtgaggtttggtgggttttttyggagttttyg

SEQ ID NO: 6296 - DNA, 1460 bp, synthetic construct
  misc_feature 1..1460: note = Description of Artificial Sequence: Synthetic polynucleotide
  source 1..1460: mol_type = other DNA
aygygtatgagagagtagagyggtagygaygyggtyggatyggtygygggggttgygggaggaagygttgtagggattygggyggygtyggyggtttagtyggagatgtaygygttgtaatagatygygttgttggygttygatagygyggagattaggttgtttttttttgggtaggatatggygygygggtttagtttggttagtgttaygtggtaygggagttygggggygtygggtygagttyggttgtagttgaggtattggtygaattyggtgaggtttaygtyggtttatagatyggyggygggttttagyggttyggygttttttagyggyggggtttygggyggyggygatagygggtyggggtaygggtygggygtgtttagggtgtygtagtataggttagygagyggygtygyggggggygyggttttgagygttttygttaggggagtttygtagtaatygtyggggtttygygataattyggtgggygygtagggygygyggaagggtygtagygygtagttttygggygtygygggyggtgggaagaaggtagtttygtygggttttaggtygtttagaggygagygttygggygtgggtagttttaggtygtygaattyggygtttagygggggtagttygyggaaggygygagtygagttagaygtygyggggaaaggttygggyggtggttgygggggygttaatttygggagtaggaggtygggttttagtygtygggttttgygygtttgttttttgyggygyggtyggtatttgtagttggggtggtygygtaagtgttgtaygygtagtygttyggttttttttaygaagggtygttttttygtygygtttagttttttttaygttttgtttgygggtygtgggygttagtgagtggaaygtygtygggygggtgggygtygagtttttygtgygttygggaygtttygygagggtttggygtagttttygtatttygyggttygggatttttgtttttttygttttatttyggttygagtttttttygtttttttttttttttttgtygttttttygtygtttatttagtattttgttgagtatygygttgtgtaggttygggttttgttgagttagtygtttgygttygttttttgtttatattatgaaggygtttatgggtygtyggatgygygattygtttgtygtttggygtttttygyggtyggtygggttgaggttatagygtttyggttyggggttgygygggggattgygttgygggttgggyggygaggygggygyggygggygyggygagggyggyggggtyggyggygaggtygygygtgttagyggyggtttygtgtttyggggtttatgtatagtygyggygggygggygggtygttttgtgygtygtagtygggyggygatttttgtattttagttgggygyg

SEQ ID NO: 6297 - DNA, 1560 bp, synthetic construct
  misc_feature 1..1560: note = Description of Artificial Sequence: Synthetic polynucleotide
  source 1..1560: mol_type = other DNA
aygttttgtagtgtygggttttgyggygattattgagttttttygttttygtttttagttttttygttttygttttyggttttygtttttttagtyggtyggggttygtygtttaygatttygtaygtgtygtygaygtygttttgtygatttygtygtaggaggtggaattgtagtggtgtyggyggttttttttttggggyggyggtggygaggygttygttggyggygggtagyggttggatgaaataygttttttttagtaggtagaaggygtygygtaygttttygtagaggttgagggyggtagtygagttgggatygttatttayggtgtyggagtagaagtagtgygttaggtyggttttyggaagyggygtttyggattyggatttgygttttaygttttggagygtgaagtygggygttaaaaagttgttgtygggtygtagttttagatttagttgttggttaaaggygtgtaggyggaggygygtggtttygtgtttyggggygygttttagtttyggtattattagtttttygtttttttyggaggggygttygagtgygttygatayggttagtagygtygyggygagtagtagtagygtgggtattggtttaaagtttygagatttyggagttygtttygygttttttatgtygttgtttagtttgygtttttygaatttttygggtatagttygttgtattggagttttaggagatatygttygtagtagygtayggagygagggatttttagttygggtygggagagtaaagtttygttggtttgttttggattgttaaaattaataatttttattattygttggaagggygygtagagtyggttatagtygaagttttyggagttattaaaaggaggygttgtagttttgtyggygygygggaagttttttttttagygtaaagttggagatattgagaggtaggygtaggtagagtggttttgttgggataagaagygttttggggygttttyggggttgaggtaaygyggagattggtgtttggygttttttttyggttttygttttggttgygatgttgtttattttgtttagggttttttttttttygttyggtagygtattttggttttgtaatagtttttggttyggagtygttttttagygagtgtaagaatygggtagtygagyggtttttttatagtggattagtgaaatttttatttttattttattttttttttttggtttttttttattttaaagaygtygttttyggtttygttggtgttaaatygygtttygygttgygggttygggagggggagggggtagttttygygttggttttaygttattgttygttaatttaggggyggaaggggygttgtgattagtattttgtattgttggggtygttttagggagaagatttttttttttatygtttttttttttygtyggttttttggattattttttttttttatygttyggttgyggtaatttagttatygygttgggttgyggtttttaggagggagggttyggttggagaayg

SEQ ID NO: 6298 - DNA, 5118 bp, synthetic construct
  misc_feature 1..5118: note = Description of Artificial Sequence: Synthetic polynucleotide
  source 1..5118: mol_type = other DNA
tyggtgtygggagttttgtttttygtygttatttttggttagttttgygtaagaaygtygttttgtttggtagttaggtygagaygtagtttgaatgtgagtaggaattyggagaagggaagggagagaattagaaagaaggttygggagggattygggaagtagtgggaggtttgygttttggagtttygygagagttygtyggtttggtaygggtttttttygggtygttyggyggtttaataaaggtyggtttygataygtattyggttttttgtgggagagaaatataaagaagagggaaaaatayggaggaggttaatagtattaggaygygggggttaattaggaattttyggagtyggggtttattagtttttgtaaatgagtattttattttttaggaaggggttttagttgygygygttggtgggaatygtagtgtttgggattygtttaggtygtttatttygggygtygggygtaggattyggataagttttggggaygtttttaggaygtattagggtaagtttgggtatygggatttaatttttagttatttttgggayggggtggggaggtataggagatatatygagaggtatttagtattygattggtattagggttaagggagtttaggggygatatagattttttygattttttaagttatttyggygaygggaggatgttgagggaagtttgttaggtgaagaaggggttagtagtagtatagagttttygattttgttttttaggttttagattygygttatgttaagaygggtttttygatttttatttttgatttttaattttagttattggatygagygygtaaagaatttgagatygtttgtttttatygtygtaagtyggtygtaggatagatattagtgggtagtaataaaaaaagaaatygggtttygggataygtgtyggyggttggattaattttagyggttgtaattaaggagygygtaygttgygtttgttggtgtttattagttatattggtaggygtataatttygygtttygattggtggttttatagygygtattatatatggtttygttgttgttggyggggtaggttygaaggaggtatttataaatgttygagttttttttgatttttattttttygttttttgygtygttygagtgatagattttattaattgaayggttatgggttatttttgtaatygttggaygatataatattaygttttagttttttatgttttaaatatatatttaayggatggttgtagagttagttgggaaataygyggattgaaaaataatgttttagaaggtaygagattggggygaaggygagagygggttgggtttttagyggagatygtagagggagatatattttagaattaggggtaataaygtgggtttttttttgtatttgtttattttgtaattttgttatttgaagattaattatttattatgttaatttgtttgtttgtttttaaaatygtatttgtatagtaaaagttttttaataayggaagtaattygaygttttttatattttttaggagattgtgtgygtgtgtgttygygygtgygtttatagtgttaagtgttagtattygagatttgtagaaataaatgtttgaattygaaatgtatgggtgtgagaaatttagttyggggaagagattagggattgggggagataggtggttgtttgtattataaggaatygttaaygttagtatttgtagtttaagtagggttgttttgtaaaggtttagtaattttttttgtaggtttgttgtatayggtttttggttttttttatttgtaaaatgggtgaatgtattygtattttagttattttygtgaggtgtttttttagttygggtttaattttttatygttaagagtttttaggttttagagttagtttgtaatyggtaaaatatgttttaaygyggtygygagtggttttatttygttgtttggtttatagygtggagaagttttgtttaggtttgaaatttttttttgtagttttagaaagtaggygattgggayggaaggttttttgttaattttttatagyggagttttgtttggattatagatgttagygttgtttttgttttaaggygtgtggtgattataaagaygatattgaaaatatttattattattyggtttttttgttaataaatggaggggtgtttaattataggtaygattttgtttttgtgttagygyggttatygtgyggaaataattygtttttgtatttatattatttttaatttaaaggagagttgtgaatttttttaaaatatttttttggagttygttttttttttttttgttygttttttattttttaagtttttgtttttagttgggggygttatyggttgtygtyggagttgtagttayggttattttttagaygygygagtagagtattaagatagtggggattttgtgtttgggtatygtttatatttggggygttaaatgtttaygtgttgatgaaattagtgagatgggaataggyggygggaaattagatagaggaagagttagggaggagattttagtttyggattttgggtygttagggtttttygygygtattttaaaaggtgyggttgygtggggtattaggttagtttgttagattttgtagagtttttaaattattttattttttaatttgattttgtggtggtygtattttttatagaaatttgattaygtttttttttttttttggttttaagygygtttagttttttttttattttttttgagtygttttttttttttttttygttttttygggttttttttttagtttttttttaagaatttttyggttaygggygtttattggttgtgygtagggaggaggygtgtgttyggtttggygagttttattgagyggaattagttyggatgatattagttttttagtttttyggygggtttagtttattggygaggtagtttttttaggataygtatattgtttttygttttygttttygttatygttgtygtygtygtygttgttatygggttataaaaatyggtygagtttttaaaggtgyggatgtttattatagatygaygygatattagygttyggtgttaggtttttttttgaggtttttyggagygagttttttaaatygtatttagagtaagtgttttygttttatagtagtygtagtttagattttagggatagattttttttaattyggttgtgatttagaatgtttygatatagggggtttggatttttattttgygggttatttttttagagygattttgtttttttgttttttttatatttatygttgtattttttttattaaaagygagaagtyggagygataatagttttttttgtttaagttttagttagttggtgagtttttygtggtttttagatgtagtatatggattttgggtttygygtyggttttgggtgtatgtgygtgtgygtgtgtttgttgygtggtgtygatggagataaggtggattygtttgaggaattaaattattagttttttatttagatttttattttttttaaagaaaggtttttattttttattygtttattttagttygggggtttagtttttttatatttaattgaaagttygaagtttttagaatgttattygtatttygagggttattaaygttttttgaaataatttgttgtatgagagtagaggggagatagagagagtttaattataggtattygygtgtagttaaaaggagggttagagatagtagygagggggaygaggagttaygggttatttgtgtygggatttygygttgtggtattgyggtgtaggygggagtagtttttttgttttttattgatttatttttttttttttttttttttttttttttttattttttttttttttttttttttttttggaagttttygggttygagggaaggaggattttgygaaagttgygaygattatttttttttggggttatggattyggaygttagtttggtgtttagtygttygtygtygttagagttygatgatttttttttgtyggttyggagtaagggtagtagyggtagygtttttattgggggtatygtgttttygtttatttygagtgattgttygtyggagttgagygtygagttgygyggygttatgggttttgygggygygtattttggggataagttaggaggtagtggttttaagttattttygtttagtatttygtygtttaygtygtyggyggttgygtygtttattaagaaggataagaagtaaatgatagagtyggagttgtagtagttgygttttaagattaatagtygygagygtaagygtatgtaygattttaatatygttatggatggttttygygaggttatgtygtaygtatayggtttttyggtgygtaagttttttaagatygttaygttgttgttggygygtaattatatttttatgtttattaattygttggaggagatgaagygattggtgagygagatttaygggggttattaygttggtttttattygtyggtttgyggyggtttggygtatttygygtttttgttygtygttatygygtattyggtagtagtagygtaygtygtatattatttygyggtgtattattttattttgtygttygtygtygtagyggttgttgtygtygttgtagtygyggttgtgtttagygtttttttgttyggattygggttgtygtyggtyggttttattygtttatygtayggtttatttaagttttygtttgttgtygyggtygtttygttggggggygggggyggyggtagtggggygagygggggtttttagtattggggyggtatgttttgtttttgtagtatgtgttaggtgtygtygtygtattattaygtgtyggttatgggygtyggtagtttgtygygttttattttygaygttaagtgagtygattggygtyggygygttttggygataggggagttaggggtygyggggaagygaggattggtttgygttgggttygggagttttgtygygaggaggggyg

SEQ ID NO: 6299 - DNA, 1423 bp, synthetic construct
  misc_feature 1..1423: note = Description of Artificial Sequence: Synthetic polynucleotide
  source 1..1423: mol_type = other DNA
tygtattygattgtaygygtttttttgggatttygtattggygagtygtttttttyggygttggaygttttatttgtttyggygtygtyggaagagttttgtagagtgagtttttagggttatttygttgttttttttttygttttygtagtygttgtagttagygtgggagtygggtaggtygygtggggygttggatttatygagaggttagygtygtygtygggggagggygtgtttygtaygtgtgtgttygygygtgttygygttygygtgtgttagygygygtgttttggtygtgygygtygagtygggtygtattaattttttyggygtygaygggtttagtttatggtgtgggygtygggtttagggaggtttyggttttygttaatygyggagtagggyggtygtttygaygygygatttgygaattyggagtgygygtygggggyggggtagggaygygtgggygggaatgtaygygygtggttaggtgygygtgggtgygagygygygggagttttygagtgygygygtgttygtgtgygygtgggtgtgggtgtgttygygtgttygtgygygygttttyggggttaagagygygggtygygygggtaggtttggatattaygygttttgttygggtttaggaygyggttggyggtttygggaggaagaggaggaggaagaggaggaggyggaggaggaggaagaggaggagggaggyggaggagtagaggttgggayggtyggaggagagagttyggttttagtaggaaaggaatttagtaygygattattggaggggygaggagtaagggaaggattagaggggaggagagggggttaggggagggaaagtgtgggagggggagtygygggggtgygygttttttttaattyggggtygtttttagygagaagtgatatttttttagttttattgaaaatygttgtaaatattgaaaatagtaaaagtgaaaayggttgygatattaagaygtttataaaatgatygyggattgttttygatgttgatgagaattgggaygaygtygygtagagygttyggagggagaggygyggtgttygggatttyggtygtggggaggagtyggatatagtygtygggaygyggggatgtygagggtatygyggtttggtttgatygaygtaygyggtgatagtygtttttgggagaygayggygtttgtaattagtagtttttaaagggtgtagttaggaggtttagtttgttygttttyggggttyggggttaagttttttttagaagttttygtttttaygygaatttygatygtaaaatttagtttatttgagygtygtttttttttttttatgtttttygggggtygttaygatygtttyggagygatttttaggaatttgtttygtagyg

SEQ ID NO: 6300 - DNA, 1384 bp, synthetic construct
  misc_feature 1..1384: note = Description of Artificial Sequence: Synthetic polynucleotide
  source 1..1384: mol_type = other DNA
gygtygygtatagaaaaggaaattttatttygtttgttaagggtagggtygggttagtggtaggagaaggttagttgygggygtaggtaggagyggatttaggagtygygtyggggygtagagtyggaygtttygaggagtttgygygtygygttattyggyggaagtygyggtttatgyggggttttttaggtttatttaaygtttygtaggygtggttggtaggaggggttyggtygtgtttagygtttttagaygtagttttttttgtygtagtygtyggtggtygtgggtygtygyggygttgagtattttayggggaagttgaggtygggayggtyggtgtagatttaggygtygtagtataagaggtagtygtttattatgagtagygyggtggtygtttagtygatgtatagygttgygtttagttygtatttttgygataygggtatagaygggtygtaaaattygyggaygataatgttggygaattagtagagtggtaygagygttagtagttygtaaaataggtagagtaygtttttygtgagggttataygygttttggtygggttyggggttaygtaggtggtgtattgygygttygttagggttaygaagagygtaaygaaygttagtagtayggygtttayggtgagygttygygtygtttgtatttyggtgtttagagttagtatygagtygtatattttgtattgtatgtgttyggtgttttgtattaygtaygatatttatagttttttttaggtggtttgygtygttaygatgttgtggtttaggaaggyggttatttgttatatgggtagttygtaygttaggattagatttttttagtttattaggtatagtattaggtttaggatttttaaygttgyggattttatggttagaggygagaygygtattygaaggttygtagaatttttaaggtygtgttgygyggygttttgggygggttttggtgtttttgygttygygttttyggtttttggttttagttygtttgtttygygggtttgtygtattttttgggtttgttagtttttgtyggggggtattttttttgaaggttygggggyggattttgtttttygggttyggtttttyggttygaagtagttaattygtgygygggttatygtgtygtagttaattatagagtttttggtagttgaagttagggaaataayggtttttgaggggtagttgagggygygggatygtttttygttyggtagtygtttttagttttattygtygttgttttagtygyggtygagygtattttgggttggtttagggygygttttttgggtygtttttttgygygtttyggtttygttattttagaaggygttyg

SEQ ID NO: 6301 - DNA, 1361 bp, synthetic construct
  misc_feature 1..1361: note = Description of Artificial Sequence: Synthetic polynucleotide
  source 1..1361: mol_type = other DNA
gygttttygattttygtygttgggatttttygtygtagtttttgttttagtttgtgttgygggtggggtygggttgagtagttyggygttttttatygygttttttatygtatygttttygatttaatttygttttygggygtttattggtttgtagtattttttttttagtttgtgaagtgagtagggggaggyggtggtyggtygtttttttttagygtttagtttggtttygyggyggaggyggygtttttttygtaggayggagttaagttggattgtygygtygygyggggygggtaaagggggygttgygttyggtttygggtagggagtgayggyggyggyggyggtttygggygagygtggttttygygtgygtataygtataygtygtygygtagggatatayggatttyggtygttagtyggttatataggygyggagattyggttyggygygygtttttyggygtataygttttttattttygygtygygygggtygyggatttgtaggttgygygttttttgyggagtttgtttyggttttayggataggtttygtagtgagtaggtaagggtygtttygtygyggttgtttttttaygtttyggtygttttttttttttttagaattttygtttagtygggatttyggatttttttttttggtttggyggttttygttagtygygatttttatygayggagagygggygagggtyggygttaggtaagttttttagatttgaaatgaagttttttttygtygttgygttttttttgygygttaggttgatattttttaatttaagtgtttggygttgygttyggggyggtygatygtygtagattgtyggggtgggggtygatttagttattttaygttttttttgatgyggagaagggagattaggggggtaggtaagttatgyggtyggagggattyggagggatatgtttttttatttttaggtggayggaygtatttaygyggatygggaaggtagggttggagggtttttyggggttaggtatygtaattygtayggggtttgaggggtgggtaagtaatgtgttaggtgggggttggggtaggggttagtgtagaatgtttttttgtggtgatatattygggattgtttaaaagagtgtygttttygtttttygtggygyggaggggttggggttggggatgttagggttttagtggtttttagaagaaaygttttgyggggtttgtggggaaaygtatyggtttttttaggttgaagtgggttygttgagatttttgtttgtygttttagaggtagaagtttttgyggyggttgyggggggyggaggttatattttyggyg

SEQ ID NO: 6302 - DNA, 1175 bp, synthetic construct
  misc_feature 1..1175: note = Description of Artificial Sequence: Synthetic polynucleotide
  source 1..1175: mol_type = other DNA
aygttgtttggtyggagygttttataattyggttaatggggagggagtygttygttaagygtttgttaggtttygattaaygggatgggtttttttygttagagtatattgttttaatttaggagyggttgtaggatttgagttaatgagaygtaattttygttagtygygyggtgttyggttaataggaggtygttygtgttyggtagygtgggaggtgtggggtggygggyggygttgygaagttgagggagttgygygyggaygagttatagtttgttatagggtgggtgygttygttttgtttagttygttygtygtttttyggttttttttgygyggyggtttttggatgggggttttttttyggggggttttaggygygggtaagtyggtygtygtttttttaggtttyggggtttyggtygttgggggygygygggygggygaggttggyggtayggagygtttggttttttgtgggggygtyggtttttttttggggttttgygygtttagggttatttyggygyggtttaggttgygagttttgtygygtaygttagyggttaatatggaggtagtttyggygygtttygygggggatygtyggygttygtgggttttaagaggtyggggygyggygygygttygggttttgggyggygagggygtagygagggttgtygttttttygggtagtttyggggggygyggygttgggtygygggttygggggttgtygtgttygatygtatgygtygatttgtygttgggygttygtttttttttgttggggttgggygyggtttyggagtttggyggyggtggtgagggygtayggttagttgtagyggygttgtgtttgtygtggatttaggatattttaggtttggtggyggggttaggtggyggyggttttttgygttygggygatggygatagygataggtttttaatttygtttygggttygggtyggtygggtttygygtygggttaygygygygtatagagttttttygggtttttttaygttggaygtygatygttygttgtyggaggaygyggggaggggtatygttttttyggyggaggttggygtggttaagggtataggggayggygtyggygtttyggtagggatagtggggatttyggggtttyggtttttyg

SEQ ID NO: 6303 - DNA, 1087 bp, synthetic construct
  misc_feature 1..1087: note = Description of Artificial Sequence: Synthetic polynucleotide
  source 1..1087: mol_type = other DNA
tyggtattygygtttttgtgtttttggtggtttyggygttttttyggagygygyggtatgtttgtttttataygtttagtatttttgtttttagagtaaatttattttttagggtataygtagaggggtagttaggtatygtttttattttgttttatttaggtygygygtatttyggaaatttggatttygygattagtttttttttgttttttttygaggattttagyggtagtgtgttttggatttatttgtagtttttaagtttttttatttttgygttttttttaggygtttttgagtttgtagagtttaygatttttaataggttgtttygaagtgtttttttttatatygttttaggaatgatttttttatattygtttttygtaaaaaaaagttggtttaagatttaggygttttaaggattagtttaggtttttattygaygygggttagggggtgttgttttggtagtttyggagtttyggtaaagagtaatttgtagggaggygttaygygyggtttttattattygttagagattyggtttatggggttaaayggaggggtttgtgtyggtygatattttaagttttgtygygtttttttygtygtttatygtatgggatyggyggaggagaaggygyggtygygggttttttgaggtagygtgtttygtttygggaggaaagtttgtgttatatagaggaggyggygyggggaggatttgggygtyggtgggtggaggygtgggyggtggygtygygtggtygtgtgtttgttttttyggygatyggtgygtttgtttttygtyggagttygyggtygtygygttttygttygttgygtttagygttyggygygtttyggttttagtttygaygygttttygtygtygtygtygygygttygtyggttatattttttttttttttgaatttatgtgtaaaatatgttaygttgtatttttagggaaagtttygyggtttttgatagtagtygttggagyggtgggttygtttagtttttttygygttttttyggagtttygttyggttatttttaygyggtygagttgtaagyg

SEQ ID NO: 6304 - DNA, 693 bp, synthetic construct
  misc_feature 1..693: note = Description of Artificial Sequence: Synthetic polynucleotide
  source 1..693: mol_type = other DNA
tyggtagttaaygtttagttttygttttttttttttatttyggatttygtaatygygaggygagagagtagygtyggygaggtattggttgggttttgattgttaygttaattttttgttgttttttttagtttttagtygtttygtttttttttttttatttttagtttgggtttggaggygatttttttttattgattgagtygattgtatttttgggtaagyggygttttgttttttttttgtttttgtttgttttttttgtaaggttayggygtttggagtagggtttgtagyggtygtygtagtaaygygagttaagtygtgtttygtayggtygttyggggtygtattttygttyggtggyggygttygaagaygttagtygygttaygtattgtttgygtttygygttttagtygtygygtattaaygtygtygttttygtygggagttaagttygtygggtyggttyggttttaggtgggtagttyggtttgtagttggttggaggtggyggtygttgtagttttggtagygggtatatttttaagtataygtatttaaygttttttttttgagttaygaggatggagtagttatttyggttygggattggygtaaggtaaggtgtagtygtttgttgtttttygtagagygygggattatttttttgttygggtatttaggtyg

SEQ ID NO: 6305 - DNA, 5065 bp, synthetic construct; identical to SEQ ID NO: 6273
  misc_feature 1..5065: note = Description of Artificial Sequence: Synthetic polynucleotide
  source 1..5065: mol_type = other DNA

SEQ ID NO: 6306 - DNA, 307 bp, synthetic construct
  misc_feature 1..307: note = Description of Artificial Sequence: Synthetic polynucleotide
  source 1..307: mol_type = other DNA
gygygggggtyggattatgagtygttgagtygggtaaattttaggttatygagttagyggattttyggagygtagttttgygtygyggagtaggttttaattaggyggygaggyggttataygtatygagttagygattttygggygaygygyggggttagggagygttaygatggaggygttaatggttyggggygygtttaygggttttttgagggygttttgttttttgggttgtttgttgagttaygtygtygtygygtygtygtttattattaagtttttyggygatgtygtttttaaaayg

SEQ ID NO: 6307 - DNA, 1563 bp, synthetic construct
  misc_feature 1..1563: note = Description of Artificial Sequence: Synthetic polynucleotide
  source 1..1563: mol_type = other DNA
tygggtttygaaaayggggggagggggaygaygttttagaggtttttgagtttttggtttttttygattttaagggtttttttttttyggtttttaggyggygayggygggtagygygaagtagtaggygtaggggygttgggatggggatgtttttgtaggtttaaggttttttttgggagtttaaataaagattayggtagygtygttttttttttygggaattygaygtygygyggttatagggggtttggaggggygggtagggtttygtagygtatttagtatagttygygyggyggagygggtgagaagtyggygggggygyggatygatyggggtgttttttaggtttygygtygyggttttygttygttttttygttygtttatygggtattttagtygygtagaaggyggaagttaygygygagggatygyggttygttygggattagttttaggttyggtatygtttygygggtygagygtttatattygttaaatttaygygggtaygttttygyggygtatygtttttagttyggttttygtttttgtagtygygggtaygyggaggggtttttggttgttygtatttgtattygygygtyggyggygtygaagtttygtttttygtttgygygtttgtttygttygtattttygyggtgagtyggyggygttttygtttttgagtttagggttagtttttttygtygtygyggttgttgygygygttttygtttagtttagtttagtttygagtaygattttagttttaygtaygattttagtttygygagtttygtatygattygttttygttttatttygttttygygggggyggygttttttttttttygyggttttygtttttttttttygttttttyggtygygttggggatttttagtygtygttygygattttttatygygaygttyggaggyggyggggtttttttgttygggyggygggtaygggggattattttttayggtgttatygtatttatttygygtttttttttygttttttggagtttatygggattaggtggyggygggtgtttttttgggggtgygyggttatgtaattggtggatttttttaaatygttttggaggggggagygyggygttgggggygggagagygtttttggttgtgagttgtttttgtygtttygtttygygtttttttgtygtttygtttygggtttttygygttttttttttyggttyggtygagygygttgtttygaygtygttatttagagtygggtygygtygggygtygagatgaaggtgttgggatatyggttggagttgtttataggtatygttygtttgtttygtagtyggtygttatttttygagttggagyggatttygggygyggyggtyggggattggggyggttygggtttgagtaggaaggggtgyggattttaattaagttttagttttgtgttatttgtttgtgtgyggagtttagtttygggagaggatttgaggttgtggygagtttttggygttggygttygggttgygggagtatyg

SEQ ID NO: 6308 - DNA, 512 bp, synthetic construct
  misc_feature 1..512: note = Description of Artificial Sequence: Synthetic polynucleotide
  source 1..512: mol_type = other DNA
tyggtttaagttagygtatttygtygattttttgtttagtttaaatttygaggttgggtaaggtattggatttayggttggatygattyggggtagtttttgggtgaatagtagygtgttygtyggtagagaatygagattagygagtygattatgyggttgtatagattttaygygyggtygagygyggtggtttgtgggtttttgttgttttttttttagggttattatgaggttttygyggaggggtgatagggatygggtttagatttgttaaatgttgyggaggtagaatttgatagtgygggagggtaggygtttgggaggtaggagttggtggagatgatagygtggaattygtgagttttaygtaaygtttttttgtygtttagggtgggtttttagaagtatagaaatggtygggttgygggatattatagygaggaattagyggagtataggggttttaggagygtygggatatgttaggtygggtagatagtttygggtyg

SEQ ID NO: 6309 - DNA, 1070 bp, synthetic construct
  misc_feature 1..1070: note = Description of Artificial Sequence: Synthetic polynucleotide
  source 1..1070: mol_type = other DNA
tygygagaagtataaaaggggaggggygggtygtgtagttaagaggayggttaaayggggaggttttttttttgttttygtagatgttggagtagygattggttygggagattygtgttttggagagaagtaaggagtagttgttttyggagagtgagtttttygygttaggtgggyggggggagggggatgtgttygggtttyggttttgtttttgaygttygtttatygatagggaggttggtgygygttaagttgygggaggtggagyggyggttgtattygtygtttgaggtygagggygttatggyggtgaatgaygggtgagaggggaagggaggagtgggygaggagggtaggggtagggyggaggggaattygtttaggtttttygtttygttttygattgtygttttttyggtttgtgtttttttyggygtygtygggttttygygtttyggtggtttttttttygttttttggattttygtttttttttttttgttttttyggtttttttttygtaggttgaaggyggagttggagatattyggggagtaggttyggagygttttygaggtyggggtyggygagggagaggtagggagttygaggaagggaggyggggygggtagggatygagttaggagagagygggygggggttttgggagyggttttygagagtggggtttgtggggagtagggyggtttyggggatagaggaagtygyggtggaggtttagggtagaygygggyggaygygaggagygtaggaatttggttygtagttttatttagttttyggtaggtyggatttgagttttttygygttygygaygaggaggatttygagtygtyggtggttgtttttgaygttttttaggttagtaggattygttygttttygattttttttygagattygttaagaaataaaggygatgattttygattatgttygygtttttygyggagtttgtgttatatygtggagyggggyggggygtgttgggatttygaggyggggtttttgtyggattttttttattagtygagtttygggygtyg

SEQ ID NO: 6310 - DNA, 766 bp, synthetic construct
  misc_feature 1..766: note = Description of Artificial Sequence: Synthetic polynucleotide
  source 1..766: mol_type = other DNA
aygaattattatttaattygttggygtygttgttgttgttattggttaaggtygyggygatygaygtatagtagaggtagtatagttggagygtttgtaagagaaaaggtgatatygygygtgaggggygyggyggggttggygtygggygttttttgttattygttttyggagtttygttyggyggtatttgttttggttaygygttttagtttygttaggtttttyggygggttygaattygtagtygggaaggtataygygagtaggagggygtattttatggttaggtgyggaygyggyggttgygggtggttagaygyggtaggyggagygtaygggyggygygtatttttttygyggtttyggagttyggygttttaggtgyggttttaggtgagagtygtygtygtttatatygtagygggggygygttgggattttttttttttyggtygtttgygygtttttttttttttyggygygggtttgtygagttgtagtttgyggtattttagagggtayggggggttttttgggtygggattggagygtaaayggttgggagattgtyggtgtttgttygttygtttgtgygtttgtttgtgtyggtgtgagygtttgaggygatggggaagatagygttagttggtttttttagygygtyggagtygagygttygtttttttatygygyggtgattggygattagyggttttygggttygttygagttttygggttggtgtaagggygtgggattttyg

SEQ ID NO: 6311 - DNA, 363 bp, synthetic construct; identical to SEQ ID NO: 6084
  misc_feature 1..363: note = Description of Artificial Sequence: Synthetic polynucleotide
  source 1..363: mol_type = other DNA

SEQ ID NO: 6312 - DNA, 2919 bp, synthetic construct
  misc_feature 1..2919: note = Description of Artificial Sequence: Synthetic polynucleotide
  source 1..2919: mol_type = other DNA
tygagtyggattttygyggagtatttattagggtggttagttggaatygygtgttagatttatatgaaaaattygggagaggaygggttgtygttgttygagtygttttttyggaagtygttgtttattaatttttygtatttttttttgtaygygtttttttygygtattagtttggagattttttgtttgaggtggtygatttgttgtagtagttggttttttttygattttaggaygtgtttttgttgtatttttttgaagyggtaggattgggtatagtygyggttttttagggttygttttttttgttttagtyggattattttttttttgttgatttygygtagttgtyggtttagttygygtatagatatggttattagttgttygtyggagaagyggtygtygaagtgtaggtygtyggyggygtggtgygggtgtagggygtttttygttttygtygygttttygtygttttygtygtygtygtygtygtygtygtttttagygttggtygggttatygtygttygygtttttagygttatyggtygaggyggtygygttgttygyggygtygggygygtyggtygtygggtggtggtggtggtyggyggygtggtggtggtggtggtggtagtgygggttygygtygttttgygyggyggtygyggygattayggyggatattayggyggyggyggggtttattttttygtygttgtygtttaaggaggygtyggtatyggtttyggtygtygyggttagttgttgygtttygygygygtagttatygaagtygttttggagttggtggttgttgttgatgagygtttygatygygttttyggggttgaagtttagygtttyggggtttagttgttgygggtagtyggttatttagtagtagttttttaggtgygttttttgttygttgttygagttygggttgggygtygagaagttgggggaagggggtatygagttgtayggygtgtttatgggggtggaggatagygagttttyggygatgagayggtygtattggttgatgatgyggtyggtttttatyggttttttttttattttaaattttattagatygaagttattaatatattttatggttaggggattggtgggtaggtyggagttgtttattgttagttttgatgttatttttttgtygtygtygtygtygtygtygtygtttygttagatgggttgtaggagaggggttagygggttgtgttgggtggttagygggtgagttagtttgtygggttggggygtttttagtttgygyggyggtggttggttygaaattttygagygygtttatatatatattttttygttttgttygygtttttygygttygtttttttttttttttgtttaygttaatgtgttttttygttygtttyggtttttttttgttygttygtttttttgygygttgagtyggyggttttaggttygggaagatttttygygagttgyggtggyggyggtggtggttgyggyggygaagttggaggagttyggttyggtgygyggygtttttygttygtygtttygttgygygttttgtataaggaagggttygtttygtyggttygggttgtaggtagggygygygyggygttygttyggggttggaggygyggygggygtttgttygggyggygygggttttggtaygggggagttaatattttatgtttttygtttttttttttgtttggttttttttattatttttttttttttttttttttttttygygygttttttatttttgtgtaaagtgtaaggtagaggtgtagttygattggaggagagggaggggggagtttagtttttttttgtttttttttaaaaaagtaaaatagygaagttttggggaaagaygaggtagagagtaaaggggggagggggaggttaagtygataagtagttygagttatagttagaagatgaaaaaagattttaaagtttttgatttagtaagaagagtttaaagtaattgttgagttttatagtattygtgaygttaggtttaaatgagaaattgattggtatttygggttaatgggaggyggygagagyggtygygattagtataatagtatagaaataaggaaatttttyggagttgttaattagggtttaattagttgattgttagttgggaygggttggtttaattttttttgygtygttgtttattygggagggaaygaggttyggygtaaagtttggtgtaagaggggaaggagtttttttagaggggtttyggtaattygggyggatttgggagggyggtttgtttttttttggagygygagataggttttttattyggagttttagttygttgggggtttattyggttgggattggtttgattttttttttttgtttgttttttatttttaggattgtgaattygttttttagtttttttttttygtattaattttggtatttaggtgtttgtyggggattttttttttttgagtttggtygtgttyggygtttaaatttggttttaattttttgttygtttttygggygttygtgyggggaagggatygggaagggagggatgtagtggggtgttyggatyggggttgygggttgggygtygttyggttatgygtttgtttagaaggttgggtattygtggagagggaaagtttattttatttttttttttataaygaggtaaaataagttgtttagaggttattttttayggagatyggttgttygttggygtygygtgtttttggatagagygagygtttatgygagataatttyggggaagtttaaagttaggttagtygggtttagtttttyggtttttgattggtyggagtttggtttttgagatttatattgygygttyg

SEQ ID NO: 6313 - DNA, 2267 bp, synthetic construct
  misc_feature 1..2267: note = Description of Artificial Sequence: Synthetic polynucleotide
  source 1..2267: mol_type = other DNA
tygaaaaatyggttttygttttttattttyggtygattygttygtygaggtggttgttttgggaattttttgtttttygtttaggagaggaaaygtatattygggtyggaygtatagaagtygtattttggttggggttataagtttgatagttatygataagtttttatttataggagtaygygaygtgttttttttttaagggaaaggtttttttttttgggttttggaatgggtttgaagttagtyggttttagtttatagggtgaatgaggggtgggtatagttyggtygyggttttagtatataygggyggaygtaggggygggggagygttagtttygtagtgtgttyggagtttagyggttttgagtygtygttattagtttggtygttttttgttttaygtaagtgaagttagtygtttagggttgygtttttagttatttgtttttttatagaggtttatattttttttttygttgtttttatagtttggttyggggtttgtttaatatagatggaygttttttaaaggttgtgygygttatygttgttattyggttgtgtygaggttygyggtygttaggattttagggatygtatgttaggtagggtttaggatttttagygyggattatttttagtttgyggggtagygtyggggattygggtaggagggagaggagtaggagggagttttggatttttttttttagatyggtygtygttatttttgttttttttagggtygttttyggtttttttattttygggttttygttaygygggtygyggggtttttgttaggaaaatygggyggttttaggggagttygygagatttttagygttygggygygtygtttttttygaagtttygtygtagttttygtaggttaggttttgtttayggggggttgygtttagttyggatgggtgggygttgggygggttggttttattttgtygtgggtattaattttgaaaayggttygtgygttyggygyggttgyggygtagattygggaayggtagtygygggyggagtyggggtagagyggyggyggygygyggggyggatayggtatttayggtyggggggttygggggattyggygggyggyggayggygtatattygygattyggttygggagtygttgttttttttagtttggttttygtttttaygatttaggggyggttgygygttgttttttggygtygtatygggtttaggygygyggyggggttggggygygyggggyggtygtttgggttatgtyggggattyggtttyggttatttygygygggaataaagygygtatttygttyggggyggttttyggttttygyggttygygtygggtttagtygtygygtttgtggttttaaygtygygygttygttygagagttttayggggtttygyggttttygtttygygygtttygttttygttttttgtttttygtygtygtygttgygttatttgtttttygttyggygtttatggygtttagtttygtttyggggygtyggtttggagaggggtttttygtygtygagagtygtttttaaygttttygttatyggggyggygttttaagaattggttgtgggggtyggggttgtgyggagygtygggagtagggagaggggagaggggygyggggagggggygaygggygygtygttttttgyggggggyggygyggggaggygtaggygggggygagygaagaggttgaggggtgygggygtygtggagggggygyggttttggggggyggttttygtttgygtttatttttttttttttygtaggtygygtatatttatttygtagtagtyggyggtygygggtttygtagttttagaatygyggtttttggyggtygygygggaggttgaaygggagttggggggtgtggggggggtggggaggtggggagttgggggggaggtygttttttyggtygtygttttygttttttgtttygygttygtttttagygyggygtttggttyggtttggggttattttygtgygtggtyggtaggggtygygtttttttygtttagtttttygggygggttygatgygaagttttygtttttygygggtttyggggttaggttatttgtatatattttgtatttatttgtatatygtgygttttatgtttatttgtagaaaygtttygagtygttgttttgtttttttygtattttttttgtyggtaggttttttttttygttyg

SEQ ID NO: 6314 - DNA, 265 bp, synthetic construct
  misc_feature 1..265: note = Description of Artificial Sequence: Synthetic polynucleotide
  source 1..265: mol_type = other DNA
tygyggttygygtgggttttaggygygggatggyggygtttagtagygygggttygygtagggygygtagygttgggggtaatagygtggggttyggtyggtagtggggygygggttgygyggtaagtagtttttyggagtttagtattagttttagtattatgtagggtatttaygaggyggaggttagtaggygtygggttyggttaaagtygttygtagtttttagtattygygttttttgttttatyggtygtaggttgyg

SEQ ID NO: 6315 - DNA, 374 bp, synthetic construct
  misc_feature 1..374: note = Description of Artificial Sequence: Synthetic polynucleotide
  source 1..374: mol_type = other DNA
tyggggagggtagtygttygtttttttyggygttgggagttttyggttggtattgygggaggagttttygggtgattygygggttttgaaatygtygttygggagttyggggtttgygttgygtttayggggygagygagggagaattgaygtttttygttyggattttttttttttttygagaattaggtaggtygygtttatttttaagttygattgttttygyggtaatatttgtgggaaatattayggtggattttgtgggtygttgagttttttgattttyggtttgttttattttgttttgttagtgggttttgygttygygttaataattygaatgggtaygtttttgygttttagaaygttgttyg

SEQ ID NO: 6316 - DNA, 1133 bp, synthetic construct
  misc_feature 1..1133: note = Description of Artificial Sequence: Synthetic polynucleotide
  source 1..1133: mol_type = other DNA
tyggygygggtygttttygtttttagttttaatgttgttgygttttaggtygtttygtttttggtaggttttagtttttgatttagtttttygtttagtttttgagagtagttttttygygggattggtttgtgygygygygtttgyggtatygtyggattaggggtygttttygagyggggagtttaggaggayggttaggtggtttgaggtagaggygttagggaggatggagaagggatatttagggtttaggyggggtgggggtagggagggyggygggatagtaaggaagtgggtgtatttgggtgatttagttgygtatgagygggtaggggttyggggygygyggattttaggygttggattgyggygtggagtagygttggggaaatygygtygggtttagygaggattgttgggyggggygygygaggagygaagttggtygggggyggggtttgagtygtgtyggggyggggtttagattygggttggtygtggtgggyggggtttgagtygtgaaggggygggttttgtaggggyggggtttygaggggyggagtttgyggtgattagygagggggyggggtttagagttattaagaagygggatttagtgagggttaaaygtggggygtygggggygtggygyggggygtaggtgtaygtaggttggtygygggygygyggggttyggygggagtttyggggtggttttygygtggggtygggggygttygygygggyggggygaggtyggggagggtagttgttygtttttttyggtattgggagttttyggttggtattgygggaggagttttygggtgattygygggttttgaaatygtygttygggagttyggggtttgygyggygtttayggggygagygagggagaattgaygtttttygttyggattttttttttttttygagaattaggtaggtygygtttatttttaagttygattgttttygyggtaatatttgtgagaaatattayggtggattttgtgggtygttgagttttttgattttyggtttgttttattttgttttgttagtgggttttgygttygygttaataattygaatgggtaygtttttgagtttaagaaygttgttyg

SEQ ID NO: 6317 - DNA, 2358 bp, synthetic construct
  misc_feature 1..2358: note = Description of Artificial Sequence: Synthetic polynucleotide
  source 1..2358: mol_type = other DNA
aygatatttyggtttgttgttatggaaataggggyggattaaggttggagygtggagygtagggattaggtttttyggttatttgagttttygttttagtygttttygtagggtyggggtagttagtygtaggygtygyggttttttagttttttggtygggttaggygygggggggatttyggyggggygttatagtttgttygggtttgggaggggagaggtagaygtagaggttggaatagttggtggyggggttygtgggttttyggygtgattatttgtttttttagggttygggggayggygtttygygtggtaattaygtgggggygyggygggattttttyggtgttygtattaattttgtygygtttygtatygggtygggttgttggggygtttagttayggtggtygygaagttagttgtttttaagttgagttgtgtatyggtygygtatattggyggtayggttttygygttttttygtttttagtataatgaaagtttgaggaattggatattaggygttggtygttttttatttttagtygttgggtgtttagagtttatttttagygattagagtagaattgtagagaagaygttygygttygggtttygtttggggagttagggygygyggggagygttygggtygygyggttattgatygttggttgtaygggggygtygtgyggattyggtttttataaagyggtagaagtaagggygtgtgttygygtagggaatggaggttgtaagtgtaaaattttattttagtaaagtaaaggttttaggaggtyggttttttttttattatyggtygtttattttggttttygattgattttttygggtyggatttttaggtttggttattygatttatggagaaaatttygtgttttataattggtygttgaygggagttgagttttagtagtagtttttyggygggtgygttyggtaaaatttattagttygtygggggttattttttagatygggagtttyggygtygggyggygttygggttygyggtttttttyggagygtatttaattttaatttgtttttgyggttttaatttatttttgygaagtatgttggttayggggtygtygtttygaggtyggtttaggygtattttttttyggggtttagatttaaatttttgggygttagttgtagttaattygagygygtygaggygggggtaagtyggggattygttygtgttyggtggttyggtttygtaggggtatggtgagttttagtttygygtygagggtatyggygttygtaagtaatygtggtgttgttyggtagtttygygygtttgtttagtttyggggygagyggtttgtttygyggagtyggyggtttgtttttgttattyggagtatttygtaggyggttttgaggggggaygtygttttttggtyggtyggtygtagttttttttttttygttttttyggattatygtygtygyggttgtagtaaaagggygttygtaygtatygtygagtttyggggaaagygttyggygygygtttgtaggatygagygatyggyggagyggggygttttttttttttttttyggtttttttttttttttttttttttttttttttttgttttttagttttttttttttygtttygtttttygttttygtttayggagygttttttatataaaatttatgaaagtgtttttagttygtagtgtygagygtygttttatttttaaggtagtagygtttagtygygyggygtygttttttaaggtgtttttattgygttygttttyggggaagatgttyggttygygttygtttaggtatttgtttttagtttttaagtyggttttyggattattttaygttttttttyggtttygtaggttttttggagttygaattygtagtttagttttygttygttygtttttygyggttggaggttatygggagaygyggttgggaygygaggatygtygtttagagtayggatygygagttygttttttgtttygttttttttttggttagygtttttttttttagtttygayggttttttttygtattgaatagttttagygaattyggttgtttygtatttygagttttaggatattgttttttygtggggagaggaggggagtaagtattyggaaagggttagttgtaaattttagggagaaggaaggattygtgygggttygggtgggtygttttygtttgggtggggtggyggyggggggtttttgattttttttggtttatatagatttygtyggggggttygyggaaaatggaggaggygtygtttggaaagygggtttyg

SEQ ID NO: 6318 - DNA, 1050 bp, synthetic construct
  misc_feature 1..1050: note = Description of Artificial Sequence: Synthetic polynucleotide
  source 1..1050: mol_type = other DNA
gygygygtttygggagagttgtgtttttygygaaattygtgygttttagtttagggttttygggatyggtgttygttagtgggtataggaygtygggtgttygaagggttgtttggagatgtaattgattttggygggtattagaatgaygagtggtagtagtaggagyggggtgaygaataagattaygaaggatttgaatttggagatatagtttagygtygaggttatygygygggagggagattggygggygagaygagtgaggggtagttagaggygtygygggtttaagaaggggttatagttttyggggattggggagggggyggtgataatttygtttygtaygggggygttttttygyggttttggggyggggttatttttyggggtttgtgggaygygtttgtttttaattttgttattyggyggyggtgggaggygtttttggattttaaygtttygggttagttttttaggggtagtttgggttttagtatttygygttgtttaagttttttttgygttgtygaggtagaggtgygtttyggggttgttaagyggggygtgttttggttattggtgttgttygttttggygtaaggygttttttygygttygtatttgtttttttttgggttttgaagggtttyggatgaaattttttgtaggtttttgggttttttaggtttattttttygattttttttttttttttatttttttattttygttttttyggtgttttttygagaggtgtttttttaygtttygygtttttygtatygygggtttygtttttyggttttttttggttttttygttaygttygttttattttaggtgtaggatttttttttttygttygtatttttyggttyggagtttttgggygatygtatagggaagygaggttattgtttttttttgttttaggggttgtygygttttagtggaygttgtatttygtagaygttyggygggtagatgyggataygygttttggaggggttttatygagttttagtagtygtagttgttygttyg

SEQ ID NO: 6319 - DNA, 1731 bp, synthetic construct
  misc_feature 1..1731: note = Description of Artificial Sequence: Synthetic polynucleotide
  source 1..1731: mol_type = other DNA
tygggttygtttygtttatyggtattaggygaggtttttgtygtagttgyggtygaagaagtggggttyggygtttayggygygtaygtyggggtgtaygygtaggaattttagtagygttygygtgtygtttttttttatttygatgatgatggtttgyggtagttgtttgttgttttygtttaggagtagygttagggttttyggyggggtttyggttayggtgttttyggtttyggagtygttyggattttttgataggttaggggatttttttttttaggtygttttttygtygtygtygyggggygygggyggtyggygttttygttattgyggtagttgtaggaggygttttttttgtgtygtygtyggttatatygttagttttttygggttttyggttaggaygtygttattaggggttttygttttttygtygtygtyggatagttttaygayggggtyggatagggtttggtagygttyggttaggtagtagaagaygtaaagggaygtgagtagggagtagagtattagtaagaattttyggaagatgttgygggatagyggttyggtygaggtggagagggtattggtygggttyggaggggttattttagtyggaggygaygtygggtaaygygtyggttatgttaggtttggatttygataggtgttagagtattttttyggygggttagygygttggayggaggttatatygtygtgygtttttgtggtygtgygaattgtttygggaggtagyggtyggggtttygyggggaaayggaatttygggggtttygygtaggatttttgtttttagtygagggagygggaaggggaaygygggttygtgtttaagaaattatygttttagattygtttaagttttgagtttggggtagttttggtttttyggtttttygtaagagtygtyggaatyggggttttggtagyggtgtygaaggygtgygttttagtttyggtttygagagatttttyggygyggattttygtttagygattttgtattattggttyggttttygtgagggtaygygyggttgtygggtttttgygtttygtgygttttagatagtggygagygatagtgatttttagtttyggttttttttggtttttttgttygtttgggygygtttttttygttygagtttaggtttttttagttaaggagygaggttttttygagtttttttgttygagygggagataggaggttygtgtagagtygtttattttttttygtagygtygggttgttttaaattgtttttggattttatttgtgagtygygtggttgggttgggttgggttgygygggatttgttagyggttttygttattttgttygtaggygtttatyggttgttttttgggtygtygttggtygtygttataygtgggaygtygagggtagtaaatttgttggtgaygttaaaggttygggtyggattagttttyggaygagygtagyggggygyggattagyggttaggyggggttagaygggyggggtgggatggagaaaaggtggygygggtttygtagtagtygtttaatggtattggagagggygggggyggtaggggygaygttttttttttagtgttttttattttttttygyggtttygtttttttttagtggattyggtgtttgyggyggtttyggggttgtttgagtgatagttaaggtyggtyg

SEQ ID NO: 6320 - DNA, 3535 bp, synthetic construct
  misc_feature 1..3535: note = Description of Artificial Sequence: Synthetic polynucleotide
  source 1..3535: mol_type = other DNA
tygtttttttgggttygttttttgtttygaagttaatagtaatttttgatygttttatatygtttagaagtttttttatattttttygttttgggagygggttggttgttgagttttyggagaagygtttgtatttgtatggygttyggggtttttggtaggtagagtagttygttattttggaaggtygggatygtttattttatttyggtttatagttttttttttgygtagttygtttttgtagtttttgyggggaagtgtyggggttgttygaggtttagtttttaggattgtaaggaggtagtttyggygtgyggyggtgygtatagtttagagtggttagggygygagagtgtaaygtttttttggtttygagygygtygtygygtttygggagtagattttygtttagtagttatygtygtttygatttttygttttagttgtagtttttgtygggtaatatgttaagagtygtygtygttatagttgtygtygttatttggggaagagtagtagtagtagyggyggtygygggtataygggggtaataaatygagttattygggygtttagygtgtyggggaattttttttgygtttattgttyggygggatttaygttatgtgttgagttatgtttttggtygygttygygggtagygtatggggtagygtttgagtggyggtagattttgtttygatgttttyggtyggtttttatygtagtygtygtygttttygtygtyggtgaggaggaagttygygttgtttttygttatgttttgygtttggttttatatgtttttgtattygtgygtyggtttttgygtygtygygtyggggttgttgtttttgggttttgggtttygygtygtataygattygttagttttggttatagtttyggaygggaygttttttaggttgtygtttygggygtygttagttattttattggttttaggtaaggagatggtygagggygttgygagttyggaggagtagagtttygaggtgtyggattttttaagttttatttttagtttttttagtgggtttgggagtaagtagttgtygtaggttattattatyggygtgaagaagggyggtaygygggygttgttggagtttttgygygtgtatttygaygtgygygtygtgggygtygagttttattttttygatygtagttaygataagggtttygtttggtatyggtgagtttttttgttaggggtagggtttttatygtygatttagattttgagttaagggagatatggygtatgatagggaattggtagggttatagtttyggattattyggggtagggtagggaaattayggtagattgygtagygtattttgttygggtgyggtgagggttgygtttygtttggttttygttataatttatagaaagttttygyggagtattggtgtttttgaatttattaggygatttygtygtaaagaagaagggtagygattgagatygtttttagtaaagygagttattttttaattatgggggtattygattygaatygtattttatgattygttttaaatttttttttttyggagttygagaygttgggaatgttttgagtttttttggtyggttttygtttttaaggaatttttagagtagtttttgttttttagatggggagagggggtgggggtygyggygtttyggygaggtygtagagtttgttaattttttgttatagttygtttggttatyggaattttaagggtgttagattygtttygttygygagtygtttgggttygggagggtgagtygggygggtggttyggygttttygtttggygggygggyggygygyggagygtggagttgtgttggtttttgtygggtaaaggygygtattgtaatyggttggagyggygygaggttttgaaggygttygggttttygggtatygtygttygttttygtttttttgttttyggtgttgggatagggaaagtaaggaygygtgttttygyggggtttttataygttyggagtaaagaatattyggggtttattgattgagaaatgagggttgtttygaggtygyggttttyggaaattttgttttygagtygggttgygggttaggttttaaagggatagtggtttyggggttataattattatttttgtttattgtttttygtagttgttggtttttggggtgagttgttgggttgttygagtttygggtaaggygygagtgggtaggaggtttagatttyggttttygataattgttttygattaggggtttaggtaaygatttttatattttygttggggtttttattygtaattttagttagtaygatatttagatatttttttaggtttaattagttttatagaygtttaagatttgggaaaataaaagaggagaagataattgaatttttttttttgtgtttattttattgtygggatttgggtgggttggagaataaaagagggttgatttygyggattaaaayggttttttttttagtttygttttatttttttttttttgtttttaatggttttttattattgttaggagttgtttaagtttygaggtttagttaatygtgatagttattttttttatygttttygggttgtgatttattttygggatattggtggataagaatggggtttttggagttygaygtttggatttaygttttggttagtygygtgaattttggtgtttttatttgtgtagtgggaataatgtaggttttgggtagggatgggaagagtgaatgygttggtayggtaaggtgtttygtaggtaygtgagggtttttttaatygttagttattgttatygattgtattgttatgatttttattattattattttttttttttttgggatggtgattttagggttaggyggtaggttataattagygtttttttaggtggaattygttagagtttygaggtagtttaggattttttgagattagatatatttgggtygggttgggaggaattggtaggaaaaggattgaatttttaatgttaggyggttttgaagtatttggggtaagttatggaaatttttataggaaggtttaygtagttttttaggyggttgttttttatttgttaygttttttttgattgattaaaaaaygttgaatgaagaaygaagtygygtggaaattttygtygygygtttgtagyggatagygtagttygggaggttyggttgtygatttgygttygggggttgygttgygagyggttaygtatggyggttggattygggyggtygtaagggtttggttgggtygygggaggygggaggtttttygttttttygagttatttttttgaattgataagtaggattttygggtttagggggtatagggttyggggyggtgattyggyggatygggttgtyggaggagtttattgtaaatgtygtaattggttttaaatattgygtttttggattgtattagtagtttttggygyggtyg

SEQ ID NO: 6321 - DNA, 2896 bp, synthetic construct
  misc_feature 1..2896: note = Description of Artificial Sequence: Synthetic polynucleotide
  source 1..2896: mol_type = other DNA
gygtgggyggtgagyggtygggagaggggygggttagttgagygtttaattatagtttyggggttyggygttygttagttgtatttagaattttttttatygtggttttgttttgtggygtttaattaygtgtttttagggttttggagyggttgttgggattgtagygaagaggggttygygttattttygttaggttttaygygtyggttttgagtgygtttttttyggtygtygggaaatttagaggygyggtttggttttaaggttttyggtttygtttttttttgtttyggtttagttttyggttgttttygggtygygatttattttttttggyggtttttgtygtatgtttttgtgttgygttagaattatygagttttagttttygttgttttttyggttagtaggygttttttttagttggggagggttttttaaattttgtgtttttaggatygyggggtyggtaagyggtaggatttttaagttgygtttttgatgyggttaggggaggygygygatgaaggtttttttttttttygttttttttttaygttttatygttattataygtygygttgygtygygatttyggygttgtttgttggygttttaagyggtttttttgtygyggtgygattttygaygttaggaggattaatttttattygttaggttttagattttaygtagatttagttatataygtaatygtttgtagatatttattatagttttttaagttaatttaaagtttygtataggygtattgtttttatatgygtagttttayggttttatatatttattagtttattygtaaataggtttatatggttatataattgttttttggatatttagttttaygtaggtataattttatatatatataatygtatataggygtaattttatttaygtagtattttayggagttatataatttttttataaataatygtatagatatagttttaygtagygttatattatttagttaaattgagatttagaaatatatttattagtttgtatttagatttttttttttaagtttygtgatatttattygtaggatagattagaaatatatagttatattgatatatatayggatttaaaygtatagttaagattttattygtaggttygtaagttattggaaaaatattaaagygttttttttttttttttttttatttttgatatatataygtttgygygygygygtatttttatatttatatttttygtttttaagygygtyggagtttygtagygggtgatttygaggtttygyggtgagagttaagggagygttttttyggygtttttttttttygtttttttttygagtttatttttygttttttygttygttttttttttttttgtttttttttttttttttttttttttgagtttggggygygggttgygygtagttaagtttttttatygygygttttttttygygygygtttygygttagtatygygtttatygagtggatgyggttayggggtygtttttaattattttttgattttyggyggtttgtgaataatggttattgagggygttygtaggggttgttaagaaggaaaygyggggygygagaggygyggygygygygggagygygagggaaaggagygagtttggggtygttgtaagyggttggygagagaaaggattygtgygagygtttatatttgttttttttaaggattttatttggttatygygttttggaagaggygagagggagagygtgygygagaggagagagayggygggggaaagggagayggygagaygygtagygtyggygttygggagatttaggaggagttygtaggtattgttggyggyggagttttgtgttttyggygggttgttgtgggygttagggtttttygagttttyggttygtygtygygygtagatttgttyggagttyggggttgtaggttggggtygtygttygtygyggatatttttttygyggygttaggattttggttggagttgyggatttgtatgtttgggggttttttaygttggttgagggaatyggttttagaagaaggaattttttttttttttttttttttttttttttttggtygtttttggttatagtttggttgtgttggggatttttttttttttttttttttataaagtattggtgagyggttttgaygaatgtggtattggyggaaggtatggggttgagatggyggggttggtggttayggatggggaggygagagatgttagagaaggaaggagttttgtttaagttygtaatttgygtttygaagttggtyggatyggggagggygattygygygttygattttgtttygggtaatygatgggaaatttttygagagygyggtttttttggggattyggygtttttgaygtttttaggygttttttygggtygttgyggttttttttygtygttygttagygtttaaggtygygttttttttattttygtttttttttttttttyggyggttttyggatttggatagagttgtaggagtggttttaaatattttttttggagatttttttttatttttygtaygagagtttgtttagtggtttttttgttttgygttttagttttaygygyggtygagtggttaggttgataatgaaatttygtatttttgtyggggggagtggggtggggaggaggttttttttggggttgttgattttgggtttygggtagggggagggggtttttgggggaggggtttgttttggttagagaygtygatttgggatggygtyggggtagggagggggttggggggtgggygyggygaaggyggtaggtttgggttygyggtygggggtyg

SEQ ID NO: 6322 - DNA, 2567 bp, synthetic construct
  misc_feature 1..2567: note = Description of Artificial Sequence: Synthetic polynucleotide
  source 1..2567: mol_type = other DNA
gcgttgggcgatgagggatcgttgggtaattgggggtataggatcgggtttcgttgggttcggggtagaagcgtcgaagtttcgattcggaacgcggtgattttattaacgtagaagttcgcgtagtcgagtagaggagtttttcgtaggcgattttcggatagacgtttttgcgcggttcgcgtggtttagtttcgttttaggaaatttttcgcgtagttttcgttttatgcgtttttatttagttttttttcggggtcgttttttttttaaagtagtttttcgggtttattgggcgttttcgtaatcgggtcggaatttcgaacggtttcgcgtgttattcggttattttggtaatattattcggcggcgttcggcggtttaattttagtttgcggtttttttcgagtttttcgtaaggtggggatcgggacgcgatcggggatggggaagggggttgtaggaggtttcgtttgcgttgtcgtttttgttgggtatagcgttttttattattcgcggcgatttcggttttcgtaaggtggggcggcgagtaggagtcggggttaggttaggggttcgagttttcgttcgaggggcggggaaggcgggtgacgtgagtcgggtcgggcgggcggagttgggatcggtttcgggaggcgggggcgagcgcgcggagaggtagacgcgaggagggaggcggttgagtagcgcgggcggttttgcggcgggcgcggtgggcgcgggcggcggggtttcgggattttcgcgcgtttttttcgcgcggcgtcgtcgtcgcgcgtttttacgtttcgcgttttacggcgttttcgtttcgcgcgtttttcgtgttcgttttttgttagttttcgggtcgcggtcgtttgtagagcgagcgtttagacggagttttcgggtaatttgagtggcgtcgatcggcggcggagtttttggtagagtttttcgattcggtagcgcggaggggattcgcgttcgttcgcgtcgcgttattttaaattttaagtagcgtcgttttatcggcgcggagtttcggttggaggtaagagtcgcgcgtcgggagatacgtatcgtgagcggtagcgtcgtcggttttttttttcgtcgtttcggagggcgaagtcgcggttttttagttttttgttgcgtcgcgatagcgtcggaatacgtttcgtttcgttgtcgttttcgttgtgtcgtcggcggagggggtcgcgagtttcgcgtttcggtcggaggatgtgcgttttcgcgggtcgtttagtttgagttatgcgttttaacggcggcggcgcgtcggtcggtatggagtttcgcgcggtcgcgttttgattcgttgtgcgtttcgcggtcggcgggcggcgggaggcggcggatcgagagtcggagatcggcgtcgcgggacggaagcgagcgggcgcgggcgtcgcgtagatggtttgggcgagttaggtttgaggtttcgtttttcgaaacgtgattatgtggatttaatagtttttaggatttaggtgagcgattcggtcggcgtcgggtgcgtgtgggcgcgtgggtgttaggttgggcggaagcggcgtttttttttatgttgtaaattaagggattttttttcgtttttcgtaagcgggtaacggggtgtatcggtagtcggaaaggggcgttcgttcggagtttggagtagtatcgcggttttggcggggagcggtcgggtttttagggtttcgcgcgttcggggtcggggtagcggcgttcgttttagtaattcgggaagtggggtcggttaggcgcgttcgtagttttaggagttagtagcgtagtgttttggtcggttgtttcggcgcgtttttttttcggggttcggggcgaggcgtcggtcgttgggcgcggcgggcgcgggggtcggggttgtcggggaaagttaaagtttcgggtttttagcgagagtttcgtaggcggagttggaggaaattatagttaaatagttatttcgttttttttttttttttttcggggtttcggggttgagtaggggttttttaggtttttagttgtcgatttagttgtttgcgggtgattttcgggttcgacgggcgtttatagttggcgggtagttggggcgggagagttggggtttttggggagtttcggcggttatttcgttgtaaatatatacgtatatacgttcgtcggcgcgttcggggtttgtttgtgtttgggattttagggttagatggaagagggggttcgagtttagagttcgtggtgggggtgtttagaaagatttttttcggtaaattttgttagttcgtcggggttttcgggtttttttggtttttgtttggggtggtttagggtttattagagtatagttgtcgtttttgttgggtaggttgtttttgagttttcgtttttttgtcggggtatttatcgagttcgtgtatttgggtttcgggttggaatcgcgagcggggaggatagaggtggaggcggagagtagcgtgcggttttcgagtttgtttattgggatgtattgcgttttcgcgttggggacg

SEQ ID NO: 6323 - DNA, 573 bp, synthetic construct
  misc_feature 1..573: note = Description of Artificial Sequence: Synthetic polynucleotide
  source 1..573: mol_type = other DNA
gcgtttaagaagtcggggttttttttggttacgcgttttcgggggcgttcgcgttttttaggttttggttgtttgggcgtcgattttcgggacgcgtcggtcgatagtaggggaggcggtagtagggatcgtagtagttttcgttttcgtacggttcgtcgggtcgcggtgagtaaggcgggtaggcgcggcgggaggcgttcgacgtttatttcgggtttggcgttttttttcggttattacgcggcgtcgtttttcgggattttttagttttcggagtttcgcgcgtttagagtcgttcggagcgcgggcggggttagtttgggtagtcgcgggtcgttgttgcgtcggaagttttcgtcgttagggagttttttgggcgttaggttttgggtttttgggcgaagtcgacgttagaatatgtttggtttcgtatttagtttatcgtatttttagcgcgcgtgggtggggggcgtcggttgaggtggggagggtatagtttagttttaggttatagtgtttcgggcggggtagcgcggtgcggggtgaacgttatcggttcggcggatagcg

SEQ ID NO: 6324 - DNA, 383 bp, synthetic construct
  misc_feature 1..383: note = Description of Artificial Sequence: Synthetic polynucleotide
  source 1..383: mol_type = other DNA
tcggtttttatagcggtttcgggttttcggatggcgtgacggtttgtggggtttgcggggtgcgttgttttcggatttgcggggggaggcggttgagttggcggcgttcgcgggtttagtggtgagtgcggcgtttttacgtttagttcgacgttttcggagcggtcgtcgcgtaggggtgggcgcgggtttttaggagggagggcggttgtgaacgcgttttgtttttcgcgttttcgtagttttttgcgtagttgatgatttttataattagtttcgttagttttattttttgtggatatttgggtaaggtcgagtcggacgttgttacgttcgtcgttacggtgggtgtttgatttcgtttttgtaggagtcgacgggcg

SEQ ID NO: 6325 - DNA, 853 bp, synthetic construct
  misc_feature 1..853: note = Description of Artificial Sequence: Synthetic polynucleotide
  source 1..853: mol_type = other DNA
tcgttttaggggtatttcgtaggcgagatttttgtagattttagttaggaaacgttagtgaacggtagcgtagggaacggggcggggtcgttggtttcgtttatcgtcgcggtgttgggggttgggggtggttttcgggattggtgtggagtttgggtttgatttattgatttggttgagtggggagattggagggtcgtattcggagttgggttcggggacgttcgttggtgggaagggtgtgcgcgcgtcggaggtcgcggttgattttgtttcggcgttgttaggtacggtattagttcggatagtattattttgtatcggtagagtatcggtacggtgtttatcgtggatttggtttcgcgttacgagtgtgtcgcggtggtgttgtattcgtcgtttatttcgggtatgcgcgtcgttttttttgatattaagacgatttattgtttcgacgttttttttaagtgagcggtttgggcggggacggaggcggggcggggacggaggcggggcggggttcgggtcgggcgttaagttttattcgttttacgtttttttcgtagtatcgagaaggtgttttagattacgtcgttcgtgtttattatttacggtacggaggacgaggtgatcgatttttcgtacgggttggcgttttacgagcgttgttttaaggcggtggagtcgttgtgggtggagggcgtcgggtataacgatatcgagttttatagttagtatttggagcgtttgcgtcgttttattttttaggagttgtttagttagcgcgtttagcggcggttttaatcggtcggattttagtaataaggcggttttcggattttatttcgcgtcg

SEQ ID NO: 6326 - DNA, 1062 bp, synthetic construct
  misc_feature 1..1062: note = Description of Artificial Sequence: Synthetic polynucleotide
  source 1..1062: mol_type = other DNA
tcgggatgaatgtagttacggaacgcgttaatgtaggaggtttttaggatattttgagcgttcgggagacgttaggcgcggtagcgggtacggatagcggaaaggggcgcgatttcgcggaatttttcggtagggtagggtttttgggtggtttcgggtgtttagaggaaggggtgggttcggggacgcggagggaaattggggacgcggagggaaattgaggtcgcggaggacgcggtcgttggtagttcgttgcgtttgtcggtttcgcgtgggtcgttttattcgggaggacgcgggttttttttgtttgtagcgttttcgtcgtcgtcgttttcgtcgttttttttttttttttttattttcgtcgcggttttcgtttttttttttttcgttttttattgtttttttttttttttttttttatttttttttttttttttttttttttttttttttttttggagcggttggggttgcggcgtcgttgttgatacggatcggtcgcggtcgttatcgggcggaggttgcgcggcgtagatttagacgggcggtttcggagggcgcgcggcgatggcggcggcgggtaggcggcgggcgcggcgggcgaggggttcgggttgagttgcgggtcggttcggatggcgggcggcgcgggttggtcgggcgttttcgcggttttgttgcgtttcgtgcgtcgtttgcgcgaggtgttcgaggtgtgcggtcgcgatttcgacggttttttgcgcgtggagcgcgtcgcggcgttcggattgcgtttcggttagggcgaggaggtaagttggttcgattttagtttcggttcggggattttagtttagtttcgtcgttttttttttagttttttcgtcgggttattcgcgtggttcgaggcggtggttttttttttaatttttttttttcgtcggagtttaggatttcggtttttttcgggtatttttggtttagtcgggttttcgtttttcgtttttcggcgttcgtgtttcgagcgttacgcgttacgtttagggtggtttttgcgtttatttttttttttcg

SEQ ID NO: 6327 - DNA, 918 bp, synthetic construct
  misc_feature 1..918: note = Description of Artificial Sequence: Synthetic polynucleotide
  source 1..918: mol_type = other DNA
tcgtcgtttttatagcgcgtttttaatatcgttgtttttgtttcgcgttttagagcgtttttagtttttttttttattttttttatgagtggagtcgggtttggggcgttttaggcggtgacgatttgtagaagtttttgagaatgtaagattttttggagttttcggttcgttagggtcgggtttagttaggacgtttcgtttagatttttttttagtttggggtgggtttaggttcgtttgtttttattgttttgtgttttaggagttttcgttcggagtttagattcggtgttcgaagatgagagtgtcgttttttttcgtcgggtgagaagttagtttacgtttcgtcggttaggtacggtgtttttcggggcgttttacgggaatttttgtgtttttatcggcgttttcggcggcggggtagttttggcgtttttttttcgtttttggtttaggttcggttcgcgggtgtagttttttttagggttttttttttttttcgggtcgcgcgttcgtttcgtatcgcggcggtttttcggtagtgtttgtttttattggacgtatagtgatcgtgacgggtacggggcgcgagtttttattattataatgggtgtgtatggcgcggggcggggggcgttgtcggtttcgagcgagggaggggagaggagggggtgcgttcgtgttttgttcgtttcgagttttcgagttcgcgttttattatcgtagcgagtcgtttttttgggtcgtttttttgttttttttttttattcgttttttttgtttcggttgttcggagatatgtttggtggcgatcggggatttagagttcggtagtcgtttttgtttttgtttttgcgatttttgttttttttttttgttttttcgcgtagcgtttttcgtcgcggaaatttcgcg

SEQ ID NO: 6328 - DNA, 865 bp, synthetic construct
  misc_feature 1..865: note = Description of Artificial Sequence: Synthetic polynucleotide
  source 1..865: mol_type = other DNA
acgtgcgcgttcgtcggagattagggatgaggttattaaatgattgtttcggttaatttttatttcgtttttattcgtatcgttttttttttaattgatttaattttttaattttagtttttcgtttttggtatcggtttttttttaagtttttagattttaattttggttttcgattcgtttcgttatagtttgggaagcgggagaagtagcgcgcgtttttttgcggatttttttttagggaagattgtggtgttagttgtttagggggattagggggttatcgggatttagcgtaatttttgtttcgttttttaattttcggaagcgttaatagtacggtttttacgtaatgtcgggtttttaagtatttttaattcgtatagttttcggggaggtcgcgtagatatcggggttttttatagtttattattttggtgtttgaagttattttggagtttttatcgtaggggcggggattagtgttaatgggtagcggggtttggtttttttaattagtattttagaaagagggtttaggggcgggggcgggtggatagggagggaacgggtttgggtgaaaggggtttgtggagtttaaatttagtgaatagggttttaagtgtcgtgttaggacgaaaagaaggcggaggttttgggataggagttggttcgggggtcgggggacgtttatttgcgtttcgggaagtttttagtttcgggcggttttagcgtagtcgggcgtttagcgtttattgtttgttaatcgttagttcggtttttaaagcggtaaggttttttcgcgagggggcggaggttcggaggagaggggaggtgaggagaacgcggaggtcggtataattcg

SEQ ID NO: 6329 - DNA, 408 bp, synthetic construct
  misc_feature 1..408: note = Description of Artificial Sequence: Synthetic polynucleotide
  source 1..408: mol_type = other DNA
gcgttcggttgttaggtaattcggttttcggttttttacggcggttttttcggtgtgttttattaagagcgatagggttggtgattcgaggggcgcgtgcgcggtcgttagtttgggatttgtacggatttttttttttttagtacgttcgttcgggggttttttttttgttacgtcgttggggttcgttcgttatttatagttttcgtagagtttttcgggtatatcgcggttggtcgttcggggttaaggatggggcgggagcgtttatttattttcgcgtcggtcggggtatttaagaggcgcgttcgtagttatacggcgtttcgtttttcgtttcgaaaaagtttttgtttttttggcgcggtgtggcgttttcgttagtttagtcggatttttttcgtttcg

SEQ ID NO: 6330 - DNA, 2245 bp, synthetic construct
  misc_feature 1..2245: note = Description of Artificial Sequence: Synthetic polynucleotide
  source 1..2245: mol_type = other DNA
acggtttcggggtttggcggggaggtttatcgttgtttagagggttcggtcggtcgggagggggcgttgtgttttttttacgttttgttcgcgggtttttagtagcgttcgtcgcgttgtaacgtaatgcgcgttcggtttttttttgggtagcgtttagtgttcgtttgttttgtagggtatcgtcgttttttttttattttggggtttttaggtttaaagggtttttagatttagttttttgtttgaattaaagtggttaggtatttagtttgtaagatgaataaatgaaggaaagaaggaacgaatgaataagggtttattttgtagagcgttcgcgttttagcgcgtattaggtatattagtgttaaaggtgttgggggtcgggtttagcgttcggcgcggttggaatgggggcggcgaggagttttttttagttagtcgtagggcgggaattgtttaaacgtaggtcgtagttttattgggtttcgcggcggtttcgtttagtagggatcgttttgttttttagtttttaatagtttcgtttttataaatttatttgagtattttggtttaagttattttagatttttgggattttttaggtttcgatttcggtcgggcgggaggttgattttttatcgcggttttttttttttattttcggttttttttcgggttgcggcggtcgttattgttgttagcgcgtttcgaggattgtcgtaaatttcgggcgtagggaaaggggattttggcggcgggatatagagagcgggtcgggggaaggggagggaacggaggaggcgaggaggagttgggagggagtcgaggggcgaggcgcggaggagggatcgaaggggagcggaggggagagggagggggaggaaggggaggggacgagttgggcgagggggcggggagtcgaggcgaggagcggcgcggatcgtgggggaggtggcgggggcgaggtcggtaagaggcggtcgcgggtcgggttgcgtcgggaaacggcggttagattttttcgggaaggggcgagcgagagtcgggtcgggtcgggtcgggtcgcggggtcgggaagcgtcgagtcgggtatttttttattaggtagcgatcgaggagttcggtcgtttatttcgtgtcgttcgagttcgtagtcgttcgtcggtttttttgggatgttcgtaggattcgggtatttaggacggtagtcgagcgagttcgaggatgggagggtattcgtagtttcgtttcgttaaggtaatagttcgtcggttatttttcgagcgttggcgttttcggtttttggcggacgcgggacggggttgggttgtgggtgtgatgggggcgggggcgttgggagagtcgtgtttaggtcggggaaggttgggtttcggggtagtttaattttttggatttttggagttagggttgggtaggtagggggagatttaggtgagaaaagaaatcgtggcgaagtcgtcgggatgttggcggaggagggggttcgtttattcgggtagtcggtttcgcgttaagaatcgttttaggttttcgggtagacgtttaggggaggggaggttttattttttacgttttttttgtagatttcggtttcgggattggagattttgaagcggggtttttatttcgttttagcgtttttaaatagtttttcgatttcgtacgttttcgttttagttttgggagcgcgttttgttttttttttttcgcggcgagttgcgagttcggagagatgaatgtcgttcgcgtttgcgagtttttgattaatatcgtagtttcgggggaggagacggtgtttttggcggtagtttttgtttttcgatcgcggttgggagcgcgacgttcgtttttcgagtttgggtattcgcgattttcgcgttgcgcggtcgattttgcgacgcggatcgggcgttggagtttaggaaagtagttagatcgtacgtttagcgtttgttcgttgaagttcgtgggcggtgggggcggttcgcgggttgtgtgagttagggaagggtcgggaggtcggtagttcggttcgtcgttcgtgttaggcgttatttgtagttttaagcgttttttagagcgttttggttttgtagggtataggcgcgttcgttgtagtcggtcggagaggcgggtgggtttttgcgttgttgtcgggatatttcgtttcgcgttagtttgggtatcgttttattcggggttcgggatttcgtagggttcg

SEQ ID NO: 6331 - DNA, 2972 bp, synthetic construct
  misc_feature 1..2972: note = Description of Artificial Sequence: Synthetic polynucleotide
  source 1..2972: mol_type = other DNA
gcgggtcgtagtcggagaggaataggaatcgtagtggggacgttttggttttcgggtttatagtattcgggacggacgcgtagtagcgcgggtcgggaattgggtattagggcgggatgggtgagaggttttaagggataaggtagggagaagcgtagcggggtgcggggaatcgtacgttttttttttgtttttgttttttatttcgaggcggtagggcgggcgggcgcggtttcgggggtgggcgggttgggcggggcggaggcggggtcgtagtattggttttatttagtttttttcgttcgtagttagagcgagtcgagtcgcggttagtttcggcgggtagggggggcgttggagcgtagcgtagcgtagttttattagttcgtaaagcggatcgagttggaagtcgagcgttgtcgcgggaggcgggcgatgggggtaggtgttatcggtcgcgttatggacgggtcgcgtttgttgttgttgttgtttttgggggtgagtgttagtcggagggggttcgttttttttttcgggattagaatttcgagaagagtcgggcgtcgttattaaggaaatagaatagagtattggggttttagatattgagggtgggtggtgggaaaggatttttgatgtcgggattacgaaggagggtttagggttttcggagcgtagaggcgattttttagggtggagatgagggtaagatcggagtacggatgtcggtttttaggtatcgtagggggcggtgggggagttgggaggggttttttaagagggggtatggggtttttcgatgtttaggtttttcggaagaggatattcgaatgtcgggatttcgaagggattttttttttagtatttcggtttttggagagtcgtgggatagaattaaggcgagagaaggagggggaattggacggggattagagatgagaggggcgagttgggttggggcggggagttcgggacgacgggatggaataatggaggaggtcggagggattggaggtagaggggattcggtaaggataatggggatcggttagataatgggggggaggggcgtcggagggagaggttggggagcgggagagaggttgagaagtgggttagggagggtagaagaggggcgacggcgagggcggtagagagatggaagtagaaggaaaggagatagagcggggcgcggattttgaagtggtcggggtttcgtttgttcgttgagggatagtgagacgagaagagagagtagaggtttggatatttttagcgtttgttttcgcgtttttgttcgcggttttttttagtttcggaattggggttgcggatttaaggttgggaggggagtgtttatttcgtcggggcgaattcgttttcggggtttttttacggtcggcgggttttttcgacgcgcgtgtttttacggtttgaagtagcgtagcggatcgcgagggacggagcgggtgtgtttttattcgggttggcggtggttacgtttcggggtgtagagcgtcggggcgtattaggcggggattttttttggtcgcgcgtagttttggttacgtaggcgggaggcggtaggtagggggcgttgcggggcgaggtaagtgtagttcgtcgttgtttgtttgcgagtttggggttgcgcgtcgttttttatttagttgcgcgattcgagcgtcgcgtttatcgcgtttcgtgggttttcgcgtttcgaagggtcgggattcggtttgagttttttttggttttcggtgtaagtcgttgggtatttaacgagacgggggcgttcggacgtttcggattttgtagcgcggtatttcgggttatcgattcggtaaaggtcggcgggtttttcgggtggttcgacgagattgttagatgtggtttgttttatggttatgaatcgaatgttttggaaggtttggtaacggaggaggcgtttttatttttttcgttagtattttttattagagtattgcgttttaaatttcggttttatagatacggagattgaggttttgagagtttaaacgatttggttaagattttatagtaagttgggttagagtcgtggttagatttttcgatttgatttttagttcggtatttttttatttttttagggggtagtcgttgttttagttcggggttacggttgcgttttttagtagggcggggggggttgatattgtttttagagttcgtcggcggtagagtttgcgggtgaggtgggtagagattttgttcgggtgcgggttttagttcgaaagtttagttttagttttttggagttgttaggatttgtggttgcgttcggggatttgggagcgatcgcgggtacgtttgttgattaacgtcgttggttagagacgttgtttagacgcgggtgggcgagcgtagattaggagagcggggaggagggatcggattttagaggggtaacgatttgggtttcgggtttgggtaagagcgagggttttcgcgcgaagatttaaggaaggaggggagttgggcgtggaggatttgggcgtttgggaaggtgtatttcgataggaatttgtcgtttgtagtttttgcggttttcgttttcgtttcggcgcgcggttgttcggtttgggatggttgtgcgcggttcgagtttttttttgggtcgcggtgagagagagagggttgaaattagagcgcgtttcggcgggtcggttggcgggtcgcgtcggtaatggaggtattttgttatttagacgtttgtaattagagtcgtcgggttggttaatgcgtttaatagggatggaacgagggtagtaaatgggcgtgcgtgagcggtcgggttgagttgggtggatggtggatggggaggtagtttcgcgggggacgggtttttatcgtattgttttagtttagtttggtttaagcgtttcgttttttttttgggggatcgcgtggggaggcgggaataatcg

SEQ ID NO: 6332 - DNA, 1026 bp, synthetic construct
  misc_feature 1..1026: note = Description of Artificial Sequence: Synthetic polynucleotide
  source 1..1026: mol_type = other DNA
gcgggcgagtggagtgttttttagatttcgcggattcgacgggagggattttgtaatgtttaattagaatcggttgttatggcgatagtttttaggtagcgtgggttgagtttttcgtaggaataaagggtgggtcgtcgttggattttgcgcgcgttcgttattaattttttttttagattcgagaggggcggcgcgtttcgttttcgggtcgcgtacgtcggtgttcggcggcgcgtacgtttgcgggagttttttttaggtaatttagtgttgatcgttcgtgtcggtgcggtcgttaatcgtttttgtcggagttttaggtttaaaagtagttttttattttttttgggttttttttaatttttttttcggtttgttttggggtatgagtagcgatggtcggttgtatttttgaggagaaaatttatcggcgttttttggagttatttttgggcgagtttcgcggatcgtgcggcggcggcgagtcggagtcggaattcgaattcgaattcgaattcgaattcgagttcgagttcgagttcgaatttgaattggtagaagttgaggcggtcgaggtttcggtagaggaattcggggaggaggcggttacggtagtcgcgatggaggagggggattaggagtaagattcggagttcgaggaggaggcggcggttgagggtgaggaggaggaggagggcgcggcgacggcggcggtagtttcggggtattcggtcgtgtcgtcgtcgtcgttttagttgtcgtttttgttttcgttttcgcgatcgttgttagagcgtattattcgcgaggaggtggagggcgaaagtttggatttgtgtttgtagtagttttataaatagttaagtagttgggtttggttggtggtgggttcgcggtttttatcgcgtcggtttcggacgcggttttttcggttttttaaattgtttttttttttgtttttttttttcgtattcgcgtttgtcgtcgttgaaagcgttttcgttgttcggattcgggcggtcg

SEQ ID NO: 6333 - DNA, 10207 bp, synthetic construct
  misc_feature 1..10207: note = Description of Artificial Sequence: Synthetic polynucleotide
  source 1..10207: mol_type = other DNA
gcggaggcggtatagttggagttcggattgtggtacgtcgttatcgtgttgtttcggggaatttcgattcgttttttgcgaaagcgttttcgaacgcgaatttagagtttgtgaacgcgtcggtaagttttttatttttttatcgtcgttcgtcgtaggtgggttcgttttaggggttttttttgcgttttatttcgttttttaagttatttagtcgatcgtttcgtttacgttttcgtgattttagatatttataattacgatttcgtttttatgtatatttaacgtacgacggtgtatagacgtgtatttgatttttgcggattaggtgttttaagcgtatagcggttattcgcggaatcgcggttcggggttagtgagtcgtttgtagtttttcgggttaggggattttttagaatttcgggaaagttattcgaagtttattcgggatgcggttttggttttcggtcgcgtgatttcgtttttaggtgtagaacgacgtttttttagggtttatagttgttaggttgggttttgttttcgtatttttcgggaagattagggacggggttatataggtcgtggttgcggagacgttttttcgggttatttcgcgattaggagggagtcgagtcgttcgtttttttcgcgtttttcgttttattttagttagttggttttattttgcgcgggataattgggacgggagggaggcgacgggagggcggcggttttagagagattgcgcgtttgttagcggtaatttgtttaagtggacgggacgggtcgggtcgttgcgggttggggttatcgaggtcgcggtttttattttaattagatttgggatcgcgggggagttcggttcggtcgttaaatcgggttggttggcgttagggtttcgggaggtgcggttcggcggggaagtcgtgatgggaagcgattttgtttagggagtgttttttattattatattttttacgtttaggtagtgatcgacggtttggcggtatttttatagcgggtttatagtacggggttatatacgttttttgagtttagtttgggtatattcgtttgttatcgagggtttaagttagtttgtagttcgcgtttcgttattcggacgtaagttcgtcgttcgttttgttacgcggtcgtatagttcgagttttttgttgtttattgttcgcggggttacgtaatttcggttttgtatatagaggaggaagcggcggggattttttgttatttggaggtttaattcggggaaggttttagtagtgttttttaattttgcgagaggtgacggggtcggaggacggaagggtagttacgttaggtttaggatcgcggttttattcggtttaggtcgttttcgttttcgttttattttattgttgcgggaagcgcggggcgtatagatcgcgcgttattagtttaagttcgttcgacgttttggtcggagatcgtttgcgagagggaggggcggtcgagcgcgcgtttttcgtttgtttgcgggatttggtcgatgcgaagtgataggggtcggagttttgttgtggagtttcggtcgtttggcgttagtcgttttcgttcgcgttttttttttttagtttcgggcggttcgcgaggcgtttttcggggttttttaaaggaatacgtatattcggttttcggggtttcgttaggggagggggtttttgggaagggggagggggtcggtttaggtgggggaggggtttagcggaggttttacggcgtcgttttagggttttttaggtttttttagcgttagttttcggtgagtttcgggtatttttagttggagagtttggttgggggtcgttatagattttttagagcggttgtagtaggattttagggtgatcgcgggatcgcggggcggggcgagtggtgggattttggttcggatagagtttcggaaagttagagggaaggtcggtgttattgtaggtggggtcgtcgtttttagatgtagtcgttgtattgtcgtcgttaggtttttcggttaaataatttaggtttgagtgttttaaattttttaggtttcggatttttggattagttatggatggattaatgaaatggattaatgtttaaaacgtatatatttagatgtatatatatttttataaggataaaagtatgtgtttatatatatatatatatatatatatatatatacgcgcgcgcgcgcgcgcgcgattttgcgaatgtatttacggatttttaggtcggtatttgggttttcggttaaggaaagttgttttggttattatttggttattttatcggttgcgtaaacgtgtttataacgggttttttttcgagaggttatatttcgtttaaggtggagttagtaggtatttgtttgtggaaaattgtagtggattttgtttcgtttgcgtagattgcgtagttcggagttaaagattcgttttggttagagaggaggtattaagagaggtgcgatttagttaagaacgaggtcgtggagaaaattttgtgggggcggcgtttatatatgcggtgatgaggagttgtgagggttttggggtcggtttcgaaaagtagggataacggtcgtagaggttatattgttttcgtcggtttcgaattcgtattgttaggagagattcggtttttaaacgttgtttttaacgtttaataacgaagtgttttgcgatcggtgtgcgtagtgggcgggcgtttgtatgggttaatgttggatgtacgcgtttattacgcggttgtacgggtgggaatgttattcgtggttagtgtatgttttgtttttttttttagaaaacgatttttaggaattagtttgagtgttcgcgttcgagttcgattggaagtaggtgcgtggtcgttttatttttttcgtgtatattttgagttatagttttcgttgcgtatagagggtattatacggggttcgatatatatatatatatatatatatatatatatatatatatatatattattattttatgggggggaaattgaggttgtcggaagatagaaaacgaagattgattatagaagagggggttttaattataggtgttcgtagatattttaatttttttacgcgttatttagtattttttaatttaggagacgtgcgttttcgagagatgagaagaaattaaaaaagtggttggtagggcgaagagaggaagtcggtatttcggaagaaggagattttcgttttcggtatcggatagggcgaaaattcgttgggtcgcgggtggagaattcggggttcgttcgcgcggtgtcgttttgtgtttagcgaaaggtgcgtttatttttttggtttcgaggattcgtttttttcggtcgttggaaagtttagggcggggttcgggtttgcggagaattttaggtttttttcgagtttttcggtgaaggcgggcgcgggtagggggttttcgcgtttttttagcgtaaggtcgcgtttcgttttcgttcgcgtcggttttagtagggttcggttatggttttatttattagttttcgttatttgggattcgttttcggatttcggtcgttcgagtttttcgattcgttcgtttatcggtttcgttttttagtgtttgttgttttttttcggggcgtagggatttttaggcggcgttacgattcggagttgggtcggaggttaggttggggttcgggttagagcggtcgggtttttgggcgcgggagaaggagggcgtttttttttcgttcggggtcgtgttaatgttttgtatttggggtcggcgtgcggttgcgggtttttttttaaggtttcgggattcgggtttttttcgttttaggttttttcggcgggttaggtcggtttttcgcgttttttagttcggcgtaggtagtcgtaggcgcgggcgggcggtgggggtcggggtaggaggaggggtttcggggttcggcggttcgttattggttaatattttattttgttgatatgtttttttattgttgaggttttcgatatttttttttaggttttttttttcggtcggagtttggtttgagttgttaaaatttcgttttcggagatttataattggtttaaaaagcgtaaaattagtaattaaggggggtttggttcgttagcgtaggggattcgagttgggtaggatatgtgagatagttatagttttttagagattacgataagatttaattagtcgcgcgtggttttcggcgtcggagcgggttagtttagttcggtttagttcggtttcgcgtagagttttcgtcgttttcgcgtatagagtcgggtgttttttgcggtgcgtcggacgggaagtttcgaggagtagttgttgcgttcgttattcgggtcgttcgtttatcgcgcgcgtcgtcgttcgggtcgggggttcgagtcgcgcgttttcggtttcggtttcggttttcgggcgtttgggtcggatgtttcgatgagagagtcggcgttggcggttagcgttatggtttattattcgttttacgcgttacggttcgtcgatttttttatgttcgtttttttggcggcggcgtagtttttttttttttcggtattcgcgttgtcgttcggcgcgttggttaagtcgttgttcgattcgggtttggcgggggcggcggtcgcggcggcggcggcggtagtagcggtcgaggcggggttgtacgtttcggtattgggttcgtattcgttcgtcgcgtatttgcgtttttttaagagtttggagttcgaggacgaggtggaggacgattttaaggtgacgttggaggttaaggagttgtgggattagttttataagttaggtacggagatggttattattaagttcgggaggtagggttgtcggtcggttggaaggcgcgcgggcgggcgggcgggttggggtacgggattgtacggattagagtagagttggggattttcggttttcggttttcggttttaggttttggttttgacgttacgtttcgtttttacggataattaagttgatttttttcgtttggtatcggagcgatttttttttaaaataaaaacgttaaaatttttcgaatgaaataaaacgaaaatatattgttaaagaatagttttaatcgttttgagttttagcgtagaggaggtttcgcggtttggttttggcggtttttttcgtttcgcgttttcgtttttttgcgttcgggttcgttttcgagttcgggggaaatttagttttttttagattttgtttcgatttcgaagtttttagtgggatttgggtttagttaattttacgttggttgttcggtttttggtagcgagtttcgggttagtcgagtttttcgttttatcgggttgggagttttttttttatcgcgggtattcgagttttggacgtattcgtcgttttaggttttaaagtttgaagaaagttatagtttcggtttttttatttttcgatttagttatcgagaatttaggtttcgggtttatttttttttttcgaattgtacggttaggatgttttattaggttttgtagtttagtttttaatataaatattttttagatttatttttgggagttttcgttttaagtgggtattttttttgaacgaatttcggggagattaaggagaagcgagaatatttttagagggtttagattttttttttgggtattagtttttattttagattagggagaaagagggtttttagatttgagtataaggtttaaaggaggttgtttaggagagggtttgataggtagaaatgggattttttgggagtaataattataggtggggtcgttcgggtagtgatgagagggtagagtagtcgattataggggaaatagttaggcggtagcggtgtgcgtaacgaggagggataaataaaggaggagtggggttttggaatttagaatagtcggttttaatgggattttttttttttttttttttttaggcggatgttttttttttttaaggtgcgagttagcggtttggataagaaggttaagtatattttgttgatggatattgtagtcgttgacgattgtcgttataagttttataattcgcgttggatggtggcgggtaaggtcgattttgagatgtttaaacgtatgtatatttatttagatagtttagttacgggggagtagtggatggttaagtttgtggttttttataagttgaagttgattaataatatttttgataagtacggtttcgtgagtgttggggtagggtggggacggtgtaggagtttgttgatttagtattgtagttgagtaggagagtagggcggtaggattttttagggggaagcgttgggtaaatttttagagtgtttttgttcgggttattgttttgtggtttacgtgggttgggtttgggtttgggttttagcgtttttttttgtaagtttgggaaatggtggggttagtggttggtagtttataattttagttttttaggtcgtggagggttttttgtatcgttaatagggaggtaggtgttgttaggattgggtttgtagtgttggattacggaggttattttgtttttggtttgtaggtgtcgagtttggaagatttgtttatgattttaatttgtttattatttttttgttaagattcgcgtttttggtttttttttaagattaggggatttaaaagttaaattattttttttatttatttttttagtttttttaagatttttttttttttttataggtagatgtttaattaggaggagagggtttgggggttttttttatttatgtttgagtaaggttttagcgaacgggggtggtgttttatagggtaaaaggaattgtttattttgaggtagggtagttggtgagttttcgaaggttggaattttttttttgtggggttagggggtttattagtgttagaaaggaagagagtgttaagagtggaattgtagggttttgttttgttttattttgtttgggttttttttgtggggaggggttgttttttggttggtttttttgttttgttttttgttttgttttgtttttgttttgttttatttttgtttttaattgggaaattttttttaatggtaagagaaaaagaagttgtgaaaagagaaaagcgagaggaaaagtagaagaaaaagaaataagggtgagaaaagagtagagataggagaaaatggggaagaggaagaatcgatagagagagagagagagagagagagagagagagagagagagaaagtggagaggaagaggttaggtatttaaagaatagaaaagttcgggtcggggttggtggttgtcggttgatttttatttttttcgtagattattttaaattttatgtataagtattagtcgcgtttttatatagtgcgagttaacgatattttgaagttgttttatagtatttttcgtatttacgtgttttcggagatcgattttatcgtcgttattgtttattagaatgataaggtgcgcgcggcgggcggtgggttaagtttttgtattgacgttttttaatacgtgtaggtttaatcgttcgtttatcgtttttcgaagttttttgtacgggattcgcgtttttgcggttcgttttcgagtatcgagtttcgtatttatacgcgtagtatttacggaagtttttaaggcgtttttttaattttatcgcgcgtatatataggtttttttggggcgagcgaatagttgggtcgtcgttttgatggagatgtttatttaataattagttgagatttcgggttcgcgttgatatttttatattttattcgtttattttttggtttaggaatgagaatgtaagtgaagagagggcgttcgaggtaatttgtttaggttttatcgatgtttagaattcggggtttagtttttattttttcggggggagttagagggtgggataggtgatatagttttttaaagtatttttggttattgttttgggttagtttaggttttagattttttgggaggcgtttagagaattattttttaattaaagggttttttttgtttgcggtttttttatttttgttttagtggggtagagtattatttttttaggtttgtgtttttgtgcgttattgtcgagtgaaagagagggtacgagtgttcgtgtcggtcgttgtggttttgtgaattaaggtgtacgttgggttgtgcgtgtttcgtttggggtgtgttggatatttgtggaggtatgtgaattcgtttggtttcgtaggcgtttgttatgtttgtgtatatttgcgtgtgtgcgagttcgtgagtgtgatttggttttgtgtgtatttgtagttttgcgtgtgaattgtagtttttgttcgcgtttgttcgggtgcggagtcgtttaatttgcgtaagttcgcgggcgggtgtgtatgtttgggttggtttcgatattgtggtattgttttaggtttgtgtggggttgtttaggtttgtttagggataatttttcgaatgaagtttttggaggatagatttcgtcgtttttcgcgaggtttttttatcggttttagttcggggcgttttattttaggcgggtgggtattaagtggacgtttttcgggttttttttttgcggttagtattcgttgatttcggggtgttatcgattacgttggaagagttacggtttgatttagcgtcgtttttttggttttcgtagattatatagttgaagatcgataataattcgtttgttaagggttttcgggatatcgggaacggtcggcgggagaaaaggtgagaggtcgaggatagtagttttgtggcgggtgttcgcgggagtagcgagtaggagggatggagggatgggtttttcgttgatttggtttattcgtttatttttaggaagtagttgacgttgtcgtttttacgtttgtacgaggagtattgtaaattcgagcgcgatggcgcggagttagacgtttcgtcgtgcgatttttttttcgcgcgggaattatttattttttcgggcgtagcgtttagttcgttgcgtttgtatcgggttcgaggtgagggtcggatcggaggagggatagggaggtggcggcggggggtttttaggtcgttgggttggttttttgttgagttattcgttaatttgaaaggttaggaaggaaacgtcggcgagtgtttgggatggggttttcgtttcgggatttttttacgagggcggttttcggtagttagaagattcggtcggatttcgagtttggttttttgggcgtcgtgtaattttatagttgtagggttttttttttagggttgggttttttttattgtaaatttggggttttggattaggtgatttgtagttgttttttgttcgattttagtagttttttcgatttggttttttcgagagtagtttttttcgagtgtttttgattttgttcgtcggttttcgtttaggtttttgtaattcgcgcgtttttttttcgtagttgaggagaagtcgtgcgtcgcggatagcgattcggagtttgagcggttgagcgaggagcgtgcgggggcgtcgttaggtcgtagttcggttttagatagcgttagttttattcgtttgatcgaattcgagcgcgttcgggagcggcgtagtttcgagaggggtaaggagtcggtcgagagcggcggggacggttcgttcggtttgaggagtttggagaaggagcgcgtcgaagttcggaggaaggacgaggggcgtaaggaggcggtcgagggtaaggagtagggtttggcgtcgttggtggtgtagatagatagtgcgttttttttgggcgtcggatatttgttcggtttggttttttttagttatttgtacgggtagtagttttttgggtcgttgggagtcggttagtcgttttttttgtattttggatagtttattatgggttttggcgtttttttcgttatgggtatgggttatttattggtttcggtggtaggcggcggtaacggcggaggtggcgggtttgggatcgtcgcggggttggacgtaggcgggttgggtttcgcggttagcgtagtaagtatcgtcgcgtttttttcgttttattttttttagtatatgttggtattttaggtaaggtttgtgatttcgcggtagcgttagcgagggagaaggtttagggagttggcggcgaggttagcg

SEQ ID NO: 6334 - DNA, 2392 bp, synthetic construct
  misc_feature 1..2392: note = Description of Artificial Sequence: Synthetic polynucleotide
  source 1..2392: mol_type = other DNA
tcggattttttgttttttcggtgagtcgttttttttttgtcgtcgggttttttttttttttttttgtttagttaaaattcgaatttaggcgttaggggagaggatcgtcgttttagtttgttttattgttgggggtacggagtttttgtttttttaaggttacggttttcgttttcgcggatttcgttcggattttttttggttatcgggacgtttcgttttttttttttcgtagtaattttttatattcgggttgtgaagttcggggtatttttaggtcggcgataaataatttatagggaacgtggtattaggtttttttcgcgggaggagggggcgcgagtagcgagagttatcgttattcgcggtttaaggatattcgcgatgcggcggcggcggcggcggcggcggtttcgggcggggattcgcgttacgttttttggcggttaagttgagtattacgtattcggcgtttttcgttttacgttgtttttcgtcggcgttcgcggtttcggggtttttatttttatttttttaagttgggtcgtgatttcgagtttcgtagtggggggattaagttagtttggtaggcggttttagtattattttaggttcgttcgggggttttgggcgaatttaggtgtttcggatttgtttatttgtttttggtacgtttttatttttcgggagtttagaaataggtttaaagttattagtatcgttaagatttggacgggttttgaaatatagttagcggaatggtattttttttaaataagtgttttttttcgatttttttgtggttcggggttagggattgaattaagataacgttattattcgagggttgggggatcgagttagaagtttttttggacgattagggttgggaaatcgagtggacgaatggggtgggtattagggtttggcgggaattttcgttttgtttatttagtagttttttgtagggtcgcgggacgtatttgggggtttaggttgtcgggtgtttttgtttcgcgtgttttcgttttgttcgcgtaggtaggaaataggagattcggggtttttttttttcgtcgtcggggattttgggcgaagtttttagagatcggcgtaggcggttggtgcgtagttagggtttagcgttaggttttgttcgtttagtgttttttttgtttatttttttttttgcgttttggaagttcgggagtcgggtacgggttagtatttgtaagatgttattattttggaagtttatttcgatttttttaggtcgtaggaaggagagagttaggttggggtaaaggagatggggtagagttggaaggggaagaagcgggattcgcggcgggggaaggggtttgggcgtcgaggcgagtgcgtagtaggtgtttagtagatttagggaaattggggtattgggttggggagtcgtatagtttttttttattttttcgatttttttttaatttttcgttttggtggattttagtttcggtttttattttcggttttgtttttcgtttttcgtttcggcggtttttagtagtaatagtttgggttcgcggtagtttagatttttttggtttcgcggtgttgtcgcgttaagcgaaggaggaggagggttcggcgattttggggacgaacgttttggacgtttcgttcgcgtttttttttcgcgttcgtcgcgcgtttgtttgttcggtttttttttcgtttttttttcggtcgttcgggttaaaatttaaggttaggtttttgagggttcgggttttttagtcgttttttttttgagtttcgagagttttgcgtgggtttaatttttcgggtgtttcgtttttgttttcgtcgtttttgttcgcgcgtcgcgggaatttagttttaagttggcggcgaagttggtgtttttcgttcgtcgttcgttatttatcgaggggaaggggcgttgcgttcgcgacgagagttcgcgtcggtcgtttttttcgcggtgtttgttttagagtttcggtttcggagggttggcgcgtttagttttagtttcgcgggcgtcggagttcgggcgcggtggggcgggggcgggggcgggtggcgcggtttggttcgttggtttcgattcgtttttgcgtttcgcgattttttcgaggttcgtacggcgttcggtttcgtttcgggttgggttgcgtatcgcgttttttgtttttagagttcgtagtcgattgtgcgggagtttttatcgtcgttcgcgagggttcgtttcgtcggggttcgttattttcgtttcggttcggttcggttcgttgtttttcgaggtttttttcgtcgtattttcgggtttttttttttttttcggaatcgcgtttttagatttgatattcggggtaagtgcgtttcg

SEQ ID NO: 6335 - DNA, 564 bp, synthetic construct
  misc_feature 1..564: note = Description of Artificial Sequence: Synthetic polynucleotide
  source 1..564: mol_type = other DNA
tcgattttttttcgtggtcgttagggtaggggtgggaggaatttggaagttacgtgcgatgttcggagttgcgttttttgttttggggcgtgggttcgcgagcgtcgcgtagtttttcggatcgttttgagttgttgcgttcggcgttgtttttttttttttagtttcgcgtttttttttcgcgattttttttttgttttttcggttttggaagcgttttaagatggggtgggggtatggagggagagaggggaggagggagttgttcgggggtagtgtcgttaggaagtgggacggggattttggcgtttttttaggttgttgcgcgcgggttggggatcgtgtatcgttttgcgcgttagacgatgtattttttggaacggtagttgaggtaatgcggggtgtgaagtggcggcgggtagaggggttcgtaggggttgggattcgcgtgtttttttttgtttcggtgcggagtacgatgtgttcgggcgggggcgaggacgttcgggaggggttgggttgcgtacgttcgcggggtcgtcgtagatgggcggtttggaggcg

SEQ ID NO: 6336 - DNA, 3277 bp, synthetic construct
  misc_feature 1..3277: note = Description of Artificial Sequence: Synthetic polynucleotide
  source 1..3277: mol_type = other DNA
gcggttgtattgttgcggggtgtaagggcgggggaaattatatcgttaggcgaggcgcggggatcgtgttggaaggttcgcggcgcggttttttttgggcgattgcgggggcggtttggtagggagttggggcgagtggtcgtcgcggggtttcgtaggcgcggggaggtatcggtcgggtattcgcgcggttgaggcgagggcgggggatgtttggtcgggtagggaacggggtgggggagggtagaggggcgagcgagtcggagggggaatcggagtcgagggcgcgcgcggatttcgaggttttttaggcgggttttgagcgattgtaaagtttgttcgagttggttgagcgtttcggcggtcggtgttcgggataggtcgtttatggtgtttttgttcgagtcgggttgtttgcggtcgtcgttcgttcgggtttcgtcggtttcggggtttagcgtgttttggttttcgtagcggtttagtttggcggttagttcgcggatggtttttttttggtttaggatggtttttttttgttgtagtatcgtttcgcggagttgtagtacgttgtttcggagtttttcggcgtcgtcggcggttacggacgcggcgtatatgtcggcgtttacgggtatcgaggtgtagatgaagcgcgtcggttcgaaattttgggtttcggcgtttaggaggtagagggcgagtagcgtataggtgcgcgcggcgcggtcggtcggtatggttgcgggtatcgggcgtttcgggttcggttcggttcggttggggttcggtttcggttgggattcggttcgggttgtggtttcgcgagcggttcgcgttttgggcgtcgcgtttttcggtcgcgcggtttatatcgtcgcgttattaggtttttattgtcgtttgcgttgcggagttcgcgttttttatgtcgtcgcgggaggggtttcgagtcgtcgacgttagcgggggaggaatttcgttttaattgttcgcggttcgggttcgcggcgcggcgggggttttacgagcgcgttatcggggttgttttcgttcgcgtttttttcgtttttttgggagttgtcgcggtttttttttttttcgttttcgtttgggtcggcgttgttgtttcgaaggtttcgagagtttagggggaaggaagtcgggtttcggtttcggattcgaggatggattatttgcgtggtgttttcgaattttcgacggggttttaggcgggcgggaaattatcgcgttcgggagatagaattcggttcggtttttttggttgtattgaatatttttgggtcggggtcgtttggagtcgggttgggtgtttaaggatttaggtcgttaatattcgagtgttcggtggttaacggttcggagtggggtttcgcggcgttattaagtttagagcgggggttatcgggtcgtttcgcgttttttagatgttcgtgtgttattgagaagtcgtcgggtagtttgggtatagggattttttacgggtcggggttttcggcgtttttttttttttagttttcgggttttgtggattcggtttcgttttcgggggattgttagtttttatttcgtgcgggcggggcgttggggatttttcggaggtagatttagttgatcgagttttttttgttcgcggcgtcggttcgatcgcgggtaggcggcgtcgtcggggttggacgttcgtagcggcgtttcggaagggggtttcgcgggagtagtcgttcgcgtttttagtagtttttttttgttaggcgtcgcgcgcgttcggtattttcgggtgtttatttgtgcgtggggggttgtttttcgtttgtttagtcgcgtttattttttaggtttaaaggttagtaggaagggtttcggaggtggttgggggcgtttatttgagaagtttcgttttcgtttagatattttattcggtattcgcgtattcgcgtttttatttggatcgcggggttcggttttcgagatcgcggttcgggtttcggcgtcgggttgggggtttaggattagggttggcgtagtcgtttcgtttcgtttcgtttcggggttattagagcggttaaagtttcggaaattttttcgtttacgttttcgtggtatagagaaggaaattgaggtttcgagattgcggggtcgggttatagtcgtggtttttcgattttttttcgtcgttttcggtttttttggtttttgcgttttgtagtttttttttgcgcgtagtcgggggttgggggtttttagttagtagggatttacgggtagtttcgggtgtcgggatcgggcgttcgtttttcgggcgggagtagaggtcggttcgatggagatttttttgagaaatggcggtttttattcgttttttagttttcgagcgttcgtcgtttgcgtttagtattttagtttttaagtttttttgagtcggggttgcgttttcgttgtttttttcggtcgtcgttttttggcgttagagggatttcgcggttcgtacgggtttgttttcggtttcgttcggagggtgtgcgggttttcgtttcgttggtttcgtttgtttattacggcgcgtttaaatttacgcggttcgcggttttttgcgtgttttgtcgatttcgggtcgtaggaggggttagtttcgtcggtttttacgcggggtttgcgtcggtagcgttacgggttggaacgcgtttcgggagaaattattcgcgcggggtcgcggcgttttttgttttaattttcgtagggagtcgttaggcgggtgtttttttggttttagcgttttggtttcgtcgttttttcgtacgcgtttagtggggaggtcgcgttcgttaggtttggagtcggatcgtgtttagtcgagagcgcgcgggcgcgggagaggagttttgttttgtttagggtaggttgtttagacggggcgggaatttttagtttggtttcgcgtttttatttttagtagtcgtggagtttttttagtcgtttaaggttagggattttgtttggttttttttttagggtagtagattttagcggtttggtatttcggtatagaggagcgtgtttttttttcgtagaggaagggagtggacggcgttagaaagggaggggagtttggggcggtgtttggggttagcgggatttttgggtattgtggggttttaggagaggagattttcgggtttagtttgtaattgttgtgtaggaggcgttgggcgggatatttgtaggcgttgtatatatacgcgagggttattatgtcgcg

SEQ ID NO: 6337 - DNA, 5692 bp, synthetic construct
  misc_feature 1..5692: note = Description of Artificial Sequence: Synthetic polynucleotide
  source 1..5692: mol_type = other DNA
gcgcgttttcgtagttcgtcggttacgtatcgtacgtacgcgtttttttcgcgcggggtggcggtcggcgggagttacgtggagtagtcgcggtgttttcggttacgtttggttttcgatgtcgcgaagggggttttggggtaggtttcgtttttcgaagttgtcgttgcggtttttgttagtcgggagacgacgaggggaaggggtgggtcgcgttgggtttttcgtttattcgtttttttttagttttgcgggggttaaattcgtttttaataaatttcgcgaaaaagtcgagggggggacgcgtcgttgttggagaataggttagaagtgatagtagaatgggtcgttgagattttcgttttcgtttcggtttttcgtcggtttggcgggcggcgacgtggggaggggtcgtttagaagtcggggtcgttcgggtcggggaattttttcgcgtcgacgtttattttttacgggtcgtattcgtcgaggggtcgaaaggggttttagtggaggacgcggtgggagttgggtttcgttttagttgtcgacgtcggcggtgttcgggttttcgggagcgtagtttttggtataaagtagcgtcgaagattttgtcgggtgtttcgtcgcggttgtcgttgtgttcgcgtagggtcggttcgtgaatgcgtgcgggggttttcgagggcgttttttttattttgcgcgttcgggggagttgttcggtcgtcgtcggtaggtagaggtttcgggttttatgggtgttttcgagatttcggatcgtgcgttgagaatgtcgacgttttaaacgagttagtagagcgggtcggagttttggtcgggaatcggcgtcgcgtgcgtattggtcggcgaggtttttggttcgtcggggaaggagtttagagcgtttgttttttcggtagaaattaatatatataaataattattcgtattttttatattgggggattgggagtaaggagtaaggataggggaggggataggatttaattcgttggttttttattttaaaaattatatattttatgttacgatcgtttttcgttaagattataaatatttaatttggtttggcgtaataaaattagtcggagtttttttaaacggagttatttcggtgaattaagttgtgaaatttaatttattatatttataaaggagaatgtttttattgtaaatttaggttataaagaaattatatttgggtcgtcggtttttttttcggatttattatttgaaggtttattaaattattttaaaatgttgggttattttttttatattttatggtaataaaaattaaacgtggtaatattttttttaatagtaggaaaggttaaaaataatcgttataataaggggatataatttttaaaagatatttttttttatttcgggatgtttttttcgcgtttggaagcgttttttttatttttttaattaattcgagtttttaaaatatttaaacgcgttacgattttttttaggttttttttcgttttacgaggcgtttgaggcgtagttttcggatggatcgtacgtggggtcgtagattttgggcgttcggacgttagtcggaggcgcggggatttcgtggtttcgttgcgaatttgcgttttatcgcggttcgtatatttgggtcgagtcggggtcgtttcgggagtttttcgttggtttttgggcgttttattcggtttagtaatgttcgggttagataaaggagtcgttagggaggggttaattcgttttttattttttttcgttttttttttcgttttttttttaggcggcgcggaggagagaagatgcggtttttaataatgtgtttggtttaatttgcggggtgtgggtatttgttgcgtttttttgggtgagggttgggtttttttttttttatttttttttatttttgtgtatgatattttggttggggtttggggcgttttgcgttggttagaagttagggttattagggatttttcgttttcgttttcgaagaggggatttgcgcggacggcgaggaggatcgatgcgtttttgagtttttagggaaacgaggtcgcggttgttgttacgtcgcgaggaagatttatgaggcgcgggtcgagtatggttcggttcggcggaggtcgttcgcgtatttaggttaatttttgatttttatttgattatttttttttttttgttatttttaagtcggcgttcggaaaggcgaataaagggaggaggatgggggatgggggcgttaagcggtggcgagggttcggttcggtaatttttttttttagtgggggtttttgggcgttttaggttcgcgtttaatgcggggtttaggagggcgtagtttgaaaggtgatcgggttggggttgtcggagattcgttttgcggggtggtttttttagtcgttaggtttacgataggatttttagggaggggtttttgtaaatgtttttgggcgaagagaggacggaaagaatatttttttttaaattgtaattaagggtgtgcggggcgggggtgtttggggggtgttgcggtaggtcgggttcgtttaatcggaggtagtagtttagttttgggtcgataaggtcgagggaaacgggatttttttgtttttcgtacggaaaagatttatttaagcgggtaagagggaagcgaagtttgtattttttatgttgaaaaaaaaatttaaaatggaaaattattttattggttattatttataagtaaattaaaaatagggataattagagtgtggggatttggagggattataaatttgcggcgttttttttattggaattaggagtttttatggtttgttgttttattttgagagaaatgagatttttggttttggtgtaggcgggtgtgcgtttcgagcgtttttcggcgggggggaggggggagtaggaggggcgaggagatttgcgtagttagggagtcgcgaatttcgagtttcggttttcgaaggcggtaggagaaatcgcgcgttgtgtttcgatttttttcgttttggttaatcgcgatttgggacgagttggaggagtttttttcgggtttcggacgttcgcgtcgaaaatcgggttatgggtattaaattcgattttaggcggttatttattttgtttttatttaaattttgatgagttatttgggagtgcgcggggattgggaagtgagggatttttataatatttttttttcgatttcggttttcgagtttattatttattttgtttttttcgttttcgttttttgttttaaattggggaggggggaggggggagagaaaaggatataaaattatcgttttttcgttaaatttttaaatttttaatttttcgtaaaatggtttggaatttattttattttataggggttttattttttatcgggtggaggttagttttttaattttttatataagtaggatttttttttatttttgaaagtttttaaatttagttattttaaatgtaaatatcgtgtgaaattttattaattaggtaagaaagtagggagagttttgatttagttgtttttaattttgggaggagaaagagaaagtgagttttttttttattaagtattttaaaataatagcgttttttttttttagttcgttttaatcgtagttttgtttttgttgaaagatttttgttttttttaggaaggggggcggggaggataggtttatatttcgaagagttttgtttttaaaattgttcgaagatttttttgtttgacgtgtatatgggggaggggaaggagttcgtttaggttattcggttttttcggatttcgtttaggttattcggttttttcggatttcgtttaggttattcggttttttcggatttcgtttaggttattcggttttttcggatttcgtagaatatttttaaagtttatgggcgttttttaatcgtgtaagttcggggtttcgggggttaggaggggttgttttaagataagggaagttgttcgttagattggggttaatatcgggtttttttaatttaagtttttttcgaaaataatttttttaaaattgagtatttttattagaaaaaattcgtattttttaggaggacggggtgggagagtttcggggaataaagttcggtttttttagttttgaggtcgaggtagggcgtatttttttttgggcgaatttaatcggagttgtagaagagataagtatttttaaattggtattcgtttcgagtttaaggtgagggtggagaagggtttttggtggaagttgtaggaatattttgggtcggggtttatttcgcgttcggcggtttttcgaatttcgtagaaagatacgtttgtagcgaaaggtttttatatattagtcgggattttattcgttttttatcgagagtgcgttttgggagcgcgggaaataaggaaaacgtacgtatttggcggcgtttcgagggcggtttcgcgggtttttcgttggcgaaggtttttagaagttatttttcgttcggttgttcgttttacggttagttttttttttttcggcgacgtatttcgtcgagttagtttataggaagcgttaggagtcggagatttggttcgttttttcgggcgttgcgttcgttttcgatcgttagggttcgcgtttttttttcggttacggtttattagagggatttcgcggcgggttttggttcgggcgcgtttttttgcgttcgagtttttaggttttcggtcgagttgcggagacggacgcggagttttcggggaagacgaggcggcggcggtcgtcgttcgggtaggagtttcggggcgggaggggtgtagggcggaggagcgggcgggattttagcgtttcgcgtttcgcggtcgtcgtttttcggggcgtttagttttatttacgtggaatcgtttcgttttcgtcgtttcgtttttacgagggaaggtattcgagtttcgtcgtatattcgcgtttttcggtttcgggttcgaaatatcgcgttttttttttagcgtcgtgtttttcgtttttttagcgcgcggttttcgttcgattcgcgcgttcgttcgattcgtttttaatttcgtttaattatcgtttttcgcggttgttttttttgtttgagttttcggcgtaggttaatggaattacgcggaggcgcgggcggtttggttaatggaaggtttagggggcgtggttggcgggaggggttgcgggcggtcgggttttatgcgttgagattcgagattgcgtcgtcggcgggtgcgtttaggtcgtttagttagagtcggtaggatttcgtcgtcgggttgtgggtttttgatttttttttcgttgtcgggagaagcgtttgagtggggagggaggtgggaggaggtggtttcgcgtcgggggtgcggggagcgggacggcggtttggatggatacggttagtttcgggtcggagagggttcggtttagagtagtttgggttttgtttagagttttattgtgtacgttttcgcgaggatttgcggagagacgtgtaggcgacgtaggtttcgggaaggaaggagggtatttgggttcggacgagcgataacgttgtgttttgtgatttcgtataaacggattttggagtttagggaaagcgttttaggtttttagttcgggtagggttcgtgggattggcgttcg

SEQ ID NO: 6338 - DNA, 7937 bp, synthetic construct
  misc_feature 1..7937: note = Description of Artificial Sequence: Synthetic polynucleotide
  source 1..7937: mol_type = other DNA
gcgtcgtttgcgaggggcgttttgcgtggattcggggtttcggggcgcgtttatttattcgagttaggagagattgggttttacggtgttagtttcgcgttcgggttcgcgcgtcgtttttagttcgcgttttttttattttcggagggtttcgcgggttttcggcgacgggtttttgtttagggttcgggaattttttttttttttttttttttaagcgttattttttcggagtcgggtcggtcgttttcggtgtacgcgggaagcgggtagttttcgtttgtattcgcggggtcgggattcggaggtattcgttttttcgatatattcgttggggtcgttgttcgttgttttagtttttcgaggttacggtaagagttcgggggtcggcgttatatatttttagtcggcgatcgcgtttagggatttaatttaatcgtttttagtttaatgaatagtcgcgcgttaatcggattttcgcgcgtttcggggatttacgtttttcggttttttttttcgtgtttcgcggttcgttagacgtcgttttcgaaggcgtcggtttggggtttggttaggggttcggtcgcggggggtttcggtcgtcggagtcgggagacgtcggagacgggagtcgggttcgcgcgatcgttattttcgagttagtcggggtgggtttcgcgttttgttttgcgttttcggttcggttcgcggagcgtcggtgtttatttgcgagtttcgggtttttcggagttttttttcgggtcgagtcgttcgaagcgggcgtcggcgtaggtttcgatttaggtaggcgggaaatttcggagttttcgttcgcggttcgtagttttttattttaggtcggcgtggtttgcgggggggaaggtcggtcggggtcggtcgttcgttttttttttttttttagatttttttgattcgcgggtttttcgtcgtatttcggttttcgggttgtttcggtcggttcgcggggattttggaaacggtttttagtttatttttttttattaagcggttttgggtcgttttgaaatcgcggagttagtaattgttttttttaggaggtttagtgcggattggataatagttaattagcgttttgtttatattcggtgatggatagtttattggcggagtgttaattaattttagcggtttcgcgggagcgggagtgggggcggggaaatagagagataataggttttgagtttaattttttcgtgtttttgtcggaatgagacggtggagaatttcgaatgcgtgtgaatttgttagttggtttttagtttaaatattttttttttttttagagggggaggtagagatttatatggagaaagaggagtaaaaataaatgtatttatcgttattaagatattatttcgattttttgagaataaatagtatttgggtgggaaattaaattttaatagaaatatttgtttgcggaatattttagaagtggtttgtatttgattacgataaaaattgtttagtggtttgttttagttggagtgaggatttagtagataggtagatagggagtagtattgagaaatattatatatggtttattatattatattcgttttttttattattaaattgaaaatattttttaaatttaggtgtagatgaagaaagggtaatttttgtttttttaataaatttttgatttttattttagtagttgttttgttgtaaagtgtggtagagggagataaaattgagagttagtaatgtagacggttggagatttagaatttattttttagggtttgatttttaggttatggggaggagagagtcggacgggttatttaaagtttttgttgtttaagtagcgggcgtgcgtgcgtgtattcgcgagttcgggttcgggtaggtagtagttttagagcggtagatgggttaggtaatttggggaggtttttgggtttggaggtttggtttatttgttatttgttagatagattttagggagaaaaagtagttatttttaaggggtggtggtgtttttttttttggttttttgtgcggtagaagttaaacgttagatttgttggattaaatatatatgtgtgtgtgtgtgtttgtgtttgtgtttacgttttttttttcgtcgggatacgcgtattcgttcgttttagttttttttttcgttttgcgttattatatttttatttagtagtaatgatttgcgtagaggagttgcgtagtcgtcgggtttgaattaggcgttatcgggtttggtagtagtttcgttgttttttgattggtagttttttggttcggcgttagtttattgggaggtttgtttacgtcgaatgagtggtacgagttttcggtcgtggagggttgcgcggttaattagcgcgttggttgtttcgggttgagtggtacgagtttattagtatgtagggttcgtggttcgtcgcgttaggttgtaggtttgagagtcgttttggatgggttcgttagagtcgttgttgtggaagcggtgtatttatagtgtaatagttagtatattgaaaatattaataggaatataaaataaagttatatttattgatttaattgtattgtatttagttgtatttaggaaatagtttttagtaagtaattgaaattgtttttattttttttttgtttttgtatttttattattattttattttttattttggttttggggttttatattttttttagtaaaagaaatttaggattgtgatgttaagaagtatatatttttttttttaataaaattcgttaaaatgttgaggttttttttttttttaaaaaatatggattatgagcgatttttttttttttgaaaaattttatcgatcggtttaaaattattttcgtaatgtatttttgttttgttttgagcgtttgttgtttcgatcgatatttagtattaaaaataaatattcgaagataggatagggatcgttaggttgcgtttggcgcgagtcgcgcgggtggtatcgggcggatagtaggcgaagttcgggcgtcgttagcgtgcgtttagttttgggtgatttacgaacgaattttaatattcgtttttttattttgttttttttttcggaatagttttgggttggttttgttcggtcggttcgcggcgaggggaattggtcgggtcgtggtatttacggtcgttgttttgaggggtttttcgggtcgaagttaggggtcggggaggggaatggttatggcgagtttttcgggttttcgtttttaatttagaatttttttttttcggagaagtgggggtggaggagggggatcgagtaaggtcggcgtagcggggcgtttttatcgcgcgcgttcgggacggcgcgcggggttcgggttacggttcgtgtggcggggttcgcgggttggtttttttcgggcgcgggggttaggcgcgattttagtttttatgatttttttagggagcgggtgcggttgtttcgtagggagcgggttttgcggcgacggtcgagttattcgcgttttaaggcgcgtttggttttagttcggtttgtaggttttatcgcgttcgcgttttcggagacgacgtcggagggaggtagacgggttagagttttggttttcggtaggcgggcgaggagagagcgggtttttagatgtaaaagtaggaaataaagtaaatttgtagaagttttagattttggagcgcgttagttacgtttggggtcgcggtaagagggatcggcggttttagggttacgttttgttttttcgggagggagttttgtgtttttaggtttagtttttttcgaaatgttttcgttagcgatttttcgttcgttcggggttttttgttcgtcgttatttttcgttttatttttttttttattttagttcgatttggcgttgcggcgtcgttttcgcggtttttcggcgcggttttttttggagttgggttgggagtgggtttcgggtttcggtattcggcgggtggcggcgtcgtcgttgcgggattgtgggatttttagttcgggtcgtgtggtcgttttttttcgttttattttttggtcgttttaggttttttaggttttcgaagttcggcgcgggtagacgcggaggcgcggcgcggttttttttcgggaggagagaatataaagaaaagttttttttaattcggttagagtcgtggcggcgtaggtaggcgatagtaatttattttttgtttgtttaaaaagtcgagtaggttggtgagaaaggaataatcgggtttgcgattcgttcgtagggggtgggagattaaaattgttgtttcgtagtcgagttcgcgtttcgagaatcgtcggtagttcgcgtttttttaattttgaaattttttattggagagaaaaaaaaaaaaaaaaataattataaaataaaagtatagtatatacgattttttggaggtcgttaggaagtttggtattttcgcgtgcgtagttttcggttttttttcggttttcggcgtttttgaagttgtaggtttttgatttttttttttttttttttttttttttgtttcgttcggcgtttttcggggttcgggaggcgtcggtcggggttgggggtttttacgtttttagtttagttcgggtagttttttttttgatttttgcgttcgtagttttttcgttagagtatttttcgggttttggcggtcgggcgttcgttttgtaggtcgggatcggggtttgggagtcgagttatttgttagattcggggagagagttggcgatttttagagggaagggagttttaaacgtttttgtatgtagttgttagataaagagaattttttgtgtagatttatttatttataatgtaaaagtttttcgaataaatattaaaaaagtttattagttgagtaaatatgtatttatttaatatattatgttttcggttatagattaaattaaatataaaatagtttgtaaataagacgttttagaattcggattataaaatatcgtaatttaaaaaggtatttagtagatggaaaatattttaatcgttttgttgttatggtggaatggttataaaaatataaggtttttcgtaaagtttttaattaggaatattaagtttatttattttttttttgttggaggtgataaatattaaaataatacgtatttagaagatgaggagtaatatgtgaagtgcgtttagggagcgttttcggagggacgtttgggagtacggtggtgtacgtagtttttattattggtttcgatttttcgtatttagagtttaaaattgtttttaatttcgtttgagtggatgtttcgcgttgggtgggggtggaagaaaatggaggtgagggttattttaggtggtcgaggttcgggtagggtttgttggtagaaggttgtgttgggtcgggtttatttttttcggttagagggtcgagttgggcgtcgtagatttcgcgtatttaggtcgttcggtattgttcggagcggagatcggtttttgttcgcggttttcggtaggcgttgaaggaagaaattttagggtcgatttgggtcgttgagagagagtattttgattttgaaagtattttttttatatatatttttaagtttttaattcgtagaggaagattttgggcgaatttgattggggggcggggtgattgttatagttttaataggaagttttcggtttcgggatagtaggtcgggtattgcggcgtggcggtttaggtgatgtcggtggcggttgcgggttttcggggttttgaggagtcggtttggggttttagcgcgatgttggggataggagttggtttcgttggggttggggaggggggattacggtggatttagaagaatgggtcgaaagatgtatgagggggatgggagtggggagaaaaggaaggttattaaaaaaaaaaaaaatttttgagttataattaataaaattattcgtttaattagtatggttattcggttaagcggaatgtagtaaaagttggatttcggtatgaggtggggagagggggagagttagtgtggattttaggttttttttttcgagatatttttgggtagcgggggaggggagagggtgtgcgtgtgagtgtgtgtgtgtgtgtgtgtgtgtgcgagtgtgcgtgatggtttcgtagatttgggtttttattatttagtagagttagtagttttttcgtcgcggcgttttagttgtagggattcgcggggacgagaacgggaggcggcgagtagtgcggttgggttttttcggttgtttcgggttaagcgtggtcgggacggtgcgtgcgcgcgcggggtttcgggtgttgggttgcgcgcgcgtgcggcggggagatatcgagcgtttcggtttcgttattcggtttggtcgtcgttcgttcgggtcggcgggggtggggggtggggggagtgggtgagcgggcggggcggggattttcgggcgagtcgagttttttagttattcgtgttttttttgtttttgtttttatagattatggattcgtatagcggtcgttggttcggtgcgcggtcgttcgtcgagaagtttagttttttcgcgtgttgatcggtttcgtcgttattatcgtttgtgatttcggacgtcgtcgtttttgcgtcgttcgcgcgtcgagtcgttttcgggtttcggtcgcgttgtttcgaggaagcggcggcggatcggggtcggggttcggtatggatggtcgcgattttgcgtcgtcgtcgtatttgttgtcggagcgcgggagtttgggttatcgtagcgtcgttgtcgtcgcgcgtttcgtttcggttgggttcgtcgcgtagtttttcgtatatttttagtcgggaaagtatttttcgtcgtcgttgtttatggtttcgtatataggttagtgttcggtcggggcgggcgcgggacgggagcgttcgagagcggaatagggcgtttattttttcgttttcgggagtagagaagttttggttttatttttcggtttcggtcgcggtggttgtttgggcgttgagcggggtcgcgcgtttcgttagttttttaagttgcgtcgtcgcggtttagagaggtttttttttggttattttttttcgggggtttcggaggggtagtttcggagtcggttgaaattaaagttttttcgcgtttcgttattttttttcgtttttttttgtagatttaaattttacggaaattttttttttgtattttgtatttatttttttaagacgtttcggggttgggataacgaggcgttttttgcggaaataaaacggttgttgtggcggggggaggggattagggtacgtcgcggtttcgcggattagagtggtgtgtgcgtcgggcgagcgttaatagggattgttggtgtaagacgagtaaattttgtttttatataaagttttaaagtgttagggcgagaatgggtttgtagggatgtatttgttttaacgagtgtttttggtatttcgttaaagtcggataaagcgtggttagagtgcggtttagttttttagtttgcggttcggggaggagggtagcgcgggcgcgggttgggggtggcgcggggcggcgtttaggatttcggtgtaggcgagagtgcggcggatttgttttaagaggagagcgaggcggatttgttttaagaggagagcgtggggcgtcgtgttgggtttcgtagggacggattttttcgggcggttttttttgattttttgttcgagaggattagtttttggtagagcgggtttaggtttttagggtagtttttttttcggtggttttgatatgagtgtcgagggaggttagggtaggggtagttattacgtttgaagttttagaggttattaggcggcgcgggtagattcgggggaagcgcgtagggttgcgttagggattcgtcg

SEQ ID NO: 6339 - DNA, 1408 bp, synthetic construct
  misc_feature 1..1408: note = Description of Artificial Sequence: Synthetic polynucleotide
  source 1..1408: mol_type = other DNA
tcgaggtttttcgacgtggatatttaacgtttttggaaagggagtgaattggtaggatattatcgtttcggttagtttcgcgggagttgttttttagaaaaaaaattttttagagttaaaagttattttttaagcgttttggggtttttcgggcgtttttttcggacggtaattttagaagttaaagcgattgtatcgttaggtttgtggcggttggaagcggggtgatcgcggttagatggtatttcgtatttacgtagggttgtgttattttagtatagaattagtaatttttatacgaagttttgtgtaaatattacgcgggtttatttttgaacgattttttgatgttttcgttgcggttatttattttatatataaattaggatttcgttgataaattttcgtgtttttattaaatagaaggttgttttgtagtttttttcgtgtttttttttaaagtacgataatatttgatatttttataaatcggtttgtagaggatatcgcgtagggggcgattaattagttgaggtgtgttattttaaaatattagtgggtatattttaaggcgggtacgtggaagggacgcggaatcgagggtaattattttttagtcggtgaatttgatggagaaagatgttaaatgtatttttcgagttagttgaatttttcgggtatttaattattgttagatgtggcgagggcgtacggagaatatttttagtttcggagaaaatattcggtcgttagcgcggggatcgttcgggtcgggaaacggttagaggcgggaggagagaggattgggcgagcgtggggagcgttgcggcgtggaaaagcgatcgggagggatggcgatgtttttatttttttcggtaggtttttttaattaaaaagttggaaacgggaattcgtaaataacgatttagggttttaaattatttgtaaagacgcgatggggaggggaatatttgcgcgttttaaaattttaatttcgaggtttttagtcgcgtttgattcgggagtcgggtgcgtttttagtgttcgcgtacgaattcggcgttttggtagtttcgatttttcgggttcgtagtttaagggaaggttcgcgcgggaggtattttcgtggtttttcgcgcgtttcgaagttcgtttttttcgtttagagtttcgcggagttgtcgtcgttttattttttatggtgatcgtggggacgtatcgtcggtcggggagtttcgcgcgagcgtcgcgtagtcgaggaagtcgtttcgagcggttgtttatcgtacgtttatggtagtcgcgtcgcgcgtcggtcgtttgcgttttcgttttttttcgtcgtcgtcggttcgcgtttttcgcgttttcggtttcgcgttttgttgtttcggggttgtcgcgcgcg

SEQ ID NO: 6340 - DNA, 208 bp, synthetic construct
  misc_feature 1..208: note = Description of Artificial Sequence: Synthetic polynucleotide
  source 1..208: mol_type = other DNA
gcgggcgtgggggggaaggggaagaagttcggcgagattagaggggaaattcgaaaaagtaagtttttgcggtagtagttaggaaatattcgttaggaattggttgcgattttaattttagcggttcgaagttttagtttttttatttttatcgcggtagagtcgttttcgtagatatttttcgaggagaatcgcggtttcgagggcg

SEQ ID NO: 6341 - DNA, 805 bp, synthetic construct
  misc_feature 1..805: note = Description of Artificial Sequence: Synthetic polynucleotide
  source 1..805: mol_type = other DNA
tcgttttttgtttttcgtattttttcgggggaggggtcggttcgcgttcgtttttagttcgaggggtaatttaaaatatggcgtttcgggcgggggatttgtgtaaattggcggagaagggacgcggggatcgagtcgttttttcggttagggattttagggaggtttttaggtcggaggtcggggtttaggttttgcgcgtcggtttagttattattgcgtcgtggcgggcggagcgggcggggggcgcggcgcgtaggttcggttcggtgggggtttcggcgagcgggagggcggttggggatttcggtcgcgtcgggcgcggggttcgggattcgggagatcgcgcggcgtcgaagttacgcgttagttttattgtttcgcgcgtttcgttttaggtttcgggtttttttttcgtatttcgtaaagtcgagattttttcgtagttttttatttcgagaggcggaaaagttatttgggattagtagggagttcgggcgcgtcgcggcgtggggattaggttcgggcgcgcgttttcggcggcggtgcgtaggagattcgggcgtggggaggaagtcgtagtttagggttgttcgtcgttgtttttttcgttttttgttgtaggagatatcgaggtttcgcggagttgcggcgggggtttacgtttagagatcgtgcgaggaaagttaatttcgttttgtttgtttttttagtcgcgggggagggggttatcgtagtattttaggatagttatatgggtatagtttttttcgttttggcgtagggttaggtttcgcggacgacg

SEQ ID NO: 6342 - DNA, 2462 bp, synthetic construct
  misc_feature 1..2462: note = Description of Artificial Sequence: Synthetic polynucleotide
  source 1..2462: mol_type = other DNA
tcgcggtttagttttaatttatcgtattttagagggaattacgagggagttgcggattggcgggggcgggggtttgtaattaatattaggtgtttgtgagagagttttaagggcgggggtagtattttttggttgggttgggttcgtttggtttcgtttcgttttcgggatttttggcgtttagcgtcgttttttcgttattgcgttattcgttagagttcggcgttttttttttttttgttttgtggacgtcgtttttcgttttcgggaggatttcgtttttagtattttaggtttttttggcgtaaaggtcgttagttcgagcgagtttaggcggcggttttatttttgtagagggaaagcgaaagacgcggtcggcgggtcgagggggcggtcgaacgcgtcgcgtggttgttgttttcgaattcgtagcggcggcgttagggcggttatcgagttttgcggatttcggtttaatttttagcgttattcgggtgtttcgagttcgtcgtagttttcggcgcgttttttagtcgcggtacgtagtttttgacgcgttcggggcgttttttcgtagtattagttaggttattttatttttcgcgtcgcgttttttcgttagtcgtcggttaggagtttttcggtttttgagtaggacgcgttaaagggagttgggaggtttagtagtttttagcgtcgttttttcgggtgacgtgacgttttttttggagcgcgggttcgttttcgttaagtttttatcgtaggtttttatagtcgagttacgggaagatgtaacgtcgggcgaggggcgtttttcggattttgaaaaatagttttattcgtttcgggaacgtttcgattttttattcgtattttttggttagatgattttaattttgggatttcgcgttggtcgtgggggtatcgggagttggagttggaggagaggagtcggtagcgcggagttgtcggggtgtagttgcgcgtagttggcggcgaggggaggcggtttttgcggtttcgtcgggttgggggaattggtttttgcgtttttgtttttcggaggatcgtattcgtttatttttatatattatatatatatatatatatatatatatatatatattgtcgttagcgttttttacgttataagtcggaatgcggaggttagagttattgtttatttgaaagtaggaaagtaggggttgaaacgttgagatggaggcggaggttttggttttatttgcgaggttcgtattttttcggaaggtttttttttttttcgcgtttttttagggcgagtaaggtttagtttttgagatttcgttttttgggttagcggttcgagttgtaggggggcggggacggattcggagggagtattagagagagagttcgcgtttatttttgtttttttcgtaaagaattggttagttttattcgcgtttagtttataattaggttgtcgggatcggggagttagattttaggtcgttttaatttcggcgagggcggggaggggagtgatagtagtaattagcgcgcgttggtaaaagtatagagtttcggaataggttaaacggtcggcgcggaggggtggaggtaagagggggcggaggaggagttgttcgagcggagagggatgacgttttttagggttttgggtttcgaggaatcgaagattggtgcgttcgtcgggtttcgcgtattagttttggggttcgtagaggcgtcgcgttcggttttcgcggtagttttaatatagcgcgtaggcggtcgatttcggttagtttaaatcgggcgtaagttttttgttttttttaaagtatttttttgttcgtttttagtttttaggtgttcgtttgagagtttttgtcgttttcgggcggattcggttaggtagttttcggtcgggttagtttcgtttttttttcgtttttttttttatcgatttcgagttaagggtaggcggttcgtattcgcgtttttgtttacggggttaggcggcgttttcggtttacgttcggttgttaagaagagaaaggcgtttatttgagttatcgaagtttttttttggggtttttttcggagtttgttcgtagttcgtaggtataattttttttggagaaaaaaagtagcgtaagggtagagagaggtagggttgtttataggttttttcgtaggggttttttttttcgaatttttcggggtttagtttcgggttcggcggcgggaaagagtttttggaggttggaaggggtcgttagattcgggtttttttcgtagttgcggtggcggtatttttaagttgttatttgtagcgcgtttcgggcgtttgtgatagttcgcgtcgtttagttttcgcgggttcgtttttttcgttcgttcgttggttgcgttcggtgttcgggcggttttcgcgttttgtttcgttttgagttcgttttttagtcgcgcgttcg

SEQ ID NO: 6343 - DNA, 990 bp, synthetic construct
  misc_feature 1..990: note = Description of Artificial Sequence: Synthetic polynucleotide
  source 1..990: mol_type = other DNA
acgtggtgtgtgtgtgcgcgcgcgagtgtgtgagcgttaggggtcgttcgttcgtcgcggtttttcgtgggttggtcgggttaatgagcgcgcggttgtaggggcggcgggcggggagggggcgtcgagttttgcggatggaggcgcgggtagcgcggcgcgtttatttcgcgcgggcgttgttggcggggggcggcgtagttattggattcggatcggggtcgcgattcggggtggcgggtggcgtgggcggcgttcggggttgggatgcgtcgggggtttagtggcggcggcggcgttggcggtggcgtcggcggttgtagggggacgagttagcgtcgcggcgttgggagttagttgagttcggtcggcgagcggaggcggtagcgtaggtagagcggcggcggtagcgggagttcgagcgttgcgcgtttattatggtcgtttagggagagttcggttatttggcggcgtagtcggatttcggttttaatagcgagcgtagtatcgattttttagtgttcggtttcgaggacgatttggtcgtcggggcgattttgtatagttcggagtggagcgaggagcgttttcgcgtggataggaagaaatttgaggttatgttataaggtaggtatttttcgtgttttcggatttttcgattgagtttttaattttttttcggatatttttatcgcgcgtttcggcgttcgttattttagtttacggtcggtcggtttagttttaggttcgttttttcgcggagtcggaggatatttagggattggagatttcgcgggattttttatttttttacgttttttagatttttaggcgttgggggttttgtgcgaatttgattggttttagaaaagtcgaaggtcgagtttgtattggcgcgtttaagttgcgttttggattttggagatgttaattttagttcggatatttgggttgtgttattcggattattcgggtcgtatagagtatgcg

SEQ ID NO: 6344 - DNA, 2274 bp, synthetic construct
  misc_feature 1..2274: note = Description of Artificial Sequence: Synthetic polynucleotide
  source 1..2274: mol_type = other DNA
tcgtttttcgtgtattgtttgcggttcgtttcgggtttatacgggatatcgaggtatgatgaggacgtagaatagtagaagcgcgttttgtttttcgggcgttagtgttcggggttagcggcgtgtattcggcgggttcggtcgggagcgggttggcgatcgcggggttcggcgttttcggttttcgcgttatttttcggcgttcgttaatttcgtttcgttcgcggcgtagagaagttcgtagtttttcggagttttagcgattttttggttcgtttttttcgtagtcgtcgagtagcgtaggttcggcgatttcgggtgtagttggttttgtgcggtgatatcgtcgttcggcgttaggttcgaagtcgtttggtcgcgttcgcggggtcgtaggtcgttggtttcgttcggtcgcgtttataaattattcgcggttcgtgattcgggataaatttttggcggcggcgtagttttttttatagttattttttttagagttagttattaaaatagaagacgcggtcggggcgaggaggtgggcggggggagttcggtggtcgttttttttcgcgcggttgacgttcgtttcggcggcggtagtggttgtggtcgcggggtcgtttttagtcgagttttcggaggcgttcgggcgcgggtcggcggggtacgggcgtttacgttttttagcgggtcgcggcggcgtcgggcggtcgtgacgtgagcgttttttttagtcggtttgcggggtatcgttagttagtcggggagtaagagtttcgcgcgtagtcggcgcgggttcggttatcggcgcgtcgtcgttcggggttgggtttggggttgtttgtggagaggcggcgggcggaacgcgcgcggttacggttacggttatcgttacggttacggttggtagttcgggtttcgggtttcgggtaggggaaggggagaggcggcgagtttagtaatcggaatcgagggaagattttggtttcgcgggttcgtttttcgttttttttgttagcggcgttagacgtcgagtggggttagggataggggaggaggatttaggattttgtgttcgcgtttttggagtcgttggagttcggatttttgtaattgttggtattttgggggtttggtttagcgttttgttgtttattcgttttttttcgttgtttcggaattaaagttttcggtttttttcgttttcgcgcgtttatttatcgtcgtcggggagcggttcggttcgtatttagtattatgaggggatttgggatttgtttggcgattttggtcggatttttgttaattgcggcgggcgagacgtttttaggtaagcgggatcgtttttgtcgttttcgaggcgcgcgggtcggcgcgggacgttcgggacgtcgatagttttttggtggtagagttttaaggttggcgtcggggtcgggcggggggcgcggcgggtcggatatcgtttttgtttgtgagtcgggcgttgggcgaggggtcgtggggttggtaggtatttagttttcgggcgggcggagcggacggatttcgagggcgagttttttagtcgggattgttagttcggtcgtcgttttttcgcggtttgggttagtgtttaaggttgggcggtttgtatttttgagtttttggtcggttgtaaaaggaatagtagaaaattttgtttgaagtttttagttgtagtcgtcgggtcgtttggcgtaggcgttgcgcggttttcgtcgatttcgagtagcggtcgggtttaggtcgttggtgttcggttgcgttcgtagcgatcgtcgggaattggcggtcgtttcggcggcggcgatttttcggtgttttgttttttttgtcgttttttgttcggcgcggttggcgatttcgggaggttttcgcggtcgtgtagcgtttgcggagaggttggggggagtttttcgtcggttttagcggtagggtttggcggtcgcggagggaagcgggtaggtttttaggttttggttacggttttgcgtttcgttgggttttttttttttattttcgtttttttagcggagcgtcgcggttagttgtaatttgtttatttagttcggttgttcgggggttttaggtgggaaggagaggtattggcggtgtgcgagtaagcgtgtgagtgtgtgcgcgtgtgtgtttgtacgcgcgcgcgggggcgttttaagtttagaggaattttttacggagaggatttgtggatcggagtcgggggttcggcgtgggggcgaattcggtacg

SEQ ID NO: 6345 - DNA, 882 bp, synthetic construct
  misc_feature 1..882: note = Description of Artificial Sequence: Synthetic polynucleotide
  source 1..882: mol_type = other DNA
gcgaagtgattttttacgtttggataaagcgttcgaaagtttaggttcgcgggttagttttagtcgttgggtttgataggggttagggaggcgggtcggttttatagttaagttatagttttagggtttggtcgtatttgagtagcgcggtttcgggttgttgttggcgttgtaggtttcgcgtttgattttttagtttgcgtagcgggtattcggtcgggaagaatttttttagtaggcggtttagtattacgtttacgcgttcgcgttcgcgttcgcgttcgtggtcgcgcgggttttagttttacgtagcgtttatagatcgtgagttcgtagggtagtgttatcggtttgtgtagtagtttcgggtagttaagtaggtcgcggggcgcgtcgggcgttagggtcggttttttttagttttgagttcgtcgttcggttttttcgttaatagtggtcgttcgcgtaggtcgggatatattaggtcgttcgttagtttttttagttttttcggtcgtagcgtttttagtttttcggttatacggaacgcgtttagggttatcgggaggcggtcggcgcgggttagagcgttttttagttttaggtatcggtcgcggtcgggttgcgttagtcgggttagtatggagcggaagagttcgattgttttttggtattcgttcgcgcggaaggtttcgtcgtttttttttaagcgttgggcgattggtttttcgtagtagtagttcgttattggggcggcggcgggatcggtttagtgttgattttcgcggggttgagatcgtgcgggtttggagcgaaggcgcggagtaggggcgatgagttgttgttgggaattggtcggcgggagcgcggttatagttttcg

SEQ ID NO: 6346 - DNA, 4359 bp, synthetic construct
  misc_feature 1..4359: note = Description of Artificial Sequence: Synthetic polynucleotide
  source 1..4359: mol_type = other DNA
tcgtgttttacggaaattattattatcgtatttataggtttcgaggggcggatataaagttttttgggggaagtggggtcgtagatttttttcgattcgaatatagattcgtatagggcgcgtttgggcgtagtttcggattttacgtcgggttcgatttggttgtttttggggaggatgtaagtgttttttagcgagggcggttgggggcggtggtggtgggagggatgggtgggggggtggtgggagtggtgtcgtgtcgtttcgtttagagtttcggcgtagtagttttgcggggcgggcgagtttagtttggtgttaatgttcgcgatgttgttgagcgtggcgatggagacggcgtcgatgtagtggttggtgtaggttttggagagtttggtcgttttggagagtatttgtattcgagtgtttagtaagtttttgtcgatggttttgttttcgtattaggttatatcgttttcgttgtagtggtttcggggtcgttggaagaacgttttgtagagagggttgcgtttcgataggtatttgacgaagttggcgtaggggtagaattcggtgttcgttttatatatgcggggtaagtttttttcgtcgttgttttcggcgcgttttttgttttacgacgacgagcgcgatttgtggtagggttcgagggatttgaagtagacgaatttgcgatcgttttcgtttatggttagtttaaaagagtttttttttaatttacgttggttttcgcggtcgcgggtatagaagtatatgtacgtttcgaattagattttgttgagtagttcgaagggcgtgttggtgttgaagacgttggaggtgtatagtttgcgtaggtcggcgcgcgtgatggtttgtttttgtattatcggttcggcgttttgtttttcgagtttgcggatgatcgcggttagcgttaggttggcgttgcgtagttcggggtttttggtgaggtcgagcgtgcggtagtacgggggtttattgaggtagcggttgagggagttgcggatgttgatgagcgacgatttgttgtagagttggtcgtttttggagcgggtttcggtatagaaggagcgtagtacgcggtatagcgtttttttgtttatggtttcgaagttcgggttttgcgttttttcgtttaggtattttcggaagatgcgtacggcgtagcgggtggttagtcgggtgttttcgtttagtcgggttcgttcggggcgttgtagtacgtcggggtttagttcggagtcgttttcgggcggtttatcgcgggttcggggcgttagtagtcgcggcggcgtttcgggttttagcgcggcgttttggtttatattgattatatggatcggttcgggttttagttttttttcggtcgagttttcgggttttaggggttcgttttagtttagttttattttttttttttttttttttttttcgtttttttttagttttttattttcgttttttttttttttttcgtttttcgttatttgtattttttggatttcgtttttttttttttttttttttttttttttgttcgcgttgtagtagtgcggacggttgtggcggcggtcgcggtttttcgcgtcgcgttcgttttcgtttcgttttttattgttttcggcggcggcggcggtagcgttggcgttgtcgttcgcgttggtgttatagttttcgttgttaggtattttcgttatattgtcgtttttttgttagttttcgggtagggcgtatgcgttatattggatcgtagcgttgagagtttttgtgtttaatgatttttagttatcgggaggtaaagtcgggtttttaaaggagtcgcgttttaattgttattttcgagcgtagtttcggaggggtagcggcgcgtaggggatggaggggaggggggagggggggataagttagatcggagagatagggtaaaggacggaggttgattagatttttttttttttttattcggtttttatttttaagaaaattttgaaggaaaaaaaaaaggaaagggagggagagttgtcggtgggggcgaaatatttttaatttattttttggcggagaattgcgcgggttcgggcgggagagagggagggtcggcgagagggcgggacggtttcgtttttttaagtaatgttcgaggagtagtgttttttttattgtttttttattgtttttcggagtcggggggtcggggcggcggttgcgtcgggcgggtcgcgggtgttgtcgcgggaaattcgtgtttggggtcgttcggagcggagcggagtaggtaggttaatgagtagggtggaggaggtacggcgaggtttcgtattttttcggcgttcgcggttagggcgtagcgggcgaggtttgggagcgggatggggttggcggcggcggcggtttttttatttatttgttggcggcgaggcgcgggggtttggggttagtcgcgcggtttttaatttttttttcgatttttgtaaaggagcgaaatacgttttacgttagttatatttttttcgatttttttaatagttatatttaagttgttattaaagatttggggcgtttttcgtaggtttggggtaagttcgcgtcggtttagttagtttcgggaaggagcgaggtagagaagattgggaggggtcggtgggaggggagacgagggaagaggcgtttgggattttaggggttatagggatttttttttattcgtttagggcgtcgttttttttgtttttgagtaaagtgatataattttttcgggcgaggcgttttattaagttggagttgaagtttttttaaggtttatcgggtaggcggaaaaagcgaatttgtgtttcggtcgattttgtcgtagttataattcggtaattcggattcggagcgtatttttatttaaagtttgttaatcgttattcgttcgtttttcgggttgcgttgttttaggcgcgcgggggcgggtatttcggaaattggaaaagtagttaaagagttcgtcgggtttcgtttttttataggagatattgttttatttttagttaaacgttcgttttcggcgcgtttaggtttcgggcgcgtttttgcgtcgtcgtttttcgttttttcggtttaggggtagttttttagagtcgtcggggatttcggttgtttttttaggaggtatagtttaggttattttcggagttcgtgttgtattttaatttttattttttttcgtagttcgtgtgtattttggcgcgcgggttagttgcgagtttttggggtgaggggatacgagggagttaggtttttagtagtgcgtttcggtgttaggtcgttttgttgggaggtagtttcgtttgtttttcgggtgcgttttcgaatttatttttaagttcgaattttcggtagttaggttgtgagagttatgttaattgtttgttttttttttttttggtttttttgttttgtttttaagggaagtattttacgtattaattgaaatttatttattaatttgtattttttttttttaagaaagaatgaaagattaggttttagggtagtgtgggtttttgagtgggagttgacgatgtttttttttgtagcgaacgttgttggtttttcgcgtgtttgttcggttttggacgttattcgagtttcggggaaatcgcgttaggtgtgaaataagttagagtaagtttttgtttcgcgggtcgttttcggttttttagggaaatataagatatatagatatatatatatatatatatatatatatatatatatatattacgtttttattcgttcggtttttcgcggagaatcgttcgggaatcgttttcgaggtgcggcgcgggaggtggtcggttttgtttataatgtattgttcgtcgtattcgttttggatacgtgtagaaaggcgtgttcgttttttcgaggttgcggtgagtagttaagttagttgtatattgggatttttatatacgagttggtatatattagttatatacggttaattttagagggttggttttttgttttgggacgtttttaggttttcgggtcgcggtgcggagaatttaggtgggtgttcggtaagttatttattaggggttgttttttcgcgattttcgttataagcgtagggattcgggggtcgcgttggtttcgggttgcgtttttggtttggtaggggattaggtttacgttgtagtttgggagcggagtcgttttttaggtttttttatttttgcgggcggcggggtttattttttttttattagtttttttttttattgggcgagttgttttgaattgttcgtagtttgtcggaggcggtgtgttgggttggacgtttcg

SEQ ID NO: 6347 - DNA, 2762 bp, synthetic construct
  misc_feature 1..2762: note = Description of Artificial Sequence: Synthetic polynucleotide
  source 1..2762: mol_type = other DNA
acgattcgggaggagagcgtggagtcgggtagggataggcgtgtcgtattatggcgtattatggatagggtttcgcgcggcggcggtttacgatcgtttaggggttgcgggagaaagcgcgagagattgcggaggttagtttcgtttagtttttgttttcgttttagtagtatttatttttcggcgggtcggagcgcgttaggttttgattcgtgaagattacggagcggggtaatttatattatttgtttttattttcggagtaggtattttcgagttgcgttcgtatttttcggggttgttagttggtagtagagtatttttttttttgtttcgagggcgataggtagggggatttttcgtggatttttttgtttcgcggcgagggtgggtacgtttttttttcgtaattttcgagggattttacggtaggcggagatcgatttgggattagggtattgtattcgtttagttagagggtttcggtcgaggttgtgtgaagtggtttttaggtttgggttggttggtcgggaggagtttgggggtattttcgggttggaggcggcggaaagttgggttgttttcgggttgggaattcgtagcgtgtagtggcgagggaatttgcgttcggattggagtaggtgttttttgtcgcggaggagttttttagtagagattaaatgaaaaggttcgttggttttttttcgagggtatgaaaagtacggaaggttttaggtaaaggcgttttcggggcgtatatagggtataggtagtcggatagagaaaggagtagtcgcgtaacggaatttttcgttcgggggagatattaggcgtgagaggttagattcgttttataggtaggcgttgatcggtagagattttttcgggtaagagggttagattttttttttaggtgggacgaatatagaatattgtgagggtaagagaagaagaaaaggaggtaattttagattgggataaagataataggatagtagagtttttgagtatcgggaggcgtacgggtgtagggtggggtaaggtggaggtaagtttcgtaattaagatattagagtgagaatttttattgtaaattcgcgatttatttttgtagaaataaataaaaaaattggagtaaagtattatgcgaggggcgaaaggtatagaaaattgtaaaatttgggagttattttgttttatttttttgttgtttggggatatttttcgcgagtttgttcggtttcgaagaaggagtagaggggattcgtaatttagtttttagagtttcgttaggaaaggcgcgagagatttattggtttcggtaattttgtttcggcgttcggacggagttcgatgtttgcgtagttatcggttgcgcggcgcggcgcggcgcggcgtggtattttttttttcgggtgcgtagttcggtttcgtagcggcgcggggaataaagggattcggcgtcgttcgttttatttcgttcgtggttcggttcgcggggatcgtcgcgtatttgaagtagggtcgttagtagcggtagtagggttcgtagcgttttcgttattcggtatatggaggcggagaggggtcgagcgaagagtcggaggaggcggcggcggcggcggcggcggcggaggaggaggaggtagcggtagtattaatagcggcgcggagaaacggttttaggtagtttttattttttttttttttttttttttttttattttttttttcgttgtttttcgtttttcgttaatggagagcgagttgatgataaatagcgggtcgcggagttcgcgggattcgtattaggagtaataaaatagatttagagattaaggagttggggagggggcgggggaatagggagggagagcgtgtgagcgtttgcgagtgtgtggaggcggttgttgtggtagcgtaggcggttcggtttcggttcggagcgtagcggaagtcgcgagggatgtagcggcggggattttggtcggtggaggatgtggaggtggaagtggagcggatggcgttttttaagagtttcgttacgcgaggtttcgggttcgtggttttgtttttttcgggttttcgttttagggtcgttcggcgcgacgaagacgtcggggatagcgtcgcggggagggcgtttcgggtcgtgcgtgttgtatttataaagagtagtagtttcgttatttcgcgttttcgttgcgtgggggtcgaggggcgtttttcggttttttttttcggtttttcggcgagttggagattgtttttcggtttcggtcgtaagggggtgaggcgaggggtcggcgcggtttttttcgtcgcggtttcgtttcgcgtagttgttgtcgtagtcgtttttgttgttcgcgtatcggtattcgttcgtcggttttcgttttgcgtcgtttattcgcgcgcgtcgtttttcgtcgtcgatcgcgtatttcgttcggttttcgttgcgcgatttgggcgagtcgtcgtcgtttttttcgcgttcgttttacgcgttgtttggttgcgcggttcgttttttttttttatttttttcgtcgtcgtcgtcgttttcgttttcgtttttttttttcgttgagttttttcgttcgcgtcgtggttaatcggaggttattaagttgcggttgtagtcggtcggattcgcggtagtcgttcgttttcgtttcgtcgaagcgtttcgtattttgttgtagttcgcggggggtcgtcggagggaagtttagagtgcgtcgagtatcgtttcg

SEQ ID NO: 6348 - DNA, 338 bp, synthetic construct
  misc_feature 1..338: note = Description of Artificial Sequence: Synthetic polynucleotide
  source 1..338: mol_type = other DNA
tcgcgggagtcgcgtaggcgggcggttagggggagtgggcgtcgttcggtagcgtttcgcgtcgaggtataagcgttcgcgtcgaggtataagcgttttcgatttatcggtttcgcgcgttttttcgcgcgtttttcggattcgcgtttgtttattttttcggttttgttgcggtcgaggttttaagtcggttatttcgtgtttaggtaatcgcgggggcggcggcggcggcgtgaggagcgggcggttgttgtttcggggttttttggttcgagtttttagttttcgattttcggcgtttcggcgttcgattagcgttttaggtcgttttcgtttcg

SEQ ID NO: 6349 - DNA, 1435 bp, synthetic construct
  misc_feature 1..1435: note = Description of Artificial Sequence: Synthetic polynucleotide
  source 1..1435: mol_type = other DNA
tcgcggtaacgatttttgggagtgatcgaggtattcgggttgtttcgtgtttttcgggtagcgatttaacgataaaatttgatagtgttttggggaaaattttatatttatcgttagcgttatattcgggttttatgttaataaggagatattgtagattatcgattagattcgtttgtttttagagcgtgcggtcgggtttttagtttggtttttaggcgcggtggcggcggtgggatacgcgttaggcgtttagagaaggatatgggataatggtttagttcgaggacgttagacgtcgtcgttcgattcggggaaggaagtttttgtagtcggttcgggaattcgaggcggggagggaggttagttttggaggtgcgttgtcgttttaaaataaaggattataaagattgtatagtggggaaaacgcgtttggttaatgcgagtggggacgatttggggagggggttgaggaaggtagggggtatacgagttaacggcggtttacggttttttttttttttcgtttttttttttttttttttttcgtcgggttgtttcggtagataaataatagaggaaggcgagttatttatcgtggttttgataggtacgtagagtatttgtttggcgtcgtcgtttttttcgcggatttcgttcggttggtttagttggaagtttttcgatttgatttagaatttaaatttggcgttgttcgtggagttcgattcggagttattgaggagttggacgattcgttcgtattttttacgggttatcgttttggttttgtttgagttttcgtaagttttgaggtattagttttggaattggcggtatatgtcgcgttcgttttttatgtttttcgcgttcggtcgttggtcggatgtttttagcgtatttcgtatttgtttattttaggtttatgaaaaatgtagtttcggttacgttgtagggatgcgaggtttcggtcgtagcgggagtttgttttgggtgggggaagggatgggaagaggggaggagggttcggttgggtattagtaattaatgtttcgtgttattaagtttggtttattcgtaattgtaacggttgtttcggacgttttttttgtttttttagcggtcggtttttttaatattttgtgattaggattattttaatattattttggtttagaggagttgggtttttaataattaaaattttattttttggtttattaaaaattttaatattgaattggggtggtttttagacgtttcgttttcgggttgcgttcggggttgggtaggtggagcgtagcgtcgttttttcgcgcgcgttttagaagtttttttagttattggtttcgtggtttaggagtgagggttgcgtttttttcgaaagtagtcgttcgtttagcgtttttgagtttcgaagggtatacgggtttcg

SEQ ID NO: 6350 - DNA, 510 bp, synthetic construct
  misc_feature 1..510: note = Description of Artificial Sequence: Synthetic polynucleotide
  source 1..510: mol_type = other DNA
tcgaggcgcgatagtttattaaagacgagggttggttttttaaataaatcgcggtgattttatttgcggcgtttttttttacgtcggttttttttttttttattagagcggttcgcgtcgattcgatgggcggattcgatcgcgtacgcggttcgcgggttcggcggaggtagttttcgtttcggggattcgggacgcgtcgttttttcgttttaggttgttcgcgtaggaattttacggttacggttaagtggggtttttgtttcggatttcgttgggttcggacggtcgagagtttagggatttgggggggcgcgcgggttttcgagtttaggcggggcggcgggcgttttgtcgtttttttttcgcgcgtcgcgtcgtcgttcggtttttcgaagtcgttttttgtcggcgcgtcggtcgtttgcgttacggcgggcgttatttatttcgggtagagttttttgttcgtgtagcgcgttttgggtttttagcgttgatttacgttcg

SEQ ID NO: 6351 - DNA, 2722 bp, synthetic construct
  misc_feature 1..2722: note = Description of Artificial Sequence: Synthetic polynucleotide
  source 1..2722: mol_type = other DNA
acggcgatggatagtattttcggttttcggtcggttaggagttcgcgagttcgttcgtttagcgttttgggttcgatcggtgtagttttttttatttttattttttaggtcgttgtatttaaaaatttaagtttcgttttttcgattttttttttttttttttttatcggcgttcgttgttttttttatggtatcgtttttattagtatttcgtttaaaatttagttttgttttagcgaatagttttttacgtattttagttttggttttcgttgttcgagcgtttttttttatcgcgttcgttcgaggttttttttcgtttagttcgtcgttcgttagtcgtcggtcggtcggtcggttcgttagttcgtttttgtttttcggtaaagttgggagggaaaggtgtatttatttttgtgtatgtttgtgaatttgttttttagaatcgtaagttcgtagattttgttaaatttttcgaagaggggtttgaggttttttttatttaggttgcgggggatttgtttaatgaatagtttgatggtatcgtggttttttatgggaatggtcgacgggtttttcgggttgtggtttaattcgtttatgtgttcggtattgttcgggttgttgtcgagttcgttggtattgaggtttgcgttgttagtttgttcgtttgttaacgtggttatttttatatatatagagaaaattttttttttttttattttttttcgtttatattttttcgtttttttttttcgttcgttcgcgtttatatacgtatacgtatatatatattcgggttttttttttttcggtttttttatatttcgtttttcgttcgttttttgttttttttttttttttttttttttcgttcgttcgcgttcgcgttttttttttgttttttttttttttttttttttttttttttttttttttttttttttttttttttttttttttttttttttttttttttttttttttttggtttgatttgatttttttttttttttttttttttttttttttttttttttttttttatattgaatagataggatttttgtttttttcgtttaaataggttggatcggtttaagtttttagttagattaggggtgggggtggcgagtgtgcgcgcgcggaggagggcgcggggggtcgggaatgggcgcgttgtgggggttcgcgttacggcgggcggcggtcgggggtagggcggcgtggggcggcggttatcgcgtttttttcgtcggcggtttcgcgtcgtggcgatggtatagttcgagacggttttcggttataaatagcgttaggcgtatggtttttcgggaggcgttgagatttcgggttcggcggtcgcggggagcgggtgttcgtgaggagtcgggtagtcggttttttttttttgttttttgggggttttttttgtaatagtagtaggtgtaattttttgtattttaaaaatagtgatttttattttcgtgtgggtatgtaggggggttttatttattaagttatgttttattagggcgttaggcgggcgaagtaaaggtagggatggcgggcggggcggcggcggaggtggaatgggcgttttttttttttatttggttttatttatttatttagattagaaaagcgagtcggtttggagggagttcgttcggggattcgagcgcgtatttattagtgtcgagagaaaaaaagttatataaatatatattatgtggataaatttatagataagagttttttcgcgcgcgttttttttttgtttttttgtgtgtgtttttttttgttttttttttttttttgtatttttaatttgttagagtagttttatatttttttttcgttcggtatttatcgttatttaagttatttgttaggatggggttgggagttgtcgggtcgcgtcggggggtagagggacggggagtagagattcggggttcgattttcgttttaattcgttttcgaaggcggaaggtgggggttttcgtttcgggcggtttttttcgtttcggagagcgcggttggtttttcggtggttggcgggaggaaggtaggagtcgggcgtttttgttcgttcgttcgtcggagggggaggaaggcgttgggcgcggtggtcggtgagttagcgcgggggatggtttgatttgttttcgtttgttttacgggtttaaatagaatatatttttttaattattattaaaagaataaagtttttgaatcgttatttgggttgtcgtcggatcgagattcgcgcggcgtgcgttgttttcgcgggtttcgttttcggtatttatagttttcgaggtgcgaggttgagtcgtttttgtcgtggggatcgggggtcgagtcgttcggttcggatttcgtcggatttttcgttaggtttattggggttggtatttcggttgcgcgggaaagggagtggtaggcgcggagtcgggagtagggttcgagcggtttcgtttgtaggggtgaatattggtggtgaatttggttggggtagtagatttttacgttaatgatatttatttgtatttcgtttttttttatgtttgtttttttagggtagttttttcgttttagaagtttggtaaattgaaataacgcgttcgttttttcgcgggttgcggggttggggagttggggcggcggggttgagcggttggtttaattttcgtcggttttcggttagttattttcg

SEQ ID NO: 6352 - DNA, 1133 bp, synthetic construct
  misc_feature 1..1133: note = Description of Artificial Sequence: Synthetic polynucleotide
  source 1..1133: mol_type = other DNA
acgacgcggtgcgttaggtagagagtttggggagtgtgcgtgttttatttgtgtttgtatcgtgtgttttttttgtgtgtttttgagaatgcgtttttggtacgcgttttgcgttaataaggcgtttggtgtgtgtatgtttgtgtgatagtgtttgggttttgtttgcggttgtttgttcgtattttagttttttttgtgttcgtagttaggttttatacgtgcgttagttttcgagcgtacgttttcgagtgattcgtgcgcggtgtgtagggattttagggtcgtgtgtattaagggcgttcgtgttcgtttttttgtattaaggaacgtatttttatatgtttgagtgtacgtttttttttatgtgtgtacgtttcgtgtttacgtcgtttatgtttgtgtaggggcgttttacgcgcgtttttttcggttcgcgggcggttagggattcgcgttgggttttacgtttttcgtggggttgatttttttttcgcgtttcgtagcgggtcgtagcgattggtcgtcggtttttttttagtcgttattttttttttttttcgttattcgcgcgttcgcggttttcgttgtttttcgcggtttcggcgaggtcgcgtcgcgttgcgtttcgtttttattggttgcgcgcgtttttgtgtggcggtagttgcggttttagcgtttttgaatgtcgagaggggtcgggaagggagtttttttatgggttatttgttttttcgttagtcgtcgttttatcgtcgttcgcgtttcgcgtttcgtttttcgtttcggcggttttcgtagtttcgtcgtcgttcgcgttcgcgttttggagtcgcgttataaagggttcgcgcgtagtcgtcgtcgtcgtcgtcgtgcgaggagttaggatggttttggtttacgtcggttatttcgtgtttttagtgtttggttttgtgcgaaatagaggtatcgtttttttttttcggggtttgtttcggagcgtggatcgtcgtaggtatcggggcgggggcgggcgtcgcgggcggtcgggggtttagggtatattcgcgaggacgtagggcgagcggtggtttttttttattttattttagggggattttcgagggtgggggcggtcgttttcg

SEQ ID NO: 6353 - DNA, 2401 bp, synthetic construct
  misc_feature 1..2401: note = Description of Artificial Sequence: Synthetic polynucleotide
  source 1..2401: mol_type = other DNA
tcgaaggtgtcgttagttttagtgtcggtgggcgtttgtattaggaatagttaaagtcgacgatatttagttatttcgagcgttagggaagacgtttcgcgtaaaatcgcggttttaggcggattttcgttttagtttcgcgttgttggtggtattttcggggatttaaagtgggtggtttgggggtaaaggaatagaggtcgaagaatttggggtatgttttattagagtatttaagggacggagtgggaggttatattagatatgcgatttcgatatattttaaaagtggtagtttcgtgggttatttttaatagtgggatggatttttttaatttttttcgtttttcgaagtttttttgttatttcgggttatgtttttttttcgggatttttttgtgtaaaattatttttttttttgtttaaaggattttttttttttttttgattttacgaatttatttttttaataggtttttaaagtatgggcggatgtgttttttttcgtttatcgttaggagtcgagtttcggtaggtgagcggtgtaaaatacgtatttagttgtttttagtttttttcgttttcgttgagttggttgtttttatttcgtattacggtattcgagtttgtgagttttcgatttcggttttagtcgtagtcgttaataattttataataaataagaggataggattgagcgttcgcgtttcggagcgtattggttgggggtaattttttattttcggcgcgtcgttcgttgtttcgattcgagagtatcgggagagtcgagggaagggaaggcggcgaggggaaggtaggcggggatggagggaggtacggcgcggcgcggagcgaggaggtgggttgtaggggacgtcgagaagcggtggggttggcgtagagggcgggcgttcggggcgcgcgttattttcgttttgttttcgtagtggtagtatacggtttataggtatttgagcgttcgttagagtaagatgatgaagaggttttcgaagaaagttattatggaggaggttaggaaagtttattatatgcgttggtttcggttgtcgtacggtatttttatggttatcgggatgatgagcgtatttattttgggttcgtggattgaggacgaggaggaagaggaggaggaagaagaagaagaggaagaggaggaggaggaggaggaggacgcgtttaggttgagatggttcgcgtggatattgttatttattttaagattgttgttttcgtcgtcgtcgtcgtcgtcgttgttgtcgtcgtcgtcgtcgttattatttgttatagttagtaacgggtagtcggcgtaggggttcgggggagtttttttcgtcgttagcgttattttaaatatttattaatagttatattgttgttattgttgtcgtcgtcgtcgtcgtcgtggagcgcgggaggggggcggggaggcgtttgggttcggggcgttgtgcgcgatttggcggggtgcgtcgagatatatatagcgagtcgtcgtcgttcgttcgggggggagggggatggagtgcgcgggtagtttttttttttcggttcgcgtttcgttcgtttcgggttgcgttggtttcgagcgtcgagagttagggggcgtcgcgggtcgttcgcgttcggggtttgcgtcgttttcgggttcgtttcggtttcgcgcgcggtttcgggtgttttcggcgtcgcgtcgttcgtcgtgcgttacgggtgtgcgttgcgttcggtcggtgattttttttttcgagcgtttttcgcgcggttaacgagtcgtttttcgtttattaggtggtaattcgttaataatggataatcggtttttttcgttcgggcgtttttgcgttagtttttttttttcggttgcgttcggtttcggttcgtcgcgttagtgcgcgttcggtcgcggtaggtttatcgcgttcggtcgtcggttcgtggtcgtttgttagtttatgttttcgggattttttagttttgtcgttacgtcgttgagtttttcggttttcgttcgttttttttttttgtcgttttcgattttttttcgttttcgttttcgtcgtttaagttttttcggcgcgcgtttcgcgtttttcgtagtcgttagtagtagtagttgtagtaattggagcgggcgcggatttaggacgatttaggcgggaggggaggaggttcgtcgcgttggttcgtttgggtttcgggttgggtaggggtgggtagggtttttcggtagcggttcggtaagcgtttttgatttttagggcgtaaggtagagcgtttttagtttaggcgcggggttaggcgtttttttttaaggtgttgcgtttttagtcgagagcggtggggtatattgggaggacggcggggcgtttcggttaggtcg

SEQ ID NO: 6354 - DNA, 769 bp, synthetic construct
  misc_feature 1..769: note = Description of Artificial Sequence: Synthetic polynucleotide
  source 1..769: mol_type = other DNA
tcgggaacgaacgtgcgtggggtagtttaaatttttgagtttagatttcgtttttcgcggttagatggtgcggtcggtggggttcgagggatgcgtatagttgtgtttgagaggtgttgttttttcgttatcgaagtcgttgggaaattttgttgtattgagatattttaatgtcggatgttttaattttgcgggtaaaaaaaaaaaaaaagtttgaattaggtattgggtttttgttacggtgaattttattcgcgtttcgcgtcgtttttttatttatttaggcgaggtggtttggatttgtatttcgttgaagaagttttttatgcgatattttcgttagtatttcgcgcggatttggttgggcggcggcggggagttagtttgttatcgtacggcggtcgggatcgtagtttttgggtgcgtagtgcgtttttcgttgcgtttttttagagcgcgggtttcgtgtttgtgttcggcgcgacgcgatttttttgttagtcgggtttcgcgtgtttttcgcgtttttcgtagttttcgcgtagttcgtagcgttttttagtttcgtttcgcggtcgcgggaattcggcgtttgtagtttcgttcggaatcgatcgttaggcgttgttgtcgtcggttacgtaacgcggggtttttgtttggtattagttttaggtgttttgtttcgggtcgtgttgtcgcgcgatattggggatttaataggtcgtcggttatttagttggtttcgtagtttttttgcggtttagcg

SEQ ID NO: 6355 - DNA, 1169 bp, synthetic construct
  misc_feature 1..1169: note = Description of Artificial Sequence: Synthetic polynucleotide
  source 1..1169: mol_type = other DNA
tcgtgtttttttcgagtggatttggtttcggttttaaatttagtcgagggtcggttcgtttttggggattcgcggatgtcgcgagggggcgtcgcgttattgaaggttgggacgggggcggtgcgcggggcggcgtcggagttcgggatgtcggttttagagacgtcgcgtttcgtttcgaggaggtcgtcggtcgggtaagcggagttcggagttcgcggagtttggatcgtaggtaaagttgagcgcgtcgtggggtcgggggtggggggttcgcggcgaaggagtcggggtcgtagtgggcggtggggcggggggcgcgggtttttgtttgatggtttcgcgcgtagtttttttttcgggtgcgcggtgcgcgcgggcgcgggagggtcgaaggggattttggaatttttttgttcgggttaagggggcgggggcggttcggggtcgggcggggttggtgtttttttttttcgtttagcgtttagagttcgggagtcgaggggggcgtcgggtcggaggcgttcgtcggtttggtcgcgtcgcgcgcgtggatggaggtttcggtcgcggatcgtttcgtttattcgcgttggttttgcgggagttcgggtgagtcgaaggcgaggaaggggcgcgggtttcgggaaaattcgattttttcggcgttcgtttcggttcggttgggggcgtattcggttcgcgcggagagcgggcggggtgtgggcgaatgttcggcgcgttgcgtttttttcggtttttttttttttcggagatgaacgttttattttcgttcggatatacggtcgtatttttattttgtttttttcgattagtcggggcgcggttcgaattgggggagagaagatttagttttcgtagtcgcgaattttgtaaattcggagtttatgcgtttcgtttttcggttcggggagtttttagttttgttcgtcgagcgtagttcgggttcggattgtggttattggggacgagaagggttttttttgcggggttttcgggttcggatggacggagggggcgttcggtaggtgaattgggttcgtttcgcgtttcgaacgtttttttaaatttataagtttcggagattttggggtattttgcgatttcggagtgatcggtggagttttcgttcgcgcgtttggttttcg

SEQ ID NO: 6356 - DNA, 6036 bp, synthetic construct
  misc_feature 1..6036: note = Description of Artificial Sequence: Synthetic polynucleotide
  source 1..6036: mol_type = other DNA
tcgtatagtttgattatcgtgagtaacgcgtgcggtacgttttggaatttgtcggttcgtagcgttcgtgattaggagttgttgtgggatttgggcgtcgtgggtatgttgcgtaatttggtgtattttaagtataagatgatcgttatgggtagcgtcgtcgttttgcgtaatttgttggtttatcggttcgttaagtattaggcggtcgttatcgtcgtgtttttaggtagttgcgtgtttagtttgtacgtgcgtaagtagcgggcgttggaggtcgagttggacgtacggtatttcgcgtaggcgttggagtatttggagaagtagggttcgtcggtagtcgaggtcgttattaagaagtcgttgtcgtttttgcgatatttggacggtttggtttaagattatgttttcgattcgggttgttttgacgacgacgatgtatcgttatttttggttgcggtcgcggttatcggggagttagttagttttgtcgcgttgtttttttttttgggtagtttttttttgtaggggtaggcgttggttcgtatttcgtttattcgtcgaggcggtaaggaggtagagaaggatattagtggggaggtagtcgtggcggttaaggttaaggttaagttggcgtttgtagtggcgcgtatcgattagttggtggaggatattttcgttttgtatatttcgttcgacgatagttttagttttagttttggagattcgggataggaggcgttacgggagggtcgcgtttagttttgttcgttatgtcgcggttcggagggcgggcggcgagaggtaggaagtcgggcgtattcgttgttgcggtttaaggcggtttacgttagtttttttaacgatagttttaatagcggtagtgttagcgacgggtattgtttacgcgaatatatgttgttttgttcgttggtcgtattggtttcgcgtcgcgaggattttaggtgtgggtagtttcggtttagtcggtttgattttgatttgttcggttgttaggtcgagttttcggttcgcgaggttattttcgtcgacgttcgcgtgcgtattattaagttgtcgtttatttattagtacgtgttattgtttgagggtgttttaagggcgggtgtagagtttttcgcggggtttggaatttttttaggggttcggaagtaggtttggttgtcggtagattatttgagtaaggttttcgagaagttggcggttgtttcgttgtttgtggttagtaaggtattgtagaaattggcggcgtaagaggggttattttcgttgtttcgatgtagtttttttttttcgttgttttcggtcggtcgtttaggttttagcgagggtggtgatttggatgatagtgatttttttttggaggggttggaggaggtcggttttagcgaggttgagttggatagtacgtggcgggcgttcggggttatttcgttgttcgtagttatttcggtttttcggcgtaatcgaggtcggggtttgggggtggaagacgttacgtcgtttagttcgtcggagaattacgtgtaggagatatcgtttgtgttgagtcgttgtagttttgtgagttcgttgggtagtttcgagagttcgtttatcgttagttttatttttagtgaattttgtagcgggtagggtagcggtattattagttttagcgagttgttcgatagtttcggatagattatgttttttagtcggagtaagacgttatcgttggcgttcgcgttatagggttttttcgaggttatttagtttagtttgtagtgggagagttacgtgaagcgttttttggatatcgtcgattgtcgggagcgttgtcggttgttatttgagttggacgtaggtagcgtgcgttttatcgtggagaagttagacgagaatttttcgtgcgtttttagttttagcgcgttggttttgtacgagtattacgtgtagtaggacgtggagttgcggttgttgttttcggtttgtttcgagcgcggcgggggcgtcgggggcgtcggtttttattttgtagggtatcggcggcgggaggaggggtcggcgtttacgggttttcgttttcgcggcgtcgcggattaggagttggaattgttgcgggagtgtttgggagtcgtcgtgtttgttcggttgcgtaaggtggttttcgcgttggtgttaggtcgtcgcgtatttttcgtgttcgtttatatgttggtgttcgtttcggtttcggtttaggaggacgatttttgtattgatttcgcggagggtacgtcggttaatttttttagcgtcgtttcgtttagcgacgagacgttgtagggattttttagggattagttcgggggattagcgggtaggtaaagatttatcggtcgttttatttttgttagataggttatggggtatcggtataaggcgggaggcgtcggtcgtagcgcggagtagtttcggggcgcgggtaagaatagagtagggttggagttgtttttgggtcggttttcgagcgttttcgtagataaggacggtttaaagttcggtcggattcgcggggacggggcgttttagtcgttgtgttttacgacgtttattgaggaggtcgtgtattgtttttacggtaacgattcggacgaggagttttcggcggtcgcgtttacgttaatttatcggcgtatatcggttatttttcgcgtttttacgcgggagcgttcgtagggtcggaaggaggtttttgtttcgtttaaggttgtattagttgtttcgtcgttcgttcggatttagtttagttttattgttgacgagatttcgttttgttattttttgagttttttcgttagtttttttagcgagttcgagttttcggagtcgtcggtcgtttatttacgaggtcgggagttcgcggttattaaggattcgggtttaggaggcggacgcgatagttcgtttagttcgcgggtcgcggaggagtttttgtagcggtgtattagttcggttttgtttaggcgtcggtttttcgtgtttggtttgcggcgtcgtaagtttcgagttattcggttggatgagcggttcgtagaggggtttcgggaacgcggcgaggaggtagcgggttcggatcgggttttcgatttggatagcgtggagtggcgcgttatttaggagggcgttaatttaattgttacgtggttgtattaggtagtagttgttacgcgggaggtttcgttcgagttcgattttattttgtttttcgtattcgggttgttagtgggatttattttatagttttttaagtataggaagggacgataggcggagggagaaatgggtagtgttcggcggttagagaaaaggggcgtagttttagttaagattagcgggagttttcgtttttttgtaggtttcgagaagttacgtggtatatagaagattacgttcggggtgttagttgtgtttcggggacgaatagtgatttacgtttttagttcggtatttcgtgtttagtttaaagggattttcggttttcgcgttatatcgcggaaggtggcgtttttttgtttggtatagttcgcggttttagttaaagtttcgagtttcgggtagtagcggtcgcggagtttatatcggtttgttaagatttcggagttggcgacgttgagttagttttttagaagcgttatatcgttcgttcgtttcgttaagatttttttttttagttttttttagatttcgttcgttttttagtttttgtttagaaagcgtttttcggttatttaggttgttggggttttgttcggtttcggagttttttcggtgtttaaaacgtcggcgcgtatttttttggcgaagtagtataagacgtagagatcgttcgtgcggatttcgtttatgtagaggtcggttcggcgtgggtcgttatcgttggttcgggtagtttcggagtcgggttttaggggtcgggcggggatcgaggcgggttcgggggcgcgcgggggtcgtttgggtttggtgcgtgtggttttagttttttttagcggtagcgagtttttcgatcgttcgggttttcggcgatagttaatttttattaaggagtcgtcgggtttgcggcgtcgtcgtttcgagttgttttcggtcgagttcgcggtttttgttttttagggcgtttcgtttcgtcgcggtcggttcgcgttgttcgtcgtttttttttgtttttcgcgttgcgaagagtttcgagcggtatttcggtagggttcggtttcggttcggtagcggtttttcgcggttcgatttagttttggcgagcgttttgttcggtgtattattttcgagagttcgtttcgtttgtttgtgcgcgcgttcgtcgttcggtcggagattgttaagcgttacgcgtcgttgtcgtatattagcgtggttcgtaggttcgacggcgtcgttttcgcggtttttgttttagtcgacgtcgcgcgtcgtagtagcgacggggagtttcggtcgttttttagggtggtcgcgtcgggtacgatttggcggcgtattcgagatgaggacgtgttttatattttgcgtagtacgtttttcgttacggttttgttattgcggggttttacgttcgaggacgtttcggtcgggttttcgtcgcgtaagattagcgacgtcgtggtttagatcgaggaggtcgtcgtttttaagattaattttagtacgttttcgagtttggagattagggagtttttcggggttttcgtcggcggttagtttttttttttcggtagcgacgtggacggttttagtttcgttaaggtttttattttcgtatttttcgtgtacgagggtttgggggtcgtcgtggggggttttttcgttagtcggtacggtttttttagtcgttcggttcgagtatttttttttaattatgtgtttagttttatggtggtcgtagttattatcgattcggtcgcggagaaagtttcggttattgttttcgttatttttttggaatagtggtttaggtcggttttttggaacgttttttttcggttttgcggcgcggtttggttgttttatgggtttgcgttgtagacgttttttataggtcgttttagggtttttgtttattcgagttttattatttttagaattttcgtttagcgtacggcgatttcgcgttttatcggaagattttgtttttgtgtcgcggaggtttaggaggaaacggggcggtcgttaggttttaagtttcgatcgtggagcgttggtaagggcgttttggtttagttttgagcgcgcggttttttttttgtcggaagtcgttgtttgatttcgggcgagggaggcggtagttttcgggttcgggtttgggtttgggttcgttgtttcgtagggatagcgttggggaggtgacggcgttcgtcgtaggtggggcgaggttgggggagggcggcgtcgcggcgggtttgttagttgggggtttttgcggcgcgtaggggcgaagtttgtaattattgtagtcgtcggtaattcgttaatgagggttttgtagggattgtttttatttttagttttagttgtgggagtgcgggtgggggtgtggtcgagtttcggtaggaagtttcgtttagacggtgtttagggaattcggagtttaagcgtttcggcggagtttaaaagggtgggggtgggaggggtagaggttaacggatttttttgtttgtcgtattttttggcgggagacgggaaggtagcgggttgcgtacgatgggattttggtgtagacgtcgggtcggttgatatttggattttattttagaggagatgttggttattagttggggcgattttaagggtcgttggagttagtatcggttcggcgtagtcgcggcgggcgaggttaatggaaaggagattgaggggagtttcggtagtgagttcgaggttttgggatttggagttcgcgttggtttttttttagcggagtttgtacgttacggagattattatatgtgggcgtggttagtgtttaggatcgtatcg

SEQ ID NO: 6357 - DNA, 3400 bp, synthetic construct
  misc_feature 1..3400: note = Description of Artificial Sequence: Synthetic polynucleotide
  source 1..3400: mol_type = other DNA
gcgtagaattagtggcgatgggaggaaggggatcggtagagcggggttgggtaagtttttatttagtcgggttgagttttggttttcgtagagtttttgtttttttcgagatattcgttatttggtgttagcggtggatcgttttgcgggggtttggcgcggtttcgggttggttttgattttgtagtttcgcggagagggtaggttcgcgtggagagggacggggagtcgggtcgattgttttcgggtttttagtttttgagttagtcgcgtgtttatttatcgtagattttcggttgagtatcgttcggttgtaggtattgttgttcggcgacgattatcgttgttttatacggatgatttcggttttgtttttgttgtcgcggttcgagttcgcgtcgttgtttgcgtacggttagttggatatcgtgtttttttcgtcgtttaggtgcgcgtaggtatcgggatacggggtaggagcgggcgggggcggcgtggtttcgtggtcgtttttaatttttttaattgcgggttttaggttattcgcggaattcgaggagtcgttatttagcgtagatttttttttggagacgtttacgcgtttggtgcgggcgttgcgggttttttcggttcgggttttcgcgtcgcgtttggttttggattcggacgcgttggtcggtttttcgtagggtttagttaatttgtcggatttcgcggcgttggagcgtttattcgacggcgaggagtcgttgttgttgttgttgaggtttattgcggttattatcggggattttgcgtttttgtacgattttacgtcggcgtcgtgggttacggttttggcgcgtcgcgtggttgttgaattgtaagcggcggttgtcgagttgcgaagtttttcgggtttgttttcggttatagtttcgttgttggcgcgtttgttcgcgttttgtttaggtggtttcggcggtttcggcgattttttgcgagcgttgttgtttttgaaggcgttgtagggtttgcgcgtggagtggcgcgggcgggattcgcgcgggtcgggtcgggtatagcgtagcgcgggggttatcgtcgtcgacgggtcgtgcgcgttgcgcgagtttagcgtagattttcgcgtcgagcgtttcgtatttattttcgagatttattaggttaataattgttagggcgtgtgcggttggttttagttcgatcgtaattcgcgttacggtaattacgtggtgttgttgttgaagatgtaggttcgtggggtcgttttggcgcgtttattttgttgcgtgtttatcgtttacgcgggtaagttgtttattagtttgtcggaggagcgtattagcgcgtattacgtgtttaatatggtggttatcgagtgtggttgtcggtgatttttgcgtcgcgcggatttttgtttcgagggttcggacgcgttttagttcgcgtttttttttatatttattcggattttaagtatcgttttaataaagattagtaagtaatcggttggggtgttcgtgcgtgttagggggttcgtgggattttttttgtcgttttttttcgcgtacggttcgggttcgttttgtagcgttcgttgttttttttttgtttgaagcgttttattatcgttttttaggtttcggatttggtgtcgggtttaggcgtaaaggagtaggtgattttgcggtcgtagtattcgttttatttcgttagagtcgcggggcgtttagaaggggtttttggatttcggcgcggggtcggtttagtttcgttttttgtttgcgcggagtttttggcgatttttaggtcgttgtttttcgtcgggacgtttcggggatatttaggtttgtttttttttgggttcggcgtttttggagtttcgtgtttacggtcggtggtttttttcgcgtgatttttagcgttggggtagggtttttcggggttttttggcggttcgtggtttttttttttttcgcggttttttttttttaggtttttttttttttcgcggttttttttttcgcggtttttttttttttcgaggtttttttttgggttttcggtttgcgagggttatacggttttttcggacggttttttcggtggtttcgtcgggttttttttcgtcgttttttgtagtttttcgattttcgggaattttgggtttgatttttgtttcggttcggggcgtaggcggcgttgatggaggcgtttgggtttcgaatttaggttgtaagatagagtggggttttggggtaagcgtttatttttttttcggttcgggttttttttttttttggggatgaaggttttaatgttcgcggttagtggaaggaagtttttattaggggcgacgatggttttttcggggttgagtttggcgggatttagggttcgggtatacgtgtttggagtgttgtttttttagggacggcgtttgtagcgatagggtcgggattcgagttagttgggtcgaggtacggtttatattgtttattttttttttatttttagagtttttttttttggatagttggagtggggttttttcggtacggttgagattaaggatgttttcgagtcgtgggaagggatttcgggatttcgttgtcgcggcgtttttttttcgaatttcgtttttttaattggttattttttttttcgattacgggttgtaggaggtttttagtaagggaggggtcgtaggagtgttttcggggggcgtttacgagttgagcggtttttagagagggcgtaggggaaaggcggtagaacgttacgaggtaggaggggttgtataaggtttattcggaagttagaatttattcgcggcgaggggaatgggtttcgtaaaaggtttatatcgggtgagaggggcgcgtaaggttcgttatttaaggggagatgtataaattaattttgggggcgtgtaagatttagttttggagaggaggtttttagattttattttggcggtatagcgtttttttttggaggaataggcgtataggtggattttagtttcgttttatttttggggagtttgcgtttatcgcggtatagttggaaagtcgagtttagtagcgttattagcgaggcgagtattaggtatttgttgagcgataggtttttttagggtagtttttcgtttagggtcgggggcggcggcggcggttgtaggggcggcgcggtttgcgtttttttgcgcgcggggacgtttcgagggtttgcgggggtaagtgcgcgttgcgttgtggttattggttttgtgtcgttttttttttcgggcgtaggggataagagataggtttgtgttttgaattcggttttttttgtttgtttgtgcggtttcgggcgtaggtgaatttagtttcgggtgtttcgtagttgtacg

SEQ ID NO: 6358 - DNA, 1143 bp, synthetic construct
  misc_feature 1..1143: note = Description of Artificial Sequence: Synthetic polynucleotide
  source 1..1143: mol_type = other DNA
tcgatcgttagtggttgggaagtgggcggtgttggggggtgagtttcggtttttttaagatgcgttttttatgaaattttttagttttacgtgtatttatacgtatacggatgtatgtatacgtatagaaatatatagggttcggatatagttgcgcgtagataagtaaaggattacgtttacgtggaaataggtgtgcgtatacgttttcgcgtattcgcgcgtataagcgttttatatttgggaacgtgcgtatttgtttttcgttttcggtatatatatagtcgttttatattggaatatttgggcgttagcgtcgggttattcgggtacgtagggcgttacgtagggtcgcgtatacgtttttcggttatacgcgtatagttttttacgtggacgcgcgggtatatacgttcggggttcgtagtcgcgtatattcgtatttaggaaattttagttattattacgcggggttcgatcgtttttgagtatttttcgttttagtcgcgtattcgttgcgcgttcgggacgcgtatattcgcgtatatatcggttttttttgcgtacgtttcgggtttattttcgtttagagttttcggggtttttttttatttcggtttcggggtttttttacgttttttcgtcgacgtgtttatttgtttagggggcgttttcgagtcgcgtttcgcgttcgtttttaggagggttttcgcgagtcggttgtatatttcgaggcggtttcggttgtataatttggagcgagttgtttcgtttttttattttgggggcgaagaagggtcggggagtgggggaaagcgggaggcgtcgcggtttgggaggttttcgcgggttttagcgtcggtcgtattgcggtttttttcgcgcgtcgtcgtcgtcgtcggttttttttcgtttcgttttcgcggttttcggcgtttttcgcgcgtttcgggcggggtttcggggcgtacgcgggttttacgtttggttttgatttggttttgtcgggcgtgtattttttatttattttgggaagcggggtttttggagcgtggaacgggcgtcgttagtgcgcgcggcggggatcgggggtgagggagagtgagttgttcgttcggggagataagtaaggcgttaagttcg

SEQ ID NO: 6359 - DNA, 220 bp, synthetic construct
  misc_feature 1..220: note = Description of Artificial Sequence: Synthetic polynucleotide
  source 1..220: mol_type = other DNA
acgtgtcggtgacgtttcgtggagttggcgagtttcgtttgtttcgcgattgagtttgcggtcgtttcgattttttagtagattttggcgtggggtatttgagattttcgttattgaaaaggcgttatagaaatgtaaggaattatgattttaataaaattgttttatttaggagcgagtttttgcgttgtttttgtcgtcggagttcgggtttgttacg

SEQ ID NO: 6360 - DNA, 1860 bp, synthetic construct
  misc_feature 1..1860: note = Description of Artificial Sequence: Synthetic polynucleotide
  source 1..1860: mol_type = other DNA
tcgcgatgttagttacggttcgcggcggttacggagttattttagtatttcgcgatggatagtgattttcggcgtggcgcgagttttttgcggtttttacgcgggtttgggcggcgggtttttttacggtttcgtttagatattcggaggtatttgttaaagttgcggaggtggacgatcgggcgtttaagtacgaattttttcgtcgaggtacggttgtcgggtttcgttttgagggtttggggcggcgaggatcgtcggggaggagggcgcgcgagtcggaggttagagtcgggtcgggtagggcgcgtttaggagtaggggagacggcgattcgggtcgaggcgggacggggatacgttatttgttcgtggagcgcggggaaggggtgcgcggcggcggcggcggcggagtttggcgtagagggtagcggtagtagcgggagtatcggttcgttcggggtcggttagtcggggagatcggggagtagcggggtcgcgggcggcggggtcgaggcgagtagtatcgggggaattacgattttcgcgttgagtcggagtagttcggtcgagttcggtattatttagatttagggcggcggcggcggcggttttgcgtttatcggttagaggagaggttgtcgtcgtcggggttgttgttgttgtagttgtcgtcgtcgtcgttggaatttggcgttcgtttgtattttatattttcgcgttgacggcggcggcgggggcggcgggcgttcgagatgttgggtcggcggcggcgcggtttcggagcgaatttatttggtttcgcggcgcggtcgttcgtttcgtttttgtttcgcgcgggaagtttttttttttttcgttcgcgtcgtcgtcgttttcggattcggttttcgtttcggttttcgttcgttcgcgttttttttcgtcggatttcgtttcgttttcgcgtttttcggttttggtcggggtttttttttcgttgcgtttttggattcgggcggtcgcggaggacgtgggtgggagagggtcgagggcgcgttcggttgggttttcgtcgatgtcggttttttggtggtttttggttttttgggatttagcgtatcgcgagggaggtttcgggtttcgtatttaagggtaagcggaagtcgaggtggcggcgtcggagttaggtatgtttcgttgtttagcgcggggttgagggcgtagacggggatcgcgcgagtcgttttttatttggttttttcggagtttagggcgcggagggtattgggttgcggattcggcgtaggcggtttcggacgttgttaggcgcgggcggatttttgttgtataaatgggttaaataggttcgtaaggttttcgcgggttttttggttcggaagttgagtcgcgggtgtttggtttgaagtttcgcgttttatagtggttcgcgggtttcggcggtttttgttttacgttttttaaggtattaggtaggtggttttagggtttttgtttacgatattttttgggtggggtaggattatttttttgtgaattcgttttggatgtttttaggtatagtttgtattttttttttttttagtatacgcggtttttgacgttgtacgtcgagttttttgggatttaggacgaatcgggttttaaggattttcgtttcgttcggattatacgtaggtagcgtcggtcgagtcgagtttgggttcgtattggttacgcgtagttatcgttagacggcgttagttttttttcgttgtagattttgtttcggaggtcgttagttttttttttatttcgggtttatagttttagtgtagtttttggcgacgcgcgttgatagttgggtagagattttcgtgcg

SEQ ID NO: 6361 - DNA, 441 bp, synthetic construct
  misc_feature 1..441: note = Description of Artificial Sequence: Synthetic polynucleotide
  source 1..441: mol_type = other DNA
gcggggttttaaacgttatttaatcggggatattgggcggggggtcgtttaattaggttcgtagttggagtagatagggcggttttcgggatttggcgcggtttttgtttttcgttgtcgtcgaagttttaattttcgtttgtttgttttgtgttttttgtacgtagaagtttagtttgtgtggttttgcgatttgcgggtattgggagatttatagttaagacgttagggttttttggaagtttagaaatggtgagagtgtcggttcgatatttcgagagagggaacggggttggttggaatcggtgggaagcggttgtggcgggatttaggttttttcgtagttagttttataatttgcgtttagagtttttgtttagttcggttttagttttttttagttatacgatggcggtcgcgttgatagtcggggtttcggcg

SEQ ID NO: 6362 - DNA, 5587 bp, synthetic construct
  misc_feature 1..5587: note = Description of Artificial Sequence: Synthetic polynucleotide
  source 1..5587: mol_type = other DNA
gcggtgttttcgggaggttggtagtcggggaagtaggtacgtgaatttatcgggttgttttattttaatttgaggttagagttgaggcgtaggggtcggggtaggggtagaggtgtcgaaacgtattagttggggattttcgggggaaggagataggagagatttaaggcgagttttaggattcgtttttatgattatgattacgcgttgcgttcgaattatatgtttatttcgtatttgttttcggggattagatcgcgtttttttagatggttggggagggagtagatttcgggtgaaggttgggggaggtatcgggatgtcgagtacgttagagtaggcgggggatgggtttcggttttttgtcgtttcggtatttcgttttgtatcgggtaaagaaggggttacgatcggcgaagagcgcgtggagatatagggattcgcgatttaggggtaggaatttcgttttttttcggaaatttttcgggttttgagtcgtgttcggcgttttttattttattttattttcgtcgtttttgtcgttatttacggtcgttgcgggttggttagcgtgtgcgtttttcgcgtcgtaggtatttgttcgttgggcgttgtgcgtttatttttttttcgcgtattgtagattttcggcgttgtcgtcgttatttagcgtagttttcggttgggtatagcgtttcgtttttttcgcggtttcgggcgtttatttattcgttatggtttaggtttgggttaaatagcggggtagttggttgtttaaattggggtaaggagttgagggttgggagttgtagagaggatcgagggatatacggggagtagggatgagcggtcgtttcgagtcgtgtagattgggaagaagttagggagagtttgggtgggaggatttttaatttaagcgggtgcggggcggggttgtattttaattagaaagacggtggttttttcgagcgattttcgaggagagagggggagcgttttggggcgggggcggggcgggttgtggtaggagaggggagggcgggggcgatgtagcggtggaggcggtttggcgtttagttattgatcgttttttttttttttttttttttttttttttttcgttttttttcggtttcgggttcgttacgtcggattcgtttttttcgcgttgcgttgggtcggacgttaggtttgcgcgtcgcggttgagcgtttattcgttttgcggaaagagtcgcggaggaatcggcgggggcggttgcgggagtcgaaggaggtggtaatcgggagtagaattagaaggagatagggaggtagaagttcgcggtttcgtggtacgtattttttcggttagggatgggtttcggcgcggtttagtttttgttcggttcgtcgggtagagattgaatcgcggatttttatcgttttgtggacgatcggatagagagaggtattgatcgatcgttagtagtttttcggtgggatcgcgttttttgtatatttcgcgtagcgtttttcgtcggagtcgtatcgggtaagtcggcgagggagcggggttgattggcggtcgtcggcggttaggggagggggcgtcgcgcggggttatggtaggttcggaggcgttttagttcgagtcggagtcgattcgagtttacgcggtcgtcgttttttcgttttcgggttttcgtcgttatcgcgtttttcgcgggagatggaatagcggaatcggttcggtgttttcggatatttgtcgtttttgttgttgtatgttttgttgtttttcgtggtcgacggtgagcgcgggaattttgttgtcgttgtggattcgggggggtttttgttggggtcgttatcgagaagaagaagaaagagaacgaatcgggaagtttcgcggtttttagtaatttcgttgtgtagtttgggttcggaggggtagggagaggcgagcggcgaagggtcgtcgtagtagtagcgtcgcgttcgagtcgtttttagtttcgtcggggtttcggttgcggaaaggatgtttgcggggagcgggagtaggcgcgttttagttaggttttggcggtgcggttaggggcgggggagaagtacgagtcgtttttgtcgtttcgttttattcggagggaagtagtaggtagtcgatggtcggtttttgtttcggttttgtagtcgttttttcgaattttgttagttttttcggtcgtgcgttagggagtagttgcggggtggggggtataaggttagttagttagagatcgattgtttcgttttaggttgttttaggttttcgatttatagttggttacgtttttttttttttttttatttttagttgtatttatagaagtttttaaagatgtgatagtacgggagggagacgatatcgaaatgttttgcgcgtttcgggttagcggagttatttcgtattcgttggagatttagtggtggtattttaaggagttatttcgggagttgttgtacgagttggcgtttagcgtgtcgggcgttcggagtaaggtaattcgtcgtttacgcggtatcggcgcgcgttcggttcgcgttcggggcggcgaaggttaatttagggagggaagtagcgggttttattcgcgtagggcgtcgttttgtggcgtagtttattttttattttcgtattttaaagtatttttaaagttagtagtggttatttttaaatttgttaattattttgatagtatcgttgtttttattattttttagaattttatttacgtttagtttttaaagagttatattttagtttggtcgtttgttcgtgttcgttggttgcggttttttgatgggtgttgggtagtgaaggaagtttttttggttttattaggtttttttcgttttttgttattttgaggattttagggtttttacggttgcgttttagaggttattagaaaatcgagtatcggaaagtcggtaggatttttagtttttaggggtatagaggggttatttttttgtggtcgaaaataggtttacgttgtttgtttgttttaaaatttatatttttttatatattttagtgtgttcgcgtgtatatatatttatatatatatttatatttatatatatttatatttttttagggttttatttagagttatttttattgagtttttcgttgggtgttgtttagatatagcggttttttttttagttttttacggtttttagtgagttgggggaggattttgagttacgcggtagggtttaaggatgtttagagggaaggagaggggtttttttttttattttggtgtttatttagtttttttagtttagtcggtaggtgtgtattagggtagttattcgttggttaggtattatgttagttttaaagttcgtttttttttgggaaatttttggaaagtcggacgttttttgtgtttttaatttttatttttcgggcggtttcggttttagtttgtcggaggagggtgtttttgtttaaaggcggattcgagtttttttagttagaaggtcgcgagttttacgtttttttttttttttttgtattttaggtaataaataaggatgtaattaaaattagcgtaagtgtggagtttagcgcgggtcgcgggagattttttttggtcgtttcgggtttcgtagtttttttttttagtaagtcgcggcggtcgcgtatgtggggtcgcgtaagtagggtagcgatcgtagttttgtatcggtggttgttcggcgtgttcgggcgttatttgtcgtcggttgtagggtcgggtttttttttgtgtaaattaagggtttaaggtttgagttttttaattcggttcggcgttgatttgtaaaattttttttggtcggattgcgcgtttagggtttttcgcgtttgttagttttcgttttgcgggtattttttttagtatcgggagcgcgcggttgttcgttttcgtcgcgatcgtggcgttagtttttcgttttttttgtttcgttttgagtatttgttttgcgtttttcgttgtaattttttatttttcgtttggattgcgggtttgggtgcggggtgttgtaggtttgtaggggacggggtagggggtggttgtgttaggttgcgaggggttcgggttatggggttgttaattttgggaggagatgcgtttaagttttttatttggagcgtagaaaggtttggagatgacgaagttttttcgtgggttcggtttagaggtgagggttttttgggtgtttgttgagagtcgtagagtagtatttttcgaagtttttatcggggcgtaggggaggagtatttcgttggggggtttttggagatttcgcggaaaggcgggttggtagtaggtggttagggagttaggtagtagttttagcgttgtttgtttttttaagaaagtatagtgttagttgtaaagggcggggttcggtgatagggtggttttttttaggaagcgattcgggtaggtttttcgtgtttcgggaggtgaggagggtcggttggggcgggattgtcggttggagcgcgtcggggcgggaaagacgtggggaagttaaggaataaggaatttagtttggggttttttgaaggtgtaggagggaggaaggagaggtggattttgtttttttgaagcgttagttacgggaagataagtagtgttggtttgtatgggcggggtagatgtaaggtgggcgtttggttaacgtgatggggacgtggggatatagtttaaagagttggttgtttggcgtttacgtagagttggaagttttatgttattgggtagacgcgggtgaaagggaagtcggatcgtgatggtgggtaaattaggattcgggaagtgttggggtgcgcggatgagggggcgcgacggttagggtggttagaagagtaggtttgggagttgtttagttcggtttttaattttgtttttttgtagatcgtacgcgtttagggtaatgatattttatatcggtttcggttgtttgtcgtgcggttgtaggacgagggcgtgtacgagtgtcgcgtgtcggattatagcgacgacgatacgtaggagtataaggtttaggcgatgttgcgcgtgttttcgcgtttcgcgtcgtttaatatgtaggtcgtcgaggtcgtgttttatatttagagtagcggttcgcgtcgttacggtttagttagcgtcgttaacgttaataacgcgggcgtcgcgagtcgtattattttcgagttcggtcgcggcgataagagttcgtcgttcgggagttttttcgtcgttatcgatttcgtagttttcgaggtcgcggtagtttcggcggtttatacgtttattattatagtcgcggtagttgttgttgtttcgttagcgtcgtcgttatcgggataggcggttttgttgcgttagaggtacggttcgggtaagggatcgcggagagggggcgtacgcgcggggatggcgtagggttagggttgcgtcgggacgtttcggggggtttcggatttaggattcgttttttgggcgtatttgtatatgtatatttttttttagttaggtcgggagcgttttttttagggtttttttttcgcg

SEQ ID NO: 6363 - DNA, 3643 bp, synthetic construct
  misc_feature 1..3643: note = Description of Artificial Sequence: Synthetic polynucleotide
  source 1..3643: mol_type = other DNA
acggggcgattttgaaaagaggttgatgaaaatcgagttcgttttgtttcggttgggttgggaatagttcgtagggttttgtcgagtgggcgagtgaggcgcgcgagtagggcgttcgtttttttttagtttcggaaaatgattaagttaatcgtgtgggtatgttttattatttattgaatataattttttataacgtttcgtttacgtgttcgagtttgtttttgacgttcgcgttttaatgtttaaggtaaggaaaataaaggtgggggggggattgcggggcgcggcgcggtgcggggggcgcggcgcgggggggcggcggcgggtgggggggtagtttcggcgttcgggaggtggtaaagtgagtttggatttttggcgcggttttttcgttttttttttttttttatttcggcgaggtttgtcgttcggttttttttcgttttatcgcgattaaaaaatacggtttaattaaatattcgtggttgtgacgttggcgagagaagttgttagcgggtggggggtggggggaaagaagaggaaaatcgagtcggcggttgcggtcgggtatcgtatggcgttagagaatttcggcggcgagcgggatttgcgtttgggtcgtcgttttttcgttcgcggtttcgggatcgttattttgaaaaggagtttcgaggtttggcgttcggcgcgcgatcgggatttcgcgtttagtttcggggattcggtcggcgttttttattcgcgagcggttcgcgagttatttttaggtttcgggaaatttttaagagggtttggggggtggggggagtaaaaaggggagggggtaggttggggtcgcggaaatttttgtttaagtgattttttttatttttttttttgtttgggacgggggttcgttttgcgttttttttttggttcgcgtttattgcggggtttcggttttttcgttcgtggagagagggtaatttgtaatttttttttttttttaattaaagttagttgatgtttataatgtgttaaatttgcgggcgtcgagagtcgttgagatttgttattttgtgattgtatcggttttttgtgtttcgggagtttggttaggttgaggtcggagagttggttttagggttgaggtgttagggttcgaattcgcgattttaggaaaggtcgtggcgtttgtaagcgtaggcggcgttcgtagtatttgttttagtcgggtttcggtttgggggtttagtcgggggttaaagaggaaataaataaataaataagtaataggttatggagggaaaagagtcggttagttttaggttggagaaatgaggttaattagagcgaggaagtgcgggcgtgggggttttggaaggtagaggagaggtagggtttgcgcggcgtttgggaagagtgtaatttggggggacgtttttcgtttttttagcgtagatgtatgattggggtaggaatgatttttgttgataagtttttttttgtttgttttaagatattatttttcgaagatgaattgaggaaaatagtcgtaggcgagattcggggtgtattttaggtaaaaaaaaaaaagttagggttgggggagagtttttttttgatgagtaggaaagtgtttagatttcgacgcgtttatttgttgtagttttgtaaataatttaaaatatagatatttttatatagacggatgtatgtgaagtggaggaaggtcgaaacgcggggaagttagggaaaaagaaagaaaaagggttgggtagagagagatttgtgttgtttattttttattttgcggagtgaatttcggtagggttttttttggggataggtggaaagttaagtttttttttttttatttttgtattgtgagtggtttttattgtgtgtttgttggagaatatgtttatcgttttcgagttaggtggaggattggaatgttggggggcggggagcgttggagttgaggacgtagtggttaggggttgggggtcgagaaagagtagggcggggttttagtttcgcgtgcgggtggtagcggcggtcgggttttgtttgttagatattgttatgtttaacgggtgtttcgtcggagacgtgatttgttagtcgttttcgtttttattttagtagaaaatacggtagttgcgaggtgtttcggtttgcggggttcgggtattcggtgcgttttgggggttgggtcgtgtgcgcgggtgggagtcggcggtcggcggggtcggggcgaggggcgagcgggaggggcggagtgagcgagcgcgcggtacggtttttcggttttttttgcgttttttttcggtagtcgtcgtcgtcgtcgtcgtcgttgtgtaatttagtagaaattcgataggggtcgcgtttgttgagcgtattcggcggtcgggtagttcgagcgggtcgtcgggtttggtcggtcggtgtagaggcgcggagggggtcggcggaggggatcggcggggatgggcgcgggaagtacgtttgattagagtacgcgtcgttttttaattttggtgttttcggcgagttgggtagtttcgcgcgttttgattttgacgttttagtttttagttagggtttaggtgaatttggggtggggtgtgcgtgcgtgcgtgtgtatgtgcgtgcgtgtgtgtgtgtggaaggggtggtgagattgggaacgcgttgtttttttttttagtttgatattagtaattggatttttattttaagatcggttttgttttttgttggggttgggagggggggcgatttttttttattatttatatttttgtttattgtttattgagtggaaggtaggcgatttaaagagacgaaagagaggaaaaaggggtgagagacggagagaggaaaaagaggggggcggttagaagagggaaggagaggcgtggggatagggttttcgttttcgtcggggtcgggtttgatggtgaaatagtaaatttacgtacggagggtcgttaggaaagtggatattatcgttttaattaatttcgagatgtttcggcggcgggatttggcgtagtcgtgacgcgtttttataaatttgttcggttcggggttgtttcgagaattcgtatagtagcggcgttagatttatttcgcgttttttagttcggagtttatttgtataattggattttttttttttgtttttttttttttttttgaaatttgtttgaaaatttaagtgaaaatcgcgacgatttgtatatttaaaagtaagtgttaagtaagtgttttgcggtggtttcggcgcgtttcggggtgagcgcgtaaagtcgggagcgaggtgtcgcgagttgcgcgtcgtttcgggtcggtttcgcgtgtgggcggttgggcggttgggcggcgggaggacggttttcgcgggtttcgggattgttcggttggttgttcgtataattttttttttttttttcgtttgttgatttttcgggttaggtgaagtgtttgggttacgcgtgtatttgtggcgagattcgggaggcgattttggggggcgcgcggtcgtagttgggtattttgtttgggtcgggggcgggtagtcggttttagtggtcgtcgttgagggtagagttgcgagcgagcggggtcggttgttggtcgcgtcgcgtcg

SEQ ID NO: 6364 - DNA, 808 bp, synthetic construct
  misc_feature 1..808: note = Description of Artificial Sequence: Synthetic polynucleotide
  source 1..808: mol_type = other DNA
tcgggggagttgcgaggttatttttagtcggcgttcgggcggattgcgagttttcgcgggttcggtcgggggagcggagattggtttttcgttcgggttggggcgtttgtcgttcgcgagtcggaagagcgttttatttacgagtaggtagttttggtagagggttaattgaggattattgttgttggttttaggaggagcgaagcgtttggagatcgggcgcgcgggcgcggttttgggagcgggggaaggtgaggggaaatgggatatgatggtattaataatcgttattaaagacggtgggagtaataaaggaatgcgttttcgagacgtcgtttagtttcggggtgttttttggcgcggtcgcggtgtaggaacgcgagtttcgtcgtcgagtttttcgtcgtttgcgttcgttggcgcggcgttcggcggtagtgttatttcgaggtcgagcgttgttttcgtcggttcgcggttgttagtcggttttgttcgcgttcgggtttcgcgagcggtcgtattttattttacggaggggagataatgagattaattagaggcgtcgttatcgcgtcggagatagttgtcgtcgtatagtaattattcgcgggttgggtgcgcgggggtttttcgttatttgcgcgtttgttgtttttattacgcggtatcgattcgggcgcgttttcggtttttgttcgtagtttatagttatatcgcgtattttatattttttttgcgtttttgttggggagtttattttttttattcgtatagtgcgttgcggttcggggtgtgggaggtttcg

SEQ ID NO: 6365 - DNA, 3415 bp, synthetic construct
  misc_feature 1..3415: note = Description of Artificial Sequence: Synthetic polynucleotide
  source 1..3415: mol_type = other DNA
tcgaggggatcggttcgtttattcgttcgcgttttttggttcggcggatattaggtagtttttcggcggtcggtcgttcggaggacgcggaagatgtttcggggaatttaggtgatttcgttcgttatttatagaaagagttaggtcggggttgttttttattttttttgtagtcggagagttgaggaggtagggatttggcgcggtttagcgcgtttcgcgagcggttttttaaatgggtgcgagagggaagagggtagagcgcggcggggcgttcggggggcgttcggtattcgaggcgggcgtacgtatttaaataggagagcggcgttcggagttatttagtgcgggtagaagagcggggcgaggagcggggtcgcgttcgttggaggcgcggggcgagtggaggaagaggaggaggagagtagaaggaaggggaagcggttcgtatttgttgcgcgtcggggcgtttgttgtttttttttcggtatgatgttttttcggcgattgttattgtcgtcgtcgtcgtcgttgtcgggttgaggatagggagggagggggcggcgggttcgcgggggggcgaggcgggtttgtttttagtttttttttcggagagcggtcgttcgtaggatgttgttgcgtttaggtttttcgcgtttttttcgcgtcgcgtttcgtcgcgaatttcgaacgtgcggagggaagaaggagggcgggcgagggaggttcggggagggaggagtacgggggggaggaggaggtagaggaggaggaggtggaggaggaggaggaggatcgcgttgtcggcggaatgggaagtttgataaatcgttttagaggttagaggaggagggggcggggaggagcggcggttttgttttttttcgtttcgtttttagacgaggtgcgcggggttcggggttggggggcggggagagggcgggtagagcggtgggaggaggagcgcgggagcggttcggatcggtattgtttcggttttcgtttttaggtcgggggttacggtattcggggggacgcgtagtcgtcgtcgcggttcggggttcggcggtttagttttttgttcgtggcgcggttggagcggcggcgtcggtaataggtaagtttaaaggaaaaggagatgatcgtgttaatcgttcgttcgcgggggcgtcgcgttttcgttttcggttttaggttcgcgtgggattttcgtttcgttagcgaaaggggtgtcgttttttcgttttcgtttcgtgcgtatacgcgggggcgcggcgttagtttcgtcgagttcgtttcggggcgttcgttattttttatttttatttttatttagcgttcgtttttagttattttttagttgttttattcggttcgtatttttttttattcgtcgatttcggagtttttagcgtggttttcgggtcggggttggcgtttttcggggaagttagagtttacgggtaggttttttttagggaggaggcgggcgcgggtcggggcgggtgggggtagtttttagatttcgcgttatttagttttttttttaggattcgtcgtagttattttttttaatttttttttttcggataaatttttttgggttcgtttcgggggtcggtgtgggagggggtttttttaagtttttttttttgattttgggatgattagggtttttttatttcgtttttcgttttcgggagtcgggtcgcgttttttatttacggcgcgggtcgattttagggcgggacgggggcgggagaaggaaatcgggtttttttgtttatttttcgttaggggtttttttcgagagtttagggggtcgtcgcgtcgtgtttcgcgttcggtttgtcggggttgttggattagagggattgattattgattggtgatcggggtcgttgaggtttcgggtcggttcggtcgattggtcgcggtaagaaggagttggttgggcggcgtgggcggcggggcgacgcgggtttatttacgggcggcggtgagggcgcgggtgggtcggagtttatgcgggcgattttcgggcggcggcggttgagcgggagtcggagttcgagcggcgcgggcggcggcgtatcgatgcgttgcgggttcgattgcgtttttttgggttagtttttaggtcgggaatggggcggtcgcgtcggggtcggtttcgggcgttgtcgggcggcggttgttggagcgcgggggcggttttcgggtttattattttcgaggcggttttgcgttcgggcgcgtcggttggggttttggcgttttcgtaggtttcgaggtcgatagtttcggcgagggcgggcgtttcgcgttttagtatcggttgtttgagcgtttttggagtagtaaattttagatttttttttttttttttttttttttttttttttttttttttatttttttttttttttagtttttttttttttttttttttgttttgtgttttttttattttttttttacgattgtttttgtaagtttgttttaaaagtttatagtatgttttttttttttttagatcgggagatagtgattttatttatacggtaagattaaaagttttcgttcgtttagtttgcgggtttgggttgggtttagacgttttttaggatgtagatgcgtcgtcgttggttttttcggttataaagtcgtttttagcgttttttcgcgcgtaggagcgttcggagttgtggggtacggattttaggcggggtagggagttcgaggcgggttgcggcggggttttcgggttggcggattcgggggttgaggcgtcgtgcgcgttgggtgttcgcggtcgtagaggttagaatcgttatttttttaggtcggggagacgcggtcgtggagcgtgaaacgttttttgtaagcgaggaaacggtgagttggtcgatatcgtcggcggttttattattttggtggtcgcgttgagtttttgtcgtttggaggcgggttgcgtcgtacggggttagttttcgtcggtttttagtttattttcgaagtttttatttaggcgcgttcggtgcggcgtgtgtatagcgcggggcgtcgtatacggaagcgtgtagttttttttggtcgcgtttttttttttttttttattttttcgttgtttttgtaaatttttgttttttcggtttttttttattgcgggtcgcggtttgaattcgggttttcgcgtagtcggtcgtcgtcgttgggtcgttgtttggttttttttcgtttaggcgtcgagcgttgtgcgattcgttttaatatttgttcgtttaattattggcgtatttattagtgttaatgggttgtatattgtagcgatagttcgttacgtataatacgggttatgcggagtgtacgtagtaattatattgttatgtcgggatacgtaaaaaggttttcg

SEQ ID NO: 6366 - DNA, 3415 bp, synthetic construct; identical to SEQ ID NO: 6365
  misc_feature 1..3415: note = Description of Artificial Sequence: Synthetic polynucleotide
  source 1..3415: mol_type = other DNA

SEQ ID NO: 6367 - DNA, 1592 bp, synthetic construct
  misc_feature 1..1592: note = Description of Artificial Sequence: Synthetic polynucleotide
  source 1..1592: mol_type = other DNA
gcgaagcgatttagcgcgaggattagtttttaattaattcgtttttagttttgggcgttttttttagtagttagatgggggttttagaggtcggtgcgcggttatatggtttcgggttaggtagggggtcgtggggacgtatttgcgttaggcgtatagtatttttgggcgcgggacgggcgaagcgtcgtgggttttaagttgagttgggtcggttttgtagcgtcggagagtaaggcggcgtagggaagggagatggggcgggatgtggggaaagttgtcgattgtttggattttttcggttcggatggcgttagttgtttttagtttagtttgcggaaattcgagttttttttagcggttcgacggttcgggcgtttcgtagattttgggtttttttcgcggtgttttcgtcgttcgtttttgcgttttggttcggtttttacgttttttcgaggtttcggcgtagcgcggtcgtcgttattttttttatattttagaggtcgtagcgtcgttttttttttcgtatttttgttttcgtaaaggagttttttcgtttcgcgcgaggtcgcggcgaggagggggcgcggttcggcgtttgggagtttatattttttcgtcgcgcgcgtcgtcgagtagggcgtcgcgtttttcggttcgcgcgtggtcgtcggaacgatttcggttcggcgtcggtttcgtttcgtttcgcgtttaggggtttcggggcgggtttcgggtttcgggcggacgatgcggcggttcggtcggagcggcggcgggaagcggaggcggaggtgacgcgttagggtcggcgggtcgggttatgtagcgttttagggcgggcgcggacgaggcggttttatttttggtcgggttggttttgcgggagttggagttcgggtgcggttttttcggtcgggggcggcgggggtcgcggtttgggtttggagacgaggcggcgttcgcgttgggtcgtagagggaagggtagcggcggtttcgaggtcggggcggacggattgagtcgcggggagcggggttttcggcgcgcggcggtttcggagtttagcgcgtagtttgcgggtagtttacgggttagtttggcggggttcgacggcggcggcggtggcggtagcgttcgatttagcggtattagtttgggttacgattagcgttacggtagttcgcgtttcggtcgttcggattcgcgtttcggtttcgggtcgttttcggtgggtagcgttcgttttagcgtttttagtttcggttttcggggttcggtcggcgtttacgttgattttttttcgttcggcgtttgtttcgcgttcgttcgtttttcggagtttgcggggtcggtttttttttcgttgtttgtattttcgttgttttttggtcgggagggcggtttaagcgcggtcgagcggcggttggaggcgtttattcgggagttggagcgggcgttcgaggcgcgtacggcgcgggattatttcggtgagttcgttcggttcggtagttttttgcgcgtatggttggggttcggggtttcgagattgtttcgggtaggcggtcggattagcggaggagagtacg

SEQ ID NO: 6368 - DNA, 903 bp, synthetic construct
  misc_feature 1..903: note = Description of Artificial Sequence: Synthetic polynucleotide
  source 1..903: mol_type = other DNA
gcgattttagaattcgttttttatttcgagttcgtttttcgtcgttttttcgtttttgggagggcggttttattaattttcgcgattcgggtcgtttttggcggttttgatttcgttatttcgtttcgcggcgggggtttgggggtgaggggcgcgttttggggtagaggattgcgcggtagggtttgttatagggtagaggttagggtttttcgggaaaaaggtaggcgtatatatgtttttttttttgggaaaagacggggaggggggttttttttgggagattttaggtttcgaaatttttcgttttttatttttcggttttcgtattttttttttttttcgttacgtatttttttttttttttagttatttgttttatttcgtagcgtcgcgataaatacggttttagttcgttttcgtttttgtttagttttttttttaagtttcggggagtgggggagtgagtagacgttttttttttaggaggtcggaatttttgtttttattttttatcggggttcggttggttagaggtaagtttcgagattttttattaattattattatcgttgcgagggtcggtgaggttgtagataacgtttgtaaggacgggagtcggggagggtgtagggcgagtttaaaggacgggtagagtaagtttcgggaagaggtaggggttttttttttcgggtcgtcgtttttcgtattttcggagttagtcgtagttacgtagcgtcgtttgtcgggtatattaaggatttggcgcgtacgtggcgtttatttttattttcgggttcgtttttggttcgcgtttagtttttttagattattcgtaaattgaggatttcggatatagagtgtagagatttcggtaagtttattgaaagttagtcgaattcg

SEQ ID NO: 6369 - DNA, 1592 bp, synthetic construct; identical to SEQ ID NO: 6367
  misc_feature 1..1592: note = Description of Artificial Sequence: Synthetic polynucleotide
  source 1..1592: mol_type = other DNA

SEQ ID NO: 6370 - DNA, 382 bp, synthetic construct
  misc_feature 1..382: note = Description of Artificial Sequence: Synthetic polynucleotide
  source 1..382: mol_type = other DNA
acggattgttcgtttagtaatatttgattacgttttttattggttatcgttttcggaagttcgttttttcgttttcggaattttcgtaggcgttgggtttgtagatggcgtttaggtatatagtggcgagtgtgatttcgtagttttgggttgtttggttaagcgttcgtcggatatggtacgtcgaagggttatcggcgtggagttttcgtttttagcgttcgcggttgggaaatcggttatcgttacggcgggaattgggattcgggttgcgtttcggtttttttatatcggtttatcgtattcgtgggcgttcgtattggtgttgatataattttttgatttttgattcgtattgtttcgcgattaaaggtaaaaaacg

SEQ ID NO: 6371 - DNA, 665 bp, synthetic construct
  misc_feature 1..665: note = Description of Artificial Sequence: Synthetic polynucleotide
  source 1..665: mol_type = other DNA
gcgtttttacgaaattcgtttacggatacgatttcggggttatatttagttagacgaatgtttggtaaatgatagttattttacgttagatttttatagttttttatacgttatttttattgttttagggaattataagtataggtatcgtttcgttcggcgtttttttttaaagattggggtattaggatcgcgggtttttatttttatttagtataaagagttcggcgtttagagttagcggtttttcgaggatttattattaagttcgcggatataggtttcgattttatatttaacgttgttaaagtggtagagtcggcgcgggttgggatagaggcggtattgaggtcggcgttgtcggtggttgagagcgttataagtttcggttcgttatattaggggcgacgttttttagaggttttcgcggtttattcgggcgggattggttttattgtttgcgcgttttgagaagtagattacggtgttttagggtttatagtttcgcgtaggggagtttagtttaggttttgtacgagcggtttttcgcgagtttagttttgagagattgggagcgtaatttggtgttgagaagaatcgaatcgtttcgttgttttttgcgtcgaattatattttttagaggttttcgcggttttattttttcg

SEQ ID NO: 6372 - DNA, 764 bp, synthetic construct
  misc_feature 1..764: note = Description of Artificial Sequence: Synthetic polynucleotide
  source 1..764: mol_type = other DNA
acgcgttattagcgcgtttttacgtataaattttttttttgcggttaatttgcgatttttaatttttcgttttggttgttaagggaggcgcgtagagcgtttgtgtttgcgtatttttatattagttcgtgtagtgtgacgttgggtttcgtttttgtgatcgggttaggttcggagttgtagggaattcggattttcgggttttttggaaggtcggggagaggttagtgtgggaggatttggtggggaggaggtcgtgttataaattttgcgcggagttgtatcgttgttgttagatattgcgacgtcgcgattttttttatttcggattacgttttttagcggatttcgcgggagttgggtcggcggtttttttgtgtttttcgggggcggaggtagttgaggcgttttttttcgggttcgtaagggttgggttttatttaattaagggtagcggtgagattcgagtgtagatttttcgagttttcggggtaggaaggagattttttattagttttgttttgtaggtcgggagtgggttgaggagtggcgtgtgggttttcggaagttcgtcgtaggttatttgtgtgatttcggtgcgagtggaggttggtatcgtttagtgcgaggttgttatttcgtgtgtttgtttacgttttgtgtgattgggtgcgaggaagttaatggtatcgtggaatgtgaggttgtgagttgaggcgggagcgggcgattgttcgttgtattttgttgggtcgatattcgcg

SEQ ID NO: 6373 - DNA, 1394 bp, synthetic construct
  misc_feature 1..1394: note = Description of Artificial Sequence: Synthetic polynucleotide
  source 1..1394: mol_type = other DNA
tcgcgtttgggttcgtagtttcgggtacgttgtagtttcgtattcggttgtttacgttcgggattatttattgtgttttttcggaattgtttagcgtgtttttttagattttagatatttattttaaatttaggttttagcgttttgtaggggatttttattttggggcgtttatttttgattttttttttgggttttttcgttacggtcgagtttaagtggttgaagcgcggacgaggatgcgcggggtttcggtttttaattgtattataggtcgtatttacgaatttggttcggtatagttattatcgttcgggtttttaggttttagggttgtagaagtttagtttcgggaaaaaaagtatatcggtttgaggttttataggaattttttttttattttggttcggtttgtaaaatttggtttatttcgcgttttttttttttagaaaagtagcggttatagtggcgttcggtttttagttttagttttattcgatttagaggatagtttagttttgggagttagcggcgttagaatacgggagagcgtttgttttcgtcgcgaatgcgttagcgcgcgggggggcggaggtaagtttcgtagttgtttcgggtcgggaggggcgcgtggggtcgggtttcggcggggatagtcgggtcggggagacggagttagaggggtcgtagtgtttttcgttttaggtttttatttgtaatggtcgtttcgtgattgattagtgttattaaagataatttaggtttgtttttttgtggatattgcggtttaaaatttaaaaaaataatatttcgtttttttattttttatttggttttcggttcggagataggcggaggttgcgagtttcgtttcgtttttagcgacgttttatcggaatttttggaaatcggtttttgtttcgagtgcgtaagcgcgcggggggcgaacgttggggttttttagggagtaagggagaagtgtggggtcgtatttgtcgaggggtcgggaggtttggaggagggtggaggttggttataggatttcgatggggatggagtgtttaaatttaggtttgtagtcgtgattttggcgtgagttggatggaggaaattttagtatcgcgagtttggattaaggcgcggcgcgtgttgtttgtggtgtttgttgagtgacggtcgtcgcgttttcgcgtatttggatcgagtgtttggtcgttggcggagtagtgttttcgtgtacggggttgttgcgtgcgcgtgtgtcgttttttagcgggggattaggatggtgtcgtagagaaggttgcgcggtggtgtttgattttgacgttggttgtagcgggtttttggggtttttgcggtttgtgtttgcgtttgtgacgtatttgatatcg

SEQ ID NO: 6374 - DNA, 949 bp, synthetic construct
  misc_feature 1..949: note = Description of Artificial Sequence: Synthetic polynucleotide
  source 1..949: mol_type = other DNA
acgtcgtgtttcgttattttaaaaaagaaaagttattttcgttaggtttttttttttttttattttcgtgtgtgtttcgaggtcgagatgtagagagtaagaaaaaggagcgaaggggatttttgcgcgttttaagtatttattagcgtttacggtgtgagatgaaggcgtattttttgggcgcgaagtttttaaagtatttgtttagggagatatttttgaagttgttagggttttttttttgtttttttttagattcgggttttgtataaattttggagggttagcgggcgaggcggttatcgtagcggtcgttaacgagtagttgtacggaggtgtagaagaaggaggttattgttatttttttgataagttgggggcgtgggaggtttcgggagttcgaagtcgtttcgagcgggggtgggcggtgagcggattttcgggtgttgattaggtgtttggtggtagagtagggaaggggggaacggacgtcgattttagggattttttattcgtttacgttttttggcgttggttatacgtcgtcgttttagtattaattggaggtttttagtggacgagtagtcgttcgagggtagtcgtttgagtcggtagatagcggttagttggggtagcggttcgaattgttttcgtaatacgttttttagtatttcggtttgcggggtgtttaggagcgcgggcggcgcggcgcggggatttaggacgtcgggcgcggggtttatggtagggtcgaggtcgttgaggtcgggtttttatttgcgtattcggggtcgtacgaggtttgggcgggggcggggcgggggcgggagttggattatttgtaattatttttcggttgcgtattttaatttcggttttttttttggaggttgcgtttaggtatcgcgttgaataagtcgtataggtgtgattcgggagcgttggagcg

SEQ ID NO: 6375 - DNA, 1365 bp, synthetic construct
  misc_feature 1..1365: note = Description of Artificial Sequence: Synthetic polynucleotide
  source 1..1365: mol_type = other DNA
tcgcgcggttttaggtgaatttggtcgaggtttttgcgttaaggacggcgcgggttagttgaggttaagatcgtaggtattgttttatcgttttttagattatagtttcgtttttgtaaggtttcggggaaacgggtattttttttttagtgagtaaaggagaaagacggagttcggtggttgggtgtttcgtttaggattattagcgagtttagagttttttttacgatcgttttagggtgggtatttttaaaagcggaggaagggagggaatatattttttggtgttgtgtttattttgtttcgtatagagcgggcgtttataggttttgggggtttcgttcggatcgtagtggggagaggtcgttttatgtttcgtttcgttaaatttaagagttttcgtcgagcgttaggaggtttttagataatcggttttgttcgttgttttttgtagaatttttttatttttttcgagtttttttttttgcgttcgttcgggtaacggtcgcgttatgtttagttttaggtcgcgaggtagttcgttattcgttttttcgggttttcgggttcgattttcgcgttttggtcgtttttcggcgtttaggttttttattggttcgaatacgtttcgcgttttcggacgtttcgagttttttttttcggtcgaggttattttggcgaggttcgatttttgcgcgtcggcggttttttagtcgtcgggtttcgtttgcgtttattcggttttttggatcgttgtttttttgtgcgttatcgggggtttgttttgggtttgttcgatatcgtggttgttcgtttatttgagcgtaggtttttattttgtgttagggtcgcgcgtggttttcgtttgcggtttgttgggtttcggcgttataggtattgcggtttcggcgttcgtacgcgggggattgggcgggggttggagagtttaggtcgttattgtcggcgttttagtgtaggagagggtattgagtgtgagaattatatacggttggagtgggaaggggttttgttatcgtttattttgtagttgaagtcgaggatcgcgatagttttgttgaaaaagatttcggcgcgaggtttttttcgtacgttgttgaggtgggagagggtgggtgtgagggcggcgtagcgtttgaatgcggtgggtaggaggttagcgttggggttgtaaggggatttagttttgttttcggttttcgcgttttttgattttttcgtatatttcggggtagcgtttagtgatagagacgttttttaaagcggttttcgattcgaattaatggttttgttttttttttttacggggtagggggaagtggacgtttcgggcggtgttgttgagcg

SEQ ID NO: 6376 - DNA, 2638 bp, synthetic construct
  misc_feature 1..2638: note = Description of Artificial Sequence: Synthetic polynucleotide
  source 1..2638: mol_type = other DNA
tcgggggtcgcgttggaattttataggaaaaaggcgcggaaagtcgtcgggtatttttcggggttttatagatgtttttagtgttttagttcgtgtattagttcgcgtattcggagggattttaggtagggggagggtttcgcggttagtatgtgcgttcgaggttttttcgtagggggtagtgtcgttcgttcgcgcgtcgatacggtgggagggggtgggaatttgcgcggagttttggaggttttttgggagaaagttaggggatgcggaggggtgggcgtaagatttttaggattttagggaggtcgtggggagggtcgtcgagggtgtagtgtgaggcgtaggagggggttgggggcggtgtacgttgtagggagacgtagtttttggaagatgcgagtgtgaatgtgtgagtgtgagtgcgtgtgtatgtgtgtgtgtgcgcgcgtatcgtagtttttcgggtttcgcgaggcgcgcgggtgttagtttgtagtcggggttttttttttcggtttttttgtttagttcggcggtttttttttttttttttttcgttcgttttttttcggcgggttaggggttgggacgtttcggcggagtaggcggcggcggtggcgagttggggagttttaggttcggcgttgtcggaggggttcgagtcgagtcgtttgcgtttcggtcgggtagcgtcgggttcgtttttcgcggggttacgttttgttaaattttgttgcggcggttagcgtagcgggttcgtaagcgggcgggaggggcgtcgggtcgggtcgggtagggcgcgggcggttaggggtttcgagagcggcggtttcggttcgcggttttattatgttttagttcggcggcgggggcggcggcggcggcggcggtagcgggggaggcggcggttttagcgtcggggcggtcggcggaggggacgatttcggggcgaacgacgagttgatttttttttaggacgaggggggcgaggagtaggagtcgagtagcgatagcgtttcggcgtagcgggatttagacgaggttaagtcgtttttggttaacgagtcggagaattagagtagtagttcggattcggaggtaaggaagtatcgcggttattttcgggggatttcggttttgcgttcgtttattcgtttttgtttttgtgtttttttcgtaggcggagaggcgttcgtagttcgttcgggatattttttagaagtcgcgggattatttcgtcgaaggtatgtgttcgttgggatagttttttattttcgattttcgttgcgtttcgttgtttagttcgggcggtttatcgttttttttgtttgggtggacgtatttttgtttttcgtttttattggcggtagttttcgtggggcgcgcgtggggggcgttggggtttttagttttcgtttcgagttttttgtcgcggcgttgttagtttcgggggtttgggttttatttcgttttggttttgttcgtagtgagaaggttttaggatagcgcgttttttaaaggattttcgtattttgggtatttttttttgatgatttcggatttgagtagttcgtatttttttaacggatttttgtttttcggaggagcgcgtatcgtgagtgttcgtcgggcgcgtcggggagggtgggaggtcgcggttcgtaggatgcgttttcgggtttggttatggagtgggggatggggttttttgcgtcgattttaagtagaatttgtttgcggagttgaattattttttggcggtcgagcgcgaggttgcgttggttagtgtttggatgaaagtaaagttattttaatttttttttttttgcgggttgaggttttggagtttatttttgggattttttttggtttttagaatttttcgtttgtatcgaaggaaatttggatttgtgttcgttttgggggggtttcgtttttttttttggaaatcggttagttttttttggtagtggggtaaggggtttagggagttgggttggcgacgttgtttttcgatttcgggtttattgggcggttgtaggttggtttttaagaaatttagttttcgtggcgggttatttatagttttcgtttttatttttagttttcgtatcggggttttagtttttttgcggagttagtttcgaattttaaattcgcgtagatgatttcgaggcgatttaaggtattttttaagttgaggaatttggtttttttttttttttgtcgtttgttttttttatttaaagcgagcgttgcgatattttaaatttgttaatgggcgcgtattgtgtgttgttcgttggtatttagagcggtgattaagtaaattgatcgggttttagacgacgtgtaaatgagggcggattttttcgttttttttttttggttttaaattttcgtttttcgcgttgcgaggggcgtagttgggggttggcgaggtttttgtgttttttaagtcgttattttatttttaggttttttgtttaggtgttgggttcgatgatagatgttgggtgaacgtttatttattgtgtgttaggttttcgcgtgttgttgtttgggcgcgatgtgaatcgtagtagttttttgtttttcgtttagatttttattgtttgttatttcgttgtcgacg

SEQ ID NO: 6377 - DNA, 1531 bp, synthetic construct
  misc_feature 1..1531: note = Description of Artificial Sequence: Synthetic polynucleotide
  source 1..1531: mol_type = other DNA
tcgtatatcgatttttgcgtcggtttttgcgattcgcgttcgtttttttcggttgggaagtatttgttagcggtttttatttgggtcgttttcgtcgcggggtatttttttgaagtagtcgttgagcgataggttgtggcggatggagttttgttagtcggttttgttgcgttggtagaaggggaagttatcggcgacgaattggtagatgtggttgagagtgagtttgcgttcgggcgcgttttgaatggttatggcgatgagcgtcgaatacgagtagggcggtcgtattatttttattaggttttcgcggttggttatggatagttagtttagtttttcgggtttcgcgggcgcggcgggcgaggcgggcgcggcgggcgcgggttgcgcgaagggtcgttgagagtagtcgaagtgtcggcggtaggcggtggttgtagaaagggttcggtcgcggtttcggggggcggcggcggcggcggagcgtttaggtacgcggcggcggttgcggcggcggcggagggcgggttttttacgtcgggttcgttgagttataggtaggggttggcggcggcggtcggcggcgcggcgtagtcggttagttcgtaaggcgttttggttgtcgggggggcgttcggggcggcggcggtggcggcgggcgggggtaggtcgggttgcgaatatatttcgaagttgtcgtcgtagtagagggttatgtcggcggtcgtgggcggttgcggcgcggtcgcggcgaggggcgagcggggttggtttcgtcgttcgggcgagagtatttttttgggggttaattttgcggtttcgtttttattcgcgttgggcgttcggtgtttcgggtcggggtcgggcgggtgttagcggagcgtttgttagtcggttttttataatcgagttcggcgcggttttttttgggtcggttcggagcggggcggtggtcgcgggtttgggttttttacgttttcgttacgttttatttgttcgcgcgtttaaattcggagttcgttcgtttcgtttttatcgtttttttgttcgggttcgggagcgtttgggaggtcggcgtttttaggtttcgggtaaaaagtagtattttatttttagtttacgttttttaatattataataagtaaagttacgaatattaaagagaagataattcgaatagtacgaatgatttttaaaaagttaatttggggtggtcgttcgggttatttgtttagttatttttttggtttttttatttttttttttttaattttttgtgatcgagtcgcggaatttacgtttagttttaatcgatcggtttttagtcgaaaataatcgatgtgatttataacgttttggggtatacggtagaggttattaataggttcgtttggcgtgttttttttttttcggggattttgtgattggaggaacggaaattagtgttgagtttttttaattaaattgtaggttcgtttatattcgggaagtatttattcgttttttgtgcggtttgtacgggttttcg

SEQ ID NO: 6378 - DNA, 2045 bp, synthetic construct
  misc_feature 1..2045: note = Description of Artificial Sequence: Synthetic polynucleotide
  source 1..2045: mol_type = other DNA
gcgaaacggtagaggtcggtagttcgcggtttacgtgtatttgtttagggaatcgttttagcgaaatttgattcggatcggaattttttcgtagtatagcggtcgtgtttatcggaatggaacgttataagttgttatttgtattttttttttagttttgatagggaatacgcgttgtttttacgtttatatcgatattcggatttttatttagttcggttagagttttaggggttagggattagtgtagggagaaggttttttattttagtttttaggatttttaattatagtttattcgtttttattttgttcggttttaggtttagtcgaatttatatgttttcgtagtgtcgagcgttattatttatagtcgttttttaaattgtgatttttatttgggagattcggaattatttaggattttggtgtggggggtagtattttttatatttgtttttcgaaaattgttatggagtagtcgcgtttcggcgggtaggtgagggggtcgagtttattagcgtcgtagtttcgttgtttattttttttagcgtcggttgtcgttttcgggtagatatcgtcggttttgattttggggttgatatcgttaaagggtagttagtgttcgtttaggttatttcgggaggtttaggggtacggcgaggggtcggggaaaggcgatcgtttattatagttcgcgcgtttagattgagggaggagtcgggttgtagaatcggcggcggatggagacgggagggaggttgcgaggtcgttcgaggagagattaaggttttagaaacggagaagcgggcgttttgcgggaggcggcggcgttgtcgttggtcgttaagggcgggaagtgttttgggatttttattaggggtcgcgagtttcgagcgttaaattttcgcggcgttcgtttagcgcgttgttgtggcgggcgcggagggcgcgcgtcggtagtgggggttgcggcggcggagggtacgggttttcgtttagcgtttttatttttttggtgtagttgtttttcgcgagtcgagatatttttgttagggaagaggagcgtttcggttgtttttttagagttttttgttggggggatatcgtttttatgaagaaaatttttaaataaattttagtttaggaggaggttatacgattatgttcgcgggttgtcggtcggaggggcgaggacgcgcgggcggaggcgcggttgtcgtgtttaggtagggagtcgagtttcgggtgttcgtcgcgcgtttttcgtcggggttatgtattttcgtttgcgttcgatatcgcgggttggaggcgagtgtagcggcgatagttcgttagcgtcgcggttcgtttcgtttcgggttcgtttttttcgtttcgggcgttttgcgtcggggttcgttttcgtagttttttttagtttttttttagtttgggtttttttagtttcgttttagtttgtggcgcgtttggcgggcgtttttttatatatgttagtatatcggttatcggttgattttttcggtttgtgatttcgcgtgggtgtagttcgtaggagtttatcggtttgtgttacgtacgggggtttttagtgtacggatacgcgtttttttcgttatttgtttatttttattagattttattttttttcgcgtcgtgttcgcggcggaaggcgtttttgtagcgcgtgtattcgcggagcggtggcgattttagtttgagtagaggagttgtagtgatttttgtttcgtttttagcggattgcggagggaattttttattttattttattggggatagggtggtacgtcgtagagtgtcgtagttgtataaatttggaagtttatagtatcgtttgattttttgtgtaatttcgaacgttagtttgttcgggtaattttgagtgggtttttgtagtcggttatgttagcggtttttgtatatttgtattcgcggttttcgttgtttgtaggttgtagagacgggggtattttaaacgtgaaagagtaatgaaggaaaatgtagatagagcgaggacgtcg

SEQ ID NO: 6379 - DNA, 476 bp, synthetic construct
  misc_feature 1..476: note = Description of Artificial Sequence: Synthetic polynucleotide
  source 1..476: mol_type = other DNA
tcggttcgcgcgggaggagtgtgatttaggtgtcgttttttttcgtcgtcgagggttaggagttcgggagcgcgattttttttcggttcggtttggttcggtttggttagttttcgcggtttttgttcgggttgacgtttaggaatgtggtcgacgagaagttttaatagtacggcgtggttttttagtttcggtgagtattcgtcgtggggaagggttttggggatttattggaggtcgcggttcgtagtagttaggggtcgagttacggttacggacgttttggtgtttcggttcgtgtcgggtttttaggcggaggaggcgttcgttgggtttagattttcgattttagtttcggtttttcggcgtttgggttgcgcggagtttttgtttcgcgtttcggatttttacgcgtagtttttacgcgtttcgagttggagaagtcgttagttcgtttttttagggcgtgtcgttcg

SEQ ID NO: 6380 - DNA, 455 bp, synthetic construct
  misc_feature 1..455: note = Description of Artificial Sequence: Synthetic polynucleotide
  source 1..455: mol_type = other DNA
acgcgggcggcgttcggggtttgcgggtaggtaggcggtttggtcgcggaggttttttcgagttttgcgtttttttagagagggaggggtttatatcggttggtatagttattacgggtatcgaaatttggggacgtgttcgattatgtttttttcggtggttcgggggttatttcgtattgtttagaagtttcgtttttcgttttttttttttggtttagtttattattttttcggtgattttgggtatgttacgtttattttttaggttttagtttttttatttgtgttgtgaggagtggaaggaacgggatgattaggagttttttaagatcgagtattcgaggtttttttcggtttcgcggagttaggaggtgttagtcgagatgcgcgtgtcgcgcgcgttttttagtgttcggttttcgtttttgtacggttttcgttgggtaagggcg

SEQ ID NO: 6381 - DNA, 749 bp, synthetic construct
  misc_feature 1..749: note = Description of Artificial Sequence: Synthetic polynucleotide
  source 1..749: mol_type = other DNA
tcgggcggcgcgtttaggtgtaggttcgttttgcggaggagggcgggggtcgggtaagtagagggcgtttagttcgggggcgtcggtttgggttgggcgtttagagtttatttcggcgcgcgggtcgcgggcgcgtggggtagtggtttttttagtcgggaagttgttgtttacgtttcggtggttgttgcggtttcgttagggttgtatcggggtttcgcgtagacgttttttcgcgatttgttgtagtttaggcggtggcggtggcggtagtagcggcggcggtggaggtggcgcgggcgatagttcggttcggcgcggtttttgaattgtttaatttttgttcgcgtcgggtttaagcgttcggtcgttgttttcgcgttgagcgtttgcgtatcgggtttcgtttaggtgaggggcgtgtgttcggagttcgttgggcgtgttcggttcggttcggtttcgtcgtacgttcgtttttttggtttggttgaggatttcggggtttggacgtgttaacgttattttcgcgcgtcgaagttgtgacggtttattaagtagagatttgcgaggtatatagagagggaatgaggcggaatcgttcgggggttcgttgatattgtagagtttttcgtagtatcgttgttttaaatttcgtttttttaggcgtgcgcgtatagcgagttagaggaggtttcgtttcgatttggggtttttcgcggtttttagttcgggggttcgggttttcg

SEQ ID NO: 6382 - DNA, 1134 bp, synthetic construct
  misc_feature 1..1134: note = Description of Artificial Sequence: Synthetic polynucleotide
  source 1..1134: mol_type = other DNA
tcgaaaaatacgttttaggcgtcgggattttagatatttgggaaatagagtgtacgtagttgttgagaggtttcgcgtttggttttttttattattgaggcgtagaggtgttgtggatagtttagatttatacggcgttcgaggtgaaatagaatttttagtttttttatgaggttattggtattttcggttgtttttagagtttttcgatttagagttgaatgtaaagtaagcgttcgaaatgtagaagtagtcggggtcgtttacggtatttgtttcgttcggggcgagagaagacgttaggttgaggttttagcgattttaggtattagtttcgaaggagggcggggagatcgtaaaggggaagtgttcggagggttaacggttttcgcgtattttgcgtttttttgaagcgcgtcgttttttcgcgtcggggattgggatttgtttttggggaattcgtttagaagacggcggcggattggggtcgggtattttttagggttgttaggttttttttagttttgtatttgtcgcgtcgttttatttcgttaggaagttttagagatttcggggatggggtgggagcgtttttttatcgcgggtttaaaaagaaggaaggacgtttttaggggtcgtagaaggaggattagttttaagttataatttttttcggatttaaggtaggtcggttggggtttcgcgtttatacggtttttggcgggggttcgcgcgtttcgggagtttcgcggttcggggaggaaagaggagataagagataggcgaggattacggggttgatttagtcggggtagggattatcgtggaaaaattttggcgaggtggggggacgcggaaagagagcggttcgcgttttgtattttgcgtcgggtatttcgcgttagtgtttcgtttttagtgtttcgcgtttcgcgtttcgcgttttgtttttatttcgggttagttgtatcgcgttcgcgtcgtaggaatcgtggagttggaaagtgggggcgtcgcggttggggggttgttttagttgcgtttcggttagcgatcggcgggtcgggtttaaatttagttaggttgggtaggcggtggtcgcgcgattggggatcgggcgtttcgtttttttcg

SEQ ID NO: 6383 - DNA, 1645 bp, synthetic construct
  misc_feature 1..1645: note = Description of Artificial Sequence: Synthetic polynucleotide
  source 1..1645: mol_type = other DNA
tcgcgtatcgaattcgagttaggtttggttttagggtagatttaattatttatttcgatcgagttttcgaggtcggcgttttagtttttatgtttatttttcggagacgtttcgtggagattttggcgtttaaaattgcgggagtttatttattgcgtttaggtggttagtttttgagttttttttattcgtggttttttgtcggtatgtaggtatgtataagtatatcgtcgagtaggaggatttaacgaatttagtttgtggatatgttttaatttttattttcgttttttttaggtttgtttaggtgaggatgatgggagggaaaagcggtgtatagtcgtaatattggtattttgtaagagtcgtcggggtattgatatagagggatatcgtattggagatgcggtgtttacggagatttattgcgcgcggtgaaatattttaagtatcgcgcggaataattgggtttagtttttttatttcggattttttttaggattatacgttattttttattttcgaatttaggggtttttttacgttgcgtttatttgttttgtttcgtaatgattattttagtttggtggcggtggaatttgagttatagaggtcggttgtataggtagacgtgggtacggaagttagaatttggaatttttaggttttttagtttttcgtaagatttcgtcgttgcggttttagggtacggttcgtagagcggagttttttggttgtattgataggtgttcgggtcgtcgttttcgtcgttgttatcgttcgcgttattgttcgtatcggtttttgggtcgaattgcgttttttcgggtgggtatatagtcgcggggaagtcgtcggggggtagtatggagtcgtaggggtagcgcgtttcgttaggagtcgggtatataggttcgtggggcgttttagtcgtcgtttggtacgggaagagtgagtagggcgtagttagtttcgatttttgaggatcgggggattggaggtagtatcgttcggagtttaggttgtttatggagtagcgtgtagtggtcgtagtcgcggcggcggcggcggcggcggttgtagcggcggagggtagtttttttttttcgtagggggagtttttgcggtcgttcgggggtttcggtttggttattgtcgtagcgttggtaaatgcgttttcggcgtcggtgttattaagtatggtcgcgggggtttttgcgttggcggttgcgggtttttcgtttatcgtttcgtaggagagattgtcggaaaattttttggacgttttgtttaagtttaatttttgaggagagggggtcgcgttggggaggtggttagcgttttcgtcgttgtcgtttcgcgtattttttagcgggtagaagtgcgcgttaggtaggtttattgagtttattaagagttgtttttttaattgtatgttttgtaaagcgtagacggtagttggttgttttttttttttcggtggttttattataaaggtaggatgggggagttagcgttttttttcgaggggaaggtaattttttttttttttcgcgtcggggttatttatttgtcgattcgcgggtcgttattgcgcgtattggcgcgttttgaatttagcgtttttttcggaaggaaagcgtcg

SEQ ID NO: 6384 - DNA, 4698 bp, synthetic construct
  misc_feature 1..4698: note = Description of Artificial Sequence: Synthetic polynucleotide
  source 1..4698: mol_type = other DNA
gcgtttcgggaacgttttttcgttgtattttataggaggtcgtgggcggtggtttaatagttttagtgtagagtttgaattttatcgtttagaaggaaaggtgagtgggggattcgggcgggaggtgaggtttgtcggtagcggtttttaggcgtgttgggtagtacggttagtagaggcggcgtttggttttggatgttgtagcggagacgttaaggagattgaatgtagggagcgaggcgtagcggtcgcggagggtggggtcgttcggaaatttaggcggcgttagttttgtagtatttgtaggtcgggggcgcgtatacgaggggtacgtgggtgtggaggaatcggcgcggcggggttttttttttgtagcgtcgcggcggtcgagtgttcgtgttggaggaacggcgagtggggtgtttgtttcgcgtaggcggtattcgtcgttttagtttcgtatatagtaggtacggttagggatcgggatcgtggtttagcgtttggaggcgttttttacgcgtatttttttcgatgtcggggcgggaagtcgagtggttttgttcggagatgttaggggatgtgggtaggggacgaagaggttttttaattggttaaattttggtttgaggaaagattgaggtggttattgattcgtgggagcgttttggggtttcgagggaacggtagtcgagttcgggagattggtgttgggtattcgcgggggtcggcgggttttacgtgggtggatttcgagttgagggtagggtagggtcgcggatcgttgatttatgagtttttttattttcgtataaggatatttgtatatggattcgggtttttattcgtttttggttgggttggcgtcgggagcgcgtaggggagggacggcggcggagtgcggggtttggcgggtgaggtgggtgaggtgtggtcgcgggggagggggcgaaggtattagaaggttgcggtcgcgttgtcgttgttgtttttatcgtcggcgcggggcgcggagggggcgaagaggtgtttgttagtcgtattgcggtttaggggtgaaaggaaaagggtttatgtaaaggagaaagggtaggtagagatttttgttggtgttagtaggtacggaaggatgtggtcgcggggatttggagtttagagggtaacgttgggtgttataatgtcggagatgatttcgggtgtagaggcgattttagttgggtagagttatagagaacgtggttcgagaaggggagtttttttaaattagatatattttgtgttgttttaaatttagtatttatttttttttatttcgtttttataatttttagggttttagcggagttatttaagcgtttagtattattagttttattttaggtaaaaattaagattaattttgtattttattaattttttcgtatttaagttattacggggtagttttttatagttttaaggcgtggttattttaagtttatagcgagttgttcgtgttttcggtttttgtttcgtaaatttcggacgatgttatcggaggacgttgaaggtaaaggttggtggggttaggcgtcggcgagattgtcgcgttagtatagttttcgcgggagtcgagtgttgacgggtttcgcgattttttttcgagggtaaacggttcggttttttagggatatttggttagtgttattttttttttatcgggtgtcgcgtatttttttaatagaacgtgatttcgtagacggatgaattcggaatcggtaaaattcgtttgtttttgtttagtttttttgttttattatattattgttttttattgcggattgcgtcgtgtgcgtttcgggatcgtttttgtatttttgtttatagttttttattattaaggtagtcggaggaagattttttcgagttatttgttttacgttagtagttatatcgaggcggtttttttcgtattattttttaagtgtagagtttttgaaagttcgaggtttttgtgttacgtatttttttttttgcggggcgatttcgcgtatgcgtgtgtgtgttacgcgtttaatcgtatagagtaatttttagacgtgtaagataaagtattttaagtaaagatggtttagagtttaaattggaaagtatatttcgaggcgttgaatttgttttcgtcgtttgtttcggtttttggggcgtcgtatttaggagaagggttttaattttttgttagattcgttcggaattagtttttttggcggtgtagtaataagtggtttcgtcgttttttttgtgtattcggagggattatatttttttttttttttagtttttagtttaaacgggagtaggtaatggcggggaaagggggaggtgacgagagcggggagaaggaagtatatattttttaattgtgaaattgtttgtttgcgtgttgtgttttgggatttttttgttttaattaattttaattttaacgtggtcgtaacgttaagattaagatttagaaatgaaaacgtatttattttttttattataaaggtcgtttgttgttgttgtttttttaaaatattaagtaattttttttttttttttttacggatttatattttgtttatgagatttttttaattttggtggtttggagaaatgaggtgggggaggggaggattaagggtagtaagacgtttattacgaaaataagatatttattaatttaatagggtcgtttttttttatataagatgtttttttattttttattaatttataataggtaaattttgagtttttttaaagtttcgttatttagcgtttatgttcgaagttttacgaataaattttttttttaggtaaatttgtttaatttttgttttatgtttagcgaagtttaggtacgatgggttaaggatttttggtttttatattgtttgagttacgttttagttggaaaggttattttgggcgagggacgtgttgttcgattggtttaaataaggaaagaaagtggagtattaaagaattaagggtttttgtttttttttatttcgttattattattatcggttttcgggttttgttgagcgttgcggcggttttggttgaaaattgcgttttcgtttaaatcgagcgtaaaatttttttggatagaagtttgaaagaatttagtgtagaaatagattttttcgtttaatttggttttaattagtaattatataagtatatttatataattatttaagtggagagtagacgtttagatttacggtttttacgtgttgttggagttggcgtagacgcgtgtgcgggtatagcggcggacgtgatatcgtatttttttcgaatttttgttatttagggtggtgtcgttttaagagggggtcgtggggaggtggggtaataggttgcgtaatttatttgttttgggggagtttagggtttagagtagagcgtaatttcggggggttgtcgtatagttttatttttttatattagaagagtaatgttttttatggatgattaatagtcgggttttttttgattatgcggcgcgtttttgtcggtattatttagttgttttaatttgatttttattagtaacgtgtttttagaggttgcgagttggattcgtattacgataacggttttttttttttttattcggtcggttttttgggaaggatcggggattgtagttttcgcgacgttttttttttttgcgtagggagtaggtttgagtttttttacgtaatgatttgggagattttaggtatttcggggtttggtcggagggttttcgggttttggagttgggcggtgtttgtagtgtatcgtcgtgagtttttttcgggtataatgtgttggtgtgtagagaggaggaaaggaaaaaaaaaaaatttaatattatttttaagtggtattggtatttatgaagtggtagtggtttatattgagcgtgtttttgtttggaggtgtagggggcggttattgtagtcgaggggagggtattgcggttaagggtagggcgagaggatagttaaggtcggttggtcgcgtgggagtttttttttttcgggtttagcggtcggaattattagtattgcggttaaaggggttggtaggtttttttgtatttcgcgtgttttttcgttttttttgtgtttttcggtttttttaggaggaagatggggtgtttatcgcgaatggggcgcgtcgggtcgtttggtcgggcggttacgtgttttttttttttcgttattgcggcgggagttttaattagagcgcgttagggggtttttttcgggtaggaattattcggttcggcggcggagggtgggtcgtcgttatttgatcgttcgttttcgtttttcgcgagtaaggggcggtggtagcgtttgttcggttataaatggtttttttcgttcggttcgttcgttcgttcgggttcggcgcggattcgtttgggcgtgtttttttcgtcggttttaggcgttttatcgttttgttcggcgttagttcgcggttttagttatttttgagggcgcgtcgggtatttagcgcgtaggttcgtttacggaggtcgatacggaagtttggatcgtcgaggcgtgtggttcgtttatcggtaggtgagcgtgtatcgcgggcgtgggatgttgtggggatagtgcgggggacgtgtggggttttcggatgcgaacgcgagttcgtgcg

SEQ ID NO: 6385 - DNA, 462 bp, synthetic construct
  misc_feature 1..462: note = Description of Artificial Sequence: Synthetic polynucleotide
  source 1..462: mol_type = other DNA
tcgttgggattttgtgcgcggggtacgttagcgattataaacgtgttttaattttgttgagttaaagttttggtgttaggcgttgttttttttttgttcgttcgagtttcgtattttttggtttttttttagttggtgttgtgtttagttttttttgggtaatttatttaggaattcgttgcggttatttttcgttttttttttaatttgggtcgagtaataagtggagttagaattaattttatgggcgagaggagtacggaggcgagtggagcgcgttgtcgttagaggttgttaaggaggcggggtggttagcgcggggggtggaggatgggggtaggacgcgggagggaagggtagggggtggggggcgaggtttcggggattagcgcgcgagagtgtttagttgggaaatgtagtttcgaattaatatcgtatgttttataattagtttacgagtcg

SEQ ID NO: 6386 - DNA, 300 bp, synthetic construct
  misc_feature 1..300: note = Description of Artificial Sequence: Synthetic polynucleotide
  source 1..300: mol_type = other DNA
tcgaattggtttgttcgtggcgggtttgtttaaagtataggggttttcgttttcggtgcgcgttgtttttaggattagtgttgttgggagataaagagttttagatattcgaggttgggagcgtcggagagtttttaggtttcgggtattttttcggagtacgtaagtatagttttaggtttttagggatagatgggttagagtcgtttgtatttgttcgtattttttgggaggttgcgatgatcgtagttagggtggtcgagcgttcggtttattgtattcggcggttgttttgtagcg

SEQ ID NO: 6387 - DNA, 554 bp, synthetic construct
  misc_feature 1..554: note = Description of Artificial Sequence: Synthetic polynucleotide
  source 1..554: mol_type = other DNA
tcgagatatttcgggcgcgagcggtagtgttgtttgtttgtttttttttttttttagtttttttttttcgtgatttatttattttttgtagttttcgttcgtattttttttaatatttcggtatttttgtattatttgttcgggtagtttcggcgggttttgggatttgttgtgcgcgtcgagaggaaggtaagttttaaatttttgtttggaagacgggttgtcgcggttgtattattagtaggaggaggaggagaagaaattatttcgcgatattttattttgcgggtgttttgtcgttgtcgtttttgttgtcgtcgattcgagttcgcgggttcgaatatcgtagcggtggggacggtgggttcggcgggcgtcgggaggaggatattagcggagttttgtattttcgtgtttcgtttattagtatttatttgttttttcgttttttttttagttttttagagaagggattatgatttggaaacgtagcgtcgtttttcgtttttatagtgtttgcgggtttttgttataaggtaattttcgtttcggcg

SEQ ID NO: 6388 - DNA, 1153 bp, synthetic construct
  misc_feature 1..1153: note = Description of Artificial Sequence: Synthetic polynucleotide
  source 1..1153: mol_type = other DNA
tcgtttttttcgtagagatcgttagttgaggttgtaatatttgtttcggtaaagcgttttcgtagttttttcggtttgttcgattcggtttttttcgtttttgtttcggttgcggtattattttttggagttacgtttcggcgagcgggggtcgcggagcgagggggtcgttgtgtcgttatttattcgagtcgttcgggttggtcgcgagtcgggattcgcgagggttggcgggttttggttttcgaggacgtagatatgtggtttgaattttcgtttttttagtcgttgtttttgtgtatttttttgggcgtttttagcgaatgcgagcggcgaggcgagggcgagcgcgtcgaggaagggcgggagaggcgcggagtttggtcgcgtcgcgttgcgtcgagcgtcgggtttttttcgcgagtttttcgggttcgcgcgcgcgttttttattgttttcgtttttcgcgcggcgcgtgttttttatttttcgtcgcgcgttttcgtattcgttcggttttacgcggcgcgcgtttgttttggcggtagcggcggcggcggcggcgcgttttttttcgaacgtcgtttttagggttgttggttgcgttttttattgtttcgcggttgttgttcggggtgggcggcgaggcgggggggaggtgtcggtttggtcgtcggggagggtttatcgttcgggcggatttttattgcgagagcgatgcgggtttaggcgcggcgcgcgggggttgtagggcgtttagtattgggggttgtcggcgcgcgggggtttttttttggtttttaggtattcgttgttgttgggcgtttttcgtattttcggttattatggatatttcgttttttcgtcgtttttttcgcgtatttcgggaggtcgtcggggcggtagtagcggcgcggtttcgcgggtgtttaggtgatcggttcggtagcggtagagtagtggtagtagtcgttattgtcgttgttattgcggtcgtcgtcgttggagagaggaggacgaggagggtaaggggtagaagtaggttttgttttgtttgttttagaggttatttcgggtttttttttattaattaagcgatttcgtgtttatttcgtaggagacgtttcggtagtttttaatttgtgtgcgtcg

SEQ ID NO: 6389 - DNA, 1603 bp, synthetic construct
  misc_feature 1..1603: note = Description of Artificial Sequence: Synthetic polynucleotide
  source 1..1603: mol_type = other DNA
gcgatacggtttttttgacgcgtttttaattaaggcgttaagtttagtttgatagtattttttttttttttcggtttttggtttgatgagtcgtttttatttgcgagcggtgtaggtatttttgttgtcgattaattttttttagcgtcgaattggcggtattcgagtcgcggttgttaggtcgggagaaggttgggtttggtcgggttttgtagcgtttcgggtttcgtttttgttttgggcgttcgttttcgtcgcggggcgaggtggtggagatcgcggacgtcgagggtttttttagttagtacgtcgcgttgtttcggttttggggcgggggtcgcggagttttattaagtggttcgcgtttcggttttcgggagattcgagcgcggggagggagtgggtgtcgcgagggggcggttcgcgcggggagagtcgttagtttacggcgtttttgcgttgttgtggatgtggttacgcgttattcggtttttggattgttaggagagcgcggttcgacgttattacgtcgtggacgttcggggatttttgaattttagcgttaaggttgcgacgatgttcgtgatttttatcgcgaagttattttcgtaaggcgacgtaaggatttcggcgatttcgggcgtcgtatattcgttattttttagttttatgtaattttttttttgttgttttttttcggcgttttgtttttttataattggaagtcgcgaaggcggttattgcgttgagtcgttcgttttgttggttaagtttgggcgattcgcgcggaggagggtcgggttgattgtcgtcgttgagttgttttcggacgggagcgtttgtttacggtatttattttttttagcggtggaaatgtggagaagtaagtgggaggcggtgtcgggaattgattttttttaaaacggtcggcgtcgttgttttgaaatgggcggttaagtgtttgtgggattaagggcggttttagagatgttcggaaaatcgttgttacggttagagtgcggcgtagacgcggtagagttggaggtgttcgcggtgtaggttgttgtttacgtcgtttaggttaggtgttgagggtttagttcgcgtttcggtcgaattatttttagtttcgttgagttatttcgttcgttcggtttttatcgtatcggttagaggaaagttttcgcggtttttacgtttttttatagttgtagcgttttttttgtttttggtttcgtaagtgtttatttgagtcgggagaggttttcgggtcgttttaattgttcgttttatttggtagttcgttttcgttttcgttttcgcggtgaggcgtttttcgttttttcgttttttttttttaaattatagttcgagttcgtttttgcgcgcgcgcgtttttttcggtttaagtgaatagttttcgcgtaagcgggatattgtggtggatgtaatttttttcgtttttagtcgcgaggagtttttcggcgtcgtaggtagcgttttttttcgaagtagttgtatttgtaattgggtagtttggattttcgtgttttgttttcgggatttcgcgtagggggcgtttcgggatattttttgcgggtcg

SEQ ID NO: 6390 - DNA, 1411 bp, synthetic construct
  misc_feature 1..1411: note = Description of Artificial Sequence: Synthetic polynucleotide
  source 1..1411: mol_type = other DNA
acgattagcgttttcggtgcgaggatggaaagaaattttagaaaaattttcgttagataattcggtagtatttggtttcggaatagagaggagagaaagatttgatcgtcgtatttagggttattcgtcgtattaagtttgagggttttttttgtttttaggtttttgtcgttcgagtttaggtttttttaggtgttttagggtcgggttgtattcgagtttcgaggaggttttgttagcgttagcgcggcggtgataatcgagggaggtgggtgagaggtgcggttgtcgaggtaaacgtagagtattcgtttagttttttaagggtcgagagtcgggagtttcgaacgtcgtttaagtagttttttgtttttcgtagttcgtttatatttttgcgggatttttggacgtttcgttcggggatttagggaggagggagagaggagggagggagtgggtagtttgggcgtacgttatcggttttcgtacgttcggtatttttcgtggcgcggcgagttaatgggatttgtatattcgaggtgtaatagtattattgtattaattattatttttattttacgtttagattgtttatttatttgcgggaaatatatgtcgggagaagtttatatttcggattttgtttcgttgtttaaggtgtaatttcggggaggcggcgaggggggaggggagggttttagattttttattatattttttagttttatttgtcgttgtaaattatgaggattttttattgagcggtatatggagattatatatttttttgaatatcgttttttaaagtttgtagatttttattttgaaatgaaataatttttcgttggttttttcggggataggcgttttttgcgttttttcgcgcggtttgggggatttttttcgtagagtaggcgcgtattttaatgtcgtggtcggcgtttagtggagattttttttatagggtttagaataatttttcgcggaatatttatttatatgtagtgtttgagaattaaggtagtttttttgttttgtttttttgcgtttagttttcggatttttgtgtcgtttgtagtttttttttatttcgaatattcgtatagacgcgagtttatttttgttttttttttacgttgggcggttttaaattcgtcgcgagggttgaggtgtttatatttgtttacggtagtttgtttcgtttttaagcgttttaaagttttttaagcgtttatattggttttgggatagtcgattttggtttttttgtttgtttgagggatcgcggaagtggcggggaatgtgttttcgtttgagatcgtttattgtgagtttttaacggaaattttgtacggaaggtaatcgttttttcgttcgcggtaagtaggatttattcgagtagcggggatcg

SEQ ID NO: 6391 - DNA, 2629 bp, synthetic construct
  misc_feature 1..2629: note = Description of Artificial Sequence: Synthetic polynucleotide
  source 1..2629: mol_type = other DNA
tcgtcggggttcggaggtgttcgaagcgacgggattgatagcggaggaaacgtagttttttttcgcgttcgttcgcggtgtaaatcgagtataggtcgtggagttaggttgtttcggttttcgttgggttttaattttcgtttcgtttagtgggtttcgcggtaagcggtttttgaatagttttaagagggttcgcggagtaaatatacgtattggttcgtttttttttcgggtagcgcggtttcgttattagttttgttcggcgcgtttagttatggattgtacggtagtcgggcggggaacgcggagagcgagcgtatcgatttgtgagagaaggttaagaggtttgcgttgtcgacgttcggtcgtattttcgtttcgggtttttttcgcggtgaatttgggtaggagacgttggggtttcggaaagagacgagtttagtagaaagcgcgtagagaggtagttttaggttaggggagtgtaaggttatagaggttagggaggtgagtataggaggatataaattgaggggataaagaggagcgataggagtttaggaaagcgaaaaagtatagagggattttgggcgttggttttagaggcgggtttagagggtgtgaggttaggttggcggcggcgtcgtcggttgcgatcggggtcggcgtcgcgcgtttttgtattttcgtattcgtttgtatcggtatgcggtgggtttttagagatcgaggcgcgaatgtagcgcgtcggttttgttgtcgtggttttagtaagagtaatgtattatggcgagttcgggttgtcgggtataagcgaattgtaggttcggcgtattggtgggcgcgggcgtcgggggcgcggcggtggttgggttggtagggttgagttggttcggcggcggcgcggcggtttcgtggtgcggtggggtaggcggcggtgcggcggtcgcgtgtagatggtgtgcgtgcggatgcgggtgggggtgcggcggaggcgggggtgcggtcggcgggttttttaggttattgtacgagtttattacgtcggggggtagcgttatgttttgtacgcgtgtgtacggttcgtacgaggcggtcgggttcgttagttttttgattatagcggtcgcgttagggttatcggggttcgcggttgtagtcgtagttgttgtagtcgttgcggttgtcgttatttggtaggaggtatagggtatgggtgagggaggttgcggtagcggttacgagttgttgaggaagttagattgtaggtatttggggggcgttaggtagtcgtagtcgtcggtttcggcgttcgttacgtcgtattcgtttgcggcgttttcggtttcgaagagttttttgtcgggttggaagtgcgcgggcggcggtcggaagggtttttttatgcggcggcggcgtcggtagttgtttttttcgaatatgttttcgtaggtcgggtttagcgtttagtagttgtttttgcgttcgtcgtcgttttcgcgcggtattttgatgaagtattcgttgaggttgaggttgtggcggatgttattttgttagttttttttatttttttcgtagaacgggaatttcgcgatgatgtattggtagatgtcggatagcgtgagtttttttttcgcgttttcgcggatcgttatggcgatgagcgttacgtacgagtacgggggtttttgcgtcgggttcggttttttcggggttgtttcgtcgttatttttatcgtttttgtttgggttcggcggcggtttttttggttttttgattgtgcgatcggtttttggggttagtagggttttcgtcgcgttttcgggttcggggtagttggttattatgataaagtcggcgcgtcgcggtcgggtcgtttttgtttttcgttttaggcgttggcgcggtaaagagttggggcgtacgagttcgtttacggttaagttttaaatttttggagattgcggatgtcgttcgcgtttgtttgttggaggtttgtcgttgttttttttttttttttttttttttttagggagcggtcggcgggagtggagtttagtttttggttatggggagttcgtttaatagagaggggtttcggtttcgtcgttttttttcgtttaggttagttttcgttttggtgggtttttttttttgcgtttttttttttttttcgtttttcggtttttcgaagtacgattcgcgtttttggcggagttgttttttggagtttttagtgcgttaggagtttcgttttgttttgattcgtatgggttttatcgagtttcgtttgcgttaggcgttttcgtttttatagcggggcggttagtcgcgtacgggcgagtttatttttaagttattttttgtaaacgtttcgtatagtttggatcggtttgttttcgtttagcgagttttaggggtttagtcgatagttaggtttacgcgtttttgaaatttgtcggtattcgttttgcgggttgggttgggagatgacgaggatttcggtggggtttgttcgtattcggttaaagtttaggaagttcgggttttagcgaggaaaggcgttttaagttttttcgcggtttttaggtgaaagaaaacgatttttttgttttgtcgtttgttgtcg

SEQ ID NO: 6392 - DNA, 1686 bp, synthetic construct
  misc_feature 1..1686: note = Description of Artificial Sequence: Synthetic polynucleotide
  source 1..1686: mol_type = other DNA
tcgcggttgtttttgtttttcggagatgacgcggagttttgttattgttatttaggtttaaggttatttattttgttcgataatttttagtattattaggcgttgttttagtgtgcgtttggcgttttttttagattagtcgacgtagaacgtttagagatttagttaagggtaagatttttagcgacgttcgttagtttttttcgtttagatattagtttaaagggtatggtaggttagggtttttcgcgttattttagatgatttttaggtttcgggtggttattttttgggggagttttttattttttgcggtagttttttcgagagtcggagtggaggcgcggggttggagggtttttcggagtcgtttattagggttttttgggggttcggtttcgattgggtagggggatttggatagggtttcggagcgtggagacggttgaggaaagttgggggtcggggttttggggcggggagcgcggaattcggcgtcgatgttcgcgtttatgaatatgtacgagttattttttttttttcgtgacgttacgggtcgtttcggggtgagcgtttgagtcgtttcgggttcgcgttagtgagcgcggttgttgtcggcgagttagcggcgtagcggcgggaattcgaggtcgagcgtcgcggcggtagcgttagaagcgtatttatcgggtacggcgaggcggtttacggtgcggtaggtatcgggaggcgagagtcggcgcggatagtaggcggcggttgtagttcgttggcggttgttgcgaggatgttgtttgggcggttgtgttgggtgtcgtttttgttggcgttgggcgtggggagcggtagcggcggtggcggggatagtcggtagcgtcgttttttcgcggttaaaggtgggtgttggggaagtttgttttttttttaggagggaggtagggtaggtttgagggtgaaagcggtaaggatttaggtttaagttggatttgtttatttttttttgtcgtagtttttttggtttttgtgcgttttggattttcgaagttagttttttgcgtagcggattagagaggtttattcgcggacgttaatttaatttttgggcggggttcgggggttgagtagaaggcgaggtttggggagtacggataattttgagggttgtttgtgtcggggtgggagcgtagtgggtgagtttcgagttttggtttagggacggttagagtagggcgttggcgcgtcgtggggataagtaggtgtttgtttttgtttgggggaaggattagcggcggtgtttttaaggagggagtcgagttgtgatttgttttttagttcggggatggagtggaaatttgtaggttttagggaaggtttcgttgatattttttaagtttttttagggcgtttttgatttttcggggaacgtgtatttttcgggtaggcggcggggttcggaagaagcgcgggatgtgaggtttttcgttgttttttttatttcgttttgattatcgaggatcgaggagtttaatttggtattatttttttgtttattttgtttttttgaagagtttgattttttcgcgtttttcgttcggaaggaagttagatttaagcgaacgtttggttttgttaggcgagtttggaagtcggcgaatttcggattttgatagttgtttgggagcgtcg

SEQ ID NO: 6393 - DNA, 1686 bp, synthetic construct; identical to SEQ ID NO: 6392
  misc_feature 1..1686: note = Description of Artificial Sequence: Synthetic polynucleotide
  source 1..1686: mol_type = other DNA

SEQ ID NO: 6394 - DNA, 2132 bp, synthetic construct
  misc_feature 1..2132: note = Description of Artificial Sequence: Synthetic polynucleotide
  source 1..2132: mol_type = other DNA
tcgagaaagtgggtgcggtaggcggcgtttggaggaattggcgtaggtttttttttacgtagtatatttggtcgtagatgttgaggaaggtgaagatgtggaagagttggtggttgtggtcgataatgtcgaaaagattcggttggatgcgttcggggattttgtttacgttgaagaaggcggttattattagttagaagtagcggcggtagaagtgtacgaagagtgtggggttttttttacgtaggtcgaagagttagttttcgagtataatggggtaggttatgttgagcggtatgacgaagacgaaggtgcgtagcgcgaacgggtaggtatattagtcggtacggtttttgtagtaggttatagtgtaagttatcgttagtacgaaggttataggtagtattagggcgcggtaggcggcgataaggcgcgtgtagtttacgtgttagtttaggcgttgttgtaagtatggagttatgattttggtatttagtaagttgaggtttggtaataggtagtagtagtaggttatcgtgttgtcgaagtcgtagtagttgatggacgcgtagtttaggtagaagaaggcggcgcgtagacgtagcgataggtagttgaatacgtgcgtcgtgtagtttatggcgaaggttagtagtattttcgacgcgtagtattataacggtagtagttacgggtggtggaagggtacgtcgtcgtcgtttaggaagaatagacggtagaatttgtttaggaatagtagtagcgggatgaagtgcgtttagaagttgagcgtttcgttggtaggttttagtatcgaggttaggtatttttgggtcgtgtacggtagacgtcggtagttcgataggatgaagtattttacgaagtcgtcgggtatttcgttttagcgtagtagcggtttggtagacgttggggggtttcgggaggcggtagagtgggagtttcgggcggttttcgaagttgtcggggtcggggtcggagggttttttgtgttcgcgtttcggggttgtaggcgtcgcggtatggtgttcggggttcggttagggcgcgcgtaggcgatttttggcgtcggttttcgggcgttgggtagttttcgtcggtcgtcgtcggagtttttgtgtttacgtcgggggcgtcgttgtaggtttaggagaagattcgtgttttcgagtagtcgtttttaaaaattaaataaattaataagagaattaattaataggtagcgttgcgatcgttaggagcgcggagcgcgcgaggtttagcggttttttcgttaagtttttgttatcggcgcgcggtcgttcgcgttgcggtagcggcggcggcgcggttgattgcggcggtagcgcggtagcggtgattgggtatcgcgcggtgcgggtgttttcgtcgtcgtcgttttcggagcgggaggtggggatgtgcgagtcgaggcgcggagggagggacgggcgtatcgaggaagggcgggggttttttaggttagggtttcgcggtcgtttcgggggatagagttgttttttgtttcgagtttcgtattattttttttttcgggtcgtcgtagttcgggtcgtttcgttaatgattgatgcgggggtcgtaggttggtcggcgacgcggcggcgcgcgcgtcgagtattagagtcggttttggggttcgaaattcgatagttacgcgggcgttttggaggatattggggagtcgcgttcgcggggggcggggagttgcggttgcggggggaggggagggcgtcggagtcgggtagggcggagagatgcgttagcggtaattttcggaggtcgtcggggaggggggtatttcggaagtcggggggttttaagttcgcgttcggatcggggtcgtgttattgttagttatttggggatgcgtttttcgtttttttattgtttttgcgtgtgtgttagtgtgtgtgtgtgtgtgtgtgtgtgtgtgtcggtttgtttacgtattatacgaaggtttagttggttttttttcgtttagtgggcgtatttaggtgcgttattattttgtcgtttttttcgtttttgttttgttcgaaagaatcgttcgtaagttgttttgtggtcgcgtttattagtttttcgagtcg

SEQ ID NO: 6395 - DNA, 2954 bp, synthetic construct
  misc_feature 1..2954: note = Description of Artificial Sequence: Synthetic polynucleotide
  source 1..2954: mol_type = other DNA
acgttaattatagtggacgtagtatcgcgagcggaaatgcggagagtatcggggtttcgtatgtggggtataatgaaataagagtagtttcggttagaggtttagtaaagcggaaagacggtttcgttcgtatattttttcggaaaattgaagcgttttttttgatttttaaggttagaaagatttattatttttttcgagagggcgtagttatagatttattagagagggcgggtagggtgtcggaagttagagaacggcgtttcgcgtttttttatcgttttagggcgtagaggtgtttttagtgttcggagaggttggtagtgtcggtttcgagggaagcgtggagcggacggtcgataggggatttttgtttaaattttattattaattttttttgagagtaaaaatatggggtcgagttcggtagttgtacgtagaatttaattttttggtagttttcggtatcgacgagttttagatttcgcgttcgtatttcggcgttttgcgcgtagagttaagttttcggattcgtggattgtagttttcgcgcgtcgcggtaaagcgggtcgcgtttttagttttcgaggcgtagcgacggtgggagtcggttcggcgttgggggcgggggcggggtcggcgaagggggagggttgcgcggcggaggggaggagtcgcggcgatagacggcggcgcgtattaatcgggcgtcggttggtaggagtcgcgtagaggttggttcgagcgcgttgcgggcgttcggcgtaaggggagtcgggtagtagtatttttttgggcgtcgttttcgcgcggcggcggcggttgcggcggggtttttttttgtttaaatatttcgttggttagaagcgttggtatcgggggcgggttgggtcgggtcgggtagtgttgtatatttgggtttttttgtttagagttgtgtgttcggggttttttggtttagtcggaggttgcggagcggcgggggttgtttgcgttgttcgttcgggtattttttcggtgatggaagtagtcgtcgtcgtcgttgcggggtcgcgttgtgttttatttatcgttgttagagaggtgggaaaattcgtcgtacggaggtcgaaagcgagaggggttgcgtcgttatgtcgggagttgagttttatataagtcgtttttagttatcgtttttagtcggtttcgtttttttgagcgagataggaagttgcggtttcgagaaagcggaggagacgtcgttggagtcgggaggcgtcgggttcggcggagcgcggagcggggttttgggtcgcgtgaaagttttttttttcgagtcgtagggcgttcgttgttcggaaattgtttagggataagtcggtcgattttttagatttttcgaaggtgcggggatttttagcggaagcgagagggagcgaaatcgaggaacgagtgatagtcggatagttcgtcgggcggtgattcggggtcgttttcgggcgcgttttcggttttaggtgagcggaggaatcgggtagaatcgagggtgggcgttatttaggaggaggaggttgggagggagattggggcgtattcgtttatttcgttttttttcgtaggttttattcggagtcgttgttatgggagagttagttttgggcgttggggattagtcgtcgcgttcgtttcggagtcgcggttcgagtttcggcgttagtagttagttcgttgcgtttttttttcgggttgtagggttgttttcgtcgcgtcgtcggttcggattgtgtttgtgatgagtcgtagttcgtagcgagttttgttttcgggcgcgttttttcggttgttttaggttgcgtttgtagtcgcgtcgcgtgttttgttttcgtagtggtttcggcgtttaggacgtcgttggttcgcgttttttttcggaatgaaggtgtttcgtaggaaggcgttggtgttgtgcgcgggttatgtattgttgttggtgtttattatgtttaattttttggattataagtggtataaggagtcgttgtagtagtgtaatttcgatgggtcgttgggtgtcgtagcgggggtagtcggaggtagttgggggcgtttagggtcgttttcggtcgggtcgtttcgtgtttatgttcgtttggattttcgtattttttatcgttttttcgttgtcgtcgtcggggcggtttttgtagtcgcggtagggatggcgggggttgcggtttttttaggtaatggtattcggggtatcgggggcgtcggggataagcggtagttggtgtacgtgtttattacgtggcgttttggttcgtcgtttttcggcgagttatttaattagaatttcgaggtgttttttttttacgagttagtgtggtatgtatggtaaaaattgtattcgggggacgtcgtttttttgtagggggtagcgcgggatatgttgagcgttttttatcgttgcgatttttttgttttttagttgtatagtttcgcgggtagcggggggcgtaattttattacgttgggtattttcggcgtagttattaataaggtggtgtgttcgttattattttgtttcgtttatcgtaaggaggtcgtggggttggtggacgatcgcgtgtgtaagaagtgttcgttatagcgtttggcgcgtttcgaggaggagtgtcgtaagtatcgtatattagttataaagggtgtgcgcgttttcgacgtggcggttttggcgttattgttgcgagattcggttttggattttaaggttatttatttggtgcgtgattttcgcgcggtggcgagtttacggattcgttcgcgttacggttttattcgtgagagtttataggtggtgcgtagtcgagattcgcgagtttatcgtatgttttttttggaggtcgcgggttataagtttggcgttaagaaggagggcgtgggcggtttcgtagattattacgttttgggcg

SEQ ID NO: 6396 - DNA, 2954 bp, synthetic construct; identical to SEQ ID NO: 6395
  misc_feature 1..2954: note = Description of Artificial Sequence: Synthetic polynucleotide
  source 1..2954: mol_type = other DNA

SEQ ID NO: 6397 - DNA, 885 bp, synthetic construct
  misc_feature 1..885: note = Description of Artificial Sequence: Synthetic polynucleotide
  source 1..885: mol_type = other DNA
gcgtacgtttgcgtgtttattttttagagtttttggtttcgcgatcgtgtattgattttttttagaattttaggttcgttttggacgtggaaggtagtcgtgtcgtttgggaaagtggagtcgagttcgggacgttgtcggtttaaatggaacgtcggtttcggggttcgtttttcggcgggttttcgagttaaattttttaattgttttatgacgttatcgggttttttttttttgtttcggttcgcgcggttttagcgtggcgttaaggagtgtggcggttttcgcgcgtatcgtgggttatttttaatttaggatttggttagtaggttgtttttcgagtcgaggttgcgttgggcggaattagggatttatagttcggagtggggttgaaatagagtttttggttcgagtagagagcgtgtatacgtatgaaatcgtgtttttgggtgcgtcggcggttaggtgttcgatgtcggttttggaagtagcgtcggagttcgtttgaatttaggttcgggaggttagaggttgtcggttacgtttaattgtgttttttttgggaagataatttttttagttttggtttttttttgagttacgggtggttggttggtttggtggaaggtaggtgtataggtaatagagataaggttaggaggtaaagtatatttatgtgtaaatgagacgcgttagggaatttgtaattttttgtattttcgtttttgatgtttcgatttttataattatagaattttaggtagaggtcgtcgattttttcgttttcgttaagagggattcggagtatcgaagttttttagtcggtgtcggcgttttcgcgtttttttttttttttgcgtcgtgattttaaaagggcggcgggcg

SEQ ID NO: 6398 - DNA, 2174 bp, synthetic construct
  misc_feature 1..2174: note = Description of Artificial Sequence: Synthetic polynucleotide
  source 1..2174: mol_type = other DNA
tcgttttatcggttttttgcggtcgttgtagaagcgtattttgttgaatatttcgaggacgtgtttttcgtatagggagcgttcgtttttgttggggttggagcggcgtttggaggtcgatattcggtcgttgttggattttttcgtttgtcgtttttgtcggattaaggagttggttatcgtcgtagttatagttgtttagcgagggttttaggttttagtttttattgcgtttttcggtttgcgtttcgtcggggcgagggtaggatttgggcggttagggaaagggtagtcgcggggaggtagtgttaaaatttgaggaggttgtagtatcgaaaattcggcgtttataaggttagttaaagtttgggtagtggcgataaaatgtgtgaaaatttagatgtaaatttttttaatttttggcggtcggggggcggggcggggcggttttaggtttttttgcgaagtagacgtttgtattttaaatttgtattttaaggcgatcggcgtttaaggggtagtggggagtttagttatattgcgttcggggtattaagtggaaggggaagaacgatgtttaaaataataagacgtgtttttgttggagaggcgtaagcgttgtaaggtgtttaaagtatatttatatatatatatatagaaaattcgtttataaagtagagtttggatttaggcgggtagcgcgttttcggtagaaaatattaaaaagtgaataaaacgtttttttagaaaataagttattaatcgtacgagagaaggagaggaaggtagtaatttaattttttgcggttcgcggttttgaagattaggaggttcgttttagtagggtgaggtttatagaatgtatcgcgtcggttgcggttttttaggggtcggttattcgagttttggaatttcgagaggcgcgaagtgggagcggttattcggagtttgggtaggggcgcggggcgggggtagttgtttttagttgcggtgagagtaattttcggttagtagtattgtaaagagagtgggaggcgagggaggggggagggcgcgagggagggagggagattttcgagggttaagtatttttcggggagaaattagcgagaggcgatttgcggggttttaagagtgggcgtttttttttttttcgtttgtttttcggtacgagacgggtatagttggtgattatttagggaattttaaatttggaatgatttagtagtttaaataagtttttttaaaaggtagcgatgtcgaaggtgttttttttagttcggcgtttatacgtttttaattggagtttttcgttatggtttattcggggtcgtcgtatcgagttggttttcgtataggtttagagggagcgagggaagggagggaaggaaggggcgttttggcgggttcgggattaggttatcgtcgcgttgttgttcgtgttttttaggttcgcgcgtttcggtagttagtagtttataggtagtagattagatggggattattcgtcggacgtaaggtcgattatttagtttcgcgtcgtttatttcggtcgaggaaggaagtgattcgcgcgttgcgaatattcgcgcgttcgttcgggtggggcgggggttggttgtaggcgatgttggttcgcggcggttgaggtttttggtcggagttgtttattatggtttggcgttaggggcgtaggcggggtttttaggttttttggggttatttcgcgaggtagtcgagggcgtaattcgggcgtttggggtcggaggcggaattaggggtcggggttaggaggtaggtgtaggcggttgttaattcgtttaatttgttgcgcgggtggtcgtttagagtcgcgggtttgcggggcgtttttcgtcgtcgcgtcgtcgtttttttaggttcgggagggggcgtttagggtggagttttatttatgggttgaggttttgggcgcgcggagtcgtcgtcgttttttcggttggtttagttggagtgttagtttcgtaggaaattcggggttcgggcgagagttatcgagatggtaggtgggacgtagagttcgcggtagttagagtttttttcgtacggttcgtcgatttacggaagagcgaaagagcgtttaggtggggtcgagttgggggtcgggtttttggagcgttgggaagtatagcgcg

SEQ ID NO: 6399 - DNA, 873 bp, synthetic construct
  misc_feature 1..873: note = Description of Artificial Sequence: Synthetic polynucleotide
  source 1..873: mol_type = other DNA
tcggagagttgttatcgatttttttaacgttttaagttttagttttgtcgttcgcgtttttttttttttttgggttataattttggttttttcgggtcggttttacgtagttgcgtaggagttcgcgggggaagatttttcgtggggatttcgagtacgacgtgcgattttaaatttttatattttttttgtcgtttcgtaggttatatgtatcgggagtcgggcggggtaggcgcggttcgtaaggattttcgcgatggagacgtaatattgtcgcgattgtatttggggtagtttcgtcgcgttttagtcgtttttcggtaggaagcgtaggtgtgtgagtcgattcggagcgagtcgcgttttcgggttagcgtgggtagggcgtcgtagtttgcgtagtttcgaggatttcgcgtcgttttttcgagttagggtttttaggagcgggtcgcgtaggagacgttagagggggttgttagcggttgttgggagaacgggttacggaaatagttttttttaaagtcggggttatcgtggggtgggcgagttcgtttttttaggtcgggggcgcggattagaggggacgtgtgtagacggtcgcggttagttttatttcgttcgggcggagacgtatagttggagttggagggtcgtcgttcgttgggtttttaggggtttgaacgtttaggggtcgcggcgagtttattcggagcgagttaggtgagtaggtcgttatggcgatgcggtttcggagagcgtacgtttgtcgcggtcggtatggaaacgttttcgttaggttcgggggcgtcgttgattggtcgatttaatagacgcgggtgggtagtttagtcgtatcgttaagttcggtcg

SEQ ID NO: 6400 - DNA, 2174 bp, synthetic construct; identical to SEQ ID NO: 6398
  misc_feature 1..2174: note = Description of Artificial Sequence: Synthetic polynucleotide
  source 1..2174: mol_type = other DNA

SEQ ID NO: 6401 - DNA, 510 bp, synthetic construct
  misc_feature 1..510: note = Description of Artificial Sequence: Synthetic polynucleotide
  source 1..510: mol_type = other DNA
gcgggtatttcgtacgttacgtaggcgttttttcgatgagtttttttttattttatagtttagggaaggtgcggggttgcgggcgtagagttgtataagtagggttgtaggttgggttaaagtcgttttgcggggatcgatatgaattcgggttttttatcggaagggattaaggattgagggttgagcggcggtagcggagatttcgttcgtagatttcgtttcgtcgtcgttatttttcgtcggttcggatgaggtttttttagttttgggacgttttgtttttatatttattatttttttattttaggggtgtagcggagttttagttacgaattatttaatattcgtaggttatagagcgacggaggttgaggttgtgatcgaattatcgacgtttttttgaggggtgaaagtacggtcgtggagattttaatcgagtttacgttggcgtaaaaggtaaaagtcgcgttagatttcggatgtcgttttttttttttcggttgcgcg

SEQ ID NO: 6402 - DNA, 511 bp, synthetic construct
  misc_feature 1..511: note = Description of Artificial Sequence: Synthetic polynucleotide
  source 1..511: mol_type = other DNA
tcggagtttggggtcgggttttttttatttgcgtgttgttttcgggtttcgtttcgtttcgtttcggagggatttttaggtcgggtttagatttaggagttatttggggatttcggggtggttgcgcgtcgagggggcgttagcggggacgtgagttggcgtcgagatagtttcggttttttagcgttagggttattgttaggagattttcggttagtatttacgtggggcgttttcgggagttcgaggggtttatcgtttgtcgggattcgttattttaaagcggcgggtgtcgtcgagtcgttggagttttcggattttaggttcgtttcgtcgtcgagtatgtttagtgcgagtcgtcgtcgaaagttttttggaataaatattcgtatttggggtttggcgggttaggaggtgtcggacgggcgtgggagggggagagcgagttggcgcggtttaggcgttcggcggttaggtttgggtttgtttgcgtttaaatcgaattagagcg

SEQ ID NO: 6403 - DNA, 417 bp, synthetic construct
  misc_feature 1..417: note = Description of Artificial Sequence: Synthetic polynucleotide
  source 1..417: mol_type = other DNA
tcgcgtcgtcgttttggcggggacggtgtagtaggcggcgggatgcggcggggcggtagtttgagcgtttcggatggttcgcggcggggcggtttgtaagagcgacgcgcggttgttgttggggcgggacgcgttgcggtcggcgttcgttttgttggttttcgtcgtgttgttgggcgtcgcgttcggtttcggtttcggtttttggtttggttgtcgcgcgggtcgttagcgtacgcgatattaggtgggtcggtcgagtagatagcggcggggcggggagcgcggggcgcgtggtttttgggttttgcgggttcggagtttcggttttgcgattttttgagtttggttgggaatttcgtacgtaatcgtttaggcgtcgggttttttttttgttttaggagggaggtggcggcg

SEQ ID NO: 6404 - DNA, 1748 bp, synthetic construct
  misc_feature 1..1748: note = Description of Artificial Sequence: Synthetic polynucleotide
  source 1..1748: mol_type = other DNA
acggaaatattcgaatcggtgaaatgtaaatcgtgtttattgtataagggaatcgtgtagggagagtcgttttttataaggagttaattagcgtttgtttcggatattttcgcggggtttttagcggggtttaaattggcggcggtttagtagggggcgaggggtgttgggaaacgtcggggttgcgaatttacggaagaaaatgtattcggtgtagttgttttagattttgtcgtcgcggtattggttgacgaaggcggcggtgttcgaggagttatacgttattatgtggaagtcggtttcggataggcgattaaaggtttgttttaagtaggtgaatttgaggtagaagcgggacgtgtattttttcggttgtcggtcggggtcgcggttttcgttgagcgtgttttcgaagatttttttggttagcgcgatgcgttcgtatattatgatgcgcgttatacgtcggaatttggcgtcggtttggttgtcgcgtacggtggtgtaggagtttcggtagtttagcgtgaggaagttcgagcgtttgttttgcgcgtcgtcgtcgtcgttattatcgtgcgttttcgggttcgagggtacggcggtcgtcgtttcgcgtagtagtagcgcgtcgttgttattttgcgagacgttgttttttaggtcgttttggtagttttcgtcgttgagagagttttgtttggtgattttgggcgatagtagtttgattaagtcggtgagttggaaatattcggtttcgcgtagtagtcgttttttttcggggaagtgtttcggtagcgcgagttgtttgtttcgtagataatttagtacgtatttgaaaaggaagtcgtttcggtcgatgaagaagcgcgttcggttgtttttgggtagttcgtttcggcgtcgggcgtcgttacggggattagagggcgagaatatgttggttaaagtattgttcgggacgttgagtagcgtcgagtgtttggttatataaatttggtcgtttacgtttagttttattattttagggaagggcgagggtgcgtagggtttcggggcggcggcggtcgacgcgtcgggcgagttggacgaggaaattatttcgttaatgggtaggatggtgttgtcgtcgttgttcgtgttttttagagttatagttttttcgtcgtcggtttagtgattcgagagagttgtattttttcgttttcggagttcgcgttttagtttttcgcgtgtttttggcgttttgcgttttcggattgggcggcgcgttttttcgatcggggcggtttcgtttagggttcggggtagcggcggcgtcggcggcgttcgagttttatcggaggagagacgcgcgagagaggagtttcgtcggtgcggcggcggtaatggagaggtaagaaggagttgttgtttttttggggcgagggcggggaagtgtgagagagatttgcgagaggttttagggttgttgttcggtttttcgtggggagggcgggaggaggggtcgaagtaaagaaaattcgtcgtttcggtagtttgtaagcgtgtcgcgaggtcggagcgtcgacggtggcgttaattatttttggtagtacgggaggaggtattgacgttaagtttcggattgggattcgagttttagttgttatttaaagagataggttgtagtcgcggttttcgggtttcgacgttagggggcggggtcgagagtcgagtttgtaagaggtgtagtttttcgattcgcg

SEQ ID NO: 6405 - DNA, 1748 bp, synthetic construct; identical to SEQ ID NO: 6404
  misc_feature 1..1748: note = Description of Artificial Sequence: Synthetic polynucleotide
  source 1..1748: mol_type = other DNA

SEQ ID NO: 6406 - DNA, 648 bp, synthetic construct
  misc_feature 1..648: note = Description of Artificial Sequence: Synthetic polynucleotide
  source 1..648: mol_type = other DNA
acgaaacgttgttatatcgagcgaatgtaacgcgtatatacgtttatattcgaatagtataagtaagagatcggttgggtgtggaatagaggcgtatatcgcgtaacgtatttatagtatgtatacgcgcgtatttcgatttcgttttttttcgcgcgtttttatatttcggcgtttaagattttcggtttacgaattttattagatagtcgggtaattttttaggtgcgtagtttgttatttcggcgcggtcgtttttgcgttttagcgtttttttttacgtcgttttttttagtcgtttgcggcgtcggagtttagcgtaggttagtttagttagtttcgtcgtgtatacggtgcgtagcgtgggttcggggttgtcggtttagtcgtttcggttacgtgtgagtcgggggcgcgggttagcgcgatgcgggtaggagttgcggcggcgtcggtgttgtcgtttggtttcgcggcgggggtcggtgtagaggagatacgtagggagggagggaagagaggagggaaggaggagggagggggttagtcggggttattgtttggatagttgggcgtcggtttttttaaaggtggggttattcgcgttcgtacgtatattagttcgaatttttattttcgatatagtcg

SEQ ID NO: 6407 - DNA, 863 bp, synthetic construct
  misc_feature 1..863: note = Description of Artificial Sequence: Synthetic polynucleotide
  source 1..863: mol_type = other DNA
gcgtataggaagggcggaggcggtattcgggggggattgtttttagaggaggtcgttgtgagtcggcgacgcgaggttgggggagtgggaggtaaattcgttaatttgtcgtcgaatggttatttttagtttttcgtttacgagggtggaaaggtagaaggtttgaaggtaaggcgtgagggagcgtttaggacgttttcggaggggtcgggtcggggtttgcgttgtagttcgtacgtattttattttcgcgtcgcggcgttcggtcgttcgtttttttttttgggttttttttggtcgtcgtcgtttttttttttttagtttttttttttttttttttttttggtttttcgtttttatcgttgatttgttagcgtttttgttcgtttttttttcggcgttcgttgttttttttgtagcgtgtttttcgtttttatttcggatggggatggggtagggggcgcggggtgagttattaattttagtcgtttgtttggtcgcgtaaggcgggaaagtgggggcgtttttgcgttttacgttaagtttagggttacgagtatttttgtggagatcgggagcggttgggttagggatgatgttttttttttttttttttttttttttttttttgttttcgttttttttttgggttttttcggggattattttttatttttcgttagagtcgttttgggagagtcgagggtttgagggtcgattattaagggtagagtttattttttggggagttgttggaggagataggtagcgtcgggaggtggtttatatcgtatcgtcgagagcgttttgttttcgtatcgttgaaatttaattacggttataggttataacgttaggggtcg

SEQ ID NO: 6408 - DNA, 1288 bp, synthetic construct
  misc_feature 1..1288: note = Description of Artificial Sequence: Synthetic polynucleotide
  source 1..1288: mol_type = other DNA
gcggattcgagagcggcgattttcgtttggaggtcgttggtttttatatttaggtataggtaagatattacggttattattgataggagggtcgttaggacggtatacgggggtatggttcgggtataatgttgttcggtaggggtcgggttttcggatttgggttttcggtttttttttttttttgcgtgtttttttagtagtatcgtggcggggtcggtcgtttcggtttcgttttttattttttatattttaaataattttaaaaggaaagaaaaaggtcgatttttttaaagtttagtttttgtggttgtataattagttggtggagttaagtttacgagcggatacggatttttgttttgtttagcgtttagattcgtaggcgtgtattattttcgtttttttttttttttttagttggaagtgaaaagtatttttcgttcggggattgggtggcggtggggtaaaaagtaagacgaaatttatttagatagttttttcgatttttagaggatcgatatttttttcgagggttttaatagtggtcgtttagggttcgagggtaacggtcgaggcgttacgcggggtcgcggttcgttttggttacggaggatcggatttgttgcgtttttgtgagtttgttttatttttatttattcggtgtttttcggtacgtcgatttgttttttatttgtatttagtttaaggtaaaaaggttgtgagagtacgttatagcgtagcgcgaaaggggcgattaaggtggagaagagagaggaaaacgaaataaatttaaggaattaatgttattcgcgaagtcgaagtcgcggttgttcgaaggattttcgtagtttcgcgtgcgcgatttttaaatatttttcgcgatgttcgcgtgagtgtgtgtgtgagtgtgtgagtgcgcgcgcgtttcgagtacgacgtttttttttcgattttttttcggcgttcggcgttcggtttgtcgttttcgttgttgcgcgtttttttttcgaaggtaaagtaggagttcgttttattattataatgtatttattttggtttagttcgcgggtcggttcggggaatttttaagggaggcgggaagtttgggtgggagcggggtaggaggtttgttattagtataatgtatgtaaatagttggagcggttatcgtgattggagaggagtttggcgatttttttttttgcgcggagtaattttagtattttcgagggttatttttttggtttgggtcggggtcgaagcggggtcggttgcgtaagaggcg

SEQ ID NO: 6409 - DNA, 1275 bp, synthetic construct
  misc_feature 1..1275: note = Description of Artificial Sequence: Synthetic polynucleotide
  source 1..1275: mol_type = other DNA
acgcggagtaaaatttaatcggtttagggaatttagatacgtttttcgcgtcgtacggattttttagaaggagtttggaggtaggcgttggatttttttaggtattttcgttttcgtcggtttttttttttcgcgttcgttgggttatttattcgcgtggggtatggtgatggtttcgttggtgttggagtttacgttgaagatgattacggttgaggcgttttgtaggaacgcgtttcggattttatttttgtacgtgtagttgtttttggggatgagggttatttagtttttgtcgcgggtcggggcggcgaatttggtgttggggtcgtaggttaggcggtcgtgggtcgagttggttatgattattttttcgcgggcgttttgtttgggcgagtgtttttcgtagcgttcgtatttcgtttttttcgtgtgtagtttcgcgtcgtcgtcgttcgtcgtttcggtttcggggttcggcgcgggttcggcgtaggtgatgtttacgaaggcggtgtattatttttttttttcggttacggtaaagtttaggtagagtagatgtacgaaataaaaggaaagtagttatgttgagagagttagattgtagtacgtttggatgagagatattgttatttttattcgtcggggtttttttttcgttttcgcgtttttttttcgtttcgttttttttttttagtttcggttaatttcgggtcgttgtttttttttttgttgttgtttattttcgggtcggaggggtcgcggtcgggacgcgtagtcgtcgcggggatcggatttcgggcgagcggatggcgttggttttttttttttttagttgtagcgcggtggttgtattttgttttttgggcgttcggggggcgcgggaatagagggttcgcggggtttgcggaggagttttgttgtcgagcgttttgttttttcgttcggtttcgtttttttttataagggtggtcgggggtttacgaatttgtagggtggcggttttgcgttttttagtttcggcggggacgggtacgattgttcgtagtttggggtgttgcggtgcggggtgttgtttagggtgtttcggtcgtcgttattgagcgttggggcgcgcgaatttagttgtagtcgttgttgttttgcgtcggtttttttaggttgcgggcgttgcgtttttgatttcgtcggtggttgcgtttgggtacgtatttgtcgcgggcggggcgggtttggggatagtgggagcgagtaggtagagcggagtaagcg

SEQ ID NO: 6410 - DNA, 1071 bp, synthetic construct
  misc_feature 1..1071: note = Description of Artificial Sequence: Synthetic polynucleotide
  source 1..1071: mol_type = other DNA
gcgagcggtggttcgatttcgggtgtggtaggaaggggtgtttcgcgttttagagttagtgttagtttttattttttcgggaagtcgagatttagggggaataggttttttagagtttagtttgtagggacgcggagggtaggagtcgtcggcgaggagtagttaatttgttatttttggcggttgtatttttcggcggttataggttgttcgatagcggattttagggttttcgcgacggtatttagagtgtttagaagggaggtcggggtcggggtgggtcgggaaaatcgagggagggaaggagtttggagaagtttcgtttaggcggggagggggcgattcggggcgtatttttcgattatgatttttatagattttggcgtcgtaatttgcgttttttgaggtcgaagatgcgtattttggagaagatatttattaggttgtcgttgtagagttcgcggtttttgttggggttgtttcgttttttgttggtagacggtcggttttagtgttgttttcgcgtttgtcgtttttggcggattaagtcgttagcgatggtcgcggttatggtggtttcgggaacgggttcggggagggagggcgcgggaggacggcgagtcgggggtatcggaggggaaggcggcggcgtagatcgtggttcgttttcggggtagaggagggggtgttaggcgggattggggagaggggaaggggggtttagttttgatcgggatttatcgtttttttcgcggggcgcggggttaggcgcgtagatgcgtttagggcgtagtcggacgatttcgggaagtcggacgtcgtggtcgtcgtcgtttggttacgttcgagtggagagcgggatcgcggttgcgggcgttgttggttatcgttcgtcgtaggaatttcggcgggggtcgttatcgttattcgcgttgttttttcgttttgttcggttttcgggcgggaggtagagtcggtcggcggtttttcgggcgtcggttggagggcgggtttcggtagggtttttgcgcgttcgtcggttcgggtcgcgttgggtaggatttagcgtcg

SEQ ID NO: 6411 - DNA, 694 bp, synthetic construct
  misc_feature 1..694: note = Description of Artificial Sequence: Synthetic polynucleotide
  source 1..694: mol_type = other DNA
acgttttcgaatttcggattttagttgttattttatttgcgtcgtttcggacgttatttggttgttgacgtggtttcgagttagtaaataacgttagtagtttttttagatttacgtcggttcgttttttcgtcggtttttttttcgtagtggttttttttgtagtttttttgggtttcgcggttagtagtgtagttcgtggagtcgcggttttgttcgttttttttgggtggttttagtgcgcgggttgatatttatttagtcggggaaggtgaggcgagtagaggttggtgcggaatttgtcgtttttagtagcgtcggcgggttaagtttagggtcgggtagataaaagaggtcgttcgcgtaggaaggtacggtcggcggcggcggagcgtagcgatggtcgggcgagggggtagcgcgttgttggttttgtgcggggtattggttgtttgcgggtggtttttgggcgtcgaagtttaggagttcggggcgttcgcggcgggtatgaggcggcgtcggcggttgtagtaagaggacggtatttttttcgagtattatcgttatttcgagttgcgcgaggcgttcgtgttcgtgtggttgtagtgtatcgttattagtaggatttatacggtggggcgtagtttcgagggtcgggagtttttggttatcgagttgttcgataattttggcg

SEQ ID NO: 6412 - DNA, 694 bp, synthetic construct; identical to SEQ ID NO: 6411
  misc_feature 1..694: note = Description of Artificial Sequence: Synthetic polynucleotide
  source 1..694: mol_type = other DNA

SEQ ID NO: 6413 - DNA, 1424 bp, synthetic construct
  misc_feature 1..1424: note = Description of Artificial Sequence: Synthetic polynucleotide
  source 1..1424: mol_type = other DNA
tcggcgggtacgttggggatgtattcgcgtagttcggcgaaggcgttgttgatgttttgagttttgcgtcgttttttgcggttggcggtgtttcggcgttttatcgggcgcggtttttttaggttcgggggttcggcgttcggcggtattttttcgtaatgggagtggtttaggtcggcggcgtcgttggtatattcggggttgtaggatagggttatgttgtagtcggggggcgatatttcggggtggtcgatgagttagttatggaagtaggggttttttttatggttgtagcggttggcggcggcggcggtagttgcggcggcggcggcggtaaacgggtagttttcgtggtgtattatcgggtggtggggaaaattatttattagatttatttcgtttttcgcgtttttttacgcgttttagcgtgcgcgtagtttcgtcgcgttttcggttcgggtttttgttttagcgttcggcgtttttttttattttttattttttagttttcgggcgttcgggttcgttcggtagtcgtagagggggttgttgtagttcgggtttcgttttttcgtttggttagtcgggttcgttttagtagcgttgcggtcgtcggttttttatggggcgcggcgagttggttttggtatcgtgcgtttttggtcgtcgtcgtcgtcgttttcggttttcgttttgttttacggttcgcgtttcggtttttgtttttcgggttgttgcgcggaggtagaattttttcgtgtttatataaaggtgtcggggttttcgcgaggttggtacgcggagtttcgggaatttaagttcgggtcgcggttttggtatcgaagttaattcggaatttaggggcgagtttgagtcgcggttggaggagtcggtttagttgtgtcggggggcggcggggtcgattgtttattgtaaagttattttcgtgcgattttttttttttcgtttttttttttttttttattagttcgatttgggtttttgggcgtttattgttttaatgaaatttttggttgttgttgttttggtttttaaatgtgattttagttgcgagtaacgtgttttcgtttttttcgcgttttttcggagggtttttagagaggttttagtgtatttatttttttagatttttttttttcggggtaaggatttggggttttgaatgagttttggagttcgaagatcgcggttcgggttttcggagggttttgcgcggtggtcgaggaagtttcggggtgacggcggtggtttttttgggttggacgacgtgaggggagtaagcggatttttttagtaagatttttatgtatagttatatttttagggtcgttcgggttaatatatgtcgttagaggttttttacgttaatttcggggcggtaggggcggcgtttcgagttttcg

SEQ ID NO: 6414 - DNA, 1215 bp, synthetic construct
  misc_feature 1..1215: note = Description of Artificial Sequence: Synthetic polynucleotide
  source 1..1215: mol_type = other DNA
tcgcgtaggttttcgggttcgtcgtagattttaacgtaaattttcgggtttttcgtaaattttaacgtagatttatcgtggtttcgttcgcgtcgggtttcgcgttcgagaggtcgagttcggattcgaaggcggcggcggcggcgggcgtttcgcgaggattcgggagtagcgtagcggcgagtagagaatacgttatagagaagaagtttagtaagtgtatggtggaaggatcgggggtgggggatcggttcgttggcgggggtaggggtgggggcgcgggcgtttttgcgaggtcgcgggttttttttggtttttttttttcgggtttttttcggcgattttttttgggcgagtcggaggcggcgggagcgggttcggggtttcgcgtttttaattttgtagggcgtttttttagttagtgtcggggaaaggcggcgggtgttaggtaaaagttttataggaaatcggatattcgagtttttcgtattcggagttcgcgaggtgaagcgagggcgagggaggacgtcgtcgcggttcgcgtcggtgtagttttttggagaggcggggcgggggatattagaatatttcgcgatgtttagtttttttaaattcgttagagttttcgtttttttttttttttttttttttcgaagtgagaggagtcgggtcgcgggcgttgcggcgggggcgttggcggcggtgtcgggggcgggaggagggcggcggggcggttggcggcggcggggttcgggagcgtcgcggcgtaggattttttagagcgcgtcgggttgagcggcggcggcggcggcggcgggcgtaggggtagggtatgattgacgcgttttttgtttgcgtttatgtgagagaaagcggtcgagggagggagcgtgtcgagttcgggttgttttttttttttattttttttcggaagtcgtttttttggagtttttcgtttttttcgtttttttttcggcggttttatttttttcggtttttttttggattttttttttttcgtttttgttttttgcggggagcgggcggtcggaggggtaagtttagtttcggggttggcggttggcgggatcggttttagaggtgatgcgattattttggattacgtgtagcggggagaaattgggtatcgtggggtggagggagttttcgttttattttcggttattttcgagtttttgttttttttttcgtacg

SEQ ID NO: 6415 - DNA, 1184 bp, synthetic construct
  misc_feature 1..1184: note = Description of Artificial Sequence: Synthetic polynucleotide
  source 1..1184: mol_type = other DNA
tcgtttttttttttcgggtcgcgatattgattcgttaacgttaatgggggttcgcgattgttgcggggacgagggcgtagagtagttttcgttacgggtcggtttacgtaggggtcgagaaagtggcggagaggcggtggtcgaggtttaggggcgagcgcgggttgagttggtttttgttgcgtttacgagcgatatttattttttcgttgcggacgtttcgcgggcgttaggttgggggttttgcgatcgatttttttcgttttcgaggtatcgtcgggttcgtttggtaggtagcgcgtttcgcgagttggagggtcgagtttcgcggggtcgtggggcgtgtgggtgaaggcgatatttcggatgcgggacgtatgaatggtggtagagtaggggtcgggattcgtttatgggttgggagagagatgtttttgtgagtacgggaaagtagcgttgtcggagaatagttttgaggcgggattaaaagtcgtcggcgaagtttcgtcgaggaatacggtcgttgttcggggcggttcgcgagcgtgcgtgtgtggaggggaggatgtcgtttcgcggggttttcggagggtgtcgggagcgggtttttagtgtagttttttcgttttcgttgggggtacggttgtttataggtttcggttcgcgtgtgtggagcggggcgagggggtgaggcgagggggtgaggcggcggtcgagtcggggcgttgggcgcggggttggcgggaggcggcggtggcggttcggcgcgaaggggttaagcggcgtatcgttttttcggcggtcgggtgtaaatagaggagttttagtttattatgtttggtcgtcgcgcgtagttcgagttcggagttaggcgttgtaatacgatacgttttagatttaggtaatttggtagcgttgggttcggttttttacggttatagcgagggcgcgtcgcggtaaggtgggtgagcggcggcggcggcggcggtttggggcgggttggcggagcgcggttttcggtgaggtttttcgcgcggtagggtcgttcgttcgtttcggggattgcggcggtggcggtggcggtggtggcggcggcggcggcggcggtttcgttttttttttttgtggtgtcggaatgggaggaggttcggcgcgggtttgaatcggtgcggaggtaatattcg

SEQ ID NO: 6416 - DNA, 5820 bp, synthetic construct
  misc_feature 1..5820: note = Description of Artificial Sequence: Synthetic polynucleotide
  source 1..5820: mol_type = other DNA
gcgagtagaaggcggacgttttcgagtcgtaggttacgtagttgttatagttttgcgattcgttatagggatttttatagacgtttagcgtcgcggtcgagttgagttcgtggcgcgcggtggttagtagtcggttttcgtagatcgggtagtagatcggcgtttgggtcgaggcggcgggttcggagttcgttagcgtgcggttttcggattcgtagtacgtgtttagggagttggtggttattaagaattgtagagagaggtcgcgaggattggcgggaagtcgggttggaggttggggttttgggttttgttaatttcgcgcgtcgtttacgagggcgtgtttcgagtattttcgggtttttcgtcgtttatattaggatgttcgtttttttttattagtttgtgcgcgtttggtttttttcgttacgtggggtttagtcgagtatttatattttttttcggagggtttttaaggtttttgacgttatttgcgcgttaagtttttttttttaggggttttttggggttttaggatttttttggggtatagtttgagttttgtggtttaaatattagggaattcgggttcggttcgtcggatttttttagcgtttcggttttttttcgggggtttggggagtaggggttgggcgtgaggggcgcgcgatttaggttttgttagttcggaagtcgtaggtagtcgtaggtcggatattttttatttttcgttttcgttttattcgttttatcggtatttgcggtggtttgggcggggcggggtttcgtttatttggggagtcgaggagtaggggtatttaaattgcgggtaggatatggcgggcgcggttcggggcggacgggcggggtttgtagggttttgcgcgttggggtcggcgtggcgcggttattgtttcggagttgtaggtttttaggcgttgggagggcgaagtaggagagtcggttagtttattttcgcgtttcgtaaatttttttaatcgggtaataaagtgagtagcggtggtcgtcgcgatttttttaatttcgtatttcggaggttcgagggggttttgggatcgagcggtttcgtagcggcgatagaaatatatattttacgaaaaagaaaaaaaaaaaaacgagtcgcgcgaattcgttaagttagatgtgcgcggtttgaagcggaggaggttttgacgttagttttatttcgcgtagttcggtttggtcgtagattcgtcggttattcgtcggcggtttaggtcgggaggggttaggatagtttcggtcgcgcggtggacggaggggttattttttcgggcgttagtaaataaattttattcgagttaatatcgtttagcgaacggtgtttttttttagttattcgagaacgagaggtatttttaattagaaattaattaatgagtagttgttttttttcgttttattgtaattattcgttttaattataaatgagatttatgaaaggatacgttgaagatgtaattaatagttaaaattagttcggcgttgcgtaggcggtcggttcggtttcgcgttggcgcgttttgtttcgagtggtaggaaggggttcgtaggcgtttcgtacgcgtttcgttattattgtttaatcgagaattagtaacgtttttcgtcggtttttattttacgtcggaatggatttttagaatttattgcggtcgtaagatagttcgtaagagttggttaaaatgtttttaggtgcgtgggggtttcggggttttagttggagttcgatattttgagattggcggttcgagggttgtagggtcgtttcgggcgtgcgtttatcggttttgtatttttgggtagtcgagtgtcgcggagaacgttttattttttttatcgcggttttttaagttttcgtttagtttatcgtttttatttcgttttttcgattttttttttcgatttttttttcgtcggtcgtgtttcgtcggtttttttttgtttttcgcggttaagtcggggattgtcgggcggttttgcgcgttcggaagagtaggttttttaatttaggtttcggtttttttcgttaagttcgtttttttcggcgtttcgtagggttggttgcgagggagggggcgttgggtgtttggcggaggcgtttttttttgtttattttgtttagttttttgtttggggcgtacggagtaatcggaagaggggatcgagcgtttattttaggattttttcggttagtattttttttgggattttgtttaagtttaaagcggaggttagtgagtaggcggtaagggggcggtaagggggcgttcgggttatttcgaattcgtttttcgttttttgcgttatcgtttttcgggatcgggattcgtttcggttgttttcgttttttgggtcggtttttcgtggtaagttgggaaggaagtcgtgtaaggtagcgttgtgtagatttgtttagaaagatttttgggtttagatttgtgaatcgttttagggttattttttaattaatgatgacgttttcgttttttttttagttgtaagtttgttttttagaaacgaaatttgtttgtttttttgatagttcggttgaaggtgattgatgattatttggagattatagtatatattatataatatttgttgcgtaattgttttaatttatagatgaaaatacgagtttttcgatcgcgttggatcggagcgggttacgttcgagttgtttgtagagggaaattatcggaaataatgaatagtcgttttatgtaaattatttagatagtttagcgtcggtagtcgcgagaaatatataaagaatacgagttaaatgatattaataattgtttttgaattttgtattgatttcgcggtaggtcgcgttttttttttttttatttgaatcgttaatattatttttttgtaaataataagaaattagttatcggggtttttcgttagaaatgaattttttaatttttttttttttttttttgtttttttttttttttatttttttttttttttttttttatttttttttttttttattttttgtagttttttggtttttttcgagtatttttttattttttattatttattgtttataaattattcgttttttttaggtaatgaggttcggttgaaggaggggtgtgagtttagtcgggttaagggttgggatggggagtagagatttttagaggggaggtatttagttgtggtttgttttttttttatttatattcggggatttggtttcggcgattgtgagtatttcgtcggttgagggggagagttagggtttaggggtttagttatttatgttttgtatttttgggttttagtgtaatagtttagtttatttagatttgaggttggtgtatttttttttttttagattcggcggggtttaattggagtcgaagttttagaataggcggttatttattttttgagtagagtttgggagaagtagtttttattttttagggtagttagtacgtgggggttttttcgggggttttttttgattattatcgttatttttttttgtttttttttgtttttttagtttgtgtgtataaatcgacgttttagtttttattagcgggcgatttttttttcgtgatttagaaatttggtttttgaatcggtttttttaggtcgtcgtatatatacgttttattttttgttcgttagtaggttttagcgtttggggttcgggtttagttatagttattttgtttcgggaagttcgtaattgtttaggaggttttttgattcgttcggttttatttaggttttattatttattttaggatatagggttaatttagtttgtggattggcgattatcgggatattttattgaaattttgtagtttggtttaggttcgtttgtttaaatcggggatttttattgggttattttttttttatagataatattggaatattttttaagtgtttttattaaaaggttaagtttggagcggaggtatttagtgttttttttattaacgataggacgtttagtattttaggtattagttgaacgcgtttgtatagattcggagtgttgagtttttttttttttagggattttcggtattaaatatattcgtgagtaggtgggttagaagttagtcggttttcggagtatatagtatcggtttagtttcggggagatgaggtgttttcgttggtttggagcgtttcgaagagcggaggattagggtcggagtaggtcgtaggggaggtaggggatggttagtttttaacgcgaagcgtaggcgggtcgtttattttgacggggttatcgttggtcgtcggaattatggaaggttttcggggagataggtcgggttttgattttttttcggttagtttagttttggtgttttaggagttattttgggggttattagtttttcgtattaagagttcgttcggagggagttttttttagtttagagaagttaattttagttaaaggcgaagtcgggagttcggggtattaggtaagggtttttttttttgagatttggggttagagattttgggggcgtttgtgttcgtttatcgttcgggatattcggttggggtgtgggtttgagaggttttacggtcgttgacgtcgtattggcgaatttcgaggttggtaggttatttttttatagtttcgaggttttttcggagttagtggtaggagaaggagttatagggataagcggtgaatttttggatttttaatcgttttttatgggggttcgcggtttttttttttttttttttcgttgcgttttcgtcgtttgttttttgggtacggtttgaggttggacggagcgtcgttcgggcgtttaggatttaggtttggttatttcgagttttttatttttcgtttcgcgtcggttcgcgtattttgtttttcgtaatttgtagtaaacgtagcggtttttggagagtttagcgacgggtagtaaattttgtttttttaagcgtaagagtaattttcgtaaagtttgtgcggcggagtttattttttatttgagttggggaagttttcgttcgcgtcgtgtggttgtcggggtcgcggggagtagttcgtagttcgggacgtatcggggagtcgtcgtagtcgtcgtcgttcgtttttttcggcggtcgcgcggagttttcgttttttcggaaggggggaggggtttcggaatttcggggcgggggcgggagcgggggattttatttatttgcggtggcgttgggtcgttttcggtagttcgcgagggtttcgcgcggaagttcggcgcgcgcgttttagcggggagtcggcgataattaatggagatatttttaggcggagtatttggcgagcggagcgcgtcggcgtttttaggcgtcgcggtcgttagtcgagttcgtatcggcgtgacgtgggcgagcgagcgcgttgtttttattcggtcgtttattaacgttttttttcgcgggcgtcgcgtttttgttaattttttttttcgttcggtttgcgcgcggcgcgtcgggtgtaggagttggggtgagggcgtttcgggtgttagtaggggcgttgggagttgtttgggcggggacgtagggtttcgggaggttatatagttttaataggatagtgggaaggcgcgcgagttagatttggttaaacgttaagttcgttgcggtttcgggttttcggtttacggggttttttttttcgtttgggttgttttatttagggacgtttgggtcgggcgcgaagagttcggaaatagttatttttgtcgtcggttcggttttttttcg

SEQ ID NO: 6417 - DNA, 1233 bp, synthetic construct
  misc_feature 1..1233: note = Description of Artificial Sequence: Synthetic polynucleotide
  source 1..1233: mol_type = other DNA
tcgcgttgggttgcgtttttgtaggagttaggtttttttatgttttgcggcgatagtcgttggggtggggttacggggaagtcgcgttgtttttcgtttgagcgtgggttagggtttaggtggtgattaaggttcggcgtagtggtttcggagcgtggaggggtagttgttgggcggtttttcgggggagggtgacggttttattcgttaacgttgttttttttttgggattaggtcggaggaattttggatcgttcgaggttggtgtttagttttttttttttattttatttttattattcggcgattttcgtagatttgattggtaggttttgtttcgatttttatttttttaggttttcgtttcggtgtttcggtgttcggtttcgggttatttttgtaggttttgtttagggtagtcggcggtgtttggaggcgggttcgtttcggttgttttacgtttaggtcggtttttggtattttagttagtgggagggcgttttcgtcgttttcgtgttttttcgtaggggttgcgtcgcgttttcgggttttttttttcgtcgtggtttggtttgtttgttttagggcgtagttgcgttcgttttagcgtttttcgggtttgcgtggtttgttcggtttagaggtttttattacggttcgttttttgtcggacgtcgcgttgttgtggtcgcggtggttttgtggttgtgagggtcgtttttgttcgtttatatcgttttttttttgtaggtgaggaatggggtttgtttcgtttggaatgtgtttttgtcgggttttgtttgatttttattttttagtcgggacgcgcgagttttttcgtttggttgagttaaaaagggatcgcgcgtatttcgtcgttttttattacgaagcgtagatataggaggttgtagggttagtgttgcggagaattttagacggttttatagtcgtcgttattcgcggggtattcgttcgggttttgtcgaggatgtgggggttttggttttcgtagagttgggattttcgaaggttttattagaaatttaggagtagttttagttttgtagagttcgcgagggtggagacgggagattcgttgtggggtttgaggttgagatgtcggtttgcggtgaagtcggcgggacgttttaattcgtttagattcgtttatttcgtagggttcgggtttatttttcggtttgtggtttgtgttgggttgcgtagtcggcg

SEQ ID NO: 6418 - DNA, 2865 bp, synthetic construct
  misc_feature 1..2865: note = Description of Artificial Sequence: Synthetic polynucleotide
  source 1..2865: mol_type = other DNA
gcgagttttagttcgttgttcgtttagagtcgtttaggtgcgagggcgtttttattagaaatcggtgttttcgcgcgttttatttttcggggttttgtagatgtcgggtcgggggtcgttagtaggttttttggtttttgttggagatattggaagattaggcgattaggatagcgggtcgggttagtgcggtgtgatacgagggttcgagcggtttcgtagtttaaacgtgtttttattttatattttttacggttgtttcggattcggtgttttcgtgttttttagtttgtttagcggtacgtgggttttaagtttggtttttagcggttgcgttagtttagttgtgtttattttggggtcgcgagggttttttatcggttggtagttggtggatacgttgttaagatcgggggaaaaaaaggaaggaaggaggttagggggatatagggttggtggttttcgtagtttttgatttgcgacgggcgcgagcgtattttcgcgtttttgcgtagagatttttttttaagattggtttacgacgttttttatttcgaagttaagggttttttgtggtaaatttttatacgtttttttttttttcgtttattttcggcgttaggattgacggggagagggtaaggtcgggttagaggggttgtgggtttggattgcggttgtcgttcgcggttttgtttttttgggtagttagacgtggggttagcgtttagtcgtagttttcgggggtgagttcgtagattttcgtacgtgatataggttaggtatggggacggggagtttttcgtcgttcgtttttatttagatgttttttgaggtttcggaatatttcgttttttattttaggatttgattaatttttaagttacggtcggtttcggtttcgcgagacgggggattttgaggattgttttttttttcgggttgggatttttttatagtagtcgatcgtttttagtttagagtggttcggttcgtagcgtttttcgggtataggttttaggtggacggtttcgttttcgcgttcggtttttttgttcgttaagcgtttcggggatttttcggtttttaagcggtcgcggtcgggtggagttagtttcgaagttcgggatttttcgaagggagaaaattcgttttgtttttttgaagcggcgggagaaatcggttttatttaggttcgggggttcgacgttttcggcggaggtcggttttaggggttcgaggttttcgaagttggaggtcggtttcgtttcggcgttttttcgtcgttattttcgtttttatttcgcgggtcggcggagggaggggcggggtcgtttgtcgttcgcgattcgggttcggtttttttagtgattgtttttgtttttttcgcgttagttgtttttagttttggggtaacgttgttaggtgtttagttttcgcgttcgagagagcgtttgtttggttttgaattttggttaggaaggggcgcgaggggaaggtttcgggggaaggcgtgttttcgcgtttcgtttcgtttcgtttcggaaagttttcgcggtttcgtttattttaggggttcgtttagttttcggagatttttttttttgagcgtagtcgtttggtgtcggttttcgtcgagttggagcgcgcgggttacggtttttttggggacgtagaagcgagaagcggggatttcggcgcgcgtttcgcgtttcgttttttttgttcgcgtttcggttttcggttcgcgtttcggtcgtcggtatggtgttgttggtcgggatcgggtcggagggcggcggggcgcgttgtatgattttattatcgtcgtttttatttcggggcgcgtaggtcgaggaggatttcgttgattacgaagagtttgaggatttttcgagtttgttagatattcgtagtatcgtttcggacgattttttttattttttcgaggacgaggaggagtacggcgtcgagagcgcggagagcgtttcggagggcgtttcggaaagcgtttcggagacggcgatttttttgcgcgtcgtttgcgttaataacgtggggttgttgcggacgttggtgcggcgcggggtgagcgtcgaggaggcgtaggagattgatcgtaacggtagggtaagcgggcgttttcgtaggatttgagtttttttattgtttttattttttttttttttattatattttcgcgttttttagtttttggtttcggatcggtttttcggttatttagtcgtcgtttagagcgtttttttttcgttgtttgggagcgcggtgttttgggtggttttttcgttttaggttgggggacgcggtgcggggagggagtagtcgaggtgttagcgcggtagaaacgttagttcggcgtttttatcgtatttttttttcgtttatcggttttcgtggattttttgattgaattcgcgttggttgttcgtgttgtaatttaggatgggttttttgcggttcggtttttttttgattattatttttttttaggtttttggtaggggattatttttttttttttgtaggagatagttttttttgtttagcgttttatttggtttttgggtttttcgcgtcgtttttgttttaatacgttggggcgtagatcggtttttttagtcgtaatgatttggaagtaatagttttttttttcgtcgggatagtttggttttttattttattttcgttgagttttgtggttcgcgtcgcgattagttaacgtgatttttgattggtttgttcgtaggttattttcgcgagttaatgttagtcggggttttttagagttagggtatagggagagttttagagtcgcgggtatttattcgggtagggtaggaggcg

SEQ ID NO: 6419 - DNA, 1154 bp, synthetic construct
  misc_feature 1..1154: note = Description of Artificial Sequence: Synthetic polynucleotide
  source 1..1154: mol_type = other DNA
tcgttttttttcgtatattagggacgttatgaatgtatcgagtatgtttttagggtggcggggagtagtattgtcggtgttgttttaaatacgttttttttcggggagatgggtggtagggagggggagtacgtagggtagttatttggtaatcgttttaagaaaggtattaatttcggatttttttttaggtatagcggttttcgagggggatttggcgcgatcgcggtttttttcgaggtaggtagaaatttcgtagtagtcgtcgtcgtcgtttgtcggtcgggagtttaggattatttttattagcggtaagaggaggaggacggcgtcgggaggaggttgcgttcggtttcggtcgtttagtttcgtaatttatttaaaggcgcggcgttcggcggttttttcgtaaatatgtatttttcgtcggcgatagttttttagttcgggaagaggcgtgcgcggcgtcgttcggttttagggtaaggttttgattttgtttaattgtagtatttttcgtttttgttgtttgagcgcggtcgcgggataagggatgttggcgggcggtaggggcgagcgtcgcgggcgagaggcggttttcgacgcgagtgcgtagcgttcggttcggcggttttttcgagttcggcgagcgtagcgttttttgtttggtttcgcgggttttacgggtttttgcgggtttttcggggtttcgggcgtcgtcgttagtcggtcgggttgagagagtagtcgtcgcgttcgtagtttcgtttagtcggttgtcgtcgcgggcgcgagtttggggtcgtcgcggcgttcggcgtcgagcgttttcgagttgcgtttcgcgcgcggttcgcgttatttgtgtcgtcgtcgttttagtcgtcgagggcgaggtttttttcgcggcgcgcggtagttttagtttttatttaaatttcggcggtcggttcgggcgttcggttagtgagggagcgttcgtttcgtcgtcgaaatcggtttcgggtgcggagtatgtttagtgtcgtcgcgagagcggcgtttcgtcgcgcgcgttttattttttttggttttcgcggtagtagcggtagtcgcgggagagaggggaggaggtcgcgggttgggagagggtcgagtatttttgggaacgtacg

SEQ ID NO: 6420 - DNA, 1154 bp, synthetic construct; identical to SEQ ID NO: 6419
  misc_feature 1..1154: note = Description of Artificial Sequence: Synthetic polynucleotide
  source 1..1154: mol_type = other DNA

SEQ ID NO: 6421 - DNA, 396 bp, synthetic construct
  misc_feature 1..396: note = Description of Artificial Sequence: Synthetic polynucleotide
  source 1..396: mol_type = other DNA
tcgttgggaagggaaaaacggtttatatcgaattggatgtcggatggaaatttttttgcgttattagattgcgtttagtatagtagatggtacgagtacgtgcggcgtttagtttaggttttcggaggtagttgagttggaaatttcgacggaaagtatttataagtttttattttgcgttggtttattcgcgtgtacgtttattttttacgcgcgtttttggtttagaagcgtatagatgtttattgtttagagtcggtatcgttggggagatcgagcgatttgcgcggcgtatagtgcggcgttggtagggttttgggttttcggtcgggggttcgagcggttaagggatgggggtgggggcggggagagtggggggagggcgaaagatcgtcg

SEQ ID NO: 6422 - DNA, 438 bp, synthetic construct
  misc_feature 1..438: note = Description of Artificial Sequence: Synthetic polynucleotide
  source 1..438: mol_type = other DNA
tcgcgtggagagaaatgagttggagagttatatcgagttaacgcgggatacggttttcggttcgggtcgggttaggggtgggaggcggttttttatcgtaggcggcgggatttttatgcgtcgagggatttaagtttttattttatttatacgtttattcggcgtcggggcgttgcggtttcgttttacgagtttagagtaggtcgtagtttgggttggggattcggtatttgggtagggtgagtttggtcggatatttttttttaggattattcgtattttatagtcgcgttaaaagcgttttatttttttgtttttcgtcgcgtaggttttttatcgacgttcgttcggaaggcgagagtttttacgtggttcggcgcggcgcggttttcggggatcgcgagtaataaaagttcggttcgtagtttttgtttttcg

SEQ ID NO: 6423 - DNA, 438 bp, synthetic construct; identical to SEQ ID NO: 6422
  misc_feature 1..438: note = Description of Artificial Sequence: Synthetic polynucleotide
  source 1..438: mol_type = other DNA

SEQ ID NO: 6424 - DNA, 411 bp, synthetic construct
  misc_feature 1..411: note = Description of Artificial Sequence: Synthetic polynucleotide
  source 1..411: mol_type = other DNA
gcggtggtgtcgatttatttgagtagttgtttcgcgtttagttcgtcgcgcgtagtggcgtgcgtcggttggatggtttggtttatgattatttcgtcgggcgtcggtcgttttatggttagggcgagagcgttacgtttgcggttttcgatattttattatgttcgtttcgttcgtttcgtttttttcgtttagttttagagggtattggcgtcgttcgttcgggtcgcgaatttttggtcgttaggtggtgggagttgcgagtgagggggttcgtattgttattttaggattatcgcgagtgggggaaaattagcgttttcgggttttaggagaagtttgggaagtgcgcggggagggggttttcgggtagataggtttggaaggcggtttttcgagagtcggagcgcg

SEQ ID NO: 6425 - DNA, 1137 bp, synthetic construct
  misc_feature 1..1137: note = Description of Artificial Sequence: Synthetic polynucleotide
  source 1..1137: mol_type = other DNA
tcgcggttaaaacgtttagcgtcgggtttgggtttgcgaacggtttagtttaggttttgcgttagagtatcgtattcgggggcggacggttttgtagttttttagttttttttcgtattaattagttgacgttcgggcgtattggtttttttcgttttcgttcgtacgaaagttttgttcgacgtttgtagttagtatcgttcgtattgtttagggagggtttgcgtcgagatttagtggtcgagtgagttatagagtcgttggttttggggacgttgttttttatcgttttttatcgttttttttttttttgtattttatttcggtatttcgtattttttttttcgttcggtttcgcgtattttgtttagattttataagtattttttcggggtatttaggattcgacgtttttttcgcgtcgttagcggcgttcgttatttttggtacgtcggagggatcgttttcggttttttgcgcggcgttttttaggggatttttagtttattttttatttagttgttcgggtttcgacgttttatttttgtcgaattgggggatatcgaggttgagttcgattaagagttagacggttatcgagcgttttatgatttcgtttttcggacgtgatttcggttggttaggggtcgtcgcggagggtagtgtagtcgaggtggtagcgtagggtagtagtagatttcgtttttattaaagaatttaagaagacgttttttttttttagcgttttgttaaataaatttttggagagggcgagagtggtgattaaagagaggagttttttttttttttttgtttgcgtttcggcgcgcggaggtgggtgagtttcggggagtcgtcggcgggtttagtttttcgttgcgggtgggtttcggtagaggcgcggcgggcggggcgcgggttttcgcggtcgtttcgggtttgttgcgcgggtaggtagatttatcggtagataggcggatcgggcgttcggttgtcgttgtttttcgcgcggcggttgcggggtttttgatttggagaataatgaagcgtgagttggaggggagcgagcgggtcgtcgggagcgtattgtgtataaatagaggcggcgtgcgtgtgagtttgagtttggtaggcgcg

SEQ ID NO: 6426 - DNA, 2383 bp, synthetic construct
  misc_feature 1..2383: note = Description of Artificial Sequence: Synthetic polynucleotide
  source 1..2383: mol_type = other DNA
tcgacgtgttaaggaaagcgcgtcgtaaggtggagcgttcgggttgacgatgagaaggtgagttgtgaattttgtatacgtttttaaataaaaggtttacgagcggcggtttcgacgtggggagtaagtaggtttttttggtttttgtagtaggcggatttaggttcgtttgtcgtcggatatttagaatttgttttcgtagcgcgagttttgtatacgttttgcgatcggtatttttggattttttaattattcgtcgtttaattttcggagagagggtttttcgttcgttgagttgcggggttgggaaggaaaagggggacgcgtttttgggggtttttggatattttggtaaagggggttgtagttttaggttttagttaaagggtttgggacggagtgggttagaaagtcgttaaattgaggattttttttttttttaagtcggagttttaggtgcggagtcgtttgtttatttattttcggagtacgttttgttgttttcgtcggcggacgcggttggttattgcggtatttttttcgcgatattcgggcgttagaaattcgtttttagagtttgttgtagcggatcgaatttgttgcggcggcggttggggtcggggcggtttgggcggaggaggttgaggttggtcggtcgtgttttgcgtttagagtattatatagtttagttataggaagtagagttggagatatagttttcgttttttttttatcgtcggcgtcgaaagcgcgcggtcgtagattcgcggagagggagtgattaaagataaaatttgcgcgttttagaaaagagttagggtttaataagtttttcgtcggtttcggggattttttcgggttcgggttttttgttttagttggagatttcgatagagcgtcggttttttgattgtttgcgaagcgagacgcggggcgtcgggtttagcgtagtgagcggcgaggcgcggcggaggtgtagtcggtagtttcgagcggtatacgttgtataatcggtttaaagtttcgagcgattttaggatcgttagcgggcgggggaggaaattataaaagttttggcgtaaaattttaaaaaatgtgaattttaaaagaaaaaagggtttgtacgtagagttcggcggattttcgtgcgtttcgaagacggatattggaaagttgtaaaagttattagaaagaaataggtaagtaaataaaagtcgtttttagaagaagaggagggtttttttcgggttcgttcggagttttatagggtaacgaagcgcgggtagcggttgcggagtcgggcggaggtgcgcggggtcggggcgtgcggttagtaagagagagggcgggaggttgggcgttggagaagatgcggcggtggagggcgcggcgcgggggttttagaggttcggcggggcgcggggcgggtcggcgggcggcggttgttagtgggggcgcggtcgtttatacgtggggtttaattcggattgagaggtcggcgtagagtgggcggggatagagtaagggagagatcgggattgaggaacgaggggaattagggttgggtgaggggaagaggaaggaagggggggagggcgaagggagggaagaggacggagattggggagaaggggggcgaattcgagaggaaggtcgggttggaagagggatttggaaagagggattggcgagttcgggtgcgagaggaaatgagcgggggatgggggcgaagttagggtaaagagagaagtgggaaaggagagggagggttaaggttcgggcgtcgagaggaggggttcggggggtcggttggagggggcgaggcgttaggcggttttgtttttcgttttcgttaattggtcgttagttttgttttgattgtttgtataaagcgagtagacggcgggggatggggcgattagggatcggatttgggaaaggaggtagtagttttttttttttttttttcgttttcgttcggtcgcggattagggattagggtgtttaagcgcgttaggtttggtcggattcgtagttgaattgattcgtagttgaattttttcgtcggatagaggtcgtaaggttgaggatgagaacgggtttttttgtagggtttcggtttttgatttgggatggggggattcgtagttagttaggaatagaggtttacggggttgttggttgtagttttaatttaagaaggaggagattttttttttgtttttttatttttatcgttttatcgggagcggcgttagtttgcgggattaaattaggggttgggagtttttagattgaaatgcgttttttattattaagagggagtttacgcggtcgcggggggtcgaggtagttagtcggcgtcgcggttttggggagttcg

SEQ ID NO: 6427 - DNA, 2367 bp, synthetic construct
  misc_feature 1..2367: note = Description of Artificial Sequence: Synthetic polynucleotide
  source 1..2367: mol_type = other DNA
gcgatttcggttttggggttttgtttttgtcgcgggagaataggttttaatttacgaagttggttaattttagaaattcgagattcggtttttgagaagcgattgcgtgtttcgggattttgcgttaataattaaatttgggagaagtcgcgggaatgtttttattggacgttacgaagggaattggggttttttttttgggaagaaaaagttcgatttgtgtcggcgagagtaggttgttttgggttgggggtattttcgagcgttgcggcgggacgtcggggttcggggcgaagagagttagggcgcggatcgacgtttgttgtttttttgcggtattgttgttcgaacgaacgaacgaacgaacgaacgaagcggtttcgtttaggaaaaatatttttttgacgcgaagttacggttgaagtttcgggttacgtagaggggttagtaattttatgggtggtggggttttttatttttggacgtagcggggagtagcgggcggtttttttttttgtttattttttttgggggtgggggagttttgtgttattcgacgttgcgaggggttgttacgggttttttaggttgtgtttttcgcggggtcgtggttcgtgttttcgaggttgttatttttttgaggtgttcggagttaaagtagagggttgatttcgtcggttgggtgaggtagtattcggtgacggcggttatgattgtgttttgggcgtaggaacgagtttttcgcgttgtttcgaaggtttttgatttttcgcgttttgcgttgtttcgcgtcgtcgggtggatttatatacgttaggagtaaattgcgtaggattcggtcgttatttttttgcgtttttttatcgcggagattttgcgtttttagtttagcgttttttattttatttgggtagcgttgcgtttgcggttcgtgggtttcgggttcgttcgtcgcggattttggtttaggtttcggtttcggttggggtttcggatttagttttggttttggtattgtacggtttttcggtttttgttggttcgttatattttagcgcgcgaggtcggggttttttcggttcggttcgtttttttcgtcgtcgtcgttcgtcgttcgcggggaaggcggggatattggtcgggaggcgggaagggtggggggaggggaagttaggtgttcgtcgggatttgcggggagaggggcggcgcgtagtttcgtcggttaggggttttggtttttttcggggcgtaggttggggttcgcgcggttggcggtcgggtttcgaggtcggggagcgcgttttgggattttcgtggaggggttttgtcgtatgcggacgaagttagagcgggttttagtttggttttggggtattttttttttttgggtttagttttttatttgattcgtgaggggttggttttattttcgtttagacgggggttggtggtcgagtttggggttttgagattggattttttttttttttgtttagtttgcgggagggagttggttttgcgtgttggtagggagagttcgttgtttagagcgtggtagttagggaggtttgaggatagattttaggttttttgtgtttgggggtagggggtgttagggtggggtaatcgttcgatttgttttggttgggggaattgtttttttttttttttttaggggttgggttggtgaggaaagggtatattaattttttaggatagatatttttggggttttttgtttaatttttatgtttgtatattttttagcgattattttgttgcgggtttgcgaacggtgacgtttttatttttgtggtttcgtaggtcgtttttggttggttgtcgttgggagacgggttggacgtaagggaattgggagtttgttttttgtttatttttaggttatagggttttttagcgttgtttcgtggttagataattttgtgcgcgaagttttatggtggaaattagttggtcgaatttatttttggtatttcgaagtgtttagtttgagtttgtttgttgttgggattatgggatgggattatagggtaggtcgggttgtggtttgttttttttagggattggagcggttaagtttgttcgtcgacggttacgggttttagagcgatcgttttcggcgtaaggtgtcgggagatggtagcgcggtagtcgggtttgaattttttatgagatgtagttagtagcggcgtttttttgtttggttttcgtcgatagttgttgcgggagaggtcgcgattcgcgttatttcggcgttttgttagttcgtgtttttagggtcgtttggtttgggaacgtagagatttacgattttttttttaattttcgaagcgggaagtcggttcg

SEQ ID NO: 6428 - DNA, 1235 bp, synthetic construct
  misc_feature 1..1235: note = Description of Artificial Sequence: Synthetic polynucleotide
  source 1..1235: mol_type = other DNA
gcgttagcgcgtgttttgtttagagagttcggcgttagtttatttttcgtgtagttattggttgggattttgtgtgtcgttgtcggttaatgaagacgttggagatcgggtttttgttcgttttttttttgcgtttcgggatgaggtagagattgaatagtcggcgagtaaattaacggtatttagaaagttatgtcggattcggcgtttagcgtttaagcgttaattcgttgaaagttttttagcgaaattttagggacgatttggatttcgttgagaggaattgtttttgagtgagatggttttagaggtttggaggagcggattggtaagtatcgggagggtagtgggagttttgtttttgtttggtgttttgaataaggtttttacggttatttattatgagatttcggaggaaagagagaagggtttcgttgtgggtaacgtggtcgcgaattttggtttggatttcggtagttttttagttcgtaggtttcgggtggtgtttggagttagtcgaagattttttgaggtgaatcgggagatcggagagatgtttgtgaacgatcgtttggatcgagaggagttgtgtgggatattgtttttttgtattgtaattttggagttggtagtggagaattcgttggagttgtttagcgtggaagtggtgatttaggatattaacgataataattttgttttttttatttaggaaatgaaattggagattagcgaggtcgtggtttcggggacgcgtttttcgttcgagagcgcgtacgatttcgatgtgggaagtaattttttataaatttatgagttgagtcgaaatgaatattttgcgtttcgcgtgtagacgcgggaggatagtattaagtacgcggagttggtgttggagcgcgttttggatcgagaacgggagtttagtttttagttagtgttgacggcgttggacggagggattttagtttttttcgttagtttgtttatttatattaaggtgttggacgcgaatgataatgcgtttgtttttaattagtttttgtatcgggcgcgcgttttggaggatgtatttttcggtacgcgcgtggtataagtttttgtaacggatttggatgaaggttttaacggtgaaattatttattttttcggtagttataatcgcgtcggcgtgcggtaattattcgttttagattttgtaatcgggatgttgataattaagggtcggttggatttcg

SEQ ID NO: 6429 - DNA, 3043 bp, synthetic construct
  misc_feature 1..3043: note = Description of Artificial Sequence: Synthetic polynucleotide
  source 1..3043: mol_type = other DNA
gcgagggtttcggggtggtgggggtgtcggttttagtatgtggaggcgataggattcgtaagattttacgcgtcgtcggggtaggatcgtatagggtcgttatttatttatttggggcgtttttaatgggtattcgtgtattttagttcgtgcggtgagcgtacgtacgtcgtcgttgtcgcgtttatacggttttttaaagtcgggggaggggtcgtggagcgaaggagttgtaggtagatttttttttttttttcgagttgggaaaagggttagtttcgtgttttgtacgtttggttttgttttgtagtttgtcggtgagttaagagtcggtagagtagaggaggcgtacggttcgggtcgtgttattattttttggtttgttgatttggttaggagttggggatggcggtagtatcgcggaggtacgttttgcgttgtttttacgttttttttcgaaagtagtgtttttagggggaaagttcgtaatgttatttgtttcgtcggtaaagttttgggatgtcgggtattttttgaggagggggaagacgcggtatttttattgaggtcggtaggttaggaagagaagtttttcgggcgtagggcgtagtttagtttcggggattttttgggtttttcgcgtgtcggtcgggatgaagcgcgttttgtatcggattcgggattcgggggcgggggttggcgttggtagcgttagacgttgttttattttttttcgattttggggaggatagtaataagttttgttttagttattttattattttgttagtacgtgtagatttcgggttttcggagttcggcgcggatttcgttttgtttcgcgtttttttttgtacgtttcgtgttattttaagagtttgcgtggttttgggtgggcgtttggttttcggcgaaacgtttggggcgcgtcgcgtgggtgtacggtgtttttttttagtagttttcggttgcgggggtatatgtatttatttgtattttgtagggataggcggtttttttgttgggagtttttgttttggggattttcgggtgggttggtggcgtcggtttttcgcgtcgggttaaaggtggttaatattaaagttagggttatgaattggtttagtcgttcggtatatatggtttttggtattaatttttcgtcgggagatttggattttttgtgttttttttttttttttttttttttttttttttcgtcgtttttttttttttttttattttttttttttgttcgttttttttttttttttcgcggtcgcggttcggatagaggttatttagcgttttttcgtagtttttcggagagtatgtgattaggtcgttagtagcgtcgcgagtgttcggtaatggtagggatggtgttttaaatatttttggaagttttggtgttatttgaatgaaggagtcgagtaggtgttgtttcggcggttggattaattcgagatttcggtttttttgataatacggtcgggaggcggggtttgcgtttaattattataggaggaagtcgagcgtcgttgggagcgtcggataaagttgtcgatttggcggcggttacgcgtttgcgtgcgtgtgtatgagtgtgtgtgagcgcggtcggagatgcgtgcgcgtgtgcgggtgttttagggtaatggtcgaaaggattgtataatataagagcgaatttaagttttagttgttgttaaagggggacggtgtgttttgggatagtgtttttggggtttttggttcgcgttatatttatatcgggttgggaaagtttttttttttcgtcgtttggaatttagtgagatttttagtttagaggatttgataaattgaagtagttttttaggtataatgatgttgtgggttaattgagtatatatgggaatttttggttttgtgatattttgtattaaaaagaattttacgattgaagataggagtagaagtattagatatagtatttggtttgagtaattgttttattttttcgttttggtgggtcgtgtaatatttggagtgtcgtttttcgttttttttttaatttagacgtattttaggttgggttgtagggatttaggtgatagttaggatttgtattatttttaggagggtggtagggaggtttaaggtagttttgagttagttcgtcgcggagtatcgcgtgttcggaggttagagtttgaaaggtaattttacgcgtttttaaatatatttttgtatttttttaaagcgttgttcgttatttcgtttcgggtttttttttattttttagttattcgatggaagtggtgagaataaaaataaagataaaaaagttaaattcggggaagttatttttattttttttttttttttgttcggttttttttttaagaatcgtcgggtcgggatagttttcggttatttttttattcggttcgtggagggaaggagaaagttgggcgtcgtttggagcgtttttttttttgttgtgtgtgtacgtgtgtacgtttacgtttttttcgcgtcggggtcggggataggaattgttttcggtttcgttattttacggcgtagttcggggggttcgtagggttgggggagggcggggatacgagcgtcgcgtttaagcgttttagggtacgtattcggcgttggcgcgtattcgttttttttttcgtttttattttttttttggagaataggtgagtttcggtattagttttcgattttttattttcgtttcgcgtttcgttcgcgttttttgcggtaatgcgtttgggaagttttattatttattgtttaggcgacgcggttttgggttttcgcggcggggcgtattgttcgtttggttggggtcgttatgtgatacggttgggggagggggcgaggagatacgcgggtaggttattttttggtcggcgtttgatttttaaagtttttttttttcgtgtttcggttgtacgcgggagtggggaaggcggaggcggggggttaggatggttacggttggtcgtagttattcggcgtgtcgagtttttttgagtcg

SEQ ID NO: 6430 - DNA, 864 bp, synthetic construct
  misc_feature 1..864: note = Description of Artificial Sequence: Synthetic polynucleotide
  source 1..864: mol_type = other DNA
tcgtaggcgcggagttgcggttgtagttattagtttagacgtggcgcgttcgtagtaagtggttggatatcgtagattaggttcgcgtttttagtagcgcggatttcggggttagtcgtttaggtagtaaagttaggcggtcggtttcgttagtagtcgatgagttttattttgtggattgtttagcgttagggattaggattcggagaggtgtttaggaggagtagatttttagattaggtaggttgtgtattcggtgattttgacgttatttaagggaagtttcgttatttcgcgttagtgtttgagttgtaattgtaaattgcgcgttttggtacgagtagcggtgggggcgggtgggggaaggagcgagtgattttttaggcgtttttcgttatttgatattagttaggtagtttttagggttagagcgttagcgtcgaagttaggtttattcgggaagttatttcggtggtcgcggggtgtttatgttagtattagattttttttcggaaggaggagcggggcgggttatacggttaggcgggttttttttttaaggcggggtgggtcgcgcgtttgcgatttttcgttcgtggttttggggtagttcgggttagttaggagaattcgcgagtttagcggcgtttgtatttgcggttttcgggagtcgggcggttttgcgaggtttattaggtttgagaggtcggaggtcgttagtgtcgttgttgaagggtggattaggcgggatcgcggattttgggttagatcgtagatttggtatcgcggattgggatttggatcggggattttgagttggattacggattgggggttggatcgcggattgggggttggatcgcg

SEQ ID NO: 6431 - DNA, 2071 bp, synthetic construct
  misc_feature 1..2071: note = Description of Artificial Sequence: Synthetic polynucleotide
  source 1..2071: mol_type = other DNA
gcgagagtagcggagagaaaggagttagagaagtgcgtatttattagtttatcgtagttgttgagcgttatagaggaggtttcggttaggtcggttacgttttcgacgtagagatagttttcgagtaggggttttacgcgggtggtgtttttttcgttttgttattttatagtggtttcgggcgttacgaggcgggcgttgggtcgtagtcgtaggtgtaggtttcggttaaagatcgtgatattgtagaagaggtgattgttaggttttttttcgttgttttcggggaagttcggggttcggatcggggcggttttgcgggttcgtatttttgttttggacgtagttgtcgatattacgtgggatattaagcggttttgggcgttagtgcgtacgggtatcgttaggatgcgtttcgtttcgtgttttaggggttcgtttgtaacgggaaggggcgttagatcggcggagattacggagttttagtgttttagagattcgtcggtaagttacgtttttttagatttcgttttattgcgaagggaaggggtatttcgttaggcgattttagaagttagtttgtattttttcggtttttttgtaatcgggaaggggcgttaatagggttattatttcggggtttcgttattttttagtcgttttttttttcggagattttgtttgttaagagttttgttttttgtttcgtttagggttggggttcggtgggaattttttcgtgttcgaagggacgatttcgttagagagtttttcgatttttgtatttatcgtttttggtaggacgtggagttgttcggaagttatttcgggttggtttttttattcgtgtgttacgatttttcggcgggtttttgtcgttcgagtgtttttatcgttagttttcggagcggcggagtttcggttttttcgagtacgagcggtttgttttgtttgtttagttttcgtttagttcgttgtcggtttcgttttttcgagcgttcgaggattgggaggggtggaatagggttttttcgattttcggggattttttgcggggcgttttaattaatttttagggtttaaggttacgcgttcggtagtcggttttttcggagcgttttcggacgcgagtttcggcgtcgtttcgttttggtttttttttcggattcgttggggttgattttgcgtttttggtcgcggggtttttttcggtttttcgtttttatttttcgcgatttaggagtcgttagtgtttcgaggttttttcggtttaaggcgttcgggggcggtgcggggcgttttttgcgcgattaattcggtttcgaagttggttaatttggtttcgggcggggcgcgcggagtttgtttaagttaggttggacgacgtttggggagggggcggcggggtacgcgggatagggttaggtcggcgggggtttcggggagtaggggtcgggtcgtatttatttggggggtcggcggcggcggcgagtttggcgttcgcgggcggcggcggcggcggtaggagcggcggcggtagtagtagtagtagtagtagtagtgcggggtagagtaggcggcgagcggttttcgtcggcggatttatggtagtcggattgtagtcggggtttcgtattcgtagtcggcgcgaaagtttttcgcgagtcgtttagtttatatttgggggtagttggagtcgttcgtagttgtagtatcgtagggcgcggggcggaggaggcgaggcgcggaggggcgggcgggggagcgtggagggaaggcggggagagggaaggagcgagcgagcgagggaggtaggcgggagggagggaggcgagcgagggggagggcggggacggcgggcgttttagtttgcggtgattcggcgtattttggcgcggtcgtcgtcgtcgttcgttttttttttcgcgtcgtcgtcgtcgcggtgtcgggttcgtagcgaagtagagatatttcgaggcggcggtagagaagcgtcgcgggtcgggtcgggggagtttcgtcgttagttattttaggggtataattttcgaggagcggcgtcggtcgaacg

SEQ ID NO: 6432 - DNA, 1170 bp, synthetic construct
  misc_feature 1..1170: note = Description of Artificial Sequence: Synthetic polynucleotide
  source 1..1170: mol_type = other DNA
tcgggttggcgggtattgagttggggttattacgtttttttagagcgtttgcggaggtggcgaaggtttggagagtatacgaggcggaattcggatcgagtgagttttttgagtcgtttgcgtgggacgtagggagagggcgaataacgtttttaggcgttgaatgtaggggtaaggagttagcgagggtggttggagtaggttttgttagttgttattaagtttttttataggtttgggggtttggggttttttggaaagattttttcgtcgcgttgattagtacggggttcgttttcgtattttgaaggttgtcgcggtttttcgttatttataattaagtttaagattaaggttgtaagttgaggtcggggtattgataacgggaatgaagttataggggaagaggataattgggacgggttggatttatatttgatattcgggaaatttttagagcgtgtggtgtttttgttagcggtagttattggtggagttgaggttatcgttattgtcgtcgttggcgttttgtttttggaattttttagtaagatggtatttattgtttgttttttttcgattagtatttttagtcgcgttttttttttttcgggatacgtattagttatatattgtggggagaagatgggttatgtaaatgtaagttaacgcgtttttttagttatttttgtataatgtaataggaatagcgattcgcgcgtacgaatcgggtagtgtgcgcgtgtgtgtgttcgcgtgtgtgagcgcgtgtgttagcgtgcgttttcgcgcgggcgtgcgtttgggtggatttttgcgtggtttgggaggtaaatcgggcgtttttttaagtcgttttaatatgatttaggtttttaaatacgtgaaagcggtagatataatagggatgcgaaggaaataaaaaataattggggaagtggtgttaagttatttaggttttgaattgaggacgagtagtgcggtcgcgtttggggcgcgttcggaaattatttttagtttgtggcggttattgttttatttaaatttttttgcggggagagttgagcggatttttggggggttggttttgggttagttttaaatttttcggttgtatttcgcgtggttttatcgacggcgcgtttcggcgtagtttttggcgcgggttcg

SEQ ID NO: 6433 - DNA, 2168 bp, synthetic construct
  misc_feature 1..2168: note = Description of Artificial Sequence: Synthetic polynucleotide
  source 1..2168: mol_type = other DNA
tcgcgttgtagttaggtagagtttcggggtagttcgtttatcgcggaggagttattttggagttttacgttttttttatattttatttatggattggaaaggatgtttagttattcgcgagtttgtttgatattgggatggaaagttatagttcgtaggttggagtgaggcgcgggaagatgtttggtttttgtttcgcggatttggtagtcgcgttttgcgggtttgtttattgaattgttgaggattcgttcgtgtgcggggattcgagtgttatttttcggagcgttattttgcgttttagtttttaggttagataatatttggaaggtagggtagggttgttttcgtttttattttttgcggaaggatggtaggattcggcgtagcgacgtagtagcgggagggtatagcgatttgtatttttagtttttttttaggatataaggttgattttatttttcggatagttgtaaagtttttgttagaattaaatcgaattcgcgtttcggagaggggtttttggggtcgtttcgttgtagggcgtggggagtggagagagggaaggggaagtttggggttgggtgtgcgcgcgtgggagcgcgtttcggagcgtttcgtatttttttattttattttcgggggtagtttgggaaggagggagtggtagtcgcgggaatgagggagtaagagaaatttttttaaagtgacgttttaaataggttcggatttagaattcgaagttaaaggttgttagaaattgggatttttcggttttttttgtagttttttttttttcgtttcgaagttcgggcggtttgttggttgtttgttttttcgttttcggtttagaggtttttggttggcgggcgtttcgtcggtcgtcggttttttttttgaaattcgtcggcgtatatgaggtcgttgttttcgtcgtaggcgttggcggttttttcgcggtgttcgtggtgatgttatgtttcgttattacgcgggaggagaggagggcggcgtcgtcgggttttgggtgaagagcggcgtagcggcggcggcggcgggcggggggcgtttgggtagcggtatgaaggatgtggagttcggtcggggtagggtgttgttgaattcggtagtcgttaggggcgacggtttgttattgttgggtattcgcgcggttacgttcggtggcggcggcggtggtttgagggagagtcgtcggggtaagtagggggttcggatgagtttgttggggaagtcgtttttttatacgagtagttagagttgtcggcgtaacgttaagtatcggcgggtgtagaattatttgtataacgtgttggagagatttcgcggttgggcgtttatttattacgttttcgtgtgagtattcgcgttttttgttatgttcgttgtaggggattattgtttttggttttttggggcgtgtttcgcgttcgcgtttttgggttttcgcgcgcgtgtatacgtggtggtttttattttttcgtacgtgttcgtggttttttttttggagtttttttttttttttagttttattttttttatttttatagtttgaatttttttttcgaggatatttaatgaattgttcggtagttttaggttttcggggcgagagttaggtagacgcgggatttaggttgcgcggataattgggagtaattaggttttaagatacgtaaattttaatcgaacggggcgttcgggagttagggaatgtaaagggaggataggcgttcgtgtgaggtttgagagtatattggagaggttaggaggtgatggcggggtaggacggggagaagtgagggggtatcgagggttaggtttttagttttaggggcggagtaggggaagttgttatttggagagagttgttaggttttaagcgcgttcggaaatacgtttcgttattatttagttattattaacggaaaatttgttagtgtatgtagttttttttgttacggagaaggtggttaaggtttagaggaggttagtaggttaggcgaagtaacgttttcgcgttgtagggggcggggaggtagcggggaatttggggcgtaggaacgcgggcggaggtgcgatagtagaagcgtaaatgggtcgtttttgatagagatcgggtagtgggttaagttttcgtttgtggcgcg

SEQ ID NO: 6434 - DNA, 2053 bp, synthetic construct
  misc_feature 1..2053: note = Description of Artificial Sequence: Synthetic polynucleotide
  source 1..2053: mol_type = other DNA
tcgacgtacgattcgtttatacggaataagaattttacgaaggatatttggggattatattggtcgtattcgagggggcgggaggcggaaaaagtatttttaaacgtaattttgttaggttttatttttcgtattttttggttttcgggatagaagtttttttggtatttttcgtttagtttaggggttggttgttcgttagaacgaaatattttttattgattacggagagttttgtagggagtcgaggttttcgttcgggttaagggaaggcgttggcgtcgcgggagataagaagaggcggaggcggaaaagaagtggagaaggaaggggtggtagagggagtagcgtgcgggaggcggcgtcggcgtcgggttgttggcgaggcggggtggggtggagtggggtgtgttttcggcgggcggttagtaagttagttcgttcgagcgtcggcgtttcggtttttagcgttcgttcgcgatagcgatcgggattggcgtttcgttgtttcgatcgtcggcgagtttcgtttttttttaggttttttattgggttttttcgcgagtttcgtttggttcggcgtggggtcgttcgttttcgttagttcgggcgttcgtcgtttcgtttcgttcgcgtagtttttgtcgtttttttcgttcgcgttgtttttggttttttttcgttttagttttatttatgaagcgcggttttattacgtgttaatgagtttttgttttgttttggtagcggcggcggtatagatttcgtcgagggaattgcgcggggagggatttgagcgtagcgttcgtagttttaaattttgtttggggcgggggattcgtcgcggcgttagttttggggttagaggggataagttttttcggttcgcgttatttatttttttttttttttttttttttttgtcgtcgcgttttcggaggttttcgttgttatgatttcgttgtgttttcggatatttttatattttgattaggttaagaaggggttggtgtatgcgtcgtttacgatttcggggttattaattatacgttttcgggtagcgcgtatcgttaatatttttcgcgggggttacgtttggggtagcgggttgagtcggaaggggaaggggagcgggagtttagaggtcgaggcgcgtcgggttcgggggtgcggtttcgcgtttttttttttcgcgtaaggtcgttttcgtggtaggcggtagcgagttgggttcggggtcgggttgagttttgggatcgcgttgcgtagttttcgagtcgttcgttatttggttgcggtcgcgcggttatttgtttttcgttttcggggcgtcgtttagtttcgcgttaggcgttttttttagcgttcgtcgttttttttcggcgagattattcgggcgcgtttcgttcgtcggttttcgatgtaaatagttgggtttcgtaggcggttggtttcgcgtttttcggttcggcgcgtttttttttcggttattcggggtttcgtttttcgtattttttcgttggaggaggacgttttattttagggtcggattgggggttttgggattcgggggcggtagcggcgggcgtttggggagtcgcggtgtgtttagtagtcgcggtaggaattaggggatatgttcgttaattgtttttattattagtcgtcgtttgttttttgtgtgtacggattaaattttaattggtttttatatttattatggtgaattgcgaatttttaaataagtttgggtcgtcgtttttgtcgaggaggcgtttttttttttttcgttttcggggttttgtagggtgtgcggcggcggtcgtggttatttagatatttttatttttcgtgagttggatcgggagaggatcgtacggtttttatttgacggagttacgttacgtcggttataagggtttcgtgttgggcgttgggttcggttttcggtcgtttttttgtggtcgttttggcgtttattttatgatattttgtcggtgtttttagatattatttcgtatcgtttcgttttatcgatttttaggttttttcg

SEQ ID NO: 6435 - DNA, 1679 bp, synthetic construct
  misc_feature 1..1679: note = Description of Artificial Sequence: Synthetic polynucleotide
  source 1..1679: mol_type = other DNA
gcgtttttattgcgtgtttagcggcggtggaggcggcgtttttttgtattacgaatacgcggttcgttaaggcgtcgttttagcggttgatggtttcggtttttttttaaaattttcggcgttcgatttcgtcgcgtttttttaggtaggaattttgcgattttattttttgggttcgttattagtttaggtttgcggtgcgcgggagggtattaagcgcgaggtttttttcgcgttttcggttatttcgtcgattttaggtaagtgggggtagtttaagaagggtaaggagtagttggatcgtgttttggatatgagcggagtcgttcgaggataagggtattttttcggtatcgtgggcggtttttcggcgggggtcggtagtttggttttttatttcggcgtgcgtttagtttttaagttcgtcggtttagcgagggcggcggcggtcgtttacggcgatttttatcgggaggagagtagtagtaagtaaggagtcggtttcgttttgggtaggttgttgggcgggggtcgggcgtgcgggcgtttcgggagcggggagaattcggcggcgggcggcgcgggttattattattattattacgcgtattattattattattttaagtgtttgttcgttggggattcgtcgtcgtcgtcgtcgtttggtttgttttgttttggggttttgcgcggtttttttttgtttttcgttttttcggaagaggcgttcgtttttaagtacgtggagcgcgtttcgttcgtagtcgtcgcgttgttaggagcgcgttatgcgtagttgttttttgcgtcggggttgtttttcgagcgttgcgcgttgtcgtttttcgattcgggcggttttaaagtttattcgggtggtgagtgtagttatttgttcgtcgttatgtcggtttttatagtttataacggggagttgttttacggtttatcggttattatcgtttattattcgtttaaattgtatttcggcgggttgttgaagtattcggagtttattttttattttagcgggtttgtagcggtcgttttaagtttcgtcgagttggggtcgttggttagtatcgatcgagagatcgttatgtataattagtagttgttcgagatggttgtcgggaagggtcgcggacgtttggattcggggacgttgttatcggtcgtcgcggcggcgggaggtatcgggggcggcggtagcggaggtagcggcgtaggtaagtttaagatcggttatttgtgtttttattgtggtaagttgtattcgcgtaagtatgggtttaagatttatatgcggacgtatacgggttataagttatttaagtgtaaagtttgtttgcggtttttcggcgattttagtaattttaataagtatattcggttgtacgtcgagggtaatacgttttatcgttgcgagttttgcggtaaggtatttgtgcgtcgtcgggatttggagcgatatgttaagtttcgttattttggttagagtttgttcgttaaagcgggcgacggttcgggtgtcgagttcggttatttttcggagtttggggattttaagagcgacgatagtgacgtggacgtttgttttatagacgattagagcgatttcgaggttgggggcggcggggagcgcgatttgtaacgagttttttcgggaaggggcg

SEQ ID NO: 6436 - DNA, 1474 bp, synthetic construct
  misc_feature 1..1474: note = Description of Artificial Sequence: Synthetic polynucleotide
  source 1..1474: mol_type = other DNA
tcgtttttaaaggttcggggaaggaggttgcgggtgggtggcgcggatttcgggtttttagttatcggcgttttttcggggttttttgatttcgttttttaaaggaggagggttcgtggtaacggtttttttcggttaggcgttttcgggacgcgggggtgaggagtgagcgtcgtggtttattttatttttcgagcggggacggagtgggcgatatcgcgcgttcggttgtacgtaggttttgcgcggttcgaggcggttttatagggggcgaggaggaatttcggagattcggcggagagagtagagacggagtttattaaggggtttgtcgtcgtagagcgcgggagtcggtattcggtggggtcgagggttcggggacgttggggttgtttgatttgagcggcggtcgttgatcgttgagggtttttgtggtcgtagcgtttagattcggggagaagggcggtttttaagggtcgggagtttttcgagggcgcggttagcgaggagggatagagggcggcgttttcggttgttcgggcgcgtagaataagtagttgtcgttagggtcgataaagttgtttttcgaggggttgagatttaattttcgtttttcgatttagttaggggagcgcgaggtcgtatataattcggcgcggggggaaagtcggttgtagttgcgttttttatttttattcggttggtttttggcggggagtttgggtagcgtcgattaaagttcggagcggtagtttcggggcgcgggacgcggggtatacgggtttagttgttcgacgggagttcgacgcgcgtttttcggcgggtcggcgggttcggaagtttcgttgttcgggtcgggtttttaagttcgtagtcgttttgattaaaataggtatcgcgacggcggcggtaggcggcggtagttagggttggggtcgtatcgcgtacgcgtatgcgttcgtcgtttcgcgtttttcggcgggcggagttcggcgtcgcggttaggattttttatttcgttttcgcgatttcgttgcgggtttgtatattcgaggattcggtttgaaacgttcgtttatttatttttttgtcgtttcgttataagattttatttttgtttgggtatgagtggggggcggtagtttcgtgggatcggcggtattcgtcgtttttttttacggggataattcgagaagtgcggttcgggtagggagagaaattaggagagaaaatgagaaagagaattttcgtttttttttaaagttggacgatttattcgtatattttttttttgggagattcgtttataatttagtataaatagggaatagttcggaaagcgcgcgagttttcgttcgattgtggcgggggaggttgaacgtttggtttatacgggtgtaggacgcgggggttaggttttttgttgcggaggaagagggggaagaggtcgcgcgggagggatttttgatacgcg

SEQ ID NO: 6437 - DNA, 675 bp, synthetic construct
  misc_feature 1..675: note = Description of Artificial Sequence: Synthetic polynucleotide
  source 1..675: mol_type = other DNA
tcgcggtgcgaagtttcggattcgttgggaatcgtatagttttcggtatttttggtcgtatgtttgttagaggtgggtttcgggaaatatattcgttgtttttttaataagcgtttttcgttttttattggtttttcggttttcgttttttatcgttttttttcgtttcgtagttttcgagtggcgttagtacgttcgtcgggtatgggttttaaatgtttattagcgggagtttaggcgtttttgttttggagcgcggtcgggagtaaaatcgtaggagtgggagggtagcgagttagttggatttcgagtcgcggagcgcgttggttttgtttcgtttgatgattttagagcgcgggtttaagcgtcgtttatgtagtatttttgagtttcggggaaggagagttaatgaaaaaatatttaatcgttttcgttgcggagagttatgagttgtttggatgttatgtattaagtttatggtttttcgtagttttatttcgtagtcgtttatattttttattattaggtacgtgttttttttggggattttgggaaggagtgcgcgtttttcgtttgcggcggtatggtttgtacgttaaggtttgttgtgttttcgcgcgtttcgggcgttcgattacgatcggcgtagtcgggatgcggggattgtcggagtcg

SEQ ID NO: 6438 - DNA, 1133 bp, synthetic construct
  misc_feature 1..1133: note = Description of Artificial Sequence: Synthetic polynucleotide
  source 1..1133: mol_type = other DNA
tcggtttcgtagtttttcgcgtttcgattttttagattttcgggagtttaggggagttaggtgttgggcggtgcgttcggtgtcgtcgcgttttttttcgttatttttggttttttcgttattcgggtttttcggtcgttttggatgtttcggttgtatttttgttttatgattttagtttttttttttaattttttttttggttttttttttttcgagcgcgcgcgtatatatatattcggttcgttttcgcggagtggttttgggagtacgatcgattttagtttagtaaatcgcggttatgtcgtttagatttttcgtttcgaggtttcggttttcgtcgtcgtcgttttcgcgtcgttttttttcgtttagatatcgtcgtttgcggtcgtttgggcggtagtttttgcggtttttaaagttggttttttgggagggggcggtagggagtaggatgaaggatttgttgtaggaggaggatttatatatttgggcgaagggaggggtagcgtcgttgttgggacgcggcgcggattcgtattattgcgcgtagtagtcgttgtagtagtcgtcggggatcgcggagtcgggacgttttcgttcggttcgcgtttcgtttttcgttttattttcgttcgtcgggtttagtaacgtagggtgtttaggagtcgcgggttgcgtagggaggcgggtagcggttttcgcgcgtttttgtcgttttcggagtcggcgcgcggcgagcgtagggcgagcgcgcgtcgggcggcggtcgcgttggggggcgtgaggcgagcggcgcggagagcggtaggggcgaaatttcgcgggttagatgttcgagggcgcggcggcgttgttaggttgtcgttgttgtttttgcgggtttcgagcgcgttttcgtaggcggtattgttcgcggcgcggcgtgtgtatcgagcgagtgaaggtatgtgtggcgggcgcggttggagttgtcgtcgtcgtcgtcgtcgtgttagtaggttttaatgtttgttattttttaggacgttggtagtagtagtagttcggagttttcgagttttcggtaggtttgcgtgttttttttcgcgatttgattggataaagtgggggttcgacggtggtcgacg

SEQ ID NO: 6439 - DNA, 1808 bp, synthetic construct
  misc_feature 1..1808: note = Description of Artificial Sequence: Synthetic polynucleotide
  source 1..1808: mol_type = other DNA
gcgcgtcggcgttggggatggggtgggggcgttggggtataagggcgtaggggcgtacggttatcgatagtcgggtgcgtttagtttgaggtcgcggagaggagtcgaattgggatgggtggggggttttcggttttaatattgtttgttagttttagtgcgtttaagttttttcgttagagttgtttttttggaggggtttttcgtacgtattgttttttttatttttttggttggaatttttcggtcgttattgtagtgtttagagatgttgcgttgtagattcgggattttttaggcgttttttttcgtttttttgttaaagcgtaacgtttgtatttttttagtttttttttttttttttgaaattgaaagttattgaggtcgtttagggttgttgttttagtagttttttttttcgttttcgagttttttttcgttttttatagttatttttttttttttttttttttttgttttttttttttttttttttttttgtttttttttttttttttttttatgtggtgttttcgggagtttagtttaatattggagcgttttttgttcgcgtacgttagaagtagttcggggttttttcgtcgttttttggttatggtcgttgtgtcgacggcgttcgtttttttgcgttttaggggttttcgtcgttgtagtcgtagtcgtcgtagtttttgagtttaaggggtcgtcgttgtagtcgtcgtcgtcgtcgttcgttcgttcggatttcgtttgcggtagttgtcgtataatatgttatttgcggtcgtttcggcggtttttggaatttcggttcgcggcgatgttagttattttagcgaagtcgtcgtagtttagtgtttggataatttgaaagtataatagttggtttttttgtttattcgttttatttcgtttgttattatagtacgtttatcggatgtgagaggagaagtttcgttgttcgggtattgtttatatacgtttaatatttatatatattttaaaaatattaaatataattaataattaaaagaaagaggagaaaggaagggaagtattattgggttattatgtatttgcgattgattttttggttttttattattttgaattttatggaatatatcggtagttaaaacgtttttcggggaaggcgttagcgaagaagtaagtgtagggttttttacgcgtttgttttttttcgtcgcgtttatttgtcgggtcgttttgtttgttcggagtcggtttttaattgtagcggttttttcgttttgcgtttcgtagaggagatgtaggttcgggttttgggggtatggacggcgttttttatttttgtttttcggcgtttttgtttttcgtagtattttagtcggtgcgaggggcgggcggacgcggcgttaaggtggttttcgttttatggtaattttaggttcgcgggaaagttcggttttgggttagattcgtattcgggatttgtgttttttttttgaggatcggataggggtatttagtcgaaggtatttgggatttttagacgtaggatgtttttgatcgttgagtaaatgataagggaggcgcggtcgcggtattcgtttatttagcgtaatcgtttcgcgcggggagatttcggttgggtttttaggttggatttcggtagtcgaacgttcgttattcggttaggaagttagggagcgagcgtttgcgcggtcgtattttcgatacgtattagcggagttaaagggcgcgcgaggcgatggggttcgcgtgtttgcgcgtttgtagagttgtcggacgtttttcgttcg

SEQ ID NO: 6440 - DNA, 1323 bp, synthetic construct
  misc_feature 1..1323: note = Description of Artificial Sequence: Synthetic polynucleotide
  source 1..1323: mol_type = other DNA
tcgaatattcgtattgtttatcgaagattttcgtgttttagttttttttgttttttatttttttcgtttatggttttcgtttttttaagtcgtttttcggaattttttgtcgggtcggcgggaagcgtggatcgagcgggttttggtcgcgtttttttcggttaggtttggtttagttcgcgtagcgttcgcgtagttcgttagggggatttcggttcgtcgggcggtatttgaggagaaagcgttcgaggggcgtggagttagggttttgcggtgtttgtttcgggaatattgcgagtcggttggagttttttagtcgtttcggagaattgggggagtcgggtttttggttcggtaatcggtggtttcgcggtagttagaggcgggttttacgggtgggtgtgttcgttttcgtacgttagttttttagttcgggaagagcgtttgtaagcgggtattttgtttttaaagatgggttttgtttgcgggtgatttgggttttcgaagtgtaattttgtggtcgggacgcggatcggtcggtttgggtttttgtagagtagattttgtttgcgttttttaggaggagtgggtggtaggattggggttttttataggttttggggcggcggcgagattggtacggttcggggtcgtaggcgcgtagttacgtttttggaagttcgtttcggttttcgtttttaattcgttttttcggggttttatggcgtgaggtttggggttgggatttatttggagtcgagtagaaaattttttttttttcgttttcggttttttttgttttttttggacgcggtggcggcgtcgtttgagcggcgatttttttttttttgttcggtttgttgcgttcggtgtttttcgagggtaggcgcgtttggattttgcgttcggatggcggcggttttttgtgagtatcggtagcggcgtattttttgtttcgaggttttcggtgttttttcggcgcgggtataggggcgtttttatttttcgttcgtttgtattttttgttattcgttttttcgtttgatttattcgttcgcggtggtcgttcgagttttgggatggggagggagatcgcggttgttcgcggcggtcgagattttcgttgacgttttcgattttgtcgtttttttcgttcgtttttagaggcgttcgacgtttcgatagtttttggagtgagattaggattgagaatagggagaggcgattcgatttttagggttcggtgtttaggataggtgaggggaaggaaagggtgttgacgggagtggggaggtgggtgggcggttatcgtagtcgaaatcg

SEQ ID NO: 6441 - DNA, 1501 bp, synthetic construct
  misc_feature 1..1501: note = Description of Artificial Sequence: Synthetic polynucleotide
  source 1..1501: mol_type = other DNA
tcgatagtggtttttcggtttagggaggagagcgcggtcgcgggtttttttttttagtttggaggttgtagtcgttcgagtcggttcgggtgggggcggggtgggggcggcgcggagggtacggagattacggcggcgttattcgggatatttagggtttcgaggttttgggcggtttttacgcgagatcgtaaattatgataataggtagttattcgaggttaaataaaaacggagtgggtttttcgcgcgtcgtcgtttttcgcgtttttggcggtttttttcgaggttttcggcggttttacgagttcgtagtagtcggtggcgacgtcgttttcgttttatttttttgcgtaagtgcgaggttgtcggtagcgcggcgtacgtttcggtcgttttcggttttcgcgtaaaatttttattttgtttacgtgaagttgtcgttgttttagagagggggaaagagttgcgggaaaagtcggggagtgacgattgcggcggttgggcgcgtttttttattttttttttttttttttttttttttgtcgtagttcggagttttggttttttttttttttttttttttttcggagtcggttttttttttcgtttcgtttttttttcgtttgtgtacgttatttgttgtggggtggtcgaaggggatgttttgtttttattagaggtatagcgcgaaggggaaatttcgatattggaaggaacgagaataaatatttaattacggacgtattgaatcgcggttgggatagatatttcgggaattcgaggcggatcgggcgacgaggtgagtgatttttttttttaattttcgttttagggttttcgggggagtttgagttgagagaatttttaaatttttcgggaaagtgcgcgaggtttcgtcggggacgtcgagcgttgggtattgaggacgcgtagttggacggtgcgtgggcgtttgcgttttcggggggcgtttggaggtcgggtgttttacgtttgagggttcgggtcgttcggatcgtagcggtgttttttgttttagaagacgtttttaagttttaagggtttttttcgagtttgtttgtttttttcggggtcggcgcggagtttgcgcgtaacggagtttatttagtagtttagcgcgcggtttttatttgtatttcgtttttatttggtagaggcgcgagtatcggggttttttttatattttttttatgacgtgtattattttttgatgattttttagatggtttaggcgcgaggatgttgatttagagtttttcggagggttataggcgtttgggttttttcggtgtcgggtgcgtgtgtattttaaaggttcgcgttttaatttttaggtattgatcgggttttttaattgcggcgattttattttaatagtttttatgtggcgtggattgaatgttttttgtagtttgttagggtcggtgaaattagaggcgttttgttagagtagtcgcgtttattggttcgagtagcg

SEQ ID NO: 6442 - DNA, 1744 bp, synthetic construct
  misc_feature 1..1744: note = Description of Artificial Sequence: Synthetic polynucleotide
  source 1..1744: mol_type = other DNA
tcggtgggtcgggggcgtggcgagattttgttttagtggagggagggtttatgtattgtcgagacgtcgattattagattttgattttgtcgtttttagaaaaattattggtagaagattcggattatggttaatttgtcggttataagtttttttaagaagcgttacgtttgggtgtagttggtagggtatattggtgagtagtggggcgggtgggcgggtgttcgcgacgggaaggggttgggcggcgttgacggatgtcggtttttagggagttttaaggcggcgggtattagcgggttgattttgaagcgttgttcggagtcggagcgttattgtttggcgcggttgatggttgacgcgttgcgcggttgcgtgtttgttttttacggcgtggtggagcgcgacggcgaaagttatttgtagttgtaggatttgttcgatggtttcgacggattttgtgtgttcgattgtaaaatgggcgttaggtatgcgtgttttgttaggtcggttggggggattaagtaggggttcggggtcgggatagttgtttgagggggattcggggcgagtgttcgaaggggttttcgtgtgcgtttttttatgttttggtcgttgtttgcgtttttataggatttatttagaggaggagttgattaaggttcgtgagcggtttaagttgcggaaggatatgtataagaaaatgttggcggtggattttgaagtttttacggaggaggagtacgcgtagcgcgtcgttattaagtcgcgttatatgtagtggcgggaaggtattagttttagtattattttcggttttcgtatcgagggtattaaggtgaggtaggcgcgtttcgttggtatcgtcgtagttttattgcgcgttgtttttttcgatttttcgttttcgtttcgtttgttttttcgtttttttttatcgtttcgtcgttttttgtaattgggaggtatcgttgttttacgttgtttttttttttattggcgggttcggggtttttgatatttttgttttatatttagaaagcggacggtttttgtagtatcgattttaagattacgcgaagtcgagagtaggtgtttcgcgtttttgaagagtttgtgtaaggagatgaggaagtgttggtgagagcgggattttaaattttgaggtgttggggagtttgaagtcgaggattgtttttgttatttggtttagtgttttcggttgtgtttttattatggtttttatcgcgttggttcgtaattgttttacgtttttttttttttgggttacgttgggcggggttttgggttttttttttggcggtatttgttaagtatagcgtgggtttcggttttttatcgttagtaggggtttatttggcgtttagttaatttgttttttttttttattttattttttgtagaggcggtatttgaatcgtttgtagtagattcgggatattttggaggtattcgagttttttaggaggtacgaggtaagcggcggttgttcgggtgttcgggtcgcgagggttagggcgggaattcggtaagggcgtttttgggtagggtcgcggtttgacggtgcggggttcgtaggtgatcggtagttcgtttttttttgtgtacgattattgttatcgcgtcggcgtgtggtttatcgatttcggtaagattacgttttttttcgatggttagattttggattatcggcggttttgggaggagggtaatcgcgaggacg

SEQ ID NO: 6443 - DNA, 1801 bp, synthetic construct
  misc_feature 1..1801: note = Description of Artificial Sequence: Synthetic polynucleotide
  source 1..1801: mol_type = other DNA
tcgttttcgggcgataggggtttttttacgtgaatcgacgtttcgggtttcgggcgaggcgtagggtttagggcgtagggcgggtttcgtacgtagggcgggcgcgcgggtatttttgtggttaggcgatttcggttcgttttttcggagtttagggattttcgaggttggcgcgggttgttcgcgataaggtgttagtagtttcgggttcgcgaggagtagtttttattcgcggttttcgagtttagttttgttttttcgttattttttagtttttcggtatttatttagggagatagggaggtagagagaagaggagaaagcggtcgtgtttgtatttagtttttgtcgtagtattcgatgagggatagtagggaggttggcggggaggtagagattaaattatgattttatcgattacggaaagattattattatttatagtaaaggaggtttcgatgcgtttattcgggtagcgattcgcggttggtgggcgtttttcgttttcgttttttcggtggttgtggaatttatttcgcgtcgtatacgttaggatttttttttttttgattaaggggaggggaaggaataaaagagattttttattttttatatatatatatatatatatatatatatatatatatatatattttttcggtattttattgttggttaaaggatttattttcgtaatttttttttcgaatattttttttatttgagtagtgtatttttttaaaggtaaagagagataagggaggaaatatagtatttaaggtgattagtcgattggatattgttgatggtatatttttttcgtttttaattaatcgtataaaattcgtaatatttcgcgttttcgcggggtttttcgcgtttttggttcggttttttcggtcgtttttagtaggcgtttcgtttttcgcgggaattttgggatttggtcgagcgtttttcggcgggtaggatattcgttcggttttttgtagtagttgagggcggcgagcggatcgcgtttaggtagcgacgcgggatttaatttttcggattcgcggcgcggttttcgttttcgtttagggcgtcgcggttatagttgagattttagcgtcgcgtagtcgttttcgtcggggtatgggcggtcgcgtttttcgtttttttttttttttattttttttttattttgaaaaaaatttatttattggtgtaaagtagatattttgatgttatttatttagtatcgtttgttttggaggtagcgttttattcggtcgtttggaggtgtgggtagcgcgtcgatgggttcgggggagcggggttgggcggttcggttttttagcggagtcggtttgttgttattcgtttaattttagtatttagtgggcgaggagagagggagagcggcgaggatgtagaggagggggagggggaggagggagcggtgggcggggagggagcgagagtcgttcggtagcgcgtatgcgtttcgcgggtcggcgtagtttttcgttcggcgcggtcggaggggtagttttttagtttttgcgcgcggtcgcgagagtttcggtttcgtttttttttcgggcggttttcggtttcgttcgatttcgcgcgttcgtttgggcgcggcgtttatcgtgcggaggggttcggtcgggattttcggtttcggtgacgttcgttcggagtttcgcgggaggttcggagtttcgagagtttttttgggtgatagcggtttttcgttcgggtttttgtaattttattcgttcgtagttcgcgcgttgttgttttgggttgcgcg

SEQ ID NO: 6444 - DNA, 1801 bp, synthetic construct; identical to SEQ ID NO: 6443
  misc_feature 1..1801: note = Description of Artificial Sequence: Synthetic polynucleotide
  source 1..1801: mol_type = other DNA

SEQ ID NO: 6445 - DNA, 1684 bp, synthetic construct
  misc_feature 1..1684: note = Description of Artificial Sequence: Synthetic polynucleotide
  source 1..1684: mol_type = other DNA
gcgttgggcggtgagtttagttaggttatttttgcgaggatatcggtcggcggcggatagtagtacgcggcgtttaggattcggtttttttagagtttaggttattgtagtttttaggggcgtttcgagtttatttggagggtcgcgaggtttttaggttggaaggaggaatagggagaaggaggaatagggagatttggggtagtgttataattatagaaaagggagaggcgaggttcgttgagtttttggtttgggtaataaggtatattgaaaattgggttttttttcgattcgtatcgtgcgcgttttagaaatgatagttagacggagtagggtttaaggacgttgaaaatttttgacgtgggcgcgtcgggtgcgggtagggacgtggaaggattgggttagttataggaattatagcgttgcggatcgggtgaggggtttcggttcgagtttttatttggggcgtagaggtgtttttgtaaggggataaagggtatttttcggcgcgatgggcgatttttttagttagaaaatgagagggttagacgaggggaggaatttttttagttatttggttcggtatagcgatcgttttaagtttagaatcgttaagttagttcggggcgtttcggttttttcgtttcgcgtttcgttcgtttttagttcgggtttcgtcgttttcgtcgtttttgtcgttcgggtcgttttcgtcggttttggtttcggtttcgtatatcggtagggggcgttcgagcgtagttaaaaggttcggcgggaggtcggcggttttagtggcggagcgcggttgtcggtgtgcggtcgggagcgatcgtcgcggggtaggggcgcggcgggtatcgcgtagagcgcgtagaatagacggacggcggcggggattcgacggcggcgtttcggtattttttagatttcggttagcgtttttttgttagtcgtaagtatttagtttcggtttatttcgggttttcgatggttttcgaggtcggggcgattttgcgcgcgtcgcgtcggttgttttgggcggcgttgttgtttttggtcgcgttgtttttcgtcgttttttcggcggcggttttaggtacgcgtcgcgttcgggttttcggcgttttttagtttttcgcgtatttttttgcgttcgggtttcgtcgtttcgtttagtgttggttacgggtcgtgttattagtttgtgcgttttcgttattcgcgggtcggggtatttggcgttttgtgtgggtggcgggagcggggacgtttcggtgttcggggatcgtagcgcgttggcgtttaattttgtcgtcgttcgttttggagtcgggaggttttagtcgtttaagtgtttcgggagatttaggtatagcggggaaaaaaggaaaagaaaggcgatttttagcgtgcggattggggtaatgtttttttttgtttagaatttttcgggagcgtaggtggttattttatttttttcgcgtttatttttcgcgaggtaggatgacgggcgtattcgggagatcggagggaggtagagtagggttgttttagaaggtcgtgggggaaaggttgcgagttgtcgtagggcgtcgggtgtttttgcgttttagaggagaagcgttttagtgttagttcggttttaggcggtaggaggttcgcgcgttcggggggaacg

SEQ ID NO: 6446 - DNA, 6657 bp, synthetic construct
  misc_feature 1..6657: note = Description of Artificial Sequence: Synthetic polynucleotide
  source 1..6657: mol_type = other DNA
tcgggttcggttcgttttgtttttttgttttttggaggtttgggcgttttcgcgtagggattaagggttggatagtcgtaggtaggggtttcgtttttggtttttatttttcgtgtttagtaatttcgggagtaggcggcggtattttttttatgtttcggttttaattacggttttagtttttttaatttcgttttgtaggaataagtgtggtagaggttcggggtcggagggcgggcggtcgtttcgcgggttggacggagtttttgggttgcggagaggtcgttggatttacgttcggataggagtttcgcgcgtttattttcggttcggttattttcggggcgcgttgtttgcggtttttcgcgttatttttatttttgtttcgggatttttttcgggaaagatattcggggagtagtttttttttttttagtagttttttttttttttttttttttgtttttttgacggtgtggggtttttcggtcggaggggcgcggcgttggtagcggggtttagagtgtcgcgtttagcgcgcgttgggggtttcgggtttcgtagtttcgtacgcggtcggtttgtgaagcggcgcgcgggggtttagtcgggcgagggcgtttttgagtttggtttggaatttttagtttatacgaaagtcgtaggttggggaaggggcgggtgggagcgggagacgttttgggaagtcgtgagatcgttcggcgagggttcgggattattagggagcgacgggggatttttcggtttagagttcgagggcgcgatttcggattcgttgggatttcggaggtatatgaagggagagggaaattcgttaaatcgaatttttcgggaatcggaaggcgtcgggtcgtttttacgttttttttttttttcggtcgaaaggcggggggcgacgcgtaacggggagggaagggagggaggggtcggcgattttaggggagggcgagtttttggggacgcggggtcgttaggggttcgacgattttttcgttttattttttcgtttttaagtgtttcgtttttttttcgtttcgtaaacgcgcgttttgcgggttgtgttttggttttcgcggacgcgcgcgtttatagagggtttgatttggggttaatttttacgaggttgtcgggcgtttgtgagtatagtcgtgtttttatttaggggtttattttttagcgttattagggtttcgatttttagattttcggacgttttttttttaaatcgaagtttgggagtttttgggtggtttggggcgggggtagggggcgagcggggcgggttaggaggagggggcgaggtcgttattcggttttttacgtcgttttcgcggttggttttaatttttttttcggagttttttttcggttattttttagtttatcgacgtgcgggtagcgatttcgtttttcgttttttcggtcgttttcgtcgcggttttcgttttttttttattttttttcgcgcgtttttttatatgaaattttttattacgtttagaaagaatgtgttataatttcggcgttgtcgcggtcgttattattgcgttcgcgttcgagttcgagtcggagtcggagtcgtcgttttttcgtttgttcggttagtttcgggtttcgagcgcgcggttttcgtcgtcgtcgtttcgcgttcgtttcgcgtttgacgtagtgagcgtcgtagtttggttttcgtcggtttcgttgggtttcgggtcgtaggtcgagtttagtcgggcgggtttcgggaggggtcggtagggcgggagggggaggagggttgtttggagttagcgagttcggaggaggaagaggaggaggaaggaggggaagtcgtcgtcgtcgtcgtcgtgttcggggaatcggggtgcgcgcgttttgttcgttcgcgatagtgtttttagttcggggttcgtatttcggtttaggtaagaaggggtttgaggggtagggggttgttcggggtcgggggatttttttgtcgtcgttgcgggatcggagggttttcgtttttaggggaggtagggaagaggatgttttttggggggggcggcggggggtagcgtagggtttttagcggttttcgtagttcgggttattttatttttggtgttttgatttcggcgttcgcgttagggtcgagttttttcgttcgcggggttttggatgcggcgttcggggttcgcggttttcgggcgtttttatttatttatttaggttcggaggcgggcgtattcgaagttagcggtcgtcgagtttgggtcggataaattttttttttcgacgtcgcggttggaagggttaggatttcggatttttagggttagggaggcgtcgcggggatttcgaaatttttcggagcgcgttgagagtaaaaagtcggttgggtagaaagagggggagggggttgggcgcgttttcgagtgcgttggggtagtcgcggcgttttaagttgaattatagacgaatttttttttatttgaaatttggtttcggagtcggaggtggggagggagtgggttgtgggtgtttcgatttcgtaaagtcggcgtgggggggcgtagcgtttcgtttcgcgtcgtttgaattttcggagggggtgttacgggattttcgtttttattttagtcggtggttgggttttgtcgatcgttgcggagttttcgggaaggattcgttcgcggttattaataggcgtcggtgattttagtttttttcggttcgggaagttggcgtggcggggttgggttgggttgggttgtcgagtggggcgggatttcggggtttagagcggatttttagtttttttggtttttttttcgtcgtttttttttttttgtcgtttgttttttttttatttttttttttcgatttcggggtgtcggttttttttcgaattttttttttttttaaattgtacggtggttattcggttacggttttgggtcgtattcgcgtaattttagtattattttcgatcgagtttttcgtcgcgggttgagcgcgagttttcggggttaggttgtttagggaggagtagggattttttataattcgcgtttttttttttaatttacggcgagcgtaatatattcgttcgtttttgcggttttatttgagggcggggagaggtcgttgggggtagtttcgggggttgtggagggtaggggggattcgcgaagtttttggagcgtttagggatgtagttcgggcggcgtgtgtagggaggaagtagcgtttcggcgttttttttttagcgtcgttttcgcgcgtttcgagggtttaggagggttcggttttttttattttatttggatatttaggtttgagtttgagtggatttgaggatttgggggacggggaatacggagtttttttttttgtttcggtgtttgtagagtttagtttttaggtagcgtggggatttttgtttttagggttagcgtcggtttcgtttttcgtttcgttaatttcgggatttcgtcgttttttaggttttaattttttagttttatcgtcgcgtttttttttcggttttgggtttgggggaggggtagggggcgtggagcgcggcgttgggtttcggatagatgttttcgcggcggcggcgtcggcgttcgggtaatagtaggtcgttaatcggcgcggttacgggggaggggcgattcggtcgggatttcggggattcggtcgtagtcggacggcgtagttttcgttcggggtggggggggggggcggtcgcgaggattcgatttttgtcgtgtagttcggtttttagttttttgtcgtttttttttttagttttaggtttcgttttttgttggggttttggttttttaggttgcgggatttcgttttttacggtttcgcgcgcgtatttttattcgttttttaagttgatttttgaggtttttcgtggattttagatttcgagtgatcgtagaattgatttttggggttaggtagtatcggttaagggcgttttgaagaggttttcggttttagtttgtatttcgaggaaatggatttattatgtttgtttttgggaagtagtaggacgttttggcgcggttttttcgggtaggcgtttagtatagcgtagggtatacgggggatatttgcgaaggtaaaggaggtttattttagagtttcggttgtatttggttagtataggtttgggggaatttgttggaaatggggatttagtattttttttggggtttatgtttggtaggcggagtggataggttggggttcggagttcggtggttattttttgtataaggttggttaggttagaagttggagggtagtttattgggattttttaagcgtgattaaggaagttttgggggtcgattagtttttttttagtggagttgtagttggggagattttatagataggtagggaggagagggtgtttcgtttatcgtcggtttcgttttataggtttaggtttggtatattttaggtttgtagtatttatttggtgggtaaataaggatttgtttttggtttgcggtttggttttgatcgtggtttaggtcggggtagagggagaaaggttatagtttaggtgttttaaattatcggtgttttttttgtcggtttttggggttgtgttgggtttttagggtttttgttttttagtatttgtatgaaatcgtgggggcgtattggttttcgttttagtatttttttttaaggttttgtatttttattacgggagttttatttagttagtcgaaggaggttataagttttaaattattaaattcgggttagtgttgggggtttgggagttaaggtagtttagagtttatttttcgattttggtttttggagaattttaggattcgggcgtgttaggttttgtagtcgggttaggtcggtttatataggattgaacggcgtcgtgggcgtttatttatatttttttttcggtttttatatattataggatttattttgatttgttgtttttgaattgagttaatttttttgtatgttcgttgaattgtttagttgttggcggcgagcggagagcgtgtcgggggtattgaggtcgggaattagaggcgggcgggggataggaagcggggagggggcgtcggcggggacgcgcgggttgcgcggggattggagagggtttttaggcgtcggtcgttttgcgaacgcgggtttgtttaggtatcgtcggggtttgttcggtttgagcgtggagtttcgaggtttttgtcgggggtttaggttgtttttggggttttgttttcgacgcgttgtgtagggttagattttgggttttttttgatttagtttttttttttgtaatatgcggacgggggttttcgtataggtaggttgttagggtgaaattgagtcgaagagtgttttagaattttttgaagtttttatagaggttggggtgaatgaaggaaggaagcggggttagggttgggtagaggaggttcggtttgcgttttgcgtttttcgtttttaggtttttgttttttcggataaggggcggatcgacgggaggatttgagaacgttttggttttgtttgaggtggtgggagtcgcgggtagtttgtttagttaatagttgtcgtttttattttttttatttatttatttattttttttattttttagatgtgggcggggagggtcggggacggatcgcgaggacgttttttgcgttttttaggattttttttttttttttagtttttgcgcgtcgtcgggagagggaaggagcgggttgtcgcggggagtcgaggagagtagggggttcgggaggttagggagagaaggggagggttagaggtttcgagtcggattcgcggcggaggaagagggggtggaagggagcgcgtaggcgggtgagggagcgagggagggagagaaggagggagggagggagggaaggggggcgggagggggtagggcgagtttgaattttttttcggtcgcgcggcgaggggcggggtcgcgcgcgtagatcgatgggcgaagttggggaggaattttaatttcgggagcgaagttagagtttgaaggacggcggcggttgcgggcgtagtttcggaatcgaggtcgggcgggtaggtaagcggcgagcgcggtcgggcgttgaatttgggggatttgggattcggattattttcggggagcggcgcggttaagtttttcgttatttcgaatttcgggcgttttcgagtgcgtagcgtgcgtttttagtttttgttgcgtttttaggtttggcgcgcgattcgagcgtagcgggtaaagttggaggaatttggcggcggcggagcgggcgtaggtttagttcgataaagttcgggggttcgggtcggggtcgttgtcgtagttcgtacgttgtttcgtgttttcgagaggttttttttttagcgtttttttttttttcgttttttttcgtcgttcgtattttgttcggcgttttttagacgcggttttttgttttttttttttcggaaattagggggttgtttttattttttggtcgagtcgttgatttttttttaggttcgtatcgttttttttgttgggtcgtttttttttcgacgttgcgagttttttcgtttcgcgcggggatcgtttagttacgtacg

SEQ ID NO: 6447 - DNA, 546 bp, synthetic construct
  misc_feature 1..546: note = Description of Artificial Sequence: Synthetic polynucleotide
  source 1..546: mol_type = other DNA
gcgggcgtttcggttattttattttagcgagaagacgaggttgtttgggttttggttttttcgggcgggggttaggggttcgtcgattttttttagcgtttcgggcggcggggttcgagaattaaggtggttttcgcggttttcgtcgtcgcgcgttttttttttttttttcgcggattttcgcggtcgtcgtttatttcgcgtatttcgttttttggaaatttagtagtcggggggcgaatatcgcggcgtttttatgggaatttggtttcgggtttagagcgcgggtagttggtagagtttggggggcgcggcggcggtagtagtaggttggagggcgcgcggcgggggttaaggggatttggtcggcgttcggagtcggagtcggagttcgagtcggagttggaggcgttcggagtcgtcgacgttaaatttcgagtagatggtggcgggggcggggcgggcgggggtacgggggggttttcgggttcgcgttgttaatcgtttaagttcggttttttttttttcgcgatttcgtcgttttcg

SEQ ID NO: 6448 - DNA, 288 bp, synthetic construct
  misc_feature 1..288: note = Description of Artificial Sequence: Synthetic polynucleotide
  source 1..288: mol_type = other DNA
tcgcgagaggaagagagttgagtcgttgtaattttgggtttgggattgcggggacgggacgggtgggaagcggttaaaggcgtagcggtttttggttagagtcgtagaggtttgagacgtgggtcgcgtttcggtttaggagatttcgcggtcgcgttttaatttttagtttttcgattgcgattgcgattcgggaaaacgtttacgtttttggaaaggaagttttattatagggagttgattcggtgttagcgcgtagtacgttttcggttcgtagtgcgtcgcgcg

SEQ ID NO: 6449 - DNA, 947 bp, synthetic construct
  misc_feature 1..947: note = Description of Artificial Sequence: Synthetic polynucleotide
  source 1..947: mol_type = other DNA
tcgtatttgtttcgcggttcgtttttttgtatatacgttttcgagtcgggagagttttcgtagtatttagagaagagatcggaatataaaggatgaacgaatggggagggggggtttggggggttgggagaacgaaaatattagttgcgtttttaatatttaaggaaggaagtggtagcggggacggggagaggatgggaaggggatgttgattgcgagttggggcgggacgcggtgatgggaggggatcgggtcgggaatgcgggaggcgaggggagcgacgggatttgtcgtttcggcggtcgggtagttaatcgattcgttttttttaggaaggagcgaggggagggtggtttagagagaaagcgtcgcgcggtttcggttgttttcggttcgggatatttaaatagattaaagaggattcggagtggagttcggagcggatttcgtagttcgcgttcgtcgcgtatttattcgcgcgttcgttgttgggttttcggtagtcgcgttttttgcgttggcggagtcggaggagtttgcgttgggtcggcggggggcgggcgtttggggagggcggagagagggttcgttcgtcgggatttttgttcggttcgggcgttttagagtcgcgggattggtcgtcggaggttgcgggaggggttcgggttagattttttagaagttttagagagagtcgttttttttttttcgtgtgattttttgggagtcgggttgttgacggtttagcgtttagtcggagttttcgcgcgtttttcgggatttattcgggagatgtcggggtttttcgggaagagtgggttgcgtttgtttttcgcggtcgtttcgttttttcgttgcgcgggatcgtggggtttgagagcggcgttttttcgcggggtcgaattcgttatttatagtggagtgtggattgatatcgcggttttacg

SEQ ID NO: 6450 - DNA, 1313 bp, synthetic construct
  misc_feature 1..1313: note = Description of Artificial Sequence: Synthetic polynucleotide
  source 1..1313: mol_type = other DNA
tcgtgttatacggcgttgggttttgtaagttgttgtttgcgtagtcgttttcgtcgttgtcgttttcgggcgggtgtattagggttcgcgtgggcggggcggggtcggggcgggatcggggcggggtttgttttttcgacgcgtcggtttcgtttttcgtttcgtttttttttagcggatcgtaatgatttagaagtttaggaattttacgtgacgttatcgggggggtgatgtaatgtattttaaatagaatgtattgtaatttttgtttagtttaacgtggtttttttattcgggtttcgtttttgttttttttatatttgtttggtaagtttttaaaaatacggttcggttatttttggggtttttgtatttagttatttttgttgtatttgtcgtaggagttatttcgggagtgtatttgtttgtaggggttggttttcggtagtagtcgcgaggttatttggtttagtgggtaggttatagggtaaggagtagggaagatgcgatgtatttttttttggagggtgatttgtgtttgtaaatattttggcggattagagggaagttcggtttcgagtgttggtagattgtggaattcggttgtgttttgaggttattttagagatttcgcgtcgcgtgagtgtcggagcgttcggtggtcgtcgcgtcgcgcgtttggagggatgttaacgtggagtcggcgtcgagttcgttcggcgtgcgtgcgtgtgtgggagcgcgcgagttttttgacgcggggattagttatgaatcgggggtgtgtgtttgtttttagagatttggtaaggtgcggagttttttagaagtgcggttaagcggtagcggagacggcgagttaggaattttttttcgcgtttttagttttttagcgtggcggcggaattttcggagaaagtttgtaaatttttagcgggcgcggcgaggacgtcgggttatttagggggcgggtgggcgcgcgcgtagggggttcgtttttttcggtgcggagttgtagttgttatttttttcgtcgggttgtcggttgtagcgggtgggcgcgcgttcggggaggggaggtcgttttcggagggcgtttggttttcgttttaggcgtttcgggttggagagcggcgaggtttcgttcgttttagtttattttttcggtcgttttttgttttcgttgtttttttgttggtatcgttattttttttcggtcgttgttttaaatgatagtttcggttcgagttttggcggcgtttaggtaatttttaagatttggcggcggagtttttttttgcggtagattttcg

SEQ ID NO: 6451 - DNA, 848 bp, synthetic construct
  misc_feature 1..848: note = Description of Artificial Sequence: Synthetic polynucleotide
  source 1..848: mol_type = other DNA
tcgttttttcgtttagttcgcgatgtttagttaggcgcggcgcgcgtttgttcggtattttttcggcgcgtttttttttttgcgtttttagatttcgatttagagcggatttcgatcgcggtaaattatggttttaggtgcgtttcggaggtagttgcgggaattagttatggtttcgggttaatgtttagggataagtatagggatagggatagagatagggattgggattggattttagttttaagagaaagtatttcgggtttattcgtattttttttttatttttaaataaagttatagaagcgattagcgcgtagttaaagggtttggaggtgaaaaggagggttgggtggggaggagagaaagtgagaagggagagaaaagcggcggttgagtaaagcgggagtcggcgcgggcggtggggtttgattcggacgtcgcgtattcggtttcgtttcgcgtttagcgtttcgtttattttttggtcgcgtttgttttcgcgtttttttgtttttttttatttattagtagttttgttgataagcgagaaaattgataagtgagaaaagtcgtttgttagcgttcgggttggtgtttgggttgttatcgcgggcgcggagggaggggcgcgcgggtatcgtcgtttgtcgggtatacgttgggtttcgatttcggtcgggtatatttattttcgtagggtagtcgcggttattatcgatttgcggagttgcgtgggttttcggaatttttattttaataagagttcggtttcgcgcgtaagtaggagggaagggaaatttttattttttcggggttagggtacgtagaagtcgcgaggtttcgcg

SEQ ID NO: 6452 - DNA, 2406 bp, synthetic construct
  misc_feature 1..2406: note = Description of Artificial Sequence: Synthetic polynucleotide
  source 1..2406: mol_type = other DNA
gcgtagcgttatagtcgcgattgcggcggcggcggcggcgtagggggcgggggaggagagaagcgtttatttcgtttcgttgttttcgtagtagttttggttttagtttcggcgtattagagcggtttttgggaatttttgggtttgttgtttcggcggtcgttagttgggagtttattatcgttcgatggtatcgaatcgattcgtgtagttttataattttagtttaatttcgaggagttagcgtagatcgtttttcgtttttagttgcggcgaggtaagggttggtagcgttcggacgttttcgttttgttttttttatgtttaagcgcggggaattatacgttttcggtgtagaatagacgatcggggttattagggttgggcggtgggagtgggggttgggagtattatttttggttggacgtgtgtttagatttatcgtttttggtttttaggattttatttttttttgtatttttaggtgtcggtttttttgtattcgttttttacggggttcgttcggcgaagggtagtcgtagtttatatttatttttcgtttttaatttttgttttttttgttcgtcgtagttattcgtttggttgggagtaagttttttttttcgttgagggtgtagagagcgtttagggcgttaagagtagaggggttaaagtttaagcgttattagttagtcgaaggttttgagtttttagggtcgcggtcgggacgtagggaggttaggacgcgacgttcgttttatttgtttttttagcggttttttggtcgatagcgtcggtttgggggagggcgcgcggtcgtagacgtagttttttagtaggtaaagtttcgagggtcgcgagttcgagtcgttttcgaagtagaagagtaggttttgtagtagcgcgaattatttggtttgttattttgtgttgttcgaatttcgtttgtttaggtagtttttgcgcgtgtcgtttttgcgcgttagtagttttagggacgcgacgtggttattatttagtcggatttttttttgtatggtgtttagaggttagcgagattttacgcgtttatatttttttcgcgtagtagtttttcgttcgtgcgcgttgcgcgttgtttttttttggcgttcgttcgttcgttttttttagtttttttttttttttaaatatttatattttaggatttggcgtcgagtcgcggttttttgaatttagatatattatttttcgttggaatttttttttcgtttcgtagagttttagtattcggaagatgtcgttcgattttttttcggtgtcgggtaaattgagggattggcgatttgcgcgttggcgaggggtaggcggagttatgtgacgtcgatttttcgaagagttcgttttagtagcgcggatagggatatacgtacgtagtttcgtcgaggcgtagagtcgcgcgtaggttgtaatttggtgttttttttttttttttagatatatatatacgtatacgtatacgtatatatttaaattttgttttttttttttttatttttttttttttttttcggatgttaaaaagtaaattagattaattttcgtttaatttaatgaaatttcgaaggttcgttatttcgggagtttgcgtttttgcgttttatcgcggcgtattgtagatttggggttaagtgttagttgttatttttttttttaaaggttcgttttttttttttattttatttttaatacgaggtggaaggaggaaggtgggtggcgaaatagagttgtaaaagcgtttagttttagtttttgtatagttagtcgggttatattgaattttagtattcggttgtattttcggcggtttttttagttatttgaggatagtatagggggtgagatggggtggtggttggtgaacgttggttattttattttatattattttattttgagagttgttataattatcggcgttatttttcgtgtattttgaggtttggttggcgagtcgttgttgggagttttttgtaaatattttttaaagtttgaaggcgggttttaaacgtaggcgtcggggattatgggagtttttaaatagttgcgttggcgtaatgatattttaatgatagatttttcgtttttatttttagtttttattcgtttatatagttatacggtatttattcgagaacgttatagcgttcgtatgttgtatcgggagggcgcgcgggtcgtcgggcgagtcgggagttggggcggggagcgcgtatcgttgtttgtcgtagagggtagcgagttcgtttcgattcggagtaagtcgcgtttggttcgggcgttttgtagcggggatgggtgttcgcgtagttttgtgaaggaaagatattattttttcgtacggaaattgcgtatatttttttttcg

SEQ ID NO: 6453 - DNA, 1218 bp, synthetic construct
  misc_feature 1..1218: note = Description of Artificial Sequence: Synthetic polynucleotide
  source 1..1218: mol_type = other DNA
tcgcgtttgtagttcgtgtattttttttcggagttgcgttagggaattacggacgaattggaaggggtcgagaagggttttggttattatttttagttttaagttttttcgtttttttagatttgggatttttttcggggaggattttttggcgttttttggtagtttttcgtcgtttagggtcgatttttttatttttagttttcgggcgggggaggtttcgtacggtcgtttagacgggttggggcgggaagattgtagcggttttgggtttattttttgtttttttataatttttagtggagttgggttaattttaggtatagtttattcgagttaggcgaggtttagaaaggtttgattcgtttggtagttttaacggatttgttttcgtagtcgttgattagtcgttgacgagcggatttttcggtcgttatggcgattgtgaaatgtagggtggagcgtatgcgttcgaagttattcgcgcgggtagtttttgcgtgtttttttgcgtgtttttttacgtgttttttagcgcgcgtagtatttcgtttttgcgttttttcgagcgtgtagttttcggtgagggtagttttacgtatagtttttaatattttttttagcgtttgtagttttcggtgcgcgtagtttttaagtttatatgcgtagtttttattttgcgcgtagttttacgtatagtttttaatacgtttttagttttattggcgtagaatttattatcgtttgttttttacgcgttttattgggagtgtagtttttatttcgagcgcgtagttttacgtagtttttttatattttttttagcgtttgtagtattttttagtgcgtatagttttgttagtagtttttcggcgcgtcgtttttgtatcgtttcgggttataattttgttggcgattaagtttgaagaattttttgtggttttatttttttttttaggtttagttttagttttgatattttaattaaaaggttatacgttaattaacgaggtattaaaggggaagattttagttgaaagaaatgattgtaggaagtgtgttagggaagttaacggaatcgttggttcgtcggtggtgcgttcggtattaggaaagtttttacgatcgttgaggtatcgggtagttagtgttcgttgttaacgcggagggaacgggcggagattgcgggtaatacgtggtagagtcggcgtgagttcg

SEQ ID NO: 6454 - DNA, 1848 bp, synthetic construct
  misc_feature 1..1848: note = Description of Artificial Sequence: Synthetic polynucleotide
  source 1..1848: mol_type = other DNA
acgacgaaggcgcgtttttttttattcgtttatattatattttcgtttttcgaagtatagttcgggttggagaagttttagcggcggcggttttcgcggcggaggttttcgcgcgtatttattatgtttttcgttttttttcgtttatttcgagcgtcgtgcgcgttcgaagttcgagtcgtagagcgttatcgcgtaaaggaaggagttaggcgcgtgcggggttcgcggagtttttttgaattttttggatgggggcggaggcgaggggcgtcgttattattgcggtaaatttcgtttttttttcgggaggtgaaattttttaattcgttttcggtcggttcgcgggtcggatttttcggaaaggattttttaggaggagggagcgaatgtaagttttgttcggacgttttatcggcggttttttaaatttgggcgttttttgatagttatttttattttatttcgtttttacgttggggattatttttggtttcggaggcgcgggcgcggtcgtaggagcgggttgcggggttcgcgaaataaagaatttcgagcgggacgtatttgcggcggtagcggttgttaagttttcgaattttttatagattcgcggacggggcgtaggttggcggtttttcgtttcgcgcggtcgcgggcggttacggttattgcgagcggtcgggttgggcgcggggtgcgttcgtcgcgggtatggtgcggcgcgggcggtcgcggggcgcgcggggaaggcgggagagcggcgcgggtgagtgggagcggcgggtgtgcgcgagtgcgagtgtgcgagcgcgtcggtggcgttgtttttgttcgttttttttcgttcgtgtagtttcggtattagtttcggggatcgtgtaattcgattttttttgatttataagttttgagtgatagttttgatttggtttaatcgcgggagggaggggaaagagaaagaaagaaatttttagtcgtacgttttttttggtatttaatcgattttttggaaaaaggttttatttcggtttggtgtttcgtgttgggtggagaagtttttcgtttcgatttggtatcgtttgtattatttacggggtggaaaagttgtttttcggtttcgcgtttttttttcgcgcgttttttttttttttttttttttttttttttttttttttttcgcgtttttttttttttaagttttaatagatgttgtcggatttttttcgttttttcgtatttttttttttttcgtttcggttttcgtttagtttttttttttttagttattttcgggttcggaggggacgcgttgagtagtaggacgtttgtcgtcgtagggggcgaagttgggaaaatttggagtgttgttcgttttatttttgttttttcgttttttttaggtcgcgtcgggagttttcgtttttttcgttcgtcgggtttttaagttcggagtgggttttagttgcgaggcgggcggcggcggttgggaggcggcgcgtcgcgggtcggggtcgggggttgggggggagttcgggcgtcgcgagttacgcgcgcgtttttttttcgtttttcgtcgtcgtcgtcgtcgtcgtcgtcgttttttttttttttttttttttttttttttttttttttttttttgttttttttcggtttttatatagatatatttatgtttgtttttttttttttttttatttgatttcgcgttttttcggcgcgtcgaagttttatttattcggcgaggggaagggggttcgggcgtgatgttattcgcgtttttttttttttttttttatatcgttaggatattttttaaatgcgcgttttggtattcgtgttgcg

SEQ ID NO: 6455 - DNA, 2119 bp, synthetic construct
  misc_feature 1..2119: note = Description of Artificial Sequence: Synthetic polynucleotide
  source 1..2119: mol_type = other DNA
tcgtcgtttttttagtatagttttcgtagttcgtattcgtttatagggttttcgcgattttagagtttagggaagaattgtcgaggggcggggggttttttatgcgtatggaagggacgtacgttttaggtttttattttttttttgatttcggggatttttggacgtcgatttttcgtttcgtaggggcgagggttttgggttcgtagttagacgcgggttttttttaaatttagtggtttggttttattgagtgggggaaggtatatattttttaagattaattgtttcgtaatagggaatttcgtaggattttagtattttcgattttttaggtgacgttaagagggtgggttttattgtgtacggtggggaaattgaggttcggaggggataaggaaggtattcgaggttacgcggttttttcggcgggcgggaacgtaggacgcggagttggggcgcgggttgtgcgcgtttaggttcgcggttttcggggttcggttgtcgtagcgcggtcgtcgtcgaggattacggtcggggcgcgggcgggttttagtgcgtaggcgcggcgggcgggaggggacgcgtttcgggcgcgcgcgcggggtagtcggcgttttaatttcgttcgtttcgcgtttcgcgtttcggcgtttcgtcgttcgtcgttcgttcgtttcggcgtcgtcgttcgcgtttcggcgtttcgggtcggcgaggggcgcgttcgcggtcgcggtcgttgtatggcgttgagatggcgggggcgtcgcgcggcggaggcggcggcggaggcggcgcgggcgagttcgggggcgtcgagcgggcggtcgggataagtcgtcggcgcgggtttcgggcgtgcgacgaggagttcgtttgtttagagttggaggcgttgtttcgcggttatacgttgcggttggagtaggcggttacgttgaaggcgttggtcgtttttagtttgttggcgggcgcgttggcgttggtcgagttgttgggcgcgtcggggttcgcgttcggtttggttaagggtttatattcggtgtattgcgttttttttttggcgttgttcgtggtaattaacgttcggtttttgtaggtgttttagttgtagtaggtcggttagttggcgttgttttttagttttattttcgcgttgttttgttgttttttcgcgttgggcggtttcgttcggggtttcgtcggggtcgttggggggttagcgatcgtcgaataaggggtttggtagttttttttggttattttcgtgttttatgttttgttgttcgtgcgtagtttgttggttataggttttgggttcgtggtggttgcgtcgtatttgttggttatagttattttggttttcgttaagcgtttacgtttttggaggacggtaagtgtagtcgcgtattttttatttggtttcggatatatttgttgggacgatgttgggaatgttcggagtcgggcgcgtttttttttatgcggcgggtggggatattgaggtttcgagtgggggtgtgtttaaggttatttttacgagttggggacgtagtcggggttggtatttttcggttagggttttttttagagttataatttacgaagcgtttttggcgtgaagtgtggagaggggagataggtgtggagagagaaaggtttggttaaggttagggagttgatgagcggttagacggcggttagaggggttcgtcggttttttgtcgtatttatttttatagagggattgaaagtgggcgaggagagtagatttttagggtaagttttaaggtcggttttgcgcgtagcgttgggttttttttttgcgtatttagagcgcgtgttgggttcgttttttaattttgcggattcgagggtggtatatgggtggtgggaaaggatttcggtttttttagttttgttggttatttttttgtggatatgttttcggtttagaaagagtggggtttgttaaggttaaatatagtttagtttttgtcgttgttattcggcggttgttttgattttgttttttttgcgttcgaattttgttattgtttttttagtcgggcgggcgagatggttgtaaggacggggacgttgtttgtttttcgcg

SEQ ID NO: 6456 - DNA, 562 bp, synthetic construct
  misc_feature 1..562: note = Description of Artificial Sequence: Synthetic polynucleotide
  source 1..562: mol_type = other DNA
tcgtagggcgaaggggtgcgttgttagatgtggtattttcgttttacggagatatacggtgttttatacgttagggagaggtttgagacgtaaagagtcgtcgagcgggttgcgggattgtttcgttgttattttcgtttgtagttattttttcgtacgtatttgtgtgtgtatttaggttaatatggaaggcgttattttaatttttgtcgtgagtaggtgggagggaagagagacgagaggtattttattggttgtttgggaaaatgaattgtattttttttttttttgcggaggattaattttttttattttttcgggtgggtattcgtattttggggtcggagtttgaattcgggagttaaggggttttagttttagggacgtgaagttgagcgtatagcgggcgtttttagatattggggaaagtgttttacgatgtttcgagtttttttagtttcgttagcggggcgagcgtgagggtgtttcgatcgattagcggtttcgggtgtagggtggcgggttcggcggcgcgcgttttttttttttttttggcggttcg

SEQ ID NO: 6457 - DNA, 1404 bp, synthetic construct
  misc_feature 1..1404: note = Description of Artificial Sequence: Synthetic polynucleotide
  source 1..1404: mol_type = other DNA
tcgtttcgttcgaggcgaaatcgttgaaagttcggttatttaatttttgtttttataattcggaatttcggatattagcggttttagttgttggcgcgcggtttttttttagttttttggattttaaagttttttgttatagcgcggcgttttttttttttgttaatttttttttttgtattgtgacggaggtaaagtaatttagtttaggaggttgaattcgagttattagagaaggagaaatagtgtcgaaaacggttcgtgcgttattagggtagtttattaacgtattaattttaggttcgttgggtagaagtcgggaggaaatattttggggatcgtatttttggttaaatgtttagtacgagttaaattcggtttttttaaagcgagttaagtttattattataaagagatttttcgagtgttttgttttaattatattttagatagttagttttgtggttgttgtttgattttaattttttttttaaatttaaaaggatgtatatttttattagacggaacgtcgcgatttttcggcgaagaaaaaggcgtcgtttattttttttttaaaacgttataataaaaattattacgtttttttttttttttttttgtttttttttttttttttagattaataaggaaaggagcgagcgagggcgtagatgttttttggttaagtatttttcggatgttttcgattaaagcgtttttaaatgaatttgtagtttgcggaagtcggggatatatttatagacgttttttgttgtttagattaggaggggtggtgggggaattaggaagttagggagagagtaaagtttttggacgcgttttaggaggaaaattttgtgtagtgttgttaggcggaggttcgttagaaggtttcgtagttgttgaggcggggtgggattgcgttttaggggtcgcgttgaagttggcgtcgcgattattgcgtatcgatttcgtttattttttgttcgttttcgggagttttttttgttttaggacggttttttattttttaaattatgttcgttttttatttcggatttatagttatttttaaatttcggttattttcgtttagtatcgcggtttttagtatatttttttattggagtagtaggtgatttaaattagatttatttgttgtgaatttttttttttttttttttttttttggtgtttttttagggagaggggaacgggatgtaggttgaggtttagcggcgcggtaattcggggtatcggcgcgcgtttttttgagtcgtagttttggttgagtaagcggagtcgtcggtagttttggtagagtcgggaagttgcggtcgtaggggttaggtcgggaggtagggggcgttgttgtttttttcgagagtcgcgttaggataggcg

SEQ ID NO: 6458 - DNA, 819 bp, synthetic construct
  misc_feature 1..819: note = Description of Artificial Sequence: Synthetic polynucleotide
  source 1..819: mol_type = other DNA
gcgagacgtgggaaattggcgaagttgttattagtcgtcggcgtaaggagcgcgagagttttgggtgcgcgtagggtatttattttttattttttagtaagtatcgtcgtaagttttttaggtgtagaaattgttggcgttgttttcgtagttttcgtataggaattggcggtagttttgcgtgtatttgtcgtagtagtaacggagaagtagggttcggtagggttcgtagtttaggggtaggagatagattttcgcgttattttttgaagaaggggtagaaggagagtaaaagagagggaaagtggttaggcgtagtttttaggaggaaagaatatttcggggagttttgttttttttcgagcggaggggtttttgtagagaaagtgtaaatttgggagcgagttttttttgttagcggagcgcgcggtagggatttggagaaagcgaggtttggagggcgtttatacggggttttatggttcgttgcgtttttttcgtcggttggggagagaagtttttggagcggttagatatttgttggtttttgagtagtatcgtttagtgtagttttcgttaggaaaagtagtagaatcgatagttttagggggcgagcggggtttatggtgtagggggtcgggcggttcgttgggtaaggcgttcgagaaagcgtttggcgggaggaggtgcgcggttttttgttttaggcggttcgggtgttcgttttatgcggggcgagcgttcggtcgattttcgtcggggcggagtttgaggggtggttgatttatgtacggggattgttatttcgtcgttttcgcg

SEQ ID NO: 6459 - DNA, 1128 bp, synthetic construct
  misc_feature 1..1128: note = Description of Artificial Sequence: Synthetic polynucleotide
  source 1..1128: mol_type = other DNA
gcgttggcgggcgtattcggcggcggcgagcgcggaggtgttgcggtatttattatggtatttttgtttcggaacgtagtaggtggggttgttcgtaatatgtagggaaatgagtatttcgttttgttttttatttttttttagtttttcgtggtgggtgtataggaaaaagaagggcgaaaagcgggggtaatagttagtcgtcgcgcgcgtttttagcgtcgtttttagtaatagcgttaggaggaaagtttgtcgggtttagttattgcgttttatgtcgtcgtcgtcgtcgtcgtcgtcgcgcgttttacgcgtcgttcgtttatttagttttggagacgtcgggacggaggagttacgcggagagaaggcgagaagaaggcggacgggagcggaacgggttcgggagcgggtttgggagcgggttttcgtcgagaagtttcgcgggagacggcggtttttaaagttattttgggtcgcgggagcgcgggatcggggttgcgggcgtcgagagcgcgtcgtttgtcgttttcgtgcgtcgtcgtcgtttttgcgcgacgtttttcggttaggtttgggaaagcgttcgtttcgttttatatttttttaaagtttcgggcgtcgcgtttttttcgtcgtcgttatacgtgtttcggtcgttttttcgttttcgcgcgtcgtttcgttcgtttttcgttttttcgggttggttcggcggtatttcgcgcggcgaggggcgtacgcgttttcggagttttcggttagcgttcggttcgtattcgggaggatagggaggggcgttcgtcggggagcgggacggggacgttgtcgaggatcgttgagttcgcgatttttttgcgagggacgttaaagtttcgtagagggtatttttcgtttagttgtttgaaggggaaggttagtttttttggtcgttagtgtgttttgttttttttgggaggatgcgtgagggaaggagaggggcggtagggacggtcgttggcgtcggtttttttgtttgagtcggttgcgtttcgcgtttttcggggttcgtagtttgttagttcgggcggttcgtattcgttttgggaattcgttcgaggtcgcgaatcgttaggggttttcgcg

SEQ ID NO: 6460 - DNA, 1128 bp, synthetic construct; identical to SEQ ID NO: 6459
  misc_feature 1..1128: note = Description of Artificial Sequence: Synthetic polynucleotide
  source 1..1128: mol_type = other DNA

SEQ ID NO: 6461 - DNA, 1128 bp, synthetic construct; identical to SEQ ID NO: 6459
  misc_feature 1..1128: note = Description of Artificial Sequence: Synthetic polynucleotide
  source 1..1128: mol_type = other DNA

SEQ ID NO: 6462 - DNA, 1921 bp, synthetic construct
  misc_feature 1..1921: note = Description of Artificial Sequence: Synthetic polynucleotide
  source 1..1921: mol_type = other DNA
tcgcggatttgggtttggcgtttattttatcgttaggattggatagaaaggttttggtcgaggttattaacggagaggttagagcggagtttttggtttagaatggaggtagtagcgagttttcggcggtttttaggagtattaaggtggaggcggtggaggagtcggaggcggtttttattttgggtttcggagagtttgggttttaggtttcgtcgcggacgtcgtcgtcgcgtagtttcgtttcggttagggttaaggtcgagttgtttagttttacgtcgggttttagttcggtgttcggcgagttgggtttggtcggggttttgtttttttcgtagtacgtgttcgggttcgacgcggcgtttttcgtttcggagattttggttaagatgttcgagttggtgtatagtcggttgtagtagggcgcgggcgcgggcgtcggcggcgcgtagatcgggttttttttcggggtttttaagggcgttacgtgtttcgagtgcgagattatttttagtaacgttaataattattacgtgtataagcgtttttattgtttaggtcgtcgtgcgttcgaggacgcgtttgtcgcgcgtaggtttaaggcgtttttcggttcggttcgcgcgtttttcggttagttcgtcgaattcgacgcgtcgcgttcgttttcgggtttcggagcgcgcgaggagggggttgggggcgcggttacgttcgaggacggcgcgggcggtcggggtagcgagggtagttagagttcgggtagtttcgtggacgacgcggaggacgattttagtcgtacgttgtgcgaggtttgtaatattcgttttagtcgttacgagatttatatcgtgtataagcggtattattgcgtttcgcgttacgattcgtcgtcgcgtcgatcggtcgcgttttcgggattttttgggtcggtcgcgttttcggttttttttttcgtcgcgtttgtgcgtacgcgtagacgtcgtaagttttacgagttgtacgcggtcggcgtttcgtttttttcgtcgttcggttacgttttcgcgttcgagtcgtcgcggttcggaagcggaagcggaagcggtttcggtttcgtttttgcgcgttcgttcggtttcgcggtcgacggttttatcgatttgagtaagaagtcgcggcgttcgtttttcggagtttcggtatcggcgttggtcgattattacgagtgtacggtttgtcgcgtgagtttttatagtttcgaggtttatttggcgtataagaagtattcgtgtttcgttgcgttatcgttcggcgcgttcggtttgttcgtcgtcgtttgtttttattgtttttcgaacggttcggtgcgcggggatttgttggagtattttcgtttggcgtacggtttgttgttcggcgcgtttttggtcggttcgggggtcgaggttcggacgtcggtcgatcgcggtttttcgttcgttttcgttttcgtcgttttttcgtagttcgggtttcgtggttttcgggacggtttcggttcggagttttaggagtcgtcgttcggttcgttttcgttttcggtcgtcgcgttcgaggtcgtgtcgttttcgtcggcgttttttttttattcggataagggcgtttagatttttagtaagggtacgtcggcgtcgttgtttaacggtaattatcggtattgtcgtttttgtaatattaagtttagtagtttgtttatttttatcgtttataagaagtattattgtttttcgtacgtcgtcgagtacgtgaagtgagcgtttatattatagtcgtagacgttttgtacgtttcgttgcgatgcggggagggggtcgtttttaggtcgtacggattgtcgtttttgggaatttcgttacgtataggtttcggcggagggggtcgtagggggtagcgttcg

SEQ ID NO: 6463 - DNA, 2872 bp, synthetic construct
  misc_feature 1..2872: note = Description of Artificial Sequence: Synthetic polynucleotide
  source 1..2872: mol_type = other DNA
gcgtttttcggaacgttacgttttgcgattgatttgcgagtaaagtagcgggtttagtttgcggcgcgcggaaaaggcggtcggcgaagagtcgttcggttcgcgggtaggggagggatcggagggagacggcggggagggagcgttggtttttttttgggttggggtttcggaggaagtttttcgttaagatttcggtcgtgcgtttttttcggggttcgtttttttttttttcggttttttttttgttatcgttttgggttttaagtaggtcgtttagtcgggttatattcggtggatagaagtcgggatttagggttggcggttgggttcgtgtattttttacgcgggcgtttcggttttgaagtgcgcgcggagtaggttttgatcgttttttttttttttttttttcggttatttttgttttttttagttattgataggatttttttcgaaaattttagattttttaagttttagtttggcggttttttttttttaagtcgcgtttcggtgatttgggttgcgcgattacgaggaagttcgagaattttttggtttaagtgagataggaattagggtaataatgaagagaaagatattcggtttttttttattttaggtcgtagaggcgtatatcgtgaaaagaaaggttaattagcgttttaacgtacgttcgggttttttttttcgattattatgtatttttaattttttgttatcgagggttttggattttttcgaggttttttgtattttaagtggaattttttgttttatttgttagtagtttcgtttgttgagaggacgtattttggggattgttaagaagtagtagatataattcggttttgttaatatagtatacggttttgttttcgtttttttttttatttttttttttgattcgtcgtttggggcgagttggagaaggcggagtaggaggtggggagaagggtgggggtgggggaaggtttggcgtagtataaataagttttttagcgggttgtttatatagtaggtggatttgacgttagttaggaggtttcgttgtaaattcgaataatattttttttcgcgtttttttttttttaaagaagttagggaacggggggagataggtggacgggggagaaaggtattttaattagttggttttaaatttattaataataataacgataataataatgtaaagtaaaataaaataaataagtggttcggcggtattttagaattttttgcggcgttttgttttttatttcgttttttcgaggagaggtagtttcgcgagtagtgtgtgtatagttcgtattgttaataatacgcgcgcgcggtcgggtgcgcgcgtttgttagcgtatatttatatatatagatatatagatatatatatatatatatatatatatatagattcgggtggggggagcggttgcgcgagatagcgcgagttttcgagaaagcgcgagatacgtcggcgcgtgtagtttcgcggtcgtcgtttcgttttagttttagtttcgcgttattcgtagttcgttcgcgaacgttcgtttcggttatttatgcggcggtcgcgttcgttggttgcggttttttcggtttttttttttttcgggcgcgttttttattcgcggtagtagttgttcggattcgcgcgtgggtgtgttgtttgggggtttttgtttcgtcgtcgcgggtgttatttttcgggacgttgtttacggcgttttcggtcgcggtaagttttttggtttttattttggcgcgttatattttcgtattttattttgttttagttatttttacgttgggtcgagttgcgattttattttgtttcgcgtttttttcgcggtggcgataaagtttcgttttaaaggtagcgttttgtttgtcggggcgagtgtgatatgtgttaaatttgggttcggcgttggggtcgtatttcggatttagtattattatttgttgtttttttttattttgttttgtgatgggggaaaaaggggtggagaggggagatttgttgttggtttacggatgatttttagtttggataatgtaaaatgttgtttcgttcggagagatttcggttggaggagaatgtgtgtcgaaatattagatgtgtgtttgtttatttttttttttttaattgtttgttgttttttttttttttttttcgtatttttatttttaatttcgggaggagaaataatagtaaaaatatttggcggttagaagtatatattttattgatttaattgttgatttttatttatttagttgggtaagtgtacgtttttcgcgtttaagttgggtattttagcgtttattttagaagtatttttttaggaaggagagagatggaaaggggatatttttgtttttggagttaagaaatttttgggttttattgacgtttcgggataatcgtgtatagggatgattgttgttttgatcgcgtttttttttttgtttacgcgttagtacgatcggtttttttcggtgtttggtttggttttatttttatttcgttttagagaggtcgtttggttgtttgtgggtgggtttggggtgaaatcgtatttcgcggtatttggtgaggggacgtgggaggagcgtagatatttttcggtgatagggagggttttttatttggttgttatttggaagtttatagtggtttcggcgggtaggcgggcgggtagagcgcgggttcgaacgtttttcgcgtttgcggcggcgtacgtgcggcggcggcggcggcgtcggcggcgcgggcgggatttattgggtggtcgcgcgcgttattcgcgcgttttttgcgcgtttttgtttattcgcgaggtcgtaacgcgttttgatattcg

SEQ ID NO: 6464 - DNA, 2906 bp, synthetic construct
  misc_feature 1..2906: note = Description of Artificial Sequence: Synthetic polynucleotide
  source 1..2906: mol_type = other DNA
tcgcgggggtgcggttttgcgtaattgggtgattcgcgtgttttttcgtattttatttgtattaagggagcgcgtgttagacgaagggaattttttttttttttttggtgattttgttatttttttattaattgtacgaagtttaagggatattcgagttttttggttgggcggatgggtttcgcgtttggtatggttgagcggtttatttttattttttcgtttttatttttattataatagcgattatttagttcgttaggagtttttgttttttagcgtaggtttttttttttttttagttttttgggttgttgaagtcgggttttgggtagatagagattggggtcgtggggagagcgttaggttgtttttgtttttttcgcgtttcggggtatttcggcgcgttggggatgtagttttcgttttcgtcgtatttggtcgttcgagcgttcgcgtttacgtttcgcgcggggtcgttcgaaattggggtcgcgttagtcgcgggagttatcgaggagttgttggggtgcgtttgtttttgttttttaaataagattttcgagattttttttttatttttttaatttttagtaggatacggaatttcggcgtttttcgaaagttataaaagaggggtacggaaattttaagttcgtcgtgttaattcggagaacgtaaattcgaggtagagcgtgcgtcgtgcggggatgtgggtgtcgaggatttcgaagcgttcggtttttttcgcgatttttattttttttagattttggttagatatttatttagtttacgtttagagggcgggggttatttcgatttatttcggaagtcgttaattttagaaattttttttgttaggttcgcgaaacgaaggtatttcgttatttcggcggggtaagttcggattttattagggtaggttcgggaggttatttagggtagacgattcgaggtagagcgttttaaaattttgtcgtcgtacgtttagttagagcgtcgagcgcgtttgtttttttttcgttattttttagttttttattcgtcgattaaatttttgggggattatatttttaagttttgggagtttcgggtaaagttttttttttttttgaatttttttattgtaatgtaattatgggtagataagaggggtggttgttttgttttttgtaacgtaaaattaatagatatttaattaagttttaatgttcggttagtttttcgttttttggtgtttattttttttttttttttattttcgttattttcgttcgttattttttttatagattacggatatgtagggttatttatttgtgtttaggaaaaataaattattagagtgatatgagaaggaatggtgtatttggttgttcgttgaaaggttttagagaagaaaacggaaaggggaataaaacggggggattttttttttttaataagtagggcgttttggggaagtttgggggttaggggttttttgtttcgtggttcggtatttgtttttttcggagtcgttttttgttgtcgggcggcgagttttattttgtttttcgtagagggcgcggtgaggaagttcgtcgggggttcgtagttttatgttagcgtcgtcgtcgtcgtcgtcgtcgtcgtgtgaggcgagtatagcggtcgtatttgtggttgatttttgggttgagggggttgagttggtttagtaggcgttaagttttttttatgtgaataataaatatttttatcggcggtcgcgattggtttgcgttcggcgtttttcgatttttcgttcgcggttatttattcggcgcggcgcggggagtcgcggttaggatcgcgttcgggatcgttaatcgtttcgcgttaattagttatttcgggaagcgggaggaggaattttcgaggggcgggagtttttggatttcggtgttatttagcggttttggcgcgggtagggagggggattttcggttcgcggattttttttcgttttttagtttgaagcgacgaggagattagaaatgttaatagttttgatttttaaaaattattttttttttttcgtttttaagaaaaaggggaggatttaattatagagtgagagggtgggaagaagcgggagcggtagaagaaggaatatggttgtggaggagtttagcggtttcggttgtttggcgagttcgggatcggcgcggggaggcgcgacgttcgttcgagtatagcgggtagtattcgcgagttcgggttttcggtgaatatagttttagaaagcgttatcgagaataatatatggtagatgataagtgtttcgttatatgtttttttttcgggaatgtttaaagtagagtcggtaagtcgcgcggtttttttgtaaagtttgtttggcgtcgcgcggcggtttcgttatttgtttcgtttcgcggttttggcgattgtttttttatttttcgttttcgagggtttgagggacgcgtgtaatagagtttttagggttcgaggtattatatagcgcggttcgttgcgggtattgcgtaggaaggggtatgggtggttatcgggacggttattttattgagatgatttaaggagtcgtagacgcggggtaggaaatttcgggggagtcgtgttcgggttttgtagggaaatttcgggatttttttcgtatgtcgtatgcggaaatttgtcgggttcgacgtgtatagtttagcgtttttttttattagttattgtttaggtttttcgattttgtattcgtcggaatgagagaaagtagtttttcgtcgtttagttttcgggtagttgtttcggtcgggttttgcgttggtgagaaagttttatttagaggcggtcgcgcgtaattgtaggcggcgttttaggttcgggcgagttagggagagcggggcgcg

SEQ ID NO: 6465 - DNA, 2906 bp, synthetic construct; identical to SEQ ID NO: 6464
  misc_feature 1..2906: note = Description of Artificial Sequence: Synthetic polynucleotide
  source 1..2906: mol_type = other DNA

SEQ ID NO: 6466 - DNA, 1696 bp, synthetic construct
  misc_feature 1..1696: note = Description of Artificial Sequence: Synthetic polynucleotide
  source 1..1696: mol_type = other DNA
tcggagtcggagtcggcgaagtcgcggagttgaggcgcgtttgggagagttaaggttcggcgggttatgtaggtgtatgttttttttttcgtttaaggagcggcgttattagcgtttttcggttttgtttttggattttggtatcggttcgttttagtcgcgggggaaggcgttttatcgttaaagtgcgtttcggcggtttcggttcgttttgcgggtcgtcgtcggagggagtgcgggggcgtttcgaagtcgtttaggtcgtattcgttggatgttgcgttttttttttcggcgtcggtcgtttcgggtcggcggtagttgattgcggtcgtgagttcgcggagcggcgagagttaagaggaggtgttcgcggcgttttcgttttttttagatatatatttttttttttttcgttttttttcggagggtggaagagataaaaacggggggttagttttttagttcgtcggttgtcggtacgcggggcggcgtttcgttcggttttcgaggattagcggcgtggcggttgcgttcggattcggttcgtcggtcggaggagcgcgcggcgttcgcggtcgcgttcgtatcgtaggtttttttagagagttcgggggcgggcgcgggttcggcggcggcggcggtcgtagttttcggcggcgcgtaatcgttcgtcgtcgttcgtcgttgttcggttttcggcgcgtcgtcggtttcggttttgtgcggagggagcgagttcgcggtttcggttttcggcgtttttagtggtcgcgtcgttagcggattgttgtagcggcgtgagtagcgggggtcgcggttgcgggaaacgtttcggagtttaggaatatagttttcgttggttagcggcggtagtagtagtagcggggtttttgcgcgcggcgtttatcgtttttttttcgcgtcgggttcgcggtgttgtaggcggtagttacgtagattgtttttttatttttttgttttttagttagaacgtgaatgtattgttgacgtatattgttttgggagaagattagcgtgatgtagtgtttttatgtattagcgtcgtttttttttcgtcgtttgtttcgcggggttaacgtcggcgttttttagcgtcgcgtcggtcggcgtcgcgtagtttcgcgttttcggtcgttcgtttttttttttttttttttttttttttttttttttttttttttttttttttttttttttttttcgggtcgtttttttttcgttttttttagacgagcggagcggggttagggcgagcgggcgagcgagtcggagtgagcgttaagtgaggggtcgcgcgtaagtcgtaggcgttcgtagttattttgggtcggtcggagggagtagttgggtggtcgttgataggttggagcggcgcggggttgcggcgggagagttcgcgtcggttttcgtttttcggttcgtattcggggttttttggttttgaagagcggggtttaggggttcggcggttcgcggcggggttgttgtatttggtttgtttttcgttcggttcgcgttatttttattttcgttgattgttgacggggcgcggattcgcgttcggagttcggaattgcgtggtggggattcgggggacggcggtcggggttacgaggtttttaggatcgagagttcgggtttcgttgttgtattgtcgttagtttttttttcg

SEQ ID NO: 6467 - DNA, 2054 bp, synthetic construct
  misc_feature 1..2054: note = Description of Artificial Sequence: Synthetic polynucleotide
  source 1..2054: mol_type = other DNA
acgcggcgatgttttaagtcgttttttgtttgaaatttcggcgtattttcggggaagtagtgttacgttttagaaaggcgtttgtgttgttttttattggggaaacgtagtgtttgttttatatgcgtcgttttatagaattgtagttttaatcgtttatttggtttttttttcgggcgttgggttattattttttttaaatatgcgttcgaatatttgtgggtttgtttttcgttgaaattttagggtgtttaaaggttacggggtcgcgatgatattgggtaggttttcggaaattttttaggattttttttattttaaagtttagttagggacgaaaggggttgggagttgaaaaattgtttttttaattttttcgggtgggaggtagagtcgggaatatatagaattttatttcgaaagtttcgggaaagagaagtttgagtttaggagcgtgagaggagaatatattcgggaaatttttgtttcggtcgttgtattttcgcgggcgtttaggtgggacgtgggtaggtgcgcgagcgtcgtgtgtgtcggtgtggatttgtgtgtgtgtttgcgtgtgtgcgtgtgcgtgtgtcgcgggttggtttcgggatattgaggattttcgggtcggtttaggtttgttcgattttgttgttttcgtcgttcgttcggttttatttttcggcgggtcggttttttatttggacgcgtcgcgttttttttttttagcgggagcgtcgtattgatattgtagatggagtttatgtcgttgtttttcgtttttttttgaacgtgtgcgtgtgcgcgcgtgtggttgttttttttagttttagtttcgaacgtaaatattttatcgaggtatagggaagtcgggagtagtcgaggaacgcggagggcgtcgaattagagtttgcggggtttgatagttttttttgcggcgtttaaggtgggcgtaatgtttaataaaaaggtcggaaaatggggatcgatttcgaatattttttttttttatttagtttcggagttcgagtagcggcggcggttttcgggggttgcggtggcgacgtcgggttgttttttttcgtttttattttcgcgggttgaatgtttttgatgttaagcgggtatagcggcgttatttcgcgtcgtttatgttcgttcggtcgggtcgttgttcgggcgcggcgagtgcgcgggggattcgtcggggagcgttttcggcgtttttgcgcgtttttttgggtagcggcggtcgtttttcggtagttcgcggtcggtcgcgtcgcggtagtttttatttttgtcgagatattcgtcgggtagtgttttggggtcggggttggggggtcgcgggagtcgtcggttgtttttcggggaggtgcggggttgcggcggtggtggttgcggcggttggcgttgcggcggcggagagttcggtcgcgggtcgagtcgggtttttcgggcgcgttttcggtttttcgggcgggttgttcgtaaagtttgtagggggtagggagcggggtcgtcgttggttcggtcgtcgtcggagttttcgggttgtttgttgtcgtcgcggttcgttgttgttgtgtattgaagttcggttaagcgttgtaaaaattttagttgtttggcgttttttgggttttttttttttttttttcgttttttttgtttttttttttttttttttcgtttcgtttttttttttttttgtcgttcgtcgttcgtcgtcgttttttttttggttcgttttcgttggttcggagttcgcggttgatatttagagcgagggagagcggtcggtagagggggtagggggcgtttttttatatgtttttattcgtcgtcgttcggtttgtcggttttttttcgtattaacgtttgtcgatatttttttgggttttttcggttcgtacggagttattttggcggtggcgatgtggggcggagagaggggtatatatgggtgatcggagcgtacggcgcgcgtttagagggaggcgtttagtcgtttcggaatttgtagttttgggcgttggtcgtcg

SEQ ID NO: 6468 - DNA, 1258 bp, synthetic construct
  misc_feature 1..1258: note = Description of Artificial Sequence: Synthetic polynucleotide
  source 1..1258: mol_type = other DNA
tcgcggaagcgttttttgttgggtagaagagtgggtttttcgtcgcggcgtatttgtttcggttgtcggtttttcgtatttatttgtacgagatttgttttcggaaagttaagttttttagttttttttttagcgtttcgtttttttttttttggtcggcggtcgcgggttcgtttagggtagcggttttcgtcgtcgcggttgattttgcgtttcgcgggttcgcgtcgttttcggcgtttaggtagtagttttcggcgtcgttttcgttgttgttgttgtcgttcgtcgttttttttttttttttcgtcgaggagttggggtttatggcgttcgtttcggcggtcgcggagggagcgtaggcggcgtcgttgtaggggtcgggcgggttggcggcggcggcggcggcggttgtaggagcgcgggtaggttcgcgcgtcgttggtaggggtagtaaatggtagttttttttcgtagtatttattcgcggttgtatcgtatcggggtattgtgggaaatttcgtttattttttcgtttcggttaattagaggtcgtcgtttttcgtttttcgcgttttttcgcgtcggttcgtattttttagtttcgttggtttttttttaaatttcgagcgaaagtttaagttgaatatgaattttgttcggaggcgacgggttgcggcggagggggagagagaggaggataggttgcgatttcgggttggggacgttagggtagggatagcgagtattaggaaggagagcgttcggggaattcgagtggtcgcgttttgggttttgtatcgtgaggttggggggattaggatcggcgggcgtttattttggttttgagtttagttgtcgacgttgggttagtattttttttatcgtcgttttttagtgagtagagttgggtttaggtagtagtttttgggcgcgggaaggtagcgggagttgtatttaggggaggggggaggtagtaggagtttcgttagtgggaattttggagtgaattcgtcggcgggtgttaagtcgaagcgtcgattttttgtttttggattggggttcggatttttgcgtttttaaattgcgttttcgttttgttcgtcgttcggtgttttttttaggcgtagtagattttcggtaaatagcggttaattcgatggaatcggattatagggttttcggtgaagtagaaaggcggaggaaatttaggaggtagaagtgaggattttggcgtttggcgtcgttgcgttgttcg

SEQ ID NO: 6469 - DNA, 628 bp, synthetic construct
  misc_feature 1..628: note = Description of Artificial Sequence: Synthetic polynucleotide
  source 1..628: mol_type = other DNA
gcgtggaggttgcggttcggcggggtaggcgttgagcgtatcgcggcggtattcggcgtagaggttttagcgcggggagtcgggtttagtttcggtttgttagcgtcgcggttttagtttattcgaggtcggtttggggggttcgtagggcgcgcggagcgtcgagtgcgcgtcgggttgggtttcgtatttcggtgtaggagcgcgggcgcggcgcggcggagcgtttcgtatggagtcggttcgggagtttttttcgcgggttcggtcgtcgtcgtttttcgtcgcgcgtttcgcgttcgttttcgtcgtttttaggtcgcgttcgttcgtagaggttgaggttcgcggtttcgaggggttgttgcggcgattcgggtcgggttacgagggtagtattagttggaaggcggttttggagggtaagcgcggagcggttttttttttttggtttagggatttttgtttaggttcgattcgcgattcggaggcggttagagttattttggtcgttgtttcggaggggagcgttgggagcgcggcgtcgggacgcggcggagttatttattttagggcggttagacgtcggttcgtggggtggggtgggagggaatcgggggttatcgcg

SEQ ID NO: 6470 - DNA, 1075 bp, synthetic construct
  misc_feature 1..1075: note = Description of Artificial Sequence: Synthetic polynucleotide
  source 1..1075: mol_type = other DNA
gcggtttttagggcgagtattttcgtttttagcgttttttggttattaaagaaaaattagacgtttgcgacgggtttttttttcgttcgggttttttcgtttttcgtttttcgtcggttatcgggcgttattatcgcgggtagtagggcggggcgttttgggagtcgttgggtgtttgggttggcgtttgtaggggtttcgcgggattaggtcggttgtaggggcgcggcggcgtagtttattttgttgttgaagagtcgcgagaggttgcgtatgggcggagggggtcgcggggtatttcggagttcgcgtacgttttagaggcgtagggcgtcgtcgtgcgaggcggtgtagagtatttggtcgtgtatttgcgggcgtaggggcgggcgttatcggtgacgcggtaggcgggggggatatcgttgttcgcgtggatggatcggggcggggtatttttttttttacgggcggcggtttcgagaagggtagagggatttatttggatgtagttgatgatgaatgtgtggtttcggaatatttttcgtagttttttagattgcgcgtcgaaggttcgggcgtaagcgttttcgttgttcgtgaatattgcggatatatagcgcgcgttgggtttttttttttgttcggtttttcgtaagtagggatggggcggcgagagcgtgatttggggcgttttcgagatttcgttttacgggggtattttgaggtttatatgggaagtggatagtgtttttttagagaaacgggtttttacggttattttgttttattttgtagatgtttgcgcgttagttggttttgtttttgttttgttgaatatcgttcgggtttagtttttatttcgcggtttggtgaagttggttttcgtgtttgtttgggaagtttttgtttggggataatcgttaggttttcgagtcgttttttttttatttttcgttgcgtcggtaattttattttttcgtttttattaacggatcggtatttaaattaaagtttagttttttggggtttatgattacgtattttcgggatttttagcgggggcgagttttcg

SEQ ID NO: 6471 - DNA, 5566 bp, synthetic construct
  misc_feature 1..5566: note = Description of Artificial Sequence: Synthetic polynucleotide
  source 1..5566: mol_type = other DNA
gcgtttttttagcgatcggggtagaattaggacgtgtaatgcgattgttttttttttttcgtttttcggtagagtttttgttcgcgttaatttatttattaggttttgttcgcgttacgcgcgtttttggtaggtttggggcggggaaaggcgaagcgttgggtacgcgagggtttgtgtattttagtttttacgacgtttttggttttttttaggttcgtcgttgtcgtatttaatttttttttttcgggggttattttgaagaagttttagattttagatttagttttttagatttcgttttcgagttcgttcggtgggtttgtaggtcggttttttttcgtttagaggagagcgtagatacgtaatgttcgttcgttggtttcgttcgttttatttttgtttttcgcgttttttcgtttcggtttttgtttataggtcgggtcggaacgttagttttaggagtcgacggtggttttttgttcgtttcggggaaggtgttgtttttttatcggttttaatttttcgttcggcgtttggggtttggttgcggggttcggtttttagtcgagggcgtagggttggttaggtttgttttggttgaggtggagatttcgtttttagggattgttgggcgtttttgtttcgcgagtaacgagatcgtcgcgagcgaacggtttttattgagtttatttttttaagtgttattacgttaagttagagaagcgaggcgagtggaggggacgtagaggggtcggaaaagttatttttttttggtttcgtttttagataaaaacgggagtttggttcggtattcgggcgttcggtgttttcggggcgttttattgaggttttgtttgtaaaattagcgttcgtgttttgaagcgtacggcgtttggaagttgtttttttgttcgtttttttcgaggtttttttttgtgtagcgagtttgagaaatatggaggatcgtttttcgtaagcgggtggtcgcgggcgtttttcgatttttgggtgaagttagagggaaaacggggttttcgggttagtgttttattttttatttcgggagaaattaatgttcggagagggttcgtttgattcgtatagaaaggtcgattttgagggcggcggtcgttcgggggagaaagcggaggttttgggttcgcgggagcgcggtagtcggggttggtatcgtagaggagagatacgttattgtttcgtatttttagaaagcgcgaggcgtcgttttagttggggtaggcggtcgaggtcggtttttatgcgcgtttttcgaagttttttgaaatattttgcggagtttcgtgtgtatagaatttagtatcgtttagtttttgggtagtttaattttttgtagttttattttagttttttcggttttttgaacggtgattttttttatcgtttttttagagttgtttcgtgtttgggtttattttggggggttcggtattttttagttatttttttttttatttattttttttttttttatttttttttttattttttattttttttttttttaggagagcgatttacgaatttttttttttttagttaattttagggtttagttcgtagattttgcgagggtaggtttttgtttatcggttcgttaggcgttttggaggtgacgttttgttttttagagtttttgttgtagttacgaattggggtttgggtcgtaggaaagtatagggttgaagtttagcgttttggggttatttatattgaggtagttagaggtaaagagttttaagaatttagaaaatattttttaggaagtcgtttaattggtttttatgggataggtggagttattaatttgggatggttttgtaggaattaaagagtttagggttttttttttttttaatattatgtttaggagatttagagtcgttggatttttttttttttgattggtgattattagagtttttagagttgtagaaaattttttttttaaaaaattaagtaagcgttaataagattttttataaatttttattagttttattttttcggggggtaggtagattgtggggtttgattttttgagattcggggaggatttttggtagatgtgtgtttagttagaatatttggtaaggatttttttaatgaagaaaaagtggaggaatttagttttagcgagaagaggtttttttattttgttttagatatatcggatagagggtatattttgattagagttacgtttagtggttaggaggttagtttagtatttttttttttattattttcgttttgggtgggggggtaatttttttgggagtagttgtgggaattgtcgttttttattttagtttagttagtattttgaagtttgtaggggaaggatagtacgtgggatggatattggggaaggagtttcgtaaggttagggtgtaatttttaggttttaggtggtttggtaggttacgttgtttcggagatgtttgttagattttttaagtttatttagggtttggtagtaatttgttggttgtttttgcgggggtttgggttgttgagtacggtgtagttgtttagggttaattagttttagggtgttcgtgttaggttgcggttttttcgtttttttcgtattgagggtatttatggcgtgtaaatgttttcgtatttttagagttgttttatcggatgtttttaggaatttatatatttttataaaaatgtattttaaatgatggataggcgagtttggggtaataacgggtgtttggtgggtagataagagtaaatgggaaggagttcgagggaggagggggaagagaagaggaaatagaatttttagttggatattttgataatagttggaaggaaagtttagaaaagatgaagagagaggaggggagaaattaattggggtttttatttttgtcgttggatttttaattttcgttttaaatgggttttgtttttcggtaaaattagtttaaaggattttaaaataaagaaaacgagatgatcggtttgggagttttttaattagagtagagaagttagaggggggcgggcgatttggttttgaagttttagttgaatagttattttttttttttttggtaaaaaggatttttttagaattttcgaggtttttggattttttttttcgtaaatggagtcgtatattgtattttttcgttttttcggatcgttaagtatgttttatgagggtcgttgttttcgggtggaatgcggtcgtatgtacgcgtttttttgtatacgtatatatacgtatatttataataagtgtttgtaggaggagtgttttgcgcgttagttttgcgtttaagataggaagttgtcgggttatcgagttaaatgggagtgatattatttttttttattagtaaggaaagcggattataaaagtttttttgtatttcggtagtttatttaatattatttatgtattttgtgtaaggaattgtgggatttcgttttacggtaaataatatggaaattttaaaaatagcgatttttttgtgcgtgtttatttacgcgtttcggggtgatttggcggggttgtcgtcgggtgatttatatttttgaatcgcgaagcgatagggaaagcgcgggcgagcgtaggagacgcggtcgggggttttttcgggtttttgggttttcgtattcggagcgggggacgcggtcgttttaaggggaggaggggcggcgggttgtttttgttatttagcggcggtcggagcgttacgtgggcgcgcggcgtcgcggttattggttcgaggtacgtgtttaggagatcggtttgcgacgttattcgagggggttttgttaaaaataagaataaaaatttagagtgaaagtgttttaggttgcgtcgagtggtttggaaattttcgagttcgcgcggaggtcgaggcggcgagggcggcggacggtcggggagcgcgggcggtttagttcggttcggtcgggttttggtttcgcgttttttatttatgcgattcgggtcgcggagttttgcggggttcggcgggggcgcggtcgtacgtcggtggggcgtttcggttcgtagcggggcggcggtcgcgaggagggggtttttatgtgcgtgcgggcggtggcgggcgcgttgatcgcgggcgttcggtattttcgagggtcggttagggcgtgcgggcggggacggtcgggcggcggcggcggtcggagtcggttcgggcgggcgtgagcgtcggggaacgcgttgtttgtatgcgcgtagttttcgtttcgggcggtttaggcggcggcgtcggagttcgaggcggtcggacgcggagaggagcggggagttcgggaggcggttcgcgttttcgtcggattattgcgattgtttagatttcggttgcgcggcgaagtcgaggatttggttttgttgaattttttatcgtttgggcgagcggggcggttcgtggtgtttttaatttagttcgtggatttaaaggtggtttcgcgtcgagcgcggtcggcgatttgtaggattttagttttggtcgcggtcgtcgcgtacgttttcggaagattcggcggggtgggggcgcgggggttttcgtgtgcgtcgcgggagggtcgaaggttgatttggaagggcgttttcggagaattagtgtgggatttattgtgaatagtatggaggagaatgattttaagtttggcgaagtagcggcggcggtggagggatagcggtagtcggaatttagtttcggcggcggttcgggcggcggcggcggtagtagttcgggcgaagcggatatcgggcgtcggcgggttttgatgttgttcgcggttttgtaggcgttcggtaattattagtattcgtatcgtattattaatttttttatcgataatattttgcggttcgagttcggtcggcgaaaggacgcggggatttgttgtgcgggcgcgggaggaggaaggggcggcggagtcggcggcgaaggcggcgcgagcggtgcggagggaggcggcggcgcgggcggttcggagtagtttttgggttcgggttttcgagagtttcggtagaattcgttatgtgcgttcggcgcgggcgggtcgtttttagtcgtcggtagcgatttttcgggtgacggggaaggcggttttaagacgttttcgttgtacggtggcgttaagaaaggcggcgatttcggcggttttttggacgggtcgtttaaggttcgcggtttgggcggcggcgatttgtcggtgagttcggattcggatagttcgtaagtcggcgttaatttgggcgcgtagtttatgttttggtcggcgtgggtttattgtacgcgttattcggatcggttttttttaggtgagttcgcggggattacgcgtttcggttcgtcgcggggaggttcgcggagttggggggcggtgttggcgcgggaatttatcgggaggaaaatatttcgaatttttttcgcgtatacgtataaagatttacgcgatattgtgtgaagttgacgtcggttcgggtagcggttaggagtttagcggtaggattgattcg

SEQ ID NO: 6472 - DNA, 5566 bp, synthetic construct; identical to SEQ ID NO: 6471
  misc_feature 1..5566: note = Description of Artificial Sequence: Synthetic polynucleotide
  source 1..5566: mol_type = other DNA

SEQ ID NO: 6473 - DNA, 1164 bp, synthetic construct
  misc_feature 1..1164: note = Description of Artificial Sequence: Synthetic polynucleotide
  source 1..1164: mol_type = other DNA
gcgatttgtttagcgttaaatcgcggttttagttttttttagttttcggtttagtcggtttattagtcggttcgcgttttgtagtttttttagagggacgcgtttcgagatggagagtaaagttttgttcgtgttgattttggtcgtgtggttttagagtttgatcgtttttcgcggaggggtggtcgtcgtcgatcgtaagttttgcgcgtaaatttttttttatttgtagattcggcgggtggttattgttattcgaattgaggatgagaagaaggaagttggaaggggcggtggatgcgtttagggatttttttagtttgggttttagtttcgaaacggttttcggagtgggatttaggaggggtcgggagggaattttttttcgatcgtgaagcggcggcgtttagttttcgttttttttttttgtcgggttttcgcgttattttttttattttggttgggatcgcgttttcgggttcgtaggtttcgtcggggaggtttcggggtgtgggggtcgggacggcggaggcggggagtaagggttcggttggcggtgatttgtagttatttttttgtcggaggggttttggaatgaaaggcgcgcgggttaaggtgatttcgttttggttggtattgcggtttagttttcgttcggggattcgcgggtcgattgtggttttttttggggaagtcggggcgcggggaggcgtttcgggtattttagtcgtacggggtacgttcgttttcggcggggtttttcgtttcgttgtgggagtggtagtgggtgtcggggtggagaaagtacgcgtggcgcggagttttggggacgcggcgttttattcgttttggggagtttcggattttttttagtttttaggttcgtatgtttttttttttttagtgttttgagaatttagcgaggggttgattttttcgaaatcgtggcgtagttattagtaatttgtggtcgtcgattcggggggttgttaggtttgcgtttggttattttttttgttttgggggttgaggttagtttcgggcgttcggtttcgtcgcgcggttgcgagtacgtggggttgacgggcgtcgcgtggaggtagcgagtataacggtggttatcgtcgttagggaatcgttcgttcgttggggtttaggcgttcg

SEQ ID NO: 6474 - DNA, 1495 bp, synthetic construct
  misc_feature 1..1495: note = Description of Artificial Sequence: Synthetic polynucleotide
  source 1..1495: mol_type = other DNA
tcgtaaatttttttttgcgtcgttttttttcgcgtggaatgggacggagtagtttttttaggcgttgtttggttgcggaggggagcgggtagcgagagtttcgggttttcgtttgggttttcgggttttcggggcgttggtttcggttttcgcgtagcgtttagcgatttttgtcgggggttttcggtagtcgcgtcgttatttttcgttcggttagcgcgggaggaaaaggggttgcgttcgggagcgtcgagtttaggtttttttcggtggcgtgttcgcgttttggggtgggggtgtggtggggaagagggagggggcgaggttaggggagggtgcgaaggaggcgtttgtttttaatttgcgggcgggaggtgggtggttgcggggtaattgaaaaagagtcggcgaggagtttttcgaaatttgttggaatttcgggttcgcgcggaggttaggagttgagcggcggcggttgtcggacgatgggagcgtgagtaggacggtgataattttttttcgatcgggttgcgagggcgtcgggtagaggttaggacgcgagtcgttagcggtgggatttatcgacgatttttcggggcgataggagtagtttcgagagttagggcgagcgttcgttttaggtggtcggatcgttcgtcgcgttcgcgtcgcgttttttgtaggtaacgggagacgttttcgcgtagcgcgagcgttttagcgcggtcgttcgttttttttttcgagggataaattttttttaaattcgattcgagtttttggattaaattcgtttgcgtcgagagtcgttcgcgtagagcgtttcgttttcggcgagatgttcgagcgtaaagaaggtagaggtaaagggaagggtaagaagaaggagcgaggtttcggtaagaagtcggagttcgcggcgggtagttagagtttaggtgggtgcgtagcgcggttcgggttttacgattttttttttgttttttttatttttttttttttttggatgtcgtggtttttttttttttttttttttcgtttgtttttttcgttttgcgttttgagcgttcgttgagtcgcgcggtgtttttttttttgggggtcgtcgtttatttgggcgtcgagttttatcgggcgtttacgtttagagtttagggtaagggatagtagtttcggtcgtatttttttagagtttcgggagcgtttcgttttttggtacggtttttttttagcgttttagcggttgagtttagttcgggagtgggatttgggttataggagtcgaggttgcgtgcgcgcgtgtttcgcgttataagcgttttgtacgggggtcgtgtgttttttagcgggaaacgttggaatgggtcgtttggagggagagtcggttttttcggtgtgtttggtagcgtagaagtgggtggtcgagtaagaggtcgcgtgggaagttagtttcggcgttttggggtatagggtaagcgatgtagagtgcgcgtcg

SEQ ID NO: 6475 - DNA, 352 bp, synthetic construct
  misc_feature 1..352: note = Description of Artificial Sequence: Synthetic polynucleotide
  source 1..352: mol_type = other DNA
gcgtttttggtagtagtcgtttacgttttcggttttgcgtatcgggtttgtttcgggaggggcgcgtgacgttatcgcggggtagtcgagaggggatcgcgggtttcgggtagggtaggcgttttcgtagttttagttataatataagggagagaaagtaacgttttggttttagaaatttttatcgttaaggttagttttggttagacgtatagttaaagagtttttttagtttagcggatgaatcgttcgcgagtggtattttttaaaattttggttttattttttaagatgtttttttattgcgtaatttagaaagtattcggatcgtcgttatttattagcggcggcg

SEQ ID NO: 6476 - DNA, 1141 bp, synthetic construct
  misc_feature 1..1141: note = Description of Artificial Sequence: Synthetic polynucleotide
  source 1..1141: mol_type = other DNA
tcgtttagtttttagcgttgcgttgttttcgcgtttatcggatgattacgaatatgattagcgagttgtttattaagtttacgacgaatattacggagtagatcgtcgtgatgatgatcgggatggtcggggagatgtgcgcgggttttagttgcgcgtttttcgagtcggcgttgtcgttgttgtcgggttcggtttagtcgggaaattaggcgttgttgttggggggtaggtaggcgttcggggcgtaggtagggttcggtttttcgcggaagatttggatcggggagtttatggtggggcgattgtagtaggaaggcgaggataggcggtatttgcggcgttgcgggagcgaaagaatcggttggacgcggagaggtaaattttgttcgcgttttggttagcggcgttggggattcggagtttgcggatttttattcgggtcgtaagtcgtcgggggtaggatagggagaacggatttttcgttgttttttcggttagtaggcgcgtcgttgggtgttagagaggggcgaagagcgttcgtttttttttttttagtttttgaggtgttttttttattaattttaggtatcggtttttggtggaattgtttttagattgtttgagtttttagggttaagttttttttttattttttagtacggagttttatttagaattgtatttcgaaagtttaaagtttatttatggtttttagagataggcgaaggcgaggttttttacgggacgttttggtaggtgttgaatcgcgcgtttacgagtttcgtttagtttttggtattatttgttttcggatttcggtttcgtttttcgttcgagggttgttgtttcgtcgagcgtagttttcgttttttagcgtacgttttttattattggcggcggttttgcggggcggggcggggcgggatcggcgggacgtagtcgggacgcggttgggcgttgggggtttgcgggcggagagttcgtttggtgcgttcgttttaggtcggtaggtttttgtttcgtttcgttcgttcggagttagtttttagttttttagttttttagtttcgcgttttttttagtttcgtaggttcgttcggtttattaattgttcgagcggtatatcgtttggttttcg

SEQ ID NO: 6477 - DNA, 3297 bp, synthetic construct
  misc_feature 1..3297: note = Description of Artificial Sequence: Synthetic polynucleotide
  source 1..3297: mol_type = other DNA
tcgttcgtcgtttcgaagttgttcggttttttttttagttcgttttttagtttcgtaaggttttttttttatttttttcggcgattttttttcgaggtttttcggaggcgtttggattttttttttttgtttttcgttttgtcggtcgttcggttttcgagggggtacgaggagttgtcgggtcgtttttcgtttttgttcggggcggcgttggtattgttcggtcgattttcggggggtcgttcgttgaggtttttttattcggtagttaagtttagggaagaagacgttatcgttgggtagagttcgtttatgtcggtgagtatcgtggtttttattacgttttatatttagtttttttaggatattagtttttttcgattttttttaattttaattgattcgtttcgttggggttagtagtagggagggtggtaaggtcgggaaggtcgggacgtggttgggtaagttttaggacgggatattggcggttttcgggatatcgttttttttcgcgggaagatattttaagttatttttttttgggttattttttttttatggtttaagaaaacgggagggagttttcgttttttttcgaggttgttttttaaatttttagcgtgtcgttttttttcgtttatttcgagttttttttaaacgcgttttcgtttgtttttagcgttcgtttttttatttttttgttttttcggtaggtaagggaggaaatgacgtgatgttatttttgtgttaggttagtttttagttttagtttagtttttcgggttttagggaattaatttcgcggttttatcgggttttattttcgaagggacgttgcgggttacggggatacgcggtgttgcgagttcggagagttgggcggttgggttttttttttcgttgttttttggtttattttttttttcggatttcggagtttttggagaaggggacgcggagggcgattgtcgagggttttagcgggatttggagttaggggttagtttttttttttatttttcgttcggttgttgggtggggttttcgcgttttggttagttgggagggggcgagggtcgttttttagggcgggaagatcggaggtttaggttgcgtcggggtggggcggggatagagtttagagaggcgtttcgggtcggggagaaggtagggggttgttttttagagacgcgtagtttatagacgcgaagttttggggattaagcgttttttttatgtttgtcgtttattttcgtttttttttttcgttttttttatttacgaggttcgagtacgtagtttagtatattttagtttcgttcggtttcgcgcgtcgaggggaggcgatgatatagagggtttcgcggacgttttttacgcgcgtttggtttcgtatttatatttttgggatttgttaatgcggggttggagtagtggggttgcggtcggggtggaggtcgcgtttcgcgtggggtttcgggggtatttttagtattcgcggcggtggagtgcgtcgtcgttggagggaggcgagacgtgggattgttcggtcgggtaaaaggagtgagggggcggggaggaggtagagtaaggggaggaagaggtcgggagaagagggttagagtaaagatcgagagtcggagaaaggcgaaaggcgcggtgagtaatcgtcgacgtagagagggtagtttttcgcgttgtaatattgagaaggtattcgcgggacgtatgcgtacggcggacggaggcgagtcggtcggggtttttttttcggtcggtagggtggacggtgggttcgtgagtattttagtttttcgaatttttttttttcgtttcgggttcgttttgaggtttcgtgttggaaagtggtcgaggttgggaggggcgcgtcgttcgttcggattttagggtgtcgtcgttgttgcggggcgggagtcggtgcgagtcgggggttttttttcgtagtgcgagtttgggggagtggggttgcgagtgcgttcgcgtgcgaagaggggtatcgcgttattaggattaatatgtttcgggtttgttagggcgttcgcgattttatttttgcggtttcgcgtcggtgttttggtggggaacgcgggagtttagtttttagattttagaaatcgtattgattattcgaagcgtatttcggaaagattaggcgggtggaagcgtcggtttttttacgggatagggagaggataaggaaggggttgggcgttcggggttggtggtttgagcgtcgttgggaagggtaaggagatagagttttttggaatcgtagcgtttttttttaggagaagtgtaattagggtaggggtatcgaggggtagggtgaggaagtggacgttttacgcgtggattttagaagatcgattaggtatgggcgtttattcggagtttttgtttacgtttttgaaaatcgaatgaatagagaagtgttttttatttttcgtttgcgttagggtagttaacgtgtaggcgtcgtcgggatttttttggaataaattcgggtatttgatttttcgtattttcggagttgttttgggaagtcgaaataagtttgggcgttcggattgcggagattggaaagtagggggcggagggcgggagattgggggcgggaagtggaggtgtaggttgtagttggggatcgcggtgggcgttggaggggagggtttgtgtgcgcggttgttttttagcgttgggggagcggacgggttaggggtttttagggaagcggcgtttcgggatcggggtggttttttcgtttttgtgtgcgcggcgatttttatatttagttcgggcggaggagttttgagagaagcggttagttgagagtggggtgggcgttttggggaaaggtttgcgtgcgttgcggttttatcgttgttagagaagtggaagagagagagtgggcgtcgggagggggtttataggcgtcgcgatttattttatttttttttacgtttgtgggggagtgagtggggaaggggttttgggagaggcggcgcgcgggtattgaggtgtatcgtgagtttttcggatttgatagtattaaaggaaaattttggcgagtagttagggttagcgagcgattttagtagtagggacgcggtcgtgcgagagttcgcggataggcgagggggattttaggggagtagttgttgtttacgggttacgggcgatgtacggagtggagaagtgaacgtggtttataggatttttgttcggaaggtggagagcgttataggggaattttttcgatttttgttcgtttcg

SEQ ID NO: 6478 - DNA, 2213 bp, synthetic construct
  misc_feature 1..2213: note = Description of Artificial Sequence: Synthetic polynucleotide
  source 1..2213: mol_type = other DNA
tcggttttaaacgtttttttagttatttgtgaatcgcgaaggagtcggttttcgcggcggggattttgttattagtattttcgcgggtcgaggtcgttttttcggtcggtttttcgttttattcgaaaaggaattagagtatttatttaagacggtgattggtagggtagattaaggtgttttggtttcggttttagtttcgcggtgcgtttcgttcgtttattttgatcgggtgtaggtagttatcgtcgcgtagggcgtttaattcggcgttcgtcggcgtttcggcgtcgttttgtaggttgcgggtgagatgcgcgatgtaggtggtggttagtagtagtacgtttagtttggatagtttggtgtcgggcggtacggacggtagcgtgcgttgtagttttaggaaagcgtgtcgtagggtttgtattcggttgcgttttcgcgtcgtattcgtcgtcgtcggtcgttcgttttcggaacgcgagtcgtttttagggttcgtcggtttcggttcggttcgttcgggacgcgagtcgcggatggcggcggttaggggcgcgggttcggcgttggcgttgagggggttgttcgttgggcggtcgcggtttatggtagtttttcgcgtcgcgcgcgttgtaaaggatcgaaggtgcggtgaggtcggggggcggtcgggtttaattcgagaggcgtagttttttggtttttttcgtgcgtttattagtagtttaacggggttaagggcgtttttaagcgagttcgttttgtttgggacgcgatttgttttcggacgtttggggagagttgcggaatttcggagtttttgggttttttagaaggataagaagaggcgtagtgtcggttttgttttttaggggtaaattaagtaaaaggtttattttattcgggaagaaagatttcggaagtatagtttaggattagtattcgttcgcgtttgggtgattttatttaattcggtacgtacgagaggtggcgcggttttttttcgtcgacgtcgcggaaaattacggtttattagtcgttttcggttttttacgttaggggggatttttgttcgaggagcgggggatttttagttttatttcggggtacggtattcgttatcgtttcgagttcgagagttgcgtagtacgcgtttgacgggttttttattttttttggagcggttgagtggagtttcgtttcgtcgtgagggcgggcgaggggcgtggagtagggtttgtgtggttagggtcgcgttggttattttattttcgttcggtcgatgtttaagtcgacggttgtttttaattttcgttggttgtgatttttatgcgggcgtttcgcggttaggcgtgtgtgtttcgatcggttaaggtaggtcgggcggaggatttggtttatcggagaggttacgtcgggggttgaggcggtttagagggttattaattaaatttttcggcggggcgggttcgggggcggggcgtttttttggtttcgtttttcggtttattgttttacgttgtttttttcgaggcgtttcgttgagggcggcgtgtggagagtttggggtgtttgtcgtcggttgcggtggggtcgggttggaggtcgcgggtgaggtttgtggttaatttcgcgttgtcgaggttttattttttcgagtttagtttgattttaggtcgtttttaggtcggtgtttagttgaggcgggaacgttgtagtttggttgagcgtgatttttaggttttgtgaggaaaagtcgagcgcgttatatcgaggcgttagtcgtttattttattataaggtaaaagatttatgttgttttagttattttaaagttgggagatatattgtattttttattagatttcgaatgtttttagtgtttgtaattttttaagaagtttttagagtagatagtttttggatcgtgggtattttttttcggggacggggattttgttgatcgttttcgttgttttcgcgggggttatcgttttttaattatttgggcgaaatatttttttttggttttgtatttgtggatttacgggaagcgtgatttgtagcgaggtaggattcgattttaggtttttttagaaagcggacgttgcgttttaaggtttgtttagagtcgttttaggaagtcgtgggttttcgatcgttttaaatcgtagcggtttttgtaggttttggattcgtcgttttcg

SEQ ID NO: 6479 - DNA, 363 bp, synthetic construct
  misc_feature 1..363: note = Description of Artificial Sequence: Synthetic polynucleotide
  source 1..363: mol_type = other DNA
gcgtttagtacggcgggtagcgtcgcgttgcgtatcgtcgtcgattatgagcgaggatagtcgcggagatagtcgcgtcgagagcgttaaggatttggagaagtagtttcgtttgcgcgtgtgcgtgtttagcgagttttagaagatcgagcgggattatgtgggtacgttggagtttttggtgtcggtgagtgttttcggtagacgtagggggacgttcgggcggcgcggggcgcgggtttcggagtggttgcgggaaggacgcgcggtattgtttgtgcggggattcgggacgggtcggggtattataggcgcgggaatttacgtgtggattttgcgttcgcgggcgcggtgattttcgcg

SEQ ID NO: 6480 - DNA, 960 bp, synthetic construct
  misc_feature 1..960: note = Description of Artificial Sequence: Synthetic polynucleotide
  source 1..960: mol_type = other DNA
tcgtttttcgacgttttaattagttattattttttcgaaggaaaataaatcggtttttgatatatttttttacgtgtagcgttcgacgttacgggttttgggcggttgtattttttttttgtcggttacggtttaaggttttattattgcgcgtatttagtttttttttaggtgattttcgcgtatttggcggcggcgttttaggtttcggaggttgttcgggcgggttggggttcgggcggcgttcgttgagagtcgcggcgttttttagtcgtttttcgggcgtcgatcgtcgtttttttgtttcggggtggggtttaggggtattagtagtcgcgggttttcggtcgtcgtttgggaatttagggttagatttagttttataataacgttttttcgttacggtaatttaattggaggtagaagtcggcggggcggtcgagcggggcggggcgggagcgcggtcgtcgcgagttacggtggggagcgggcgcgggggattttggcgggtttcgggtagcgcggttgtatttatttgtgttataattgcggcgacggggggttgaggaatcggtttttttaaaagtaaatcgaaaatgggtaatagagaggtcggggtagcgttaagaggggttttgtttcggtgtttagggtaaaaaattcggtttcggtttttagaaattcgagttagcggtggtttttttttttttttttttttaaacgtttttgtgttttcgggtcgaggggcgtttttcgcgcggtttcgagtgtatagcgatattagggttggcgttggagaggggagttttttttttagtatttttcgggtttttttcgtatttttatttatagttttttttttgggttcgacgttttttcgttttgtagtcggagtttgggtttggtgtttattgtttcgcggggtgtttcggacgtttggtttttgtagcgttttttacg

SEQ ID NO: 6481 - DNA, 1404 bp, synthetic construct
  misc_feature 1..1404: note = Description of Artificial Sequence: Synthetic polynucleotide
  source 1..1404: mol_type = other DNA
acgcggggttttcgggaatcgtcgtttttttttttcgttttcgcgttcgcgttttttttttcggggtttcggtttatttatttttggtgcggtttcgtcggatttaggagtttcggtcgttcgggttgcggggagggggcgtttcgggtcggttttagaagttattttgtaaagaggtagggggcgcggggtcgcgcggggcgagttcgggattcgcggggaagaagtttttcgggatcgcgtttcggtcgttcgagtttttcgcgttcgtcgttttttatttcggtcgggggtttatttgggagttcgttgttttcggttagtcgttcgcgtgtgtttagggttagtagtacgtataagtgttagcgtacggtcgtcgcgtttatgtttaatgcgggtttcgttgggcgtgcgggcgtgcggggcgcggggattcgatcgatcggtcgttttcgtaggcgttgttcgttgttcgtcgtttcgttatcgttcgggttttcgagtcgtttagttagttcggttgatgagttgatagcgcgcgtttattggttcgtggcgtcggaggggcggggcgtcgtttagggtcggttaatgggcgtcggttttcggtttttcgaggaagaggggggttcgggcgtcgtcggggggattttttttttggggcgggcggtaggtggggggtgtgggtttggtcggtcggttcgttaggcgcggggtttaggttaggttggggttgtttggaggttgcgtttttttttgttcgcggcgtttcggttttcgtcgtcgagagtggacgtttttttggggtaatttttttcggtttagaggtagtttcgggggcggggattttgcgaatcggggatttcgtgaggtcgttcgttattcgtgggtagtgaaacgcgttagcgcgtagagtagattcgtttgcgttgtcgtttgttggacgttttttgagtatttattggggatcgagtgcgggcgaggtagtagcgaaggaatcgggaggggaaatttcgtgaagattatttgaaaattgacgtttaaaataaacgaattttttagtattcgttaaaggatagtggttcgttagtgtgtttgttacggggcggtcgtaggatttgcgtttggaatcgggcgggcgttcgggacggataatgtcgtttggcggtcggtttcgcgggaggttttcgtacggggttaatttcggtcggcgaagttcgttgttcggaatgcgaggtcgaggtttttttttgtgatagatcgggcggggttaggaggaggggtagggcgggtatttcggttcgaagatttaggaattgttttggtttggtttggggtttatatttgacgtttggcgagggttggtttcgggtttggttttatcgggtttgggagggacgggcg

SEQ ID NO: 6482 - DNA, 1247 bp, synthetic construct
  misc_feature 1..1247: note = Description of Artificial Sequence: Synthetic polynucleotide
  source 1..1247: mol_type = other DNA
tcgtggggtattacgcgcggatttttgtttggcggtttttgcgttcggggttgttgagttcggggttcgttttgaggtcgcggttgtggtttttggttttttcggttcgcgttattgtcgcgcggcgttcgttgtattttgttttttttgcggtttcgtatgtttttggtggaatttagttcggcggacgacgaggaggatgagatggaagtttgttggaaatcgggtaaattttatagaaaattgatgaggaagacggtcgagagtaggattttgggagtatttatggcgggtaagtggttgcgtttttttaggaggcggtggcggcggcgtaggacgcgcggggtacggagcggttggatagcggtcggggttcggtttttcgggcggattcggagtgcgaggagtcgggttttagttatataaatttcggtttcgttacgttttttttcgtttttcgttgggaggggaggaatggggagggagggtagaggaggggtggggagggtgggaggagagtcgggtggtgcgggtcggaggtgtgggggagaggggtcgcggtgcgtcggtgtggtaggaagacgtagcgttttcgcgggacgcgcgcggggttgtcgggcggtgcgcgcggcgcgggtcgtaagcgttgatcgggggaaggcgggcgttgtcggttcgtggtcggggagtaaaggttggttcgtcgcgttagggtttttttcgaattttcggaggtgtggttttttcgtagcgcggtttcggttttcggttttcgttagtcgtttttatttttttgggagcgagcggtttcggaggagggaagcggcggcggcgtttttaagagatagtttggagtaggcgtttttgttgtaggttgcgtgttgtttcggggcggtggtatttttttttttcggttttaatcgttaggtttgtcgtttgcgttttttaggggttagttcggagttagagaagtttcgttttgggttaggcgtagggtttagttcggaatagttttattttttcggttgggtatcgttttttataaagataggcgtttattttcgattttcgaggttaggtaaaggttacgagtttttagagtttggatcgatgttaaaagttgttgcgtttttttgtaggttttagttttttttttcgtagtttttaattttttttgacgtagattttagttgttttattttttcgtttgttttcgggattttttttttttcgcggtttgtttttcg

SEQ ID NO: 6483 - DNA, 1861 bp, synthetic construct
  misc_feature 1..1861: note = Description of Artificial Sequence: Synthetic polynucleotide
  source 1..1861: mol_type = other DNA
tcggtgagtagagtcggcgtagttatagcgcggagtcgcggcgtttattggttttcggagttgttaatcggcgtgtaattttgtaggaatttttttcgggtttatttgggagttatattgtcgttttttttttttagtcgtttaggggagtttggagaagtaggtttaggagggagggagttagaggaaaagaagaggaggagaaggaggaggattcggggagggaggcgcggcgcgggaggaggaggggcgtagtcgcggagttagtggtttcgtttggacgcgttgttttttagatattttcggagttttagtcgcgcggatcgcgcgttttcgtcgttttgtttttaaatttttgtcgtagtttttttttaagttagcgaatttattttttaaaattagaaattgaatttcggtacgggaaaggagttcgcggaggagtaaaattatagtagagtaagaagagttttagagagtagttttttcggagtattaatttcgtgtcgggagtgtagaaattaataagtgagagggcgtcgcgttttcggggcgtagttgcgggcggcgggagtaggcgtaggaggaggaagcgagcgttttcgagtttcgagttcgagttttcgagtttgagtcgtaatcgttgcggtattttgtttcggattcgtgtgcgcgggttgcgtcgagcgttgggtaggaggtttcgttttgttttggttgtaagtagcggttgggagtagtcggtttttggggaatatgcggcgcgcgtggattttgtttattttgggtttggtggtttgcgtgtcggcggagtcggtgagtgggttaggcggaggatgcgcgcgtcgtttagggtgtttgaagttacgagaggagttcgtagggaataggggagcgttatttggggaatttttagtttttaagtatatatcggagattcgttgggataaatgcgttcgttcggttattttttttttttttttttttttttagaaaagcgttgttcgttggcgttatttcgcggttcgcgggaatgggggtatcgagaattgcggtttggtttagtcgtagaggtttttgaagttatttttaattttttcgttttcggcgggttttgttgcgtggtttgggaaggacggaggggaaagggtggtaggaggggggagtttgggtcgggttcgcgagggaacggttttatttcgcgcgtttttcgagattagggatgatttggaaatttcggggttttttttttcgtatattatttttttcgcgttagtttttttgtttgattgtatgtaagttttggggagatgggggttagatttaagagattcgcgagtgtttagagagaaaagtttgtaaaagtttttttgtttgatgttttttgcggttagggcgaggtaatcgatattacgtggaatcgtagtaggcgattttttaaggggatattgggggaggtacggaacgcgttcgaaaatgttgggacgtcggttattggatttttagttttgcggcgatttttttttcgttgaggggtggaggttgtatcgcggggcgttagggacgggaggatatttttataggagttatacgggagtgtcgtaagtagggcgaggcggggtacgtgtgatacggcgttcggtttcgggtcgtttggtcgttgggggatagaggtttttttttcgttacgttcgttttttttggttttggcggggcgtttttggggtcgggaggagtttcgttttcggcggagcgtttgtcggtatttagtttttttttttcgttttggcggtgggaatttgatttttttttttggtcgcgtttcgggggttggagtttgtttttttacgtcgtttaatgagcg

SEQ ID NO: 6484 - DNA, 3044 bp, synthetic construct
  misc_feature 1..3044: note = Description of Artificial Sequence: Synthetic polynucleotide
  source 1..3044: mol_type = other DNA
gcgcgcgtgtggaaggttgggtggggtgcgtatatacgtttatttgtgtacgtatatatatatatatatatatatatatataggtatatatattcgagtttagttatttatattgtttgtttagggcgtttggaagagttggcgagttcgtttagttttgtttattcggtttcgtttcgtttttttcgggagggtttttcgggcggcgtttagtttcgagtagagtaaaggacggcggcggttattttcgtttttcggtcgttggtttttcgttttttttcgtttttttattgaatttattttcgtgtttcgaaaatttgattttaattcgattttttcgcgttttcgttttttttttttagagtgagcgttaaaaagggtttgatagatagaagtttttggttttagtatcggtttagttcgtttttagacgatttttgttttttttatttttatagtttttagtggtcgttttattttcgtattttttcggttaattttaatttttttcgttttttttcgcgttgtttcgcgttttttttttaggattttttcgtatatttttagcgtttagcgcggttttttataatttttttacgtttcgtttttttcgttttgttttcgttttcgatattatttgcgttttttattcgttttaatttttttttttcgttatttttatttgtgggtttttagttttttgttttttttttggtttttatttttgatattttagggattttttttttttttttacgttttttttttttttaggatttcgtttcgatatttcggggttttttcgttacgcgtattttttttttttaggttttgatatttgggcgttttttttttgttatttatttttagttttagttttgattttcgggcgttttgttatttttacgtttttcgtttcgtttcggtttttcgggcgtttttattcgtcgtttttatttttttatttgttatatttggtatttttgtttttatttttgtttatatttttttttcgttttcgatatttcgggcgtttttttatacgtttttattttttatattttcgttttcgaaaattcgggcgttttttttttttacgtttagtttttttttttttttcgttcggtttcggatttagtttggagatcgcgttcgggaggggcggttgtcgttcgcggggcgttcgcggtgttcgggtttgggtagcgaggaggtgacgtcgttttcgcgggatgagttcgggaggcggaggggcggaggaggtgttggcggcggtattgagcggcggcggcgtagggcgcgcgggtttttcgcgtcgattttatcgatttaaggggcggcggcggtggcggcggttgagcgattttgggtcgggcgcgtgatgaggaggggtcggcgttagatttcgttgtacgtcggagttcgtttggattcgggcgttggtagtcgaagggttttggtttcgggatttttcgtcgttagttttcgttatatttttttcgttttcgtttttttattttagtcgggggtggggtgggtggggttggggttttcgcgggggttttcggtttcgcggttcgttttcgggtgtgtttggaggagttttttttttgtggcgcgcgggagttttgtgatgcgttagtcggcgggacggatgagttgttttttcgggaaatcgttttcgtttttttacgattttttcggttttcgtttgggtgtttttcgggtcggtagtatttcgttttcgggcgttcgaagcgagtttttcgggggtttgttcgtaggtattttttttttttcgaggcggcgcgcgcgttttcggttttgatcgcggtcggatatattcgcgtttcggttcgtttgtcgttttttcgtttgttttttttagttattttatttttagttgttttcgttattttattttattattttttttcgttttttcgcgtatttcgcgtttcggtttttagttttttttttttttgaatcgtttattttatagtttttcgttttcgggaagaagaaatatttttcgaagcgtattttttagttttttttttttacgcgttcgtttttttttttttttgttttttttgggggaggggggttgtcgttttggattgaaggttattgatttgtatgtatttgttttagcgttggaggttgttttagtcgtcgcgtcggtgtcgtcgttgttagtggagttgttttttcgtttttttagggtggttcggttttattaaatatgtcggtttttgtcgggtttcggggtcgtttggtttttatttcggcggttttttagtcgtttttgtagttcgagatgtttgattttagttattttacggaggaggagaggaaaattattttggtcgttatggataggtagaagaaagaagaggagaaggagtagttcgtgtttaagtaaggatttggttttatattttcgtttttttttttgtttttcgttttttcgtttattgttttgcggtcgtttgcgcgttttagttcgtcgttttttttttcgttggcggcgtttaggttacgagggttgcggttagcgtcggtcgttcgggttgttttaggggtgtttgagagtaggggtgtgtgtcggggagggagggcgttaaggtcggttgaggtgagggtggcgagttttaggcggtgtgattttttttggcgttttttcggattttttcgttggttattttggtttcggggttttagcgggattggggttgaatttaggttttgtgcgtatttttttttttttcgtcgcgttgaggtagtgattggggtatagaatttaatatggtcgtgtataggtgttttttggacggattcgggcgaaggcgcgttggtaggggatgcggacgttattttggttttacgttttcgcggggcggttttattagtaacgcgggatagagtagggttgtttatagtggttgcgagtagcgggcggcggcgcgggttaggggtttaagttttgtcgcggtcgggtgggtgtgcgttcgtcgttattttttagtttttttttttcggcg

SEQ ID NO: 6485 - DNA, 1603 bp, synthetic construct
  misc_feature 1..1603: note = Description of Artificial Sequence: Synthetic polynucleotide
  source 1..1603: mol_type = other DNA
tcgtatttcgttcgattaaggtcggggtcgtagtttgtattcggattggatttggatgtagttaatttttttttggttgatggaatagttttttttttttatagtttcggcgcgtttttttttcgcgcgtttcgtcgtttttcgtcgtagaataggagttgcgcggttcggagcggcggcggcggcgtcggagtattcgtttcgtacgtcggggcgaggggcgagcgagcgcgttttttttttcgcgttttgcgttttcgcgtttttttttttttcgttgttcgttttttcgtttttttttttttttttttttttttttcgtgttattttttttttttttttttttttttttttttttttgatcgttcgtttgtatatttttatttttttttcgtcgttttttttttttttttttttttttattgttatattttttgtgttttcgtttttttttttttatttgtttgtttattttcgaacgtgaattcgcggttttcggaggagtttagcgttcggagtatttggagttcggtcggcggcgggtcgagtttggttagcggcggcggcggcggcggcggcggcgggagtcgagggagcggtagtcgcgatcgcgggtatcgcgggagttttagcggtagtagtcgtcgtcgagatgtttcggcgaaagtaaagtaaatttcggtagattaaacgtaagtttgcgcgcggggtcgggagttggtgggattattgtttaggagcggggtgcgcgggacgggaaagcggtgggtgggtggcggggttaggggagattcgttttcggttttttagatgttttaaattttgtttgagtagtcgaagggataattagatagttatagatagatagacggttagttcgagtttcgggtaggagagaggttgcgaggagtagtttatgtttgtttcgtttagttttcgcgttttcgggttgtttttttaatttcgattcgcgtacgttgcgagttttcggcgttgtcgtttagtcggaggggtagtttcgtttttttagacgtttattattgttgttgttattgttttgtgcgattgacgtgggattatttttgggaattatttttagtaattagggtagaaattttttagaaaagttgggcggtcgagatttcggggcgagggaggtaatttttttacgcggtggaaaattagagcgttagggtttcgattttgggcggtgttagagttatattaaattcgaagcgaaataaaaagtaggtgtaaaagttcgcgtttttgcggcgggcggtcgtgcgtttttgttttgcgggcgcgggttggtggttggtaggtcgtgttttgggatttcgggcgggttcggtttacgtcgttaggacgtttagtcgagcggggattcgggtggtgtttggttttggtggcgcgcggagttttttttgggaggggtcgttagttattttttagcgcggaagttgtgagtttaaggcggtgggcgcgtaggggagtgtatggttttgagttttcgggtgttcgggggtttcgatggtgtttagaggatacggcgggttaagagatatttttcgaaataggtacgttcgtagagattaagtcg

SEQ ID NO: 6486 - DNA, 1365 bp, synthetic construct
  misc_feature 1..1365: note = Description of Artificial Sequence: Synthetic polynucleotide
  source 1..1365: mol_type = other DNA
gcggcgaatatgagtgcggatcgtacgatttagttttgagcgttcgattggcgttcggttcgtcgagtttttagcgcgtttcgtttcggtttttcgcgtttttagggtatagaaaatagagtgttttgtagagttttagggttttaaaggtggggattggggattcgtaaaagttggggtggagagtatagttttgattatttgagttttcggagttagggcgtgagtgagcgtttttatacgttatttttgaagtttattacgtatttttggtagagagggatttatttcgtttattgcgtttttatcggttgttttggtagtggttgtaatttatgtagtttagaatgatgagggtaaaggagaaaaggcgaaattgtatttgggcggtcgggcgggggagagacgttttttaaagtttaggaattggagggttcgtttaaagagtcggcgtcggtcgcgttgttggggaggatttagagggagattcgttatttattttcgggtcgtatcggttagtttagcgcgattagtattttttcgttacgaatttgagagataagaagcgaaaatagggtgtgtgggggatggagagagtttcggggaggtagttgcgttttcgtacgttttaatttaaagaagagagggaaggaggaagcgaatttattgtttagtacgagtcgcggagcggtttaatttagagcgggtagttgcggacgagttggagaggaaggtgattataattagtgaattagtaatttttgtcgagttttaagtttcgatttagcggtataatgcgttgtgtcggcgtttcggggaaaggaaagaattttaaaggtattgagagcgtagggttaaaagaacgtttttaggttatttggagtttacggcggtgtatttaagcgtcgtagttgcggttgttttggtgtgggttgtttatcgtgcgtacgtttcgggcggcgcggtttttttaggcgcggtgttttatttcgggttcgggaagcgagtcgtttggttagtacgtgggttggggaaaagtttgtcgagatcggttgggagcgtttggtagttttggaattttagcggtcgtcgcggggttggcgacgttaggtaggagcgcggagcggcgggtgtagttattgggatgtttcgttttcgttcgcgagcgcggtttttaggtaaggggtgcgttcgtttatattttttgtttttttaattaattgtgtcgttttttgcgttttttttacggttattttatagttaagattttttttttttcgagttgtagaaggtagaacgttttcgggaggacgaagtgattcgaagggatgtggtaagcgtatttttcgatggagatgtagatcg

SEQ ID NO: 6487 - DNA, 419 bp, synthetic construct
  misc_feature 1..419: note = Description of Artificial Sequence: Synthetic polynucleotide
  source 1..419: mol_type = other DNA
tcggggaggcgatttttggatgcgttttgtgcgagtaaagtcgggagagcgagttttaagtatttggtagcggtgtttttagtaggcgtcgaggaattcggttatttatttttggtgaattttgcgtttattgaggtattcgaggtacggatgtgttcgtttagtattcggagacgaaggagagagagcggggatatgcgttttagttttgttaggttttagggtttttatttttgtatttaaagtttttattttattttatttttcgttatttattttttgtttcggttattcggtgcggttttagtatcgcgcgttttttcggtacggttttcggagaaagttttttaattattagttacggtatttgtagtttttgtacgtcgttcggtttcgtcgggtgggtagcgttcgttacg

SEQ ID NO: 6488 - DNA, 3675 bp, synthetic construct
  misc_feature 1..3675: note = Description of Artificial Sequence: Synthetic polynucleotide
  source 1..3675: mol_type = other DNA
tcgcgtagtttagttcgcgtcggggcggtgggtgggtgggtgtttgttatgggattatttttagcgttttatttttttcgtaaaagtggcgttttcgttttttcggtttaggtatattcgttcggggttcgtacgttcggtttagatattagcgcggtggagagtatcgggtggggttttcgaagggtgaggttcggaggcgtcgcggagggggggttttttagagaggagggggcgttgcgggaaggtttttaagggaggttgcgtttaattttcgacgttttgtatttagttcggcgcggcgcgtttagtcgttttttcggatttttttcggggcgcgggagtttagcggcgcgtttagtttttatttatggtggtgatgatcgtgatcgtaaagtagaaggagtcggcgaatttttattggacgtcggcgcggtgcggtttcgattgtaggattattagttttagttgtcggtagttttcgttgttgatgttgtatttttttttgattcggattttttcggttttgagtttttttttttcgcgtatttcgtggttcgattcgagggcgtcgaatacggcggcgtttattagtaggtaggtgaaggtgtagacgatgagggatagagttcgtacgttttgtttttttatggtcgttagtaaggagtcggcgcggggggtatgtttcgtaggtttatagtcgcgcgcgttttattgtagcgttcggcggtcgtcgtcgttttttttttcgtcgtcgtcgtcgtcgtttttaagttgtaagcggcggcggtagtagtagtagtagtagtggggaggcggggggcggggaggttggggggggtttttttcgttggggtcgttatagttatcgttatcgcgaggcggttggcggggtaggggcggcgcgggttcgggtttagtcgagaaggcggataggtataggaggttgttcgagcgtcggggttaggcgttcgggaatttcgatattttgcgttagattcggtcgaagtagttcgttttattgcgtagggttatgtagggcggtttcgttgggtatcgcgcgggttttgttgtttttcgtatttcgtttttcgttttcgcgggaaacgtagggacgggaatcggagttagaaagcggtcggagggcggtcgcggggttcggtatttttgtgggtttagttcgcgggtggcggtgtttagtaaggagtttgtaggttcgcgcgtttagcggaatttgtttttttttttattttttttcgttttttttcggtggtggggaggaaaagtttgcgaagtggcggtgtttttggagttttttgtaagcggggagggggtcgagtaggtgtagcgggaggggtagttcgttttttaaaggttcgcgcgtttagcgtttattcgggcgcgcgggtgcgtagcggggttttcgtcgggcgtcggtcggtgcgcgaagtttgttcggtttaatttttaaggcgcgggagcggggcgcggttttaggacggtagggatcgcgatggagcggtttcgggggcggtcgggggacggcgcggtggcggtcggttagttcgttttttcgggggcggcgggcgcggcggcggcggcgggaggggtttcgcgggtttcgcggagtagcggggcggacgcgggcgtatgagtcgcgcgggggtcggggtttttcggcgttcgggcgtttcgggaggcggtcgtcgcgttggtttgtttcgggcgttacgtgcgtgcgcgtcgttgggagttcgaatgtgtgtgtgcgcgtgtgtatgtgcgtgtgtgtgtgtgtgtgtgtgtgcgtttggtagtttcgtttcggcgggagggtttcggggagcgggggtcgggttacgtcgaggtcgggttttttttttttttttttttttgtagtttttagggcgcgttatttttcgtttggtttttagttagttggcgaggttgttgtggtagttttcgttgtagatttagcgcggcgtagggcgtacgcggagggagttcgggaggggcggtttgagtcgttagggagggggcgggggcggagtcgtcggcgggttttggcgggggatgggaggataaacgcggttttttgggtttttttagtttcgttttttaagagcgtaagtagttttggcgggtggagagtttgagggattcggggttggaggaggaaaacgggatttagttagagatggtaggttgatagttttaggtagattgggtagagagtggggagtagaaggggagggggttatgggtatataggagagcggtagtagcggtttacgaagttttttttattttttattttttatttagttattcggcgcgggagcgtgttattggttagggatatggtttcgtggagtggtggggtttcgagggttgtttcggttttttcgttttttagcggtatagttcgtttgggttagtatttgtagattcgagtcgtttttttggagagcgttaaggatagtatgggtcgttatttttggagttaggatagcggggaaagatatcgtaatttttcgatttagtaatttttttgttgttttattgaaggaaaaaaaaaaaatatatatatatatatatatatatatatatatatatatatatatatatatatatatatatatatatatatataattattttttgatatatataattattttttggttttttatagttgggcgtaaggtgcgtcgtggatgtagttttgagttacgcgatagttttttcgagattatttggggtaggaatacgaggttcgggttggggcgtatttattttttgtttttagatgagttttttttaggttttattttttttttattttggttttttttatttttttttttttttcgttttttttttttaggttatcgaggggtttttttttgattttcggttttttgaatttcgtttggagttttggagttttaaaaggatagatttaagttttagagatttttgggttttttttttttttttgattttagttaaggaagggatggagatgggaaagagttgtttggcggtaggttagtagttggttaaggggtggttggggaattagatttaattttcgggtagttcgcgggttttaggagattagttttttttgtgggtcgttttttggagcggtgttcgggttttttggttttagggatttcgggtttagagggtttgggattttagtgatttatcgaggttttttagttgggacgttttgtattttatttttagggattacgggtgtttattagggaaggggagttcgcgttgtgggttacgtttgagtcgttaggttttcgttgggtttgcgggcgttttggggcgagggagcggggagttttatttcgagtaggtattttttttagatttattttggaaattaaggttttcgcgttcggtaagtgagtttggttgtcgggtgagttatcgcgagcgggcgataaggatttttagtagttggtaattaattgcgtcgtggtttagtttacgacggaattttagttaggtttttcgtcgttttggtagcggcgttatttttgagttatagtcgtcgggttttcgcgcggttcggaagtcgtttgttcgtttcggcgttattagggggtattggatttcgatttacgcggcggtcgcgtagtcggtttcgttgcg

SEQ ID NO: 6489 - DNA, 3675 bp, synthetic construct; identical to SEQ ID NO: 6488
  misc_feature 1..3675: note = Description of Artificial Sequence: Synthetic polynucleotide
  source 1..3675: mol_type = other DNA

SEQ ID NO: 6490 - DNA, 3378 bp, synthetic construct
  misc_feature 1..3378: note = Description of Artificial Sequence: Synthetic polynucleotide
  source 1..3378: mol_type = other DNA
gcgagcgcggagtcggagagtcgggagtataggcggtcgcgtcgcgttttggttcggttcgggttcgcgcgttagtatcgttcgtagcgcgggtattcggatttttcgggcgttcggggggttttagtaggcgcgggggaacgggagggggtttgcgtgcgtcggcgggtgttttttagggggcgtttcggcgaggtttagagcgggtcgggggcggcggcggttggaggagttttttttattttcggtcgggcgttcggtttagtcgtcggcgacgcgaggcgttcgcggggatttgtaattcgtcggatcgagttttcgtcggcggggtcgttgttgttggggaaggtaaggaaggttttggcggggggttgggggcgcggcgggtgggggcgtagcgagggtgggagggggtcgggggaggggcgggcgtttagattttttaatttcgtcgtttggggtttcgtagtttcgaggttttgcgtttagagtttaggagtttggatttttattttttatttttttagttttttgttttttttagcggtggcgatggaatgtggtaggttttcgcgagttcgtattgggtaggttgaggagggggcgattttggacgtaggagaggtttttcggcgtcgtcgttttttttttatttatatattatagtttggtatttttttttattatatgtatagggtaggttggggagggcgttttcgttgtatttttagtatatatagacgttggcgggggtttaagggagttttttatggtttttaatagttatatatagacgtagtaggtttcggagagttttcgagcgtgttttttttttgttaattacgtttagggttttttatagatattgtaagggttcgagacgttttttttttacgtatagagttcggggtaggtaggagaaaattttagattttttttcgaagttttcgttcgtagaagttttcgtttgtagatttggtattggtagtggagattttttggaggtatttttttttatttcgggcggagggttatttttgcgttttttatttttacgcgaacgtttggtttttttttttttgtttatttttttattgggtcggataggtcgcgcggataagtcgtttttaattttgggtcggttttatgtcgttttcgttttaagcgtcgagtattttcgggcgtcgagtattttcgggttcgcgtcgtcggtgagtagaggtcgtcggttttttatcgtcgtcgcgttagtttggagtcgcgcggagttgtttcgaggaacgagtacggttttcgtttttttttggggaggttgggagttttggattcggttaggagttttttttttaggttttcgcggttttttgggcgaggtagagagttttttcggtttcgggagggggcggcggagttgagaattatcgcgaagcgatgcgatcgggagggtttgacggaggttgcggtttcgagttcgcgtttttttttttggtcgcggcggtttttgtttggttatttttcggtagtttgaagagaacgtttaatttggtattttagttttaggtcgttgggtattttatttttttttatttttattttgggtttttaagttttttggagcgtaggcgtttaggttgggattcgaagagttttaagttagtttttttttagtattcgttttcgtcgcgattttttcgtttttttttcgggtttggggcgtagatttttgggttgtaatttcggagtagttgaaaggtaggaaggcgtgtgggcgggtagggggtttgtattttcgttttagaggagtcgtttgtcgtttgtgttggggagggagttgggaggtttgttttttcgttttattttgggaatttacggagattttcggtattttttttatagatataaatatacgttttttcggagcgagagtcgtcgcgggggaatagtagaggtcgcgcgggcggaggcgggggaaaggggagttgggttttttttttatttgggagggaggtggtatacggtgtgtggggtttggggaggcgattgttacgttttttagaatttttatgttttttattcgtttgcgatttcggttgtcgaggaggtaacgagggaggtcgagtcgttttttttcgtgggcggtagcgaaattttgcgttcgtacgtcggggtgtcgtcgagttcggttttgagtatttagtaaggttaagtaggcgaaggagggggcgggggtttttgggcgcgttttcgttcgcgtatagtcggggttttggaagggggtgtgcgtagttcgtcgagttagtttcgttcgtttgtcgttcgcgttcggttttcggaggcggacgttgcgcgcgttcggggatttcggagcgttcggcgttttacgtttttttttcggttcgttagttgttttttggcgttgtttttagatttgttgcgtttcgatttggggggtagaaggttggttcgggagattcggcggttgagggtcgagtcgcgaagtttagggatgcgttagagaggcgcgcggtttcgcgggtgggcgttgcgttggggggttcgagtttggggtttgtcgttttcgattttagggacgggcgtttgtttttgtcggggtttcgcgtaggggcggatagagggcgattcgtcgtttcggttttaggtagtatttattcggatttcgggttagggagggggcgtagttaagttgtggagttttcggaggtttttttttttttcgtaggtttcggtttttttcggatttcggtggtcgcgttcgtgaaatggggacgcgggttttgttttcggattttttttagttttcgatttttcgtatttgtttcgagatttaacgtgttcggttcgtagcgtgttgggtttgcggcgttagggtggttcgagtttcgagattatttgcgtttgcggatatagtcgcggggtttggtatgaagggttttagggagggtttagtaagcgttcggggttcgagtagttttttgcggcgtttttcgttttcggtcggttcgatttcgttttcgggagtgggtcgtggggcgcggagttcgtttttcggggacgtcgcggggttttaggtttaggcggtcggcgcggggtcgtagtggcggaaggcggagggtcggcgcgttgtcgttgattgtcgggagagggcgttcgtatcgcgttcgcgcggttttgttcgtttttttcgtttttttcgcgtttggttcgcggtttcggttttattttgggtagtttcggtcgttatttttttttcgttcgttcgttcgttcgttcgttcgttcgttcgttgttcgttttcgtcgtcgggtttcgtgacgcgtttcgcgtttcggtcggagtttttttcgtcggttcggttcg

SEQ ID NO: 6491 - DNA, 1108 bp, synthetic construct
  misc_feature 1..1108: note = Description of Artificial Sequence: Synthetic polynucleotide
  source 1..1108: mol_type = other DNA
gcgtgtttagatgaaaagcggggtagtcgcggttcgtagatagcgggcggttgggttagatcgtagagggaagtttttagcggtaagttttttcgcggggaaggttgtgtttgttttaggagatgagtcgtaggtattaggggtgatgaggttcgggggaggtggatgtgggggatggagcggttttaaggtcgttagttttagtcggcgttttgggtcgcggggtcggagagtttcggagcggattttcgtcgcgtttcgaattcgtttcgcgtttttaggttatattcggttcgtatttttttcgttttacgtgcgtttacgcgttttttcgggtttttttttttttttcgcgcgggtcgggggcgcgggtttcggaggagttgggggcggcgggggcgcggggcgggcgattgtcgggtttcgggttagttttcgtttttcgtttcgttttcgatcgttcggttttttcgttcggcgttttttcgggttgcgtttcgcggtttttggcggcggcggcggcgggcgtagagcgcggtatgggcgttcgggtcgcggggtttggcggcggcgggcggacgggcgcgcggttgcgggcgtaggtgcggggcggcgggtcggggtcggggtcggggcgcggagtcgtcgttcgggggtcggggcgttcgcgttttcgtcgtcgttgacgtttcgtttgtttttttttcgtgtttcgttcgtttttagatttttttttttcgttttttcgtagttcgggttttggtcgtggcgcggttgtcgtacggtgtttttcgacgtttttcggacgcgttgtttttgtgatcggttttttattttcgttattttagtttagtttagcgtcgacgcggtgagatttcggtcgggtcggcgggaggggcgtcgggtaggggcgcgggcgggggttgtcggcgggtttgcgggtggggagggttcgtattcgttttgtttcggaggggtcgttgtggttcgtagtcgtcgtggtttggttcggtcggcggggtttatgcgtttttggagagggtgggtgggcgtcgagcgggtggtagtgtggagttggagacgggtttgggaggagtcgggattttcg

SEQ ID NO: 6492 - DNA, 1700 bp, synthetic construct
  misc_feature 1..1700: note = Description of Artificial Sequence: Synthetic polynucleotide
  source 1..1700: mol_type = other DNA
gcgcggggtgggcgttttcggttttttagtttttaattttttcgcgtattcgggacgggtgaaggcgtttagttgtcgagtatattcgcgacgcgggtttaaatttcgtcggtttttaggtatttttatttcgttatagcgcgggttgttttttttttttttttcggaggaattttttaattttttagtatttatattataataaaggaggttcggtttattaatgcgcgatcgtagtttatagggatttttaacgaatttcggtttagagaatgtatttggtcgtgttacgcgcgattttcgaggggtaggcggacgggtttaggcgcggataaaggggtttttcggggcgtttaagttcggggcgggacgtcgggagcggagttggtcgggaatttattttcgtagcggttcggttgtgtttttcgtggagtagaagggcggcgggtagtagtagtagttagacgttgagtcggggttttatggtggcgcgttcgaggcggcgagggacggttgttcggcgtgcgggggtcgcggcggatagttagttttcggaaggtcggatttttagcgttacgtatcgtttcgggtgcggcggttttaagcggagatttgagcgcggcgggtcgagttttttaatttgttggcgttgttttttttttttcggcggtgcgcgggcggcgttttaaaggggaggattttgcggcgcgggtaagaggcggcgggagcgcgcggttcgggagtgtggttgtagtgcgtcgggatattagggtttcgcgtttcgtatttaagaggttttcgcgttttaatttttcgcgttcgcgcgttcgcggatttaggtcgaggatcgaaaggggtcgttcgagttttcggggtcggcgtttagagagtttagtaaggtcggtcgttttgtcggtgtgtcgtcggcgggtgtttttggaagggttaatgcgttcgggtagtagtttttgaagtcgagttcgaggtgagagcgattttcgagcggcgtttagattttggttcgagagtatcgatttggagcgttttgtgtaggttagggttgtacgtttttttgtttgggagtagaaagggggagggtgggagagcgaagatcgagtttttcggttaaggagtatttataggggtttaacgggaggtttttttttttttcgggtcgtgggggggacggtttttcggttatttttgtatgcgggtcgcgtatcgcgttgttttcgcgtttcgcggatcgagatcggcggtgaggatgggttgttttttttattttgcgttaaattcgttttgtttgtcgtttttaggttaagtgggattgatcggggtttagagtggacgaatcgttagtatggggagagattagcgcgcggtggtcggttttgttttacggcggtaagcgattttttgtttggttttcgtgggttacgcgcgtatggatttttcggtgtaattttcggggattgataagtcgggttcgtacgtttacgttttttttttttttttttttatgtaggtggttgttgttggggatagtgatcgtggggtttttcgtttagagcgttttggcggtaagttttggttttcgcgtttggatttgcgcgttcgagagtggttgggacgtttgagtggttttggagaaggtagttcgttcgtgcgttttcgagtgtgtgtgtgcgtgtggatgttcg

SEQ ID NO: 6493 - DNA, 692 bp, synthetic construct
  misc_feature 1..692: note = Description of Artificial Sequence: Synthetic polynucleotide
  source 1..692: mol_type = other DNA
tcggcgattcggttatttttcgagggttttaggcgttttatttaacggtcgtttttcgttttttgttcgttattttttcgtttttttacgaaggcgcgaacgttttagattttcgtcggttttcgatagtatttatttagttttttttttggagattttaggttgtattttgggatagaaaagaaggcgggtacgatcgcggtgtcgggttttattttagtcgtttttttttttgagggagttaggcgggagagaggggaattatcgaggtttcggttttttcgcgttttagagcggtcgggcgagttttattttcggtttgtgattcgttgatttgtttttgttttattagtcgggcggtgaattggattgattggtgatttttggtattaggtttttttatgggtatcggagtaggcggataggggtggggtttcgcgagcgatacggaagggttagtgtggcggagcggattttgtggaggcggggttattgtgtttttgagaagggttttcgggggtggagtttattaaggttgcgggggcgtggttacggagcggagttaataaaagcggggcgtgtacggtcgcgggttagtgtttatgaagggcgaggggtgtggttatagggcgggatttacgaaggatgtaggggcgaggtcgggtttttgtaggatgtgcggtcgcgggtcg

SEQ ID NO: 6494 - DNA, 1924 bp, synthetic construct
  misc_feature 1..1924: note = Description of Artificial Sequence: Synthetic polynucleotide
  source 1..1924: mol_type = other DNA
tcgtcgtttgtttaatgttttcgttagttttgtcggtttttatcgtcgtttgattttattgtttttttcgtggtttttgttgtttttttaaattgtttaacgatcgttatttagtaaaaatgaatgaaacggggtcgtgtgatttaggtagtttggagatgagattttggaattataagttatattttaacgtataaatcgattttattcgttttggatattcgatgtacgcggaatgggcgttgtaaaatgcggttgtttcgtcggaggtatttgtttgggatttgttggtagtcgtcggttttttttgtttgcgattttcggtttagtcgtcgggattttggtgtatttgtttttgggcgttttttttattttttagtggtcgttagttttatttttagtttgtggtttcggattcgtcggtttgagcgttcgtagagggtcggtcgtcgttatagtttcgcgtttcggttttcgcgttttttggattttcgttttaggtcggcgtagtttagtttttcgggtaggttttacgttatcggggtttagtgcgcggcgacgaagcggagagttgtgtttagatttcggagagaaatttcggtttcgcggggcggcgcggggcggcgcggggttcggagttgtttaatttcgtcgtttcgggaaggcggtttcgggttcgtagggagtttcggggagggttttcggtttcgtcggtagcggcgtcgaggggtgtttgggtttttggggatcgcgagaggaaaaagaacggaaatcgtatcggggaggaaggacgcgtagaacgttttcgtgaagcggggtgtttcggttaggcgtgcgcgggagcgcggttcgggggagttcggcggcgtcgtcgcgcgtattcggtagaggtttcgcgggagaacgcgtagttcggggcgtggggcggggaattgttcgcgcgaggttttcggcgcgtttgggtttcggcgagagtaaagcgcgttttggtatcgggggcggcggcgtagaggtcgggaggaagaaattcgggttttggtttaggtcgggtttttatttttgcgattcgcgagaggtttaggcgggaaaggcggcgagtggcgttagcggtttcgaaagtaaatttggttcggtgttattgttcgagggtcgtcgggcgcgttttttaattttttcgagtttggaaaacggagattttcgtagcgttttttttagtgcgtgttgcgagtgttgaaggaggattcggtgtttggacgattcggagtaggggaagtattcggtcgacgttgtcgttgttatcggcgttattggcgggtaggatagtggggcgggtaaggggttttttcgcgtttttcggtttttcgcgttcggcgttagttttttggtttttttttttgcgtagttttaggtttagtttttagttattttttaagaagacgatttcgagggtcgaaggtcgtttttgatttttgattacggatttttcgtgtaattcggaagagtcgtgattttaaaattcggtttcggggttatagaagttcgagatttgggaggcgttcgggattttttttttagaatcgtagggattcggtttgggatttagggtgtggtttttcgttttgcgcggtcgggaaggcggtcgggttcggttatcgcgttaagtattgcgtatttttgggacgcgtcgttgcggggggttggggggttggggcgtttttacgacgtttggtttgttcggttagtgtttggtgtcgttggtgggttcgtggttgcgacgggtaaacgttcgtttcgcgagtcgggtaaggtaatttttgcgggtcgcgttcgaaggtcggatttttttaagtcgtttgggagtttttaaataggtggattcgaagtttttgtttgatcggagaataacgtttaatttatttcgtcg

SEQ ID NO: 6495 - DNA, 1991 bp, synthetic construct
  misc_feature 1..1991: note = Description of Artificial Sequence: Synthetic polynucleotide
  source 1..1991: mol_type = other DNA
tcggtgtatcgtgttttggtaatcgggttttggcgttttcgagagcggggcgaggggtgttacgcgatttttaggtcgttttgtatttttcggtgcgtttgtagggattttgtagtaaagttttggatgtttgtagtcggtgtaagtttgtaagtagttggagagcggtggttggagtcggggggcggtgggcgtggttacgtttttttttaggtagtttcgggaatgttttgaaaagtattcgaaagttttgagtcgcgcgcgcgttaaaagaaaaggtataattttttattatttcgggcgtggcgtgtttagatttcgttattttagttgcgttttcggttgtagcgtatacgttttttgcgttttttttttcggagcgtcgttgttcgtcgggtttatttttcgtagtagtttttaggcgagagagggggttagagtgttcgtattttttttaggggtattatgtttaacgacgaggtatttagtaagttttttatatcgtcggaagttttttacgttttcggggtatcgtcgtagggtagagtcgggggttttggtaaagcgtttggggcgttagtgggggcggttagcggttcgagcgtcgggggtagtagtagaggaggcggtttcggtttcggggcgtcggatttgggtgtcgggagtaagaagttttcgcggttgtttaagtgcgtacgttgtaggaattacggttacgtttcgtcgtttaagggttataagcgtttttgtatgtggcgcgattgttagtgtaagaagtgtaatttgatcgtcgagaggtagcgcgtgatggtcgcgtaggtgggtgcgggcgtgcgggagttcgggtttagttttagtttttttttttttttttttttttagatggagtttcgttcggttgtttaggttgtagtgtagtggcgcgattttggtttattgtaattttcgtttttcgggtttaagtaatttttttgttttagttttttaagtagttgggattataggcgtatattattatgttcggttaatttttgtatttttagtagagacgggggttttattatattggttaggtcggtttcgagtttttgattttaggtgatttattcgtttcggttttttaaagtgttgggattataggcgtgggttatcgttttcggtggggttcgagttttttgaatgaagtttttttagtatggtcgttgttatgcgggttttgggttgtggagagatgcggcggtatttgtcgatagcggcggcgtttggggttttgggttttcggttacgttatatcgtcggtttgggagcgtcggagacgcgtttgatttcgttcgtcgggtagagttgcgggtttcgttcggttcggggttttttacgattttttattttgtgtttcggcggagttgcgggggttttttttgttttcgggtttttgagatttttgatttcgtttttagggtagggaatttcggggttcgtttttttgggttttttcgcgattttagagttcgcgttttaatagaattgggagggtttattgcgttagaggagtttttaggattttcgttttcgtttttcgaggtgaggttagaggggagggttcgattttaagggaattttagggatttttagtttcgtttttttagtagagaattaaggaatttttttcgttttggggttttaaaaattttcgatcgcgttttgggagtagagggtttcggggttcgattttttcgagcgtttttagaatttttgattttttttttttgttgagttgtatttaaattagaaaggattttggagggcggtagcgttggttgttaggttagcgggaaagggaggttcggtcggttgttgtttacgcgggtaatttgtcggaaagttttgtttgtttttttggaaaagtcgttgtaatggatatagcgttgcgcggtttttttgcgcgtttggggcgttttttgttttcgtttttcgtggatggaggttgagcg

SEQ ID NO: 6496 - DNA, 1667 bp, synthetic construct
  misc_feature 1..1667: note = Description of Artificial Sequence: Synthetic polynucleotide
  source 1..1667: mol_type = other DNA
tcggggtgtaatcgtaatattttcgtaggttcgagttttttcggagttgagtttttgcggttaaatgtcgggataaaagcggttttgggttcggaaaaacgcggttagatttggattggagggaggagaagagagagaagcggagcggttattttattcgtttataggtatttttatttttattttcgttggtttttttttttttcgtttcgcgagtatcgtcgcgttttggagcgtcgtagtttttagtcgcgggttggggtagcggagagggtttggaggagggggtcgcgagcgttttcgcgagagtggtttggttgtaggtggtaaggaaggtgaagtgtaggtattcgaggggcgtaaaggaggaggaaggcgtggggcggggagtgtaaggagatagggattttaggggcgggggtggcggtgggaaggaggaggggttgggggagggcggcggaggtgttgggttcggtcggtttacgagggagttgtagaagagttggtttagattttaattagagttgtcgtcggttttttgtagtcgtcgtagcgttttcgcgaaggaggacgtgtcgattcggttgcgcgtttaaggtagaggttcgcgtcggcgttggttgggcgtgagttgggaggtcgagttgtgagcgcgaagggagttggagagacgattgcggtattttcggtcgtttcggagtatatacgattatcggggttgcgggattaagggtcgcgtcgttcggaggtcgtttttgagcgggtttcgtagtttcgtcgtttagcgttttttggttttttttcgtagttaggttgttaatttattcgggagttcggggtatgaacggttacggttttttttatttgtatatgggcggttcggtgtcgtagtcgttacgggcgtttttgtagcgtacgtttaagtgcgcgcgttgtcgtaattatggcgttttgttttggtttaagggttataagcgttattgtcgttttaaggattgtatttgcgagaagtgtatttttattatcgagcggtagcgggttatggttgcgtaggtggcgttgcgtcggtagtaggttaacgagagtttggagagttttattttcgattcgttgcgcgttttgttagggttttcgtcgtcgggggacgtcgtcgtcgtttcgtagtcgtcgttagttttttagtcgtcgtagtcgtagtcgtcgcgttttgttgtcgagttggtcgcggtcgtcgtgttgcgttggattgtcgagtcgtagttcggggttttgtaggcgtagttcgttaagttaggtaagagcgtttgaggtgcgggagtttggtcgggcgcgggggtaatttcggagtgttagttgtagttttatttgggaggattggaggtaaagttttgggacgtgggtttgtcggggtttttttttttatttttcgttaggtcggggttttttttttcgggagaagtcggttgagtttggatttagcgcgagtggtattcgcgttcgtagggaaggcgttttcgggtagttaaacgacgggattgtgcgttagtatcgttaggtgtttttttaggttgaagggttcggaacgtgttagattgagtagggagataacggagttgagataggataaaattaaaatttacgtgcgtatatttattacggtggggtcg

SEQ ID NO: 6497 - DNA, 433 bp, synthetic construct
  misc_feature 1..433: note = Description of Artificial Sequence: Synthetic polynucleotide
  source 1..433: mol_type = other DNA
tcgcgagataaatggtgattttttttttgtaggtatcgttatatttcgggtttagattttggataggcgagtcggttgtatcgaaggttcggtaggcggattttggcggagcgttttagagagaagagtgtagatcgcgggaggcggagggttttttgttagcgtgtttcggttaattagtatttatatcgtttgataatcggttaattagaggacgtaaagtttcggggtttgagcggatagtattaggaaggggagcgtagtttgtagattgaagttagtggcgttgcgttgaatgtaattgcgcgcgttcgtcgggtgagttagcgatttgagttaggcgggggcggttcgatttttttcgtttagtttgggttagaggaagtcgaaagcggttttagtaaggtgaggcgttcgaggttgtagaagatcg

SEQ ID NO: 6498 - DNA, 896 bp, synthetic construct
  misc_feature 1..896: note = Description of Artificial Sequence: Synthetic polynucleotide
  source 1..896: mol_type = other DNA
acgaggattaaaggtacgaatttgtttttacgttacggttcgggatttagggtgcggggattacgcggagcgtagtagagtttagggtaggagtcgggaggtcgcgtaggtagagttcgggtagggcggaggggaggtcgcggagggtcgggtggaggtttttatcgttagttttaaggtttgtagtatttttttttggtttttgtttttagggtcgatgtgttttcgagcgaagtcgtcgtgtttgggtagaaggcgttttaggaggcgcgaggttttagtcgcggcgttgttttcgtcgttattgttgttgtttcggtttcgcggcgtttagtacggtttcgattttttagttaggcggcggtcgttttcgatttcgcggtttaggcgtagtttttacgttttggtataggattgtatggtcgcggttatcgttttttgtttcggttcgtaagggttagtcgcgtttttggttttttttttggtttcggtttttcgggtggcggttgcgttcggtttggagtttttttcgttggatagtcggtcggatagatggatggacgttcgcgggtaatgaatgggcgttgcgtttaattaagatattcgcgtaaagttgtggttttatttaaggtatttgtttcgtatattttaagcggcgttttggaggcgggaggtgggttggggttaggaagtttttggttaatgaaagtagatagagggggagggggcggaatagttttcgttttcgttttttttttttattttttttttagttttttcgtggagtttcgttttttttggatcggaggttgttatttttagttttatttatttcgacgttggttggtgtcgggggtcgggacgtttcgtacgtcgttcgttagggtgtggagtcg

SEQ ID NO: 6499 - DNA, 1494 bp, synthetic construct
  misc_feature 1..1494: note = Description of Artificial Sequence: Synthetic polynucleotide
  source 1..1494: mol_type = other DNA
tcggggtttttttaagcggagtattttaaaagtcgtatcgcgtagtagaggtttttaggggtttttattcgtttttagtgattacggagcggtttttatttttcgtcggcgtttggttattttttttttttcgtagttttcgtttgatttttatgtgattgtaggtaagaatagtttagtttttgtgtttttgtaaagaacgtaaataaaaatgtatattattattatttaataaacgcgtaatttcgtaagatataaagcgttttttaaatatcgtttttttggtaatattcggtattttggggttgttaaatcgtagataaagacgtttattagcgcggggggtgaggagattaagggagagataagattaacgtgtttttattaacgggagcggcggttaaaagggcgtcggtgttaggggtgagggacggggtatcggtattaattagcggttcgtttcggggttttcgcggttaaggcgagaacgtaggattaggagtattgttgtttattttttatcgtaattcgtatatttcgggattacgtaacggcggatggggcgttcgggagcggtttttgtaggggagagtaataggttttcgcgttttggaggtttggtttgcgtttcgggtttttaggttaatattttatttttagtttttcgatattaagattgtgtttttttgggttaaggaaaaggaaaaatttttaaattttttagttagcgagagtaaaagaaaggggtggcgggggtgttgaaaggtttaggattatttatcgcggggttggggggagtggagatttgcgagtagtaaaggaaatttttagattttatttttttaaaaaagttatagtagcggttttcgcgaagcgtcgggtcgcgcggggtggggtaagcgtatcgttttatcgttttacggttcgtcgttatttttatttttatttttatttttatttttattttcgtttttatttttatttttaagcgtcgagtttagggcgttcgcgtatttttttcgtcggcgcgcgcgtagggcgcgggggcgcgtttcggtttttgggtcggggtttaagcgtcgtttattcggttcgcggcgttcgtttagggtcgcgacgcgagggggcggaggattggggagtaggggtcgtcggggtttttggatgtttcgtttcgtttacgtttattgtttttttttttgaagtaacgattcggcgaggagtttcggattaaaacgtatagatatttacgcgtgattgagaaatttaatttcgcggtggttcgacgttagtttagcgtttcgtcgcgtttttttttttagcgcgcgtcgtatttgcgtcgatcggggttgtcgcggaggcggtggcggggtttaggttgttggggttgtcgtgacgtttgcgatcggcggggcggcgggcgcgttttggttaattaggggacgcggtcgagtaggtttgtgcggggttttaaattcgtttttgggtcgttcg

SEQ ID NO: 6500 - DNA, 828 bp, synthetic construct
  misc_feature 1..828: note = Description of Artificial Sequence: Synthetic polynucleotide
  source 1..828: mol_type = other DNA
tcgcgattttatcggggaaatatcgcggatagtcgggttagtagcgttcggagtttattttaggtttttaaatttgtagtattttttagagcgcgcgcgttcggagcgggatttgtttgttttagtgtacgtcgcggagcgaattatcgggttggcgggggtggaggggtgtaggcgtgggggttgcgggtcgttcgggttttgggttttttttgtcgtcgtcgtcgtttttcgttttcggttaggagtcgcgcgtgacgcggttcgtcgtaggagtttcgaaggcgcggcgtcggcgagttttttttcggtaggcgcgtgggtggtagcggttaatttgatagtttttcgggtcgggcggttagcgcggaggcgttacgttcgggtcgggggcgggttgacgtcgtcgtcgtcgcgggaggagggataaaggggtgggttttcgcgggtcggtatttcggcggttgggttgcgggttagagtattgttcggtggtgtttaggaggagtaggagtaggagtagaagtagaagcggggttcggagttgcgcgtttacgcgggatttgtgttcgaaatgtcggtgcgaggagatcgcgggtttttatttcggcgggagttgttaggttggtttcgcgtaagtgtttttttgtgtcgcgcggttgggaggagggtcgtgagcgtgagcgtgggagcgttgggggttttgttcgcgtgttgttttgaagttgtttttcgatgcgtcgtaggaagttgggatttttttattcggacgtgggacgtaggggaggggtaggttttatcgttcgggttgatgattcgtggttttcg

SEQ ID NO: 6501 - DNA, 2705 bp, synthetic construct
  misc_feature 1..2705: note = Description of Artificial Sequence: Synthetic polynucleotide
  source 1..2705: mol_type = other DNA
tcgtgtttggtggttcgggtggggcgtagttgcgggaaatgtattcggagttgtgttttttttcggcgaatagtttgcgttattcgtcgtatcgggaggtggttgggggttgtcgagcgagtggtgaacgcgatgggtggagagcgttcgaaacgaggtggaaaagggggcgggggcgaggtacggcgtttttttgttttttttttagttatagacgcggcggcggcggttgagttttttagtttcggttatgtgatagtttcgaagcgttagttgcgggggtttcggcgtttcggggattattataaaacgtagttaggagagcgcgtcgttgttattgtcgtcgttttttttttttaagataagttcgggagaaaggcggtagttgcggcgcggacggttgagttttttcggttagtatttatttagtattcgtagacgttttttttagttcgtcgttcgtttttagagttttgcgttttatattttttagtagaatttgcgggcgttgtcgttttagaaattattaaagttttttttttttagcgatagtttagggttgcgcgttttttttaatttcggcgacgttgcgagtttcggagaaaagagaggcgttttagaagttaattttttttttttttattttgattttttattttaggaaaaggagaattttagcgcggtttggttaagtgtttggttaggggtttgcgtttagggtattggaagttttgttgttattggtttttaggatagtaggcgtaaatttagatttaaagggttagagtttttattgtttagattttttttttagttattttggtttgggtttttttcggatttagaaaaagtaaagaggtcgggaggaaatacggttttttgttatttttttttgtagttagttttagtatttagtttttggttattcgggggaagacgtagagaaggcggcggtaaatttggtgtatttcgttcgcgattgtgcgcgttagtcggtaatcgtcggggttagaagttgttagttttcgagagttgagtaggttcgaaaggttaaggtcggagatattaggtaattcggagaaggtaggagagagaagtagagagggtttggagggcgagagggtaaagtggcgggattggaggggtcgagtgggaattagtgggggtagttaggttttaggaacggagtgcggagagattttgtggtttagtgcgggtcggagggcggtggaggagtcgggggcgatgtcgcggtcggggaagagttcgtatagcgattaaaaatcgttttatttttatatttcgttgatcgttatggtaatttagtattcggtcgagaagatgttgtcgttgagcgatatttataagtttattatggagcgttttttttattatcgcgagtatatatagcgttggtagaatagtttgcgttataattttttttttaacgattgttttattaagatttcgcggaggttcgattagtttggtaagggtagtttttgggcgttgtatttcgattgcggggatatgttcgagaacggtagttttttgcggcgtcgtaagcgttttaaggtgttgcgcgtcgattatatttatttgtacgcgggaagtattaagagcgcgtcgggcgtcggttcgggagggtatttttatttttattattattattatttttattattattattattattacgttgtcgtatattattattattattattatttattttagtcgtcgtcgtcgtcgttttcgtcgtcgtcgtatatggtatattatttttattagtaatcgtttattgtttcgtagtcgttttcgtatttttcgttatagttttcgtagtaatcgttttagtagtcgtagttttagtagtcgttttatttcggtaagatgtaggaggcggcggtcgtggcggcggcggcggcggcggtcgcggtagtcgcggtgggtagcgtgggacgtttgttttagtttttattttacgggttgggttcggtcgtcgtcgttgtcgtcgcggtcgtggcgtttacgttaggttttaagtatttttttgttattgagaatattattggtcgggattataagggcgtgttgtaggttggagggttgtttttggcgttcgttatgtattatttgggttatttcgtgttcggttagtttggtaacgtcgttagtttcgtgtggtcgtacgttggcgttatggattcggtggtcgtcgtcgcggtcgtcgtagtcgtagtcggagtttttgtaggttcggagtatggggttttcggggtttcggttaagtttttgtgttattcggtaagttagagtttgtttgttatgtcggtgtttattaagtttacgtttgcgttgtcgttcgtgttcgcgttgtagtcggggtttattgttttcgcggtttcgtagtagttttcggcgttatttatcgtgtgtttcgcggtcgcggtttcgttcgttgtttttttgttggagtttatagtttttatttcggtcgaaagtaagggcggttttttgtattcggtgttagtgtatttttaggggattcggcgggcgtggggagattagcggggtgagagacgtcgggttcggaatcgtttaaattattcgacggggagagggcgttttggttaggtcgggtagagttggcgagttttagtttttgttggaacggaaggtatttaaatagacgaataatttcg

SEQ ID NO: 6502 - DNA, 704 bp, synthetic construct
  misc_feature 1..704: note = Description of Artificial Sequence: Synthetic polynucleotide
  source 1..704: mol_type = other DNA
gcggaatgtgggcggggcgtagttggggagtttgcggggaatgtgggcggggcgtagtggtgggagggcgtaggagtgtgggcggggcgtagttgggggagggtgtagagatttgagggtttgaggttgtttggttggtttcgtttttagaggcgggtgtcgcgttgtcgtttaggtatttggggtttttggtgtttgagtgttttattgtcggcgcgaatataattgttttagttataggcgaggtttggttaaggtgtgggcgtatttggggtaggttttgagaggtttagcgttcggtggtgcggatagaggcggggtatcgcggcgttcgtcgtcgttttttcgtaggtgattatttttttgtaggtgttttcgggttttaggtggttgcgtgtttgcgttatggttgatattttgggcgagcggtatttggtgatttgtaagggcgcgacggtggaggtcgaggcggcgttgtagaataaggtggtggtattgtatttcgcggcggttcggtgcgcgtcgagtcgcgattttacgtcgttgttttgcgatttttatacggcgttggtggtcgaggcgcggcggttcgcgtttttcgaagtggttttcgtgttagtcgacggtagtttttaggagatgttggattttatgcgcgagttgtatggcgtttggttggcgttgtttttttacgatttttatcg

SEQ ID NO: 6503 - DNA, 950 bp, synthetic construct
  misc_feature 1..950: note = Description of Artificial Sequence: Synthetic polynucleotide
  source 1..950: mol_type = other DNA
tcgggacggagcgggttattcgagtggtaaatttttttttaatggatgcgggaaaagcgtatttgtagttttttttttatcgttgttaagcgagttgattgttaaggagtgcgtatttgtttgtttttaacgtgatagtcgcgggagcgtttcgtatttcgggttttagggaatgaaggagtttgtttcgaattggttttagaatttttagtttttagggcggttcgcgttcgtatttattttgattacgtaggtgatttcgggttttagtatttggtcgttggcgtgcggcgtttttcgagggggtttgggtagcggttcgtcgtcgggtcggttttttttggcggcgtttatggtcggggcgcggggcgtcgagggcgtattgtcgttcggggcggttaggttgggcgcgttgtagttgttcgagagtcgcgcgttcgttcgttttcgggcggtcgacgataggtcgcggaggttcgagttggagagttttaggtgggatattttgtggagtaggtggtttaggttgtcgggtttatcgtcgggcgttttgcgtagcgtttcgtcggatattaagtagggagtcgtcgtcggggtcgcgcgcgtcgtcgaaattttgttttcgtcgtcgtttatcgataggttgtggagaaggttatcgatcgatgttatcgagttatttttgaagcggttatatttggtgcgtggaagtatgttttttcgtgggttcgttgtattcgttcgggcgttgttggtgtcggtttcggcgcgggttgtcgcgtatagtaggcgagttattgttttcggagcgggacggagagtgggggtttcgggatagttttttggagaacgagagtagagtaagaggatggtgtttttttatcgttaaaagttagtatagcggcggtcgcgtagtttcggttcgggagatcgttgtttggggttgtacg

SEQ ID NO: 6504 - DNA, 4861 bp, synthetic construct
  misc_feature 1..4861: note = Description of Artificial Sequence: Synthetic polynucleotide
  source 1..4861: mol_type = other DNA
gcgtcgtcgttttgagtattttgcggaaaatgtgagaattttggggagttattgttgttgtaaggattcgcgggcgggttatcgcgttggtgggggggttttgtttaaattttgcgttttcgattttttattcgttttataaagggttggtgaagattattttaaggatcgtacgaattggttttttaagttttaggaaatcgaaataataatcgaggcggttttttgttcgggttattttcggagcgagttttgcggcggatttttggttttcgtttttttgggtattcgcggtgcggttagatcgtttttgttagcgattttttggttggtaagggagaggaggtggagtttagattggttttttacgtttagagtggaagcgatttttaggattttgtagttatcgagtcgttcgtcgtgtttagttcgggtttgatggtgaagagtatagttgttttcgatagagtcggaggaaaggaagtttaagaagtaattgttcgcgtttcgtttattttgtcgagtttatttttatttttatttttattttttgcggatttagaagttgttttatcgagttcgattgtgttataaaatattttattggaaaaaaagttatcgttttcgtaagagggggtaggggttttagcgatatcggggattcggtttttaggtcgagtcgacgggttgtttcggggtaattttaggtcgttgtggtttgagtttaatcgttgggttttcgacgtttagaagcgggtgtgtgtttggaggtttttcggtcgggagggtaggttttagacggggtgggggtgtaggcgaggagcggggcgtgaatacgcgtggagcgttttgcgttacggagtttagggtagagattgtagttttcgtcgggttggatgcgagttttttaggttagagtttagaagcgcgttgggatttgggtttggtttttgggtttgtgttttttttcgtttggttttaattgttcgtatttaagattataataaaaaggtttaggaagtaaattttttggacgcggaagggtcggttcgcgggttttcgtcgagtgagggggttgcgggtggcgcgggtattttaggtttcgtatcgtatatcgtttttagttttcgcggtttttgtcgttgggttcgttcggtattttcgtcggtttttttgtatttttggcgcgtttttgtttagtaagttgttcgttcgttggaattgagttttttttgggtcgttttttgggtttggtgggagattttaggtcgtcgttttgtagtatttgtacgggggatcgttagtatttgggtgagttagtacgtggattggggattttcgaggagatttgaatttaggtaggattaaggagtgtagggtttatatgaggaaatggtggggaaatgtttcgggaaatggcggttatttgtttaaatgtcgtttggggagcggttcggtttggggagtataagattgttaggaggtttgaaggtgtcgcgggaaaggacgaaatgttggtttatttaaggggtagaaaaaattgagaggatttcggtgcgtattaggtatcgagggaatcggggggttgggtagagttttagtggggagaaagaggagagtagttttgtatgtatcggggtatggtttaggaagttgaggggtgggaagttattaggtatatttattatttttttttattttatttttcgattttggtattacgtttttatttgtaattggtttaggtttagggatttagtaagatttattttggaaagagtagggcgtatttttagtaaggtaagtgattatatttttatagttcgttggttttagttttgtatcgttttatttgttcggcgtggaaaggtatttttgtttttcgaagcgtttttttaggtttattagttgtagttcggtgaatatagtgcggtttcgacgtttttttttggttttggtgtttggttttttagggtttgtcgtttttagtttttcgcggagttgtaattcgagcggtaggtgtggcgtattcgcggcgtcgggtagttcgggttttgtcgttagtaacgtagagtttagttttgaatagtttagcggcgttagtgggaatttgaatatcgtcgtttgttcggtttttagtacggttgcgaagaaagagaatgaggattcgggtgagttacggtcgcgtttttttgttttagggattgtcgtattacgtgtcgcgggggtgttcgcgtttggttagtgttttttagcgtaaaatttttacgttttgtcggtcggcgtcggtggcgtagatggagattttttttaacgttgtcgttttttagatttgggagggagtattttttcgattttgttcgtgttttgttttggagttttttaggttttagttgtttttgagatttcggggtttttgatgaatatgtttgtagttgcgagaaattcggagtgtgttttgtttttcggggaaagtagaaattaaaaagaaaacggtagttggttttaagaagatggcgtttgttttaattaaattagttttgttgcgttagaaaaagaatatgtacggagcgtgtatatttgttttttcgtgcgtggtataatagttatgcggtggttaggagttatttgggtcggagttgggtgtttttcggaaattttaaagtattttgagaatttggaaattattgtttacgttttttatttttagacgtttttttatgtagatgtttttattttttttagttttaaaatgattgtgtgttcgttttaaacgaattagtagtaatagagtagatggagacgaaaggtagtcgaatggtcgagttttagttggatttagaaggagcgcgttggttttgtcgtttttaggttagggagtatcgattaggaggtgggggggtgtagggaaggcgatttgaagggttggggtttcggttatagcgtaggagtttttttttttcgataggtttgttattgaggtgcgagttttagtttggttggagtcggaaagggtagggtaaggcgtaggtaaatgtggggtagaggattcgtagggaaaaggtgggagatgggaggtaggtcgattttaatgagagaagcgagggaggtcgatcggtagacggttggaaagcgagatagggaaagataagacgagggtggagtgcgatggagatagtattattagggtagagtaggtttcgttaaattagaagaaagggtagaagttgaaaaggtttgcgtaggtcgtttaagttttgtagaggtttagtcgatttgaaattagaagggatagttaggtagttgtttatagttaggtttttggttttaaggtaaggtcgaagtaggttcgtattgcggttaaggtcgcgtttttcgttcgttggagttttcggggatttcgggtcggtttgggttcgcgttagtatttagttttcgggagcgtaggttttttttttagaggttcgatttttttgggttgggtagtcgcggttattttcggttatttttttgcggcgaagtttaggcgttcgtggtttgaggtcgtttttatttacgagagttcgtagtttggtagtgcgtttgtattggggatgtttattcggggttttcgggttggaggtcgaagggaagtagtgaaggaaagagcgaatatttttttcgggcggttcgcgggtacgaggtttggtttttgtgaggtttggagtttgtatttttcgtttttcgtttggagggtttcgagagacggttttagaatttgcgtttttagagtagtttttcggggttgtttcgatgtcggaggaggttcggggcgttttcgcggtttagttcgttgtttttcgttaagttcggttcgcgatttcgcggtcgttatacgtatttaggtggttgtggaagggtcgcgtcgttagtagcgtttgtacgtcgaattttagtagttcgttcgtcgcggtagcggcggttgcgggcgcggcgtttttgggttcgggtggtttcgtgaggatttttttaattatgaagttgcgatagcggtgcggtcggtggttcgcgtagttttcgggcgggtcgaagcgcgcggcgttcggttttttcggtcgttgtatcgcggcgtttattgttgcgttcgcggtttggcggcggcggcggcgacggtttggtttcggcgcggggttcgcgcggggttttaggtcggttcgtagttcggggcggcgcgcgggcgtcggtttatgttttttttttcgtcggtcggtcgggcggaggcgtagggcgcgggcggggcgcgcggggttcggtcggtcgaattcgggattgcgttttttttttacgtcgtcgcgttttttgttcggttagtttcgcgttatcgtttcgtttcgtttcgtttcgcgtcgttgtttttaatttttaggttgagtcggagggagggatttagaagggagggaggcggaagggaggttaaaaaggagggggttacgtgaaagaggtcggtcgatcgagatcgagggagattgagcggagcgtacgttttggaaggagagagtcggagagttcgggaggtaagatttttagagacgagagtcggagggattaaacgatataggtgagagaaggggtagaggtagacggcgtgggttaaataagattttagatagtgatgtgagggtattagagacgttatcgagatgtgcgtagagagattaaaagaggcgtgagagttagcgggttgtgacgtgacggagggtatagaggtaggcggggtagaggaagggggcggtaaagaaatgggaatagttagaaaatcggcggtttgatcggtttttaggtagtttcggaaaggtcgggaggaggaggggtaaaggtcgcg

SEQ ID NO: 6505 - DNA, 999 bp, synthetic construct
  misc_feature 1..999: note = Description of Artificial Sequence: Synthetic polynucleotide
  source 1..999: mol_type = other DNA
gcgtaacggtttgtttgcgttttttgcggttatagtcgatatacgttcgtagacgtacgtacggatatttcgttttttattagcgtacgaagacgggacgcgcgtttatagttttagggttcggttttgtattacgagttaacgcgcggtttttagggaggtggcgtagaaggtatggcgtttttgtttacggcgtttcggttttggtagtttttatagagattttcgttgatggtttaggtttaaaaggttttttttttcgagtttgcgtttttttagttttttcgttgggttagggtttattattttttttcgtcggcgagcgtgggtttttttggaggcgggggtggttttgtagaggtagttttaggtgcgcgttggagaggtcggttcgtcgcgcgggagatattttttttaaagtggaagcgttgcgtgggtagtagcgcgggtcgggttttcggattttagtttttgttgttttcgagattttcgtttcgcgtcgtatttttcgagtttagcgttttcgggttgcgttgggcgtagtggttttcggttagggcgtagtcggtttgggcgttagagttttttttagttttcggtttagggcggggaagcgttagttttcgtagtttttgtgaaaggttttttgtgttttttgtttaggtgcgcgttgtggtatttttggttagaagtatttttggcggtttgttgggtttttcgtagtttttggttgagattttgtcgtcggcgttaacgggttgcgttcgcgttttcgttttgttttcgttcgggtttcgggtttcgcgtgtatattattttttggttttttttattaaaattttttgatttttagttcgatgttgtcgtcgcggttttcggaattgttgtttttagacggcgagtcggggttgggagcggtttttacggggacggatttttttcggaggcggaggtggtttttttgacgcgaaaggtaggggcgcgtttcggtttttagcg

SEQ ID NO: 6506 - DNA, 1750 bp, synthetic construct
  misc_feature 1..1750: note = Description of Artificial Sequence: Synthetic polynucleotide
  source 1..1750: mol_type = other DNA
tcgcggttttagggttcggcgatttttaaggttttcgttttaggcgttgcgggtaaatagggtttgggggtttttttttatcgcgggttgagttttcgttatttgttttttttgtcgcgggtatttaagtttcggaatttgcgagttaggtagcgttttattttcgcggcgtcgtttttgatggttattttgtggatttttcgtagtttttagttttcgatgtggtattttcgattcgcgtatttttggtttatggagtttaggagcgtttggtttaggcgtttttcgaaattgaagagtttttttatggtggcgattttttagacgttaattattcgttattgagtcgtcgcggtttttcgtggtttttttatttcgattaagttttaaattcgcgatttttttttttatttcgttatttatttttaaatttaagatttattattaaattagtaatttatttttaaatttaagatttatttttaatttcgcgatgtagtttagaattcgcgatttagttcggtttattatagtttttagtagcgatattcgtagttttcgattttttagatcgagtgagtttaattaagtcgttattcgcgtgttagtagttgggcgtttcgattttttagatcgcgtgagtttagtaaagcggttaggcgcgcgtttgtagttcggcgttagttcggatttcgggagtcgttttcgagttcgcgtggacggtagagggcggttgtagttcgggcgtaggcgtcgttggtttgcgggtttttttgggttcgcgtaggatatttcggaatcgtaggcgcgtattttttttcgtttgagggttcgtttggtcgtgattttcgttttttttttttttcgaagagagatggggtcgttggtaggggtttttcgtagttatcggggatggggttgagggtcggtttttgtttcggtgtagtcgtcgcgggtagatcgtttggtttggtcgtagttatagcgatatttagtttcggttttgcgaggttgggcgcgttagttagtttgggagttgtttggcgtttgtagttgggcgtttaggtggtggagtatggtttgggcggtttttggatcgcgagtgtttttggtttgagagttcgttagattttgtttttattcggttttttttttgttagagttcgagatttttagttaggggttttttgtaattatcggggatggggttgagggtcggttttcgtttttgtgtagttgttgtaggatagatcgtttggtttggtcgtagttatagggatatttggttttggttttgagatgtggggagtgcgggcgggttcgagagttgtttggaggttgttgtttgtatatagaaggcggttgtagtttgggtgtttaggcgggttggaggtgtatggtttggtcggtttcgggatcgttagcgcgtttagtttgagggtttttaggtcgtgtttttcgtttatttttttatttgagggggattggggtcgttggtatgggtattcggtagttatttcgtgtggggttgagcggcgggttttcggttttgtttttgtgtagtcgtcgttgggtagaatgtttggtttggttgtagttattgggatatttggttttggttttgcgatgttgggagcgcgagcgggttcggaggttgttaggtagttgttgtttgtatatagagggcgattgtagtttgggcgtttaggcggcggagtatggtttgggtggtttttggaatgcgtgcgcg

SEQ ID NO: 6507 - DNA, 391 bp, synthetic construct
  misc_feature 1..391: note = Description of Artificial Sequence: Synthetic polynucleotide
  source 1..391: mol_type = other DNA
gcgtaggtcgtagaattttttcgcgaaggtgtcgtaggaggagtcgtggcgcggtatcgtttcgtcggcgttcgtgttttttcgcgcgcgttttcggggttttcggtttttcgggttcgtatcgtcgttcgcggggttggttgcgtaggcggcgggtttcgttagtagtagtaggagtagcgacgtttagattttcgggtgttgtcggggcggtcgcgttattcgtgcgtatagatttcgtagttaggtcgttcgggtcgtagcgggggcgtcgcgggcgcgggtcgggattgagttttcgtcgaggttattagtacgcgttcgcgtagtcgcggagtttttcgtattttcgtttttttgtttcggtttgcgtattttcgttttagtatcg

SEQ ID NO: 6508 - DNA, 817 bp, synthetic construct
  misc_feature 1..817: note = Description of Artificial Sequence: Synthetic polynucleotide
  source 1..817: mol_type = other DNA
tcgggatagagacgggtaggtagcggtgggtcgaagggttcggggattagggttcgggtcgggaggggcgggcgttttatcgcggtttgttggaaggcgtttttggtgtaggtgtcgttatttcggtaggagatggtagggattttttggaggagtagcgcgtatttgtgttggcgcgcgcggcgggtggagatgtaatcgacgcgcggtattacgtagtttttggacgagaaggttacgatggttacgcgcgtggtcgtgggtattacggggaagtcggatagtagtttgcggacgaatatgagttcgttgcggaagttgatttcgtttacgttggacgaattatttattaggaagataagttttaggcgttcgttgagttttcgtagtagtcgtacgcgtcgtcggaacgtttggtttagtcgttttattttgtttttcgtcgtttcgtcgttaggagcgggcggcgcggggatattttcgggggtttcgggcgcggtttcggggaagaggcggaagttgaaattgcgcgacggggatatttgttgaaaggtcgtttagttcgaaacgagcgttagattttagtaataaaaggttaggcgaggttatatcgcgttggagatagagcggttgtttcggagcgtaggcggcggttcgggcgggaagaggcgttgggcggtcggattcgtagaggggcgtgcgcggagttgggcgcggggtagcggttaagagttttagcgtttttttatttgatattggggatagatataatttagattttttagtagttcgggaatttcggagggaacggcgcgcg

SEQ ID NO: 6509 - DNA, 814 bp, synthetic construct
  misc_feature 1..814: note = Description of Artificial Sequence: Synthetic polynucleotide
  source 1..814: mol_type = other DNA
gcgaagaaagtcgaggcgtcgaggtttttaaagttggtagtttcgggtggcggtgtaggggcgaagggggggcggggggaatcgtcggatatgcggttttggagttgggtgttgtatttggggttgttgagcgtcgcgttgggttgcgggttggtcgagcgttttcgtcgggttcggagagattcgcgggtcggtcgattttcgcgtttcgtcgtcggttcggttatttgcgttattcgggcggttcgcggtcgtcgcgtttcgtcgtcgtcgtcgtcgtcgtcgggcggtgtttgggaagtcgtgcgcgtttttcggcggcggtagtagcgggaggcgaggggcgttatcgaggagtcgagttcgtcgagtcgggcgttttattttagcgggcgaggcgagtagttgcgttttcgggtcgatttcgagttgtttcgggacgcgtttacgttgtaagtgtggttgcgagcggaggggggttagaggttttcggtagtgattataggtaggtgagggcgtttcggcgggcgttgtatcgtttttgcggttttagaggttcgcgggtgtttgggcgcgggtggcgggcgggtcgggggtttgcgggcgtgtttgtgcgagagttgtttcgcgagcggcgtagagatattcgggcgagttgagagttttattttgttttatcggtggaatgggtatattcggaaggcgtagttgttttatttttgggaggaatttggggagtttttttggcggtttcgcggattttcggttagtgagggttggttttcggagtttagggtacgtaattcgtgtttcg

SEQ ID NO: 6510 - DNA, 1429 bp, synthetic construct
  misc_feature 1..1429: note = Description of Artificial Sequence: Synthetic polynucleotide
  source 1..1429: mol_type = other DNA
gcgcgtataatgaagtagttgtttgtagcgttaattagttggcgattttgaggttattgcgtggttttgttttggtcgtttttaataacgggatagagcgtcgggtatcgcgtattgattaattatttttttttcgcggtcgttcggtttttttttttttttttcgtcgggtttggttttatttttttcgggcggtttgcgtttttttttttcgcggtttcggtttcgtggcgtcggtagtttcgggagtttcgggaagtttgcgcgcggtagtttcgtagtcggtagtcgggagtttcgtagttttcggggagcgtcggggttggtggtttttttgttggaggaggcgtggagggagcgtttttgttttgagttagttacggtggtcggttggaggttgttattttattatgcgtcgggtttgtttgtttgcgaggaagtagatggtggggaggtaggtagcggcgagagtggttagatttgaatttcgtttatttgttattttttataaaaggtaggttcgggggatttaggtattcgttgttattttttgggggagggggaggtcgaggggtcgtcgttttcggcgtttgcgaaggtttcgtatttgtcggtgttcgttttttttattttttgttttttttttggttgtagtttttcgtatcgcgtaaatgttatttacgtgttaggatgtgtgtttatagtttgtttttttgtttgtttagtttcggcggatagggtttagcggttgcgcgacgtttttcgtcgttgggggagattagtaaagttattcgtttttggatttcggggtttgggtttttagatttcgtttcgcggcgggagatgcgtttgagttttttatagacggagcgcgttttagtttgacgtagagggatgaatagataagcgtatcgggcgggaatttcgattgtttgtgtatttggggtcggtttagcgttggacgtgggttgttggttcgagaggtggcgacggaatcgcgtgtttatatgtatgggggagtggaaagtcgtagggtgtgtttttacgttttttgagtagttcgcggtaagagttgttgagtattttatttttcgtttttagattttaaggtagtttttcgagttttttaaacgtattgtatttagttttttcgagagtggagttgtattaaggataaatattttagcgttattataaattttttttgttttttgggcgatttttagatgaattttggtgatttttagattggatttttattttttattttttttgaaagaaagtgttttagatgcgttaataaaatatgtttatgtattcgtgtaggcgttcgtatgtttgcgcgtcggtcgtgtgtaggcgtcgaagtatacgtttgtgtgaatatacgggtacgcgcgtttttgggtttagtggtttttttttcgcg

SEQ ID NO: 6511 - DNA, 7708 bp, synthetic construct
  misc_feature 1..7708: note = Description of Artificial Sequence: Synthetic polynucleotide
  source 1..7708: mol_type = other DNA
tcgggaagagcgagaagttatacgttgggttgtagattgggttttagcgggtttggagcgtggatatgttggttggttttttttttcgggagttatagttttcgtcggtttcgttatttaggttttgtcgggtatttaggaggtttgtacggtcgtttgtagttcgttgtgtagagttcgggtcgaaggcggagttcgatgggaaacggtcggtcgaaggtttttgtaattttgttataggtttgttttttcgggttttttaggcgggtgtttgaggtcgcggttttaggtcgaggggagatcgtagtgagacgagtatttttttgttgcgtttttttaggatagagggtttaatttttttttttgaagatatcgtaggaagttgttcgtattttaaaaattttaaatttcgcgtttttttttttttttgttttttttttattttcgttttttagtttcgtttattagtttttattatttcgatttttttttgttttttttgtttttttttttttttttgggtttttcgttttttcggagtacgcgttgttagggtttggggcgtcgagcggttaatggtacggcggtaggacgtgatgttaggcgcggttgtagaaaaggcgcggaggtttgcgttggcgcggattgtagagtcggggttgggttaggcgcgcgtttggagagtattgcgcgcggttgggttcgcggtcggcggtttttttttttattttgtttttttttttttttttttttttttattttttttttcgtttttttttttttttttttttttttttttttaattttttcggtggttcgattcggttcgtaggtttcggagaaatttttattttagtcgtcgatttagcgtttaagagggtcgttttgggttgggggcgtattttagggaggggaggggtttaggtagttgggtcgtcgcggatatttagcggttttagggtgaatttcgatcgtagtcgtcgtcgtttcgggtagagtttgcgtttttgttttgcgtttcgggcgttgaagtcgggcgggcgatgttcgcggcgtgaaagcgttcgcggcgggcgtcgatttttgttttagttttttgtttttttcgtttcgtttgtttcgtgtttttgtgattttggttttggcgtcgtcgtttaggcgtttcgtaatgtagttgtttttgcgtttcggcgggaggcgttttgtttcgcgagcgttcggggttcggagttcggtttgggggtttagtcgagttcgggcggggtcggggtcgcggtggcgatgtatcgggttcgttagcgttaggagcgttaggtagttgaggcggggggtaagttttttttcggaggagtcgcgttttcggtttcgtcggtttcgtcgcgatgttgttttatagtttgtcgggtttcgaggtgtacggggttatcgacgagatggatcgtagggttaagagcgaggttttcgttattagtttcgttatcgatcgcggcgatatcgagacggtaggcgcgcggttgtggggtcggggttgagagttgggatggggtcgggttagttagcgtttttgtttttcgaagtttggggagcgtttttcgtgtcgtacgggattgggtgttggggattttcggttagaatgtaaggtcggtggttttcggttcgggggaaattcggttgttgggacgtagaagggaaataaggttgaaatcgaaatttcggttttgggggtagaggagagcgtttttttcgaattggaagcgaagttttattcgcggttcggggcggttttttttttattttgttcggtgtcggggtcgatagtttcgcgtttttttttatttttcggtttcggttgttggcggcgtcgcgagcggcgttagggaagggcgaattagttgggagtattggggttttagtcggtttgggtcgtttttagtttttcggtaatcggggattttttttaatttttagcgtagttttagaggtcgaagttttcggggttaatatttgtcgttgatcgcgtttttagatttttgattggttagatttagttaggttagggttgggagtttaggtttcggtttggttttcgtcgaaggagattttatttggatttttatatttggtttcgcgggtttagttttaaatagttagtttttcgttttaggtttttttgggggttagacgagtagatattgttcgattagcgggtttagaagtgatttttaggaggtcgcggaggtggggagtacgggagaagtttttttgtttcgggagtaggagtagcggcgttagtgttttttcggtttttgagcgttttttcggttagattttttttgttggttagtttggatagggaagtatttgggttgaatttgttttttatttacggattttgagggtgtttttgtattttatttattttattttcggatttaagagggttttagttcgtgtggtagaggagttagaagttggttgatttgttttggttttaatttttggtttaaggatttagggattattggagttggggtttaggaatttcgttgtttttttaaagaggattttgtgtggagggtgatttaatggttattttatttttcgggtggtttatttaagaagtagtttagggaaagtttttggagggtttgattggagtagttgttttggtttttaaatatagttcgagtattttgggggaaaggatagggaggattggaaggaagagaggtaagtattagagttatttaggttaggagttcggtttgggttcgtggttggcgagggttgcgtaggtaggtttgggttttgaatcgtttagaaatggaaatgggttttttggggtggggggaagcgcgtcgtatgttttggtagtttttttcgcgtttagggtagttaaggttatagagggagttgtgggtgtcggtttttcggcggcggaggggtcgttggttgacgtaggcgttgttgtttttcgttttttttttttcgtagattatgtcgtttattagtagtgatcgcgtcgcgttgtgcgtcggttgcgggggtaagatttcggatcgttattatttgttggcggtggataagtagtggtatatgcgttgttttaagtgttgcgagtgtaagtttaatttggagtcggagtttatttgttttagtaaggacggtagtatttattgtaaggaagattattataggtagtttttttatttaattgttttttaggatttttttttttaattttaggtatagttttatagtttggttttttttttttcgtttagttttaggagagggtttattatttaggattttttcgttttttttttaagttttttaagttattataagttgggtgataattttttaaagtagtaatttggggagtttttggaaaggtttacgaagtaggagaattagaaaaaaagtagaagttgtttttttgttcggagtttagattataaaaaagtttgagttgggatttttgtttttttttttttttgaagttttttgagttaattcgaggttatagaaataggtatttttaaatttaggtagtttaagttggagtgaaatatagttggaaagagagttgtgggagtgggtgtatttttaggttttttgagaaaatgggaatgaaaggtggttaagattaaagaattagaattattagtagattttaagttttttgtttttttttttttttagttttaggattagggtttatgtatattttttttgtttttgtttttacgtttgtgtttttttttttttttttgtttttgtgttttttttaaattataaaagttagtaggatttttaggcgttggtttggagggaggagtaaaggttgaggagggggtaagtggtaagtgtttttttttatttttaggtaaaggtttttttagggtttgcggagattttgggtgaagtagaagtttttgtaggtataagtgtgttaagggaaattattttaggataggattaggtttgggttaaaatttagtttttttttttttttattttttaaataaaggtcgggttgttcgttttgaggaggggattgtttttcgtagtagtagcggtatttggaggaggaaaaggggggtatttaatcgtgtgtttttatagtttttttttttatggtttttataggcgtttttttgtgtagcgttgcgttcgttgttatttgggtatttcggtttcggagatggtgatgcgcgttcgggatttggtttattattttaattgttttacgtgtattacgtgtaataagatgttgattacgggcgattatttcggtatgaaggatagtttggtttattgtcgtttgtatttcgaggcgttgttgtagggcgagtatttcgtatattttaattatgtcgacgtggtagcggcggtcgttgtagtcgcggcggttaagagcgcggggttgggcgtagtaggggttaattttttgggttttttttattataatggcgtgggtattgtgtagaaggggcggtcgaggaaacgtaagagttcgggtttcggtgcggatttggcggtttataacgttggtgagtgcgcggcgtacgaagcgtttttatagggttgggggaaagtgtgcggtttcgacggtcgggagttggattgaatttttgtgtgttgggtaaatagcgagttttaagtatcggacggtttcgtagaagggatattagttttttgggtttttagattgtgcgttttcggttggagcgggaggagagggtgtagtggttttttgttgtttcgggtgtagggttttgtttttgataaattgtttttttggagatggttttttggtttgggtttttgttttattttgttaggtaggaagtggtagggatggagaaagtaaggcggcgttgacgttaaataggttttgggttggcgcggttgagggtcgggaattggggtagcgaaggaacgaggtagggcggcgagggttttaagagaaagggttggttgtggttcggggcgtcgagttcggtttggagtgcggtttgatttcgtgaaatgttttaagggcggtaggtttggggaattcgggtttggggaatttaggaaagtaaaggttgcggttttttttgttcggttcgatttttttttaaagataggttttagttttttcggattttttttttcgagttttttggcgtttgttggggtgagggtcgtgattttcggaagcgagtttttcgggcggggacgagatcggagtaggtttggtttcgcgttggggtggggtggggtggggtgaggtggggggtttggttcggattttcggtatttttgaattttaggttattttcggagaagttttgttttttttcgcgtttttttttgtttaggatagttgtagaggttttgagtttcggtaaatgagtcgttaatatttgttcgaagtttgtaaggttcggaaaggtttatgatttttcgggttttcgaattagagtttatgtgtaattattttttttttttcgtttgtaatagaattagatttggagattttgtgttttttttttttttttttttagtttaatgtataagtagaaaaaagtaaaaataaaaataaatttaagattgtgtagagggtgttacggcgggaagaagttagttatttttattttaaagaatttgagttgaatagagagggaaatgaggggcgggtgttcgttttaacgaaatcgtttggaggattatggggcgtgtgtttttgtgtgcggaattgggaggaaaacgtagtttttagtttggtaaatggtgaagtagcggtaggtcggtcggtggcgcggatttaagatttgttgaaggtattattatagatgtagttttttggaatttttatttttttttttttattattttttaaaaaaagataaaatcgagtttagatcggtttttttaatattaagtcgtttttatttattaagtgggttaatttttattcggaagtatttcgcggggttcggttttagggtatttggtggttggggagttgtattgtttttttgggtacggaggttcggcgtcggttttaggattgtgtaaaaagagagtagaaggtatagagatttatttttgttttttgttgtttagtcgtcgtttgttttagcgaggtgggttggaggttgaattttaagttttgtttaatttttataagagatattttttatttagttattttattttttttttggtttttttttttttttttttttttttcgtttttttcgttttttttttttatttttgtttttgtgtgtgtcgtgtttgttttcgtgttttttttttcgattttggtcggggtttttagttttgagagaaacggcgttcggtgcgtcggcggtggttatgcggttggttttttcggggttttcgggattaggttggggaaagagggtattttttcggtttttcggggtttagtttagtttttttagatttggcgttcgttttttttttttttttcgtattggtaggagagaaatggtcgtagtgtgggtcgcggggtagttaggattggaaagcggggattttggagggtgcgatcgcggacggggtgtgcgggcgcgggtcgtgtgcgtgtgcgtgtagggtttcgattacggggatacgagtttgtttgtggtagtgttttatattttgtggtttagttacgacgattttttgtaaagttttttgttttggggatagttttttcgaggcgcggcggtattttattgaagggcggcgagttgggggtcgagtggggagggggcgtcgtcggggcgtcgggcgttgggtttatagtagagtcgcgggtcgcggggtcggaaagttttttcggggcggggtcgtagcggttttttttcgtagtttttcgggttcgggtttcggtggaacggaaatttttttttatttcgggaggggttgttagcgggttgggggtgcgaaaacggcggtaggagcgggcgaggggttcgggtcgcgtattttgcgtttgggtttgcgcgtcgcggtcgcgggagtttcgcgcggatcggtcggacgttcggttttttttagttttagttttttgtgtgtgtgtgtttggcggcgtaattattgatttgattttaatttattatttagataattgaatttataatttcgtttttagtaaaatgaggcgaagttagatttgattataggtttagttttagcgataagagttcgaaattcgatgggttaataatagattacgagtaaattatttatgattttacgagttttttagttttattgaatcggtttaattgagaggaaaaaaaaaaaaaaggagagagaaagttcgggtttttttttttttttcggtttttcgttttttttcggattcgattttggggaatttcgattcgttttcgggtattgggggcgggagtgagggggttcggggcgtcggttaaatttgggttttacggttgtttttttcgtcgtcgttttttgtttttgtttttggtcggtttcggtttcgttatttagggtcggtttttttttttttttttttattttttttttttttttttttttttattttttcgttaataacggtttcggaaaaggtttttttcgtagggatcgggtttttcggagtttcgggatttagttcggttatcggattttcgttataagttgcgtttgttttcgggattcgttttttttttcg

SEQ ID NO: 6512 - DNA, 3969 bp, synthetic construct
  misc_feature 1..3969: note = Description of Artificial Sequence: Synthetic polynucleotide
  source 1..3969: mol_type = other DNA
tcgggagtgtgggtgtttcgggggcgtgggtgttttaggagtgtgggtgtttcgggggcgtgggtgtttcgggagtgtgggtgtttcgggggcgtgggtgtttcgggagtgtgggtgtttcggaggcgagggtgtttcgggagtgtgggtgtttcgggggagtgggtgtttcgggagtgtgggtgtttcggaggcgagggtgtttcgggagtgtgggtgtttcgggggcgtgggtgtttcgggagtgtgggtgtttcgggggagtgggtgtttcgggagtgtgggtgtttcggaggcgagggtgtttcgggagtgtgggtgtttcgggggagtgggtgtttcgggagtgtgggtgtttcggaggcgagggtgtttcgggagtgtgggtgtttcgggggcgtgggtgtttcgggagcgtgggtgtttcgggggcgtgggtgtttcgggagtgtgggtgtttcgggggcgtgggtgtttcgggagtgtgggtgtttcgggggcgtgggtgtttcgggagtgtgggtgtttcgggagtgtgggtgtttcggaggcgagggtgtttcgggagtgtgcgtgtttcgggggcgtgggtgtttcgggggcgtgggtgtttcgggggcgtgggtgtttcggaggcgagggtattttagaagtgtgagtgttttaggggcgtgggtgtttcgggggtgtgggtgtttcgggggcgtgggtgtttcgggagtgtgggtgtttcggaggtgagggtgtttcgggagtgtgggtgtttcggaggcgagggtgtttcgggagtgtgggtgtttcgggggcgtgggtgtttcgggagtgtgggtgtttcggaggtgagggtgtttcgggagtgtgggtgtttcggaggcgagggtgtttcgggagtgtgggtgttttaggggcgtgggtgtttcgggagtgtgggtgtttcggaggcgagggtgtttcgggagtgtgggtgtttcggaggcgagggtgtttcgggagtgtgggtgtttcgggggcgtgggtgtttcgggggttgtgggtgtttcgggagtgtgggtgtttcggaggcgagggtgtttcgggagtgtgggtgtttcggaggcgagggtgtttcgggagtgtgggtgtttcgggggtgtgggtgtttcgggggtgtgggtgtttcgggagtgtgggtgtttcgggggagtgggtgtttcgggagtgtgggtgtttcggaggcgagggtgttttaggagcgtgggtgtttcggaggcgagggtgtttcgggagcgtgggtgtttcgggggcgtgggtgtttcgggagtgtgggtgtttcgggggagtgggtgtttcgggagtgtgggtgtttcggaggcgagggtgttttaggagtgtgggtgtttcgggggcgtgggtgtttcgggagtgtgggtgttttagaggcgagggtattttagaagtgtgagtgtttcgggggtgtgggtgtttcgggggtcgtgggtgtttcgggagtgtgggtgttttagaggcgagggtgtttcgggagtgtgggtgttttaggggtgtgggtgtttcgggggcgtgggtgtttcgggagtgtgggtgtttcgggggagtgggtgtttcgggagtgtgggtgtttcggaggcgagggtgtttcgggagtgtgggtgtttcggaggcgagggtgtttcgggagcgtgggtgtttcgggggcgtgggtgtttcgggagcgtgggtgttttaggggtgtgggtgtttcgggggcgtgggtgtttcgggagtgtgggtgtttcgggggagtggatgtttcgggagtgtgggtgtttcggaggcgagggtgtttcgggagtgtgggtgtttcggaggcgagggtgtttcgggagtgtgggtgtttcgggggcgtgggtgtttcgggagtgtgggtgtttcgggggcgtgggtattttagaagtgtgagtgttttaggggcgtgggtgttcggggggcgtgggtgtttcgggggtgtgggtgtttcgggggtcgtgggtgtttcgggagcgtgggtgtcggggattgtagggatatgggtttttttttttatttttgtcgtttagggtattttttgtgaggattcggagttcgtgagtttttatttttttgagttcgattttttggtgttttcgtttgtatttttagtttttttttaaattagattagttttttaggggcgtcgacgtgtgaaattgattttaaagaaaataggtagtggtttttttttcggttttacgtggtttagtagcgtttatttttcgttttttttttcgcgtttagtaattaatttaggtcgtttttgtagaattcgggtttttgtttatcggtttatagcgtttatttgaggtttcgtttttttagtaaaggtcgttttttcggaacgcgttttttgcggtttttttagagtttttttcgcgcgtttttttagtttcgttcgttttttttcggggtttttttttttcgtttgtttttaggttcgttttttttcgcgggttgaggtaggttcgggtagtacggtcgtttcggggcgggggttattttttattatcgcgtggtgtttatagtttacggcgttttcgggtgacggttttttcggttgtagggcgttttgaagagcggtttgttcggagttgagcgtacggggttgtttcgttttgggcgtttttggtttttattagtttcgtttttttatgggtaaaacggcggttttgtttgtttataagtaatcgtcggggttacggaggggttaggagttgcggcggggggttgtgtttttaggatcggttttaggaggattcgcgcgaggtttggagtttttaggggtcgcgggggatagaggggttttaagcggaggcggggaaggcggtagaagtttaggatcgttaagagttggcgaggaagttcggggttcgttgtcgggggagtcgggtaggggtcgcgtttcggattaggacggaggtttggggaaggcggatttggtcgtcggagacgcggtgcgggtggagacgagggatttggattttcgcgggcggttgtacggatttttacgcgcggtttacgtgggttttagggggttgttcggtattcggggtcgcgtcgtttttttttcgtcggtatcgattcgtagttttacgtttacgcggcggcgttcgtagtttttttcggttcggttttcgcgcgtgttttcgagcgcgttttcgggattagttttcggaagtagagaggttaggtcgggaaggatgggcgacgggggtggttgattcgggagtacggtagggaggatatttagttaggttcgcgagtagcgtcgttttttttttttaggacgggcgggaatttgcgatgttttcgtcgcgtgggtcgtggggcggttttcgaggtattgggcggggtacgcggtgggcgttttacggaattcgtattttttagttttcgtaatttaggaggaagtttacggcgttttgtatcggcgtcggcgcgttaacgcgtttttggaggagttgcggtcgggttttttggagagggagtgtaaggaggagtagtgttttttcgaggaggttcgggagatttttaaggacgcggagaggacggtgagtttagtttcggggcgtttcgcgtcgcggatattgtaggcggcggtgaattaggtcgcgtggggtcgtttgcgtttttttggttgcggttgtgggcggcgaatacgtagcggcgttcgcgcggcgttttttgcgggggtcgtttttcgttcggggtgatttcgtttttttgggcgatgttttttatttttaggtacgcgtttttttcgtgcggtcgtatcgcgtatgtcggtttttatattagaaaatacgatttgtaaagtatatttagggtgttttttttaattttttaagggagtttttttagttttcgaagggtttagggtagtttgcgtatcgtagacgcgcgcggttcgtagaagggacg

SEQ ID NO: 6513 - DNA, 2490 bp, synthetic construct
  misc_feature 1..2490: note = Description of Artificial Sequence: Synthetic polynucleotide
  source 1..2490: mol_type = other DNA
gcgtttttttttcgttcgaggtttatttagcgttagcgttcggtttttttgtagcgattgggttttaatgtcgtacgaggggttttcgcgaaggttaatggtattatttttttagttttttttttatttttattttttatttttttaggttgtggggggttaggggtcgaggttcgcgcggcgcgtattttttaggcgtatttttatcgttaggtatttttggaagcggtagaagggatagcgtttgcgttgcgttttgtcgattttgtagttttggttttcggtgtacgtgtagtgtttgttgttttgtatcgtgcgtttgaagaagttttgcgggagttgagagttagcgaggtttcgtagcgttcgtttgtcgtatttttgtcgcgcgttcgtcgtttattttgtagtttttatacgtgagtagttcgtagtggtagtcggatattttgttttcgtatacggggtatagttcgtttaggttttcgtcgtacgaatagtttatgttcgcggcgttcgtttgcggagggatagcgggttagggagggtcggcggagatcggtagtttggggttttcgcggtcgtcgttttagtcgttgtcgtcggttcgtcgcgtaattttttttttgtgtttaggcgttgtcgtcggtatttatcgagcgtttcgcgtagcgtttcggggtgggttcggtgtagttttcgcgttcggtttttttttgttaggttttacgttttcgtttcgttcggggggtttttttcgcgcggatttcgtcgcgttcgatttggggttttcgggttcgatgcgtttcgattgggattcgtttgtttgagaataaaatttcgattttgagaaaaagagatgggtttagtcgcggggaagacgttaggggatttaggagcgttggggcgttcggttcgggtgttttgggaattcgatagagacgaaggaggtagagatagagttcgggggagttagagatgggaagaaattttggcgagagataacgatcgacgttatcgggcgtagatacgaggttagttcgagagtgttagagatatagatattgagacgtttagttagagagaattcggcggggacgagatatagggagggatggagagagatagggagatagagagagagagagagagagagagagacgagagagagagagagagagagaaacgaggggtgggggattggattagagattcggagagatagcggaggttcgaagagaaaatttaagagagattgacgtagagttagagatataacgatagacgatagatagagacgtcgagacgagaggagtttcggagagacgaggtcggggagttatagaaatacggagagaaaatttggaggcggaagcgtttagttcgagggtcggggataggggacgcgcggaaatttgtcgggtaggagtttaagcgttaaggcgaggtttcgtagggtcggatttagacgggggttcgggtcgtaggaggcggaaaacgacggcgtcgggatcgagagttcgaaaacgtagagtcgtcgggatttttttttcgggggagataaagtcgtagtagcgacggtaacgggaggcgtagttcgagtcgtcgttgttatcgggacgtcgggcggggagatttcgggcgggggtcggcgggtttcgggaagtcgagttcgaggcgagggagcgatttcgggcggagaggcgaagttcggaggagggaagcgcgaagagttagggttcgggacgcgagagggggcgcgacggcggttgcggtcggttcggcgtttatttggtcgtttttgcgagtagcgtttcgcgtttcgttcgcgcggagttcgtatttttcggtcgcgtcgtcgtcgtcggcgaggagtcgtattcgggcgtagcgtcgttcgttcgcgatgacggtcgttcgggtcggggacggggaggcgggggcgcggggttggcggcgcgggggtttcggtttttttttttcgttttttcgttttttattttgtttttttgttttttttcgtatcgtcgtcggggtcgtttcgaggcgtatttgggattcgggttttttagtcgttatttcgttttgcgttaattcgtcgcgttggggtcgggggtcggtttttttatatcggcgcgtgcggtattcgggggcggaggttcggtcgtgttttttttttaagttcggttcgcgtcggtatttttttcgtagtttagttcgagttttcgtttttattttttaggttttttagtcgtagttcggtttttcggatttcgagcgcggttagagagttgcggagttcgagtgtttcgcgatttgggtaggtatagggtagtgggggttttgggttattcgtttgtagtgggaggaggtagtttttgtttgtgaatttagttgggtcgtggcgaatgttacgcgggtggttggtcgtattatagcgtggaagtgggtaagggcgagtggcgatcgtggtcgaggttcggatttacg

SEQ ID NO: 6514 - DNA, 5370 bp, synthetic construct
  misc_feature 1..5370: note = Description of Artificial Sequence: Synthetic polynucleotide
  source 1..5370: mol_type = other DNA
tcgtgttcgagggaggcgggtagcgtagaggagagggtgtaaggttttaagaagaggagcggggggattagggcggggtttaatggagttggggcgttcgtagattggaaggagtcgggattttcgttttagagtttttttttttattttcgttttttttagtgatttcgagttttcgatttagttttttttttaggtagagagaattcgaggttgtttttgtcgttgaaatttgagcgggagagtatttcgaagtcgtttgcgtggagcgagtagttttcgcgttatgggttagaggcgttcgggagaatttgcgggttacggattatattcgtaggggtttggcggagtaaggtgtcgttcgtcgtttgcgggtaggagtcggttttgggtttcggtttttgttgtgtcgtttagtcggtcgttttttcgttttttcggtaagggaagcggtggagaggcgcgggagtttcgattgtgttggagagatttgggatttttgcgcgtttgcgtgcgaaggattcgagatcggttaatttagttgggagtacgggatacgaggagtgaggataaagggtaaggaacggggtttatagggagggtgtgtgtgtgtgtgtgtgtgtgtgtgtgtgtgtgtgtgtgtgtgtgtgtgtgtgtgtgtgtagggggaatgaatggatagcggggaaggtatgtagaggggtttaaggggtgtggatttagtagttttattttagattagagaaggtagttaggttttggcgtttatcgagttagcgtttttatttgggcgcgggtcgtatggcggtagattattttatattcgttttggtggcgtgggatatgattggtaggagcgcggaagaggcgttgagaatgtatgcgtattcggatagattagacgcggtacggagggggtattttttataagtttttttgttttgagattaggttttcgagtggttcggggaatgcgtttttgggtatagttagcggttttagatcggtattggacgttaattcgagttagagaagtttgggagattggatcgtaggggtttttatttagttaaggagggggaaaggagagttgtagggtaggagaggttaggtatagggaaggtggggaggggatggagttttgcgttaggagttgggggtgtagggtttgtgacgagagagtattattatgtgtattttgaaggagagggagagggtttgggtttggaacgaggattttcgtttgtaggtagtcgtttagtttcggttgtagggatggatcgcgattagtagagggtagaaagtgtttggttcgttcgtcggtttcgagtcgcgtttcgcgtttcgggattttggttttgtgcgtcgaagttttgttcgttcggtttttttttgtagtagtcgcgttttcgttttagatgttcggagaaggcggtttaggtttagtttaatttcgcgggtttaggtttggggtttttaggttaagtaaagaggggatcgagatgtgggagagaaattttatattgattgtttatttttttcgatttagttatataaaggcgtttagaaatatacgaaggtataaagttttttattatatataaatatatatatatatatatatgttaggagatacgcgagtatatagaagtatttagaatttcggagataagtatagatacgtaaagttgatagagatatttatatagaaaaggatcgtagatataatatagaggttgagatacgtataaagatttaggttttcgtatgaaatgatgcggatatatattttagatataggtacgaaggatttatatatttatatatatacgggtgtaggggatttagatatagatttatagatttatttttgggagtttggaaggttgtagggatatatatatcgtgtgtgtagagttaaggagtatacggaggtaagagtcgtagaggcgggggttcgatacgtatagatatatatagatatttatcgatatatacgtaggtagggtagggcgggagtttttaattttttataaagtcgggttttttcgcggggtttcgcggcgtagggggttatttttgattaagtttttcgtaggttttaaattcgattcgttttttcgtttttagcgaggttaggggattcgttttttatgtttttcgttttcgttcggtttcgcgtcgttgtttcgtttcgggaggggtcggggtcgtttcgtagcggatcgcggggggttagttcgtcgttatttcgggtcgtaatcgtttttttgtttttcggtgagtcgcgcgtcggtggggattacgggtcgtagatagtcggttcgacgttgtggtttttcgtatcggacgcgggtgttaggttcggttggcgcggaagtcggtagttttatttcgttagttttcgcgtttcgttgtcgaggtttattttgtttaggttggttagagtattgtttttgattcgcgcgttttagcgatttttggtcgggtattcgattcgttaaaggatttcgattttggtagttaatttaatttttttagagtcgttattttggggttattatttttttttagcgttttttattgtaaattttaggaggttcgggttttgtttattgtttttgtttttgttcggggattttttttttagttttagttgttttttaaattttcggtcgtttgaatttaggtttgattttttttgtcgttttagtgttttttattttcgatttcggggttttaattttttatcggtttagtttttcgtttaatttttgttaggttcggagtttttttagattttttatttatattttaggtttatttttcgtttttgggtttgggttttttttgtacgagtttagggttagtcgttttcgttttttgttcgttttcgtttttcgtttttgggagtcggtttttttcgcggattaagcggtttcgagtaggcgtcgtcgttcgggggatttcgatttagttttcgcgatttatttcggtcgatagtcgggggtttttaagcggttattttcggtcggcgtcgttttttggcggagtcgtcgcgttttttgtcgttcgcgtagtttggtttcgttcggggttatttttcgtagcgttggagttttataaaatattaataataaagaaggtagaggagaaaaaagaaagttttcgttttttaatttttaaattaattttttaagggggtggagtagagggatttgtttcgaagacgattaaaatttttgcgaggggttcgcggggcggtcgggtcggggagtcggggtttgagttcggggttaggcgcggcgcggggcgcgggttaggggcgcggagtttcggggcgcgcgggggggcgggacggtattatttgacgtggagtcggcggcgtatttcggcgtagggatatcggtcgcggggtttaaatgttaggaagtttcgggaggtgaggcggttcgtattttttcgtcgttagttttagttttaaattcggcggtttagcgggcgtattatggtattggagtagcgcggggagcgcgttcggagtttcgcggttcgttgcgtttcgttcgggatttcgttgcgtcgcgcgtttttttcgcggttcgcggggtcgtttttgtatttttattttttttttcgtttgtcgtcgtcgttatcgttatcgtcgtcgtcgtttttttttcgcggtttcgtttgtagtagtcgtcgtcgtcgggtttcgggattgataagtaggtgatagaggagtcggcgcgcgtggttgtaagtgttcgggagagcgcggcgcgggttgtagtcgtttcggttcgttcgtacgacgtcggggttcggggttagcgcgtcgtcgttttacgatcgtcgggggtcggcgtaatttttgttttgcgggggtcgcgttttttcggttttagggtcgcggtggcggagagcgggtggacgggtcggcgggcgagtagttcggtcggcggggttcgtagcgcgtttcgcgttttatggatatagtaataggtttcgagtcgttggagaggtgtttttttcgcgggtagacggattgcgttaagatgttggacggtattaagatggaggagtacgttttgcgtttcgggttcgttattttgggggtgttgttgggtgagtgcggggtcggaacgttcgagtggtttcgggcgtgggatggggcgtcgttcggttgtggatacgggcgttggggttaacggataaaggaaatgggtttgtaggatatggggaggaggtagagataggatttttggagtgatcgttagagggtcgtaagtacgttttcggtaggcgttttgaggggataggatagttttagtcgttatttattattttttttaggtttaggttttagagttgttatttcgatgtggtaggtggcgggtggtaggggtgatggaggatttagtaattattttggcgagtttgggagaggcgtaaggttatttggggtgggggagattttaagagaaaaacgtttttttggttatttaaattatagattttggggagatcggggatagaagattacgaacgttatcgtggggcgtgttagttagcgagcgttttagttttatttcgtttgttttggttttagtcggttattttgcgtcgtgttcgttgttatttgttttaatacggagcgcggatttttcggagaaggggagagtatagcgtcgagttaaggttcgaggttcgcggtttttttacgtcggagttcgaggattgggacggattagtcggggtcgttcggtttttggcgcggcggttcggggagcgtaggcggtaggcggtgatttcgggcggttcgagttttcggggtcgagggttgtgggttcggtgcgatcgggacgtcggggttgggtcgggcggcgttgacggtcgggttttcgttttgtgcgttataggtttcgattgttcgtatttcgtcgtttgcgagggttgttagcggtttattttcgatcgttttttgatgcgagttaacgagtcgttttggtacgaggagtgtttgtagtgcgcggcgtgttagtaagtttttattattagttgttattttcgggatcggaaattgtattgtaaataagattattaatagtaagcgtttttcgtttttttttttcgttatcgttcggtattcgagttcggttagttttttgtcgggttcggttcgcgttcgttttgtcgtcggttttgtgcgcggttgggtcgggtagttttaagggtttcgagagttgcgcgttttggggttggggcggattagtttagtttagcgggtattgatggggttttgggagttttcggacggtttttagttgttattcgttgtttcggaattttgcgttgggtcggtcg

SEQ ID NO: 6515 - DNA, 3120 bp, synthetic construct
  misc_feature 1..3120: note = Description of Artificial Sequence: Synthetic polynucleotide
  source 1..3120: mol_type = other DNA
gcgggagagtttttttcgacgttcggatacgcggatggggcggtttttagcggtttttattcgcgtatttttttaggtttatttttcggcggttcgtgtagtatgttttttattgggagtgggatgatattatgtataggtttttgggtttcgtagtcgagtcgcgggtattagcggcggttgatgaatttcggtgttattaggggtttagttcggatttgggaatcgcgcgttttaatacgcgtatacggttttgttttttttaaagcgtagtttttttatttagtagttgatttatggaggaattcgattttgggacgcgttaggttgaagttcggagtttagggttttgtagtagttttcgggttttttagcgtttcggggatttttggtggttcgggggtttttttgggttggggtcggggtgtttcgttaggtggggttttacgcggtttagaaagagttagtgattttttttggagttattgtaggttttcgttggagggagtaagattggcggggagagttggtatttttattttttgttgagtatagttttcgtttttttttaagtttttttgtcgattttttcgggttggttaaaagtagtaagttcgggaggtttgtttattgagagaatagaaaattaggggttgcgggggagaatttaagatttttttttcgtttgagaaacgtgcgaagttttttagtttttggaggtaattaggcggttcgaaagtcgagttttcggcgcggatgttagggtcgattttagtttttttttttttgcgttttagttcgagggcggcgagtggtaggtttttttttattttgtttttttttttttggatttggtttgtaggggggaaatgtggttgtattaatttataaatatttatttttaatagatttgtatttgtggagatttcgaataaagatagtttagggggattataaaaattttaaatttcgtttttttttcggatttggtgttttaaatgttaattataggcgagttatatttaatagtaacggggaaaggcgagtaggtttcggggagggaggtggggggagagttcggttattaaatgtaattttttattatgaaaaggatttcgtcggttttattttttaataagattatgttacgaatataagtatttaggatggtgttgagtgatagggttttgtcgtttaattagaggttgtgtcgtttaaatcgcggggttttttgttttacggagtgaacgacggaaatttgttattttaatttttttatttatgttaagtatagaaaagaagtcgagtattttataatcgtgttttttttatttttttcgaggacggcgggaagagggggtttcggttttgtagttttttgacgtttttcgttttcgagcgcgtttgggttttaggagtcggagcgttgtcgtgggggcgggggaaggggtggttttgcgggtgttttaattggtagcgtttggaaaatggggatagtgattttacgattagaggatgaatggggggagggttagtgggatgtgtttgttttttttgatcgagagtacgggttttgttttgttttttttttttaggaaaggtggtatttcgggtgtatatttattatttttattaaagcgggattgattagaagagagaggtcgaatggagatgttaggttggggttttcggcggggtagatttcgttggatttttgggattaatgtcgtagcgttcgtatttttgtaggtttttagggttggttattttcggttgtatgttcggtttttttttttcgagggtgaatttttttgttttatttttacggaaattttttttttcgttaggttcgtggcgtttttttcgttattttcgtcgtcgtcgtcgttattttcgttttatcgtttgtagggtttttttgcggcgttttggtcgtagagatttagttttgtttgtcgattggtttttcgacgtcgtcgtcgtgtttgagtttcgttgtttgttcggataagtagaatttcggtaggcgtagcgggcgtcgaggtttgggttttagtcgtggcgttcgtttcggcgtagtggggagtcgcgggcgtcggagaagcggtcgcgttgtttcgggttattgtatcggttgaaaaaattaaaagtaaaattaatatttagaaacgaagtttgcgtgttttcgggggtttcgttttgttttttttatggatatgggggtggggagttcgtggggttttagtttaaaggttttagttagtggaatcggagggggatttcggaggaatttgtttttgatgtttcggttttttggttttttattagaattcgtagaggattcgttttggagttttcgtgcgttttggtagaggtcggggacgttagagtgtacgtagttttttgcgcgtcgagtttaggtttcgggcgtagggaggatcgggttgagagtagggtgttatttcgtaaaagcgataggtaaggattgttttatggggagggagaaggagtaggaagtgatgtttttatttttgatagtatagggatcgggagtttcgatggaggaaatttttttcgggtaggacgagtagagggataggatatggtcggggattatgggattcgttgttattaagtatgggacgggtaggcgagagcggggaaggggatcgatggagttagaagttttgagtttatttttcgttcgtttttttttggagttttttttgtaatttcggtttagtcggtaatcggtttttttttttaggttaggggtgggggagagattttttttttcgaaatatttgatattaattttgtttttttggtaagaaaaataagttttgtttggaaaggggtgggtggggggcgtcgagcgagcgagggaaggagtaaggaggcggcggcggagtaaattttgcggattaggttttagcgttttcgttttatttttagtttcgcggcggtgatttgtgtgcgggggtttgtgattttgtaagtattaaacggttcgcgggaatcggtcgagtttagagggatagtgggtcgaagggcggtttaagataacgtagatggtttttattagttcggtcgggttcgtagcgttcgtcggttcgttcg

SEQ ID NO: 6516 - DNA, 3120 bp, synthetic construct; identical to SEQ ID NO: 6515
  misc_feature 1..3120: note = Description of Artificial Sequence: Synthetic polynucleotide
  source 1..3120: mol_type = other DNA

SEQ ID NO: 6517 - DNA, 7861 bp, synthetic construct
  misc_feature 1..7861: note = Description of Artificial Sequence: Synthetic polynucleotide
  source 1..7861: mol_type = other DNA
tcgttttttcggaagtcgtgtttttttttttttgttttttttattttcgagtttttgtatttttgcgttttcgattcggttttttatttgttttttttatttcggtatcgttttgttttagtttttttcgatttttgtttcgttttttttgtttttagaagtttgcgtttttgttttttttatcgttcggttttttggtgttttcggcgtttttttcgtcgttttcgtcgttttgattagtttgggttgtggcgttggtatcgttggtttggggatcggggtgtgggcgatggaagggggttcgagaggcgtaggggaggggttttttttttttcgtttttgggcgtttggggagattcgcgtgttagttatttgtcggtcggggcgtcgatttcgcgtttacgtattttacgtgggcgtttcggggcgcgtttttgtttttttcgagttttgaaagttaattatattgggaggggataggggtggggtgggagagggggtcgttgtttttatttattgagtcgaggtcgttatttcgtcggtagtttcgcgtaggtttggtttcgagttacgtttgttgaaatcgtttttttcggtttcgtttttattcgttttggtagttagtcgcgtttttgtacgcgtcggcgggggcgttttggaattttgaatcgttttacggggaacgggggtggggggaggggagcggcgcgggttttacgcgaggaaggaattttttgggttattgcgaaagattgaggtttagaaagttagagagagacgtgcgaggaggaagcggagagggtgtgcgaagttggagagggagtcggagcgttagcgaaagaggggagcgttggggaaggaggaagagaaggagagggggagaagagagacgcggatgttgggcgcgcgacggtagcgggcggaggaggggagcggtcgggaatttgcgcgtaggggaagttaggacggagcgtagtatcggtaggggagggttgtcgaggggttgtgtcgaggagttcgggtgggggcggttggatcgcgggtcgcgggatttatagatagtgcgaggcggcgcgggggtttttttttttatgcggggttggggcgtaggggttgggcggggcgggtgggcgtttgagcgcggcgcgggcgtatttttcgttttttttttttcgggtttatttcggtcgatcgatatttgcgcgggatttgttttcgtcgttaatatttttttaatgagttcgttaggtttaaagcgagcgcgatttgttttttagggtggattttttttcggtagatgtttcgggaggaggaggcgcgcggagttttcgggaggggggataaattttttttttcgaggggcgagaataggagatttttttttaaagtttaaaagaaagacgggtttttattcggtttttaaaaatgtatttttcggcggataatgggtttttttttgcgtttttgagggtcggcggggcgggtagggcggggattcgtgcgttttggtttcgtttgatcgattcgtatttttttttttcgtatttaggttcgggttttagagcgagggcgtaggagtcgcgaagtcggtcgttttttcgagcgtttttttgaagcgtattgtcgggatttggttttttcggagttaagtttcggcgtatcggcgagaacgaaagcgtcgtgcggggttttgggttgttttatacgttttcgtttttataggtgttttagtcgggtcgaagggacgcgcgttggtgttttaaggggaggacgaacggattttcgggtttgggtcgcggttttttttttttcggcgtttcgttttgagcggggtaataattagaaattagttaatttcgggcggttgtcgggttttgagattgttttgttcgtttcggtttagttattttttcgggtcgtttttgttttttttttttattttttttttaatgttttttcgtggggtcgtcggtttgtcgcggcggttttttttttattttcgtgggtttaggggaagagggtattcgggcggcgaggatgattttcgaagagtcgcggtaaattgattcgtttcgttcggagtcggggtcgcgtgaatgggggttcgggcggcggcggtagcggagaagaggataaagatgttttttttgaaagggggagggggcgcggagcgggaagcggggttatttatttttggttcggtttttcgggaagtcgcgtcgaagaaagggggtcgaggtttatttaagttttacgagtcgtttataatggatcgatatattgagggtttttttattaacgtttatgaatattaaagagatcgttaagtggcggttagcgggcgaggggggcgacggagtttgagagtttcggttcggtcgaggggagggggtttttgcgcgagtatatttcgcgtttgggtttcgcggaaaatgataaaataatacgggttattcgttgggaaagttcggaatgttttttttcgaaattttttttcggggagatgtgagtatagggttttgttttttattttaatgtattttgagattgggcgttatttacgggttttttttttttcgggcgggggtttaggtgggttttgtcgttagattagaagtataaaatgtgagcgcggtggagatttgggcgtattagttgggaggacgttttgcgtttcgtttttgttcggtttttagtattgtttttcgggtttgcgggttcggaggagaggaatgggattttttggtcgtagttcgagttcgtggttattgcgttagcggaatttaagtttttaattttaagtcggggtttaggatttaaacgttgtattttagtacggaggatgtatagatttgagggtttttcgtagtgggacgtggttttggagagggtaaaattttcggggttgtcgtggggtaaagtgattttatttaaagagagattaagtaaagaaattttagtttataaagtttaatttaaattattgtatagatagggatatcgaggtttagagaggaaaggggtagtttataggatatatagtagtttttatttttttttggtgttttggaggaattgaggtcgttttcggggtttgggagttgtcgtagcgtttggtttttggtagcgtttttcgacgtcgtttttttcgtttttagtattttgttttttttatttaggtttttttagaagttaagaagtaggtttcggtgaggtttttttgtaggagttatcggattttatacgtttttttagattcgagttttggttagggagtcgatgcgatttataagttgcgtcgaaaaatgagtggagggttcggcgattttaatttatttttttttttagtagcgttgttttttgttggcgttttgtttaacggttttgttttttgttaggtgtgtttttttttgggttttagtttcgggcggattcggacgtagggtttgaaggttagttatcgtcgtttttttttttttgcgttttaacggggacgggggatgtcggagattattggtaggaattggggattaggggtttggagtttggacgttaggtgtgagatttttttagttaaggcgcgttcgggtggtggaggggcgtttatgttaataggcgtttggatagggtttcgtttatgggaggttagttcgttgtttttttatttaagtttttcgcgttgaggagaaggtttagggagtttatatagtttagcggagattaattcgtgagtttgatttacgtcgagagggtttaggtatttttgttagcggtatttgaaattgtaggttggtgatgggagttagaagtgcggtaggtggggtgagtttttttatttagtatgttagggtttggggttcgaggtttgaggttgatattggggagtcgcgaagtttgtaggaagcggggtttttcgttgggtttagtagttatttgtttcgggagaggggatcgttgggtttcgaggtgtttcgaaatcgtcgtaaagtaagtttgtttttgggatgatgggtaggaggaatagaggagaggaagggaaagaagagagaggtagaggagaaagaaagaattaggaggtaagaaggaaggggcgtcgtaacgttatcggtttttcgaggttgtagtttagtaaggagtcggaaagtcgggtcgtaagtcgaattcgtattgaggtttttcgcggagttgtttgtagtttttgagggatttcgtttttaggtacgtttgtttttatttaggaagggtttcgggattttttttaatttttttatatttcgtaggaaattttttttttagagataggttgttagggcgatttttgttcgtttatttcgattttcgatttggtttcgtaagggtcgggagtttggttttttatgaagttgttttaggtcgggattagttttagtttcgacggtcgttgcggtttcgtttcggtagtttcgtgagttcgcggaggagtttcgtattcgatcgtgtatagcgatcgagttggcgcggttcgtatgaagcgaagcgtcggttttagtagcgtagtttgagtaggggattcgcgtggtaattagggttgcgcgcgagttcggggcgattgtggcggttcggggagtgtagggtcggagagggaagaggacgcgggttttggtcggggagggagagcggtgtagggttgggtcggttagtcggggtagtaaagtaaaggtgaacgtcgggttgggttaggtcggtgaatatagattaggtttgaggggagcgcggggttcgaagttaggcgtttttttttgtttagtttggtttttggagttttagagagtttcgtcgtatttttttttttttttcgtttttttttttttttagagtcggttgagtttttttttttgttttgcgttttttacggggagagaaggaaaaataggaggggggaggaaggattaggaaggggagagaggagtggaggggtattgtttggagcggttcgcgcgttttcgtttttcgcgttttcgcgacgaaggtttttcgagtttagtcgggtataataagtttgtttttcgacgttagggggttattaataattaattaggagggttattgcggtttttataaaggcgttgagattttgttaaggggaagacggtttcggtcgagtgtgcgagaggttagcgcgcgtttgagttttttgttgtcgtttttttgtaattattcgttttttatttattttgtatttttcgtattcgttttcgtttttattcgcgtttttttatttttcgcgtcgtttttgttatttttatagattttattatttttttttttttttttttttcgttcgttttttttttagtcgtttttttatttttcgtttttttttgcgtttttttttttttcgttttttttttgttttggttttttttttatcgtagcgtttttttttcgttttttgggtttttttttcgttcgtttatttttttcgtcggttcggtcgtttttcggcgtcggggagtttcgggtcgtttatgatgggtttcgtgttttcggttgaggttttggtgtttaagatcgggttgaaggcgtcgggattggcgttggtcgaggttattattttcgatattttgtatagttttttgtacggtcgttggcgtaacgtgttcggggagtagtttttcgaggataagagttattacgttagttttaagatagtttttatcgtcgaggtgttggcgtagttttttttcggcggtgagtttagtcgtcggagttcggcgtaattttttttttcggcgatttttattttcgttttggcgatgcgcgagacgcggttgggatattcggtttcgttgttattcgcgttaatttgggttttttcggcgttcggtgtattttagtttttttatgggttaaattaggacgcgagttattaagtagtttcgtagtttattcggtttaaggatcgatttcggcgatttcgtcgttcggtttcgacgttttcgtcggttttttttttttttttttgcgtttgagttggcgggttttcggtatttatagttttattaggcgtgtaatagtagttgatttaaaaagaaggggttttaaatttatttagttaatttgggtttgatttacgaaagtttttatttaaattaagaattttaaaaggtagtcggggttggggagggggtggagggagggcgggcggggagaaaaagtcgcggggagagcgagggagagaaagagagagcgagaaaagttttttttttttaagatgttttaagtttttattttttatttattaattcgtaaataatatttttttttggttttggtatttttgcgcgtcgtttttttttttttttttacgatttttgttttttttttaatttatcgtgaagattaattttatttttatttacgttatgttaattatttaattttttttttttgtaaggggaatttttcggttttttttaaataagtttttttcgtattgagttataatttattgttatagtatttttttagggttaatgaatttagaattagtaatttttttcgaatggagtcgaatgaatgcgattattttaatagcgtgataaattgttcgtcgcgtcgtaatggatatcgtttaattttttttttttagtcggttcgttcgtcgggtatttttttaggtagtttagaggggaattttgtaagatatggaggtcgtttttgtgcgtttcgtcgtttttagttttgtcgtagatgttcgataggggaattttcggggagttgggggtcgtcgcggttttttttcgtttagagagatgatatcggggtttgtttgagttcgggcgtcgttttttttggtattttagggtttgggagtagagagggattcgggcgcgttcggggttatatagcgagcgtagagtttggttagttgttgtcggtgtttttttggtatttttaatatttgttagttcgaggtttgtttttagcgttgattacggttcggtttttttgttagtgtttagagtttggatatatagtgggttttcggaagtcgattaggcgaaagagttttcggttggtttttatttttttgtaggatttggttttagtttttttgtgtataaaatcgttcgttgtcgttggtttattaatttttaaatttattcggggtagaggatggaagaagttgcgaatgttttgagaattcgcggagagattaaaaatttatttttaaaaatgatttttaacgtattattcgttttttagggtacggagggtttttaggttgtaaatagaggagaggtcgttgagttttcgtatattcgattttttttatattcgggtggtttttttggatttggggtcgatttgggtttggttggtttgggtaggatcgaagtcggggtttcggcggggaaggaagggtcgggtttcggttgtttcgggttttgatcggtttttttggtttcgtcgtcgtagaagtgtagaagttgtttagtttggtgttgtttgcggaggtgattatcgtttagagttttatttttggcgagggtttcggtattttttttaagacgtggattaaggcgggaatcgagatgggtttttttatcggtcgcgtgatcgtttcggagtacgtggatatttgtaagaataataattttatgtgggaggtacgcgcgggttggggtagaggggcgtaagggtcggcgaggggcgttggtcgcgggtaggattcgggcgttcggtcgtcgtcgtttttattcgggttgagagcggcggatatttttggtttggacgttttttgagtcgggattttaagtcgttcgagtttggagtttatttcgtttttaggttttttttaattcgtgtcgaaaattcg

SEQ ID NO: 6518 - DNA, 1434 bp, synthetic construct
  misc_feature 1..1434: note = Description of Artificial Sequence: Synthetic polynucleotide
  source 1..1434: mol_type = other DNA
tcgggtgtgcgtttttttagggtttttattgcgtatcgcgggttacggtagattattttagttttcgttttgttgtgtaggtgttaggagtgtcggttggtttttttttttttaagtaaggttttagggtatcgcggttgttttgggatcgtaggggcgtttttagttttttatcgatgtttcgacgtttttttggcgttggaggttttcgcgagtttggttgtttttcggagtttgttttgtttgttgggttttaggcgacggtttaggttggttgggattttcgaattatcgcggaaaagggttttagtaggtaggacggcgtcgtttttttgtcggtaatttttgttttaaagcggattttttgcggggatcggagagggatgtttcggcgtgaggatgggagaagtttcgggacgggagggtcgcgggtcgtgtttttagttggagttttcgcgtcgtcgtcgggtattttatgatttgggggtggtggtgtgttcgtttttttatgttattttgattttaatttttgggcggattggagtttgtagatttcgttgttagtagttagggggcggcggggagtcgagcgagaggaaaaatttatttattttttgggcggattgcgtcggtttcgttcggtcgagtttcgtttttcggtcgcggttttcgcgcgtagttcgcgtagcgtttagagtcggacggcgtttttcggtggcggcggaggagttcggagggacgtagtcgggtaaggtagggcgtagggcgggcggcgcgaggcgtagggcgcggcgggtagaggttatttggttattttttttggcgttcggggaaggtgcggcgatggtcggggcgcgcggggcggcggcggcggcgggcgggcggcggcgggtcgagggggcgcggggatatagttaggcgtttttgttcgtcgcggtgttcgtcgtttgaaggtcgtttgggcgcgggagtcggtgttagttcggagcgggcgttggaggtagttcgaggcgcgatgtcggtgtcgttgtttaagatcggggtcgtgttgagtattatggttatgattattaattggatgttttagacgttgttttcgttggtgggttttaatattattaagttttcggcggtcggcggcgggacgttggatcgtagtatcggcgtaagtgcgttcgtcggtcgttttggcgcggttttttttttttttttttttttttttttttggttcggagtttcgggttgggcgggcgtcgcgcgggattcgagtcgtttagggaggcggcggggagtagggcgggtaagggtaggcgtcgcgggtcggcgtagcggtggcgattttgtttttcgtttttttagtttgggttattttattttcgttcgcgcgtttttggggcggcgtttttttcgtttgggtttttcgtcgcggggtcg

SEQ ID NO: 6519 - DNA, 5053 bp, synthetic construct
  misc_feature 1..5053: note = Description of Artificial Sequence: Synthetic polynucleotide
  source 1..5053: mol_type = other DNA
tcgcgggttttttgggatttttgcgatttcgtcgacgcgcgttcgttttttttcgagtttcgcgattttttcgtttatcggggaaggagattttagcgtcgttgttttgttttttttgaacgttgtttttgttcgatttggagtcgtcgcgggagcgttttatgttgcggaaatattgtttttagcgttgtcggtcggcgtttttttttagttttttttttttggttcggcggttttggaattaaatttgggggcggggcggggtgagcggtcgttcggttttgcgggggtttttaaggtcgcgggcgggagggaagtaggggcgagcgttgatttgtattacgcgtatgtttaggttcgtttcggacgagagttgttcgcgtacgtggcgcgtcggtttgggcgaggtgttgtaagcgttttttagcgtttttagttgtttggcggtgatggtcgtgcgcggtcgtttggtcgtggtttcggtttttgcgcggcgggcgagcggtgaggcgcggtagttttttcggtttcggtcggatttttagtttttttatttcggtcggcgcggggacgtcggggttttaggtgtttatttttatttcgttttataggtttttcggaaggcgcgggcgttgggagcgattggtaaaaacgggtagtattcgggttggggtggagggggcgtcggcggagggcgggttttgtcgcgggggcgggggcggcgttttttttaaaatcgtatttttacggcgttttcgtttttagttttggtttttttttttaagtattttgattttttcgcgggtttttttttattttaagggtgtgggtatggtttagttttcgcggttaagaatttagggcgataatttcgattaggggcgaaaagtcgtatatttcggatcgaacgaagcggttcgggacgcgggtttgttcgtgatttcgtcgttttcggtttcggttttttgttgtttatatcgttttagtttaggtttttttagtgagcgtttggggagagaattttttcggacgtttttttgggcgtggttttagttttattttttttagattaggaaaggtgggagcgtcgttttttcggttgatttcgttgtttggcggtttcgtagttcgttttgtatacgagtcggttgttttttatgaggtagaattcgtcgttcgtggttagttgtcgtttgtatacgacgtaggtaaagtagtgtaggtggtatacgaagttttgggcgcggcgtattatttgcgtgggcgggatgtttagttggtacgcggcgtatttggtttcgaagcgtttgcgggacgtatagggtcgggtttagcgcggaagcgcgaggtttatttcgtttcgagcgggttggagagaggtaagcggttgtttgggaaggcggtttcggaggaaggttttgttcggttttgtagggtggtcgttagtttggtcgtcggggtagagttgtttatttttattgagaagggaattttaattttagaaagatttcggggagtttagtcgttattgtttgtaggatttatgttggatttgggaaggtgaattcggagggagaggatttatttggggttagttttttatattttatagttggagttatgaaggttattgggttagagtcgttgggtgttagtattaggaattaaaatattattaatttcggaggaattaagtttagtagaattttataaataggggtgtattttttttaatgattgtttttgtgatttaggtaataaattgtttttttttttaaataatatttgttgatgttttagttaggtttagttatttagggagtatttatggagaggttttatttttaatttggttaggttatagggtgttttgtttgggtgataggagtgggttgggattgcgagagacgtaggtttcgagggtttggttttggtgattgtgaggggaggagtttttggggtaggcgtgtttttcgtttttatattgaggtgaggtttcggggtttatttgaaaaagtcgtttttgtagtaaacgtttttttttcggttgaagtagcgttcggttagtggcgtgtggtagtcgttgtatttgagatatttgttgtgttagtggcggtttagagttttgaggatgaagcggtttaggatgtgttggttatagttagcgtatagcgggatttttgtgggtacgaggaagttttgggttatttcgtagattaggaggtagtgaagttatttttttattttaacgcgagttagtttttttttcggtttataggatttagggttgtcgaggggtttttttttttttatatatttttttttttagttagtttaagtggtttcgtaagtttcgggagtgtgtaggtatcgtattttatgttaggagttaaggggaaattgatatcggtttaaaaatgtgtgtgagtaagaaagtagtttaggttattttacgaggttgaatatttaattataaaatgttgttagtgttaagaagggtgtatgtggagtttaaatgaaaattttattttagggggatttgttttttgaagttcggtaggaaatatagggaaacgggtttttattattatttggagttggggtattttatcgggttttttttatgttaagcgttatggttattttttttagggatttttcgtaaatgtggttgttttgtttggtggttttgtttgtaggttttcggggtaaatattaatgttttttttattattgggtagtcgtaaaattatttatgagtggattggataagtcgatttattgtttttgtgttaggcgtgggtgtttttaatatcgttagagttatttaaacgtttggtttttcgttgtttttgttttttatattttatttcggtattgtaggttttttggaggaattatattggggaggtttaagggtgttttgtgggagtttcgagtttgtgagcgggttttttaggtgttaagggttgaggattttttttttatttagaaaaagtttttggaagagaggagtgttcgttgaagggatcgggatttattgatatattgtattcgtttttttggttgtggatttcgtcggttttagtttattttttagtgggtgagagatattaggaaggggttttttcgattttcggcggaaaaaattgggttgcgtttttttacgtagtggcgggaaatcggcgatgaatgcgtttcgtattcggtaaaatcgtagtttcgggtgcggagcgtcgaggattcgttgcgcgttcggggtttttatcgtgggtagcgatcgtaggcgaggattcggttcggagcggggcggttcgataggtcgatatagcgcggatttagtatcgcggatcggatagcgtttcggtcgtagttcgtcgtcggcgttcgcgtcgggtaaaagtcgttttagtttatttcgcgtcgcgttcgcgattttagttttacgttgtatggcgattttagttttggcgggggtttttgtgttagggatggcggggtcggcggagtttggacgttagttcgttcgtttcggttagttttttcgagcgcgggcgcgtagttttttttttttttttttttttttcgttttttagttttcgcggttaattttttttaggaatcgtcgaaaaataaataaataagtagggaatcgcgagtttttatagtttggatgtaatttttttttcgtcggtcggttttttttattttttattggtttcggggtttttttttttattttgcggttttagttggttcgggagtcgaggagaattgtttaggttttttaagaattaaagtgttgggagttagagtggtgttattaggaagttggggggtttggagaagagaggtttttttttatagacgggttttgagcggggataaatcgagcgggtgtttgtgggcgtagacgttgaaatttgatttcggggagatcgacggtcggagtttagttcgattttggtttttgtatttgattttgtttcgttggaacgtggaaagagttcggttggggcggtttttttggggatttttttgtttcgtggttattgtttcgttattgttttttgcgttttttttagtttagggagttggtttcgggttgtagaggttttttaagtttattttggattttcgagagttttttggtcggagtagcgtagtgttataattttatttattttttgataatttaggttaggggttttgtaataaatataggttgaggcgtttaggcgcggacgtttcggggttttcgcgtttattttcgtttagattttttagtttttgttagttttcgcggttaggttcggaaaggtttgaggattttttggttttttcggtgtagttattcggttcgggtatttatttcggcgtaggttcgtttttcgcgttagtagtgttagtagtaggtcgtttttcgtcgattttcgggtcgggtttagtttttcgcgcgtttttatgggtttcgtcgttcggcgtcgttattttttagtttcgaattttttcgggtttagcgacgttatttcgtaatagtttcgaatcggcgtttaagcgatttcgggtgttgttgggcgttgcgttcgcgggtcgttttggggttcggagtttttggtcgagcggagggcggagcggtcggggggcggggtcgcggggcggggcggggtcgggggtcgcggagattagttcgggttattgcggattttgagcgtttttgcgtcgggatttgcggtgtttagaggtcgtttcgcgtgttcggttcgagggcgggtatcggtaagggagggtttaggttagggtttttcgttagcgttcgtttcggtttcgtagttttttgcgtcggagcggtttagaggtagaggtttgagttggagtatacgttaggagggttaaggttttcgggagaggggtcgagaaggtagtagggttttttcgtcgttgaggtttggtttcgggagtagtagatggtcggcgggagtttaattcgaaacgtagaaggggtgagtgtggcgtcgagggttgcgtatcggaatcgtaaggtgtcggatcg

SEQ ID NO: 6520 - DNA, 6343 bp, synthetic construct
  misc_feature 1..6343: note = Description of Artificial Sequence: Synthetic polynucleotide
  source 1..6343: mol_type = other DNA
tcgttttttattgtgcgcgatcggaggggtcgttttgtagtgggcgttgtgacgggggcgtagttattgacgttttttggggtaatatttataaataaggtttaaatgcggttcgtttttttaattgcggatattagagggcgtagttttaggattacgtttttatttttttattttattcggaaaggggtttattcgagtcgatttcgtcgttattagtcgggggaggggaggttttggagttttacgcgggagttttcgtcgcgggaattataattacggttaagtttttttggttcgttcgttttatcgtagggagaggacggggggacgggtaggacgggcgtttggatagttgggtttttttcgtaggtgtttttgatttcggtatggaggaagcgttcgcgttttcggtttaggttcgtagttagggttgtttcgttcgttgcgttttaggtaagtcgggttagcgtgggggagtagcggggtttgggttgcggagggggtcgttttgattcgcgtttttttttagggtaaaagtttcgtaaggtagtgtgagttggagtcgttagtttggggattttttttaagatgattcgtacggatttttcggatttgttggtgtcgatcgtgtattaggatattaaggtggcgatttcgggattcgcgtttaagtgttcgttatgtgagcgattcgtggttcggtttgttgagttcgcgttttttaataagcgttattgtcgtagtttcgattttttggaggcgttggacgggtcggttatggagattttgtcggagttatcgtcgtcggagttcgttgtgtcgcgcgttcggattcgcgaagtcgagttacgtcgtcgcgttcgttttaagagtgcgtttcgcgcgttttcgggtttgacgttcgcgttcgtttcgtcgtcggtgttgtttcgtcgagggcgggaggtttagcgtgcggcgcgggtcgaggtatcgtcgcgtcgggagttcgcgtattcggcgtttcgcgtttttgttaacgagttgtattttattaagttgtagtcgtagcggggcggtttcggtcgcgtcgcgtttttgtgcgtcgtcgcgggtcgttgcgtatcgttcgagttattcgcgggtttcgttttttacgtgcgttgtcgtttggatattaagttagacgacgtagtgttttagtacgttattcggggttcgcggttttgcgggtttatcgaggtcgcgtattgggttcgtttcgtttcgtagttttacggttttacggtgttcgggtttcgttatatggcgttgtcgcgtatttcgacgtttagcgatttatattgtgcggattttcgggcgttttattgcgacgggtttttgtttgggtttcgggattacgtcgagcgtcgtagtttgttttttattatttcgtcgggttttatttagtttttttatatagaggagttttaaggttttcggggtagttttgtagttagtttcggtttaattttcgacgtttattattttaggttttattcgttcgaggagttttcggggtttagtttaaggcgtatgggcggttattacgtaggagaggtgcgtatttttttaatttaggaatcgttttttcgtttttattatggggaggttttacgagtttacggtttgttttacgggtttcgttatgttttcgaggagtttcgggtttattttatcgttcgttttttttatacggaggatttcggaaggtatcgcgagcgtgacgttttggttcggacgtattcgtattcgcgtagtagttcggtttgggcggattggggttcgcgatcgtatcgtattttgtaagtggtgtcgttttttgatttcgattcgttgttcgttttttggtacggcggtatcggtattagttcgtttcggttggttatcgatagtcgttattattcgcgtttttgggataatattttggtttcggggtcgcgtcgagaagattcgttgggtcgcggtcgtagttacgagaatttgttggggcgcgaggtgcgggagtcgcgaggcgtgtttttcgaaggtcggcgttcgttcgtcgtcgtgaatttgtttattttttttagacgttacgtcgtattgtttttgttcgagacgtcgttgacggagaagggtcgcgcgggcgagggtttgggtcgtaattggtacgtgacgttcgagattattattattgataatgatttgcgcgttatcgagcgttcgagcgttagggtttgggagttgttcgggggtcgtacgcggttatttttttacgcggttttcgacggttttatttttggtcgttagcggagtttagagtagttggacgagtttattacggatttggttatcgattcgcgatttatcgtcggttaggttttagagttcgcggtcgattgtttgggtttttaattgcgtcgattgttggattcgcggttcgcgggtttcggggttttcgcgttggcgtcgttacgttcgtttttcgtttcggtcggtagcgtcgaggagttcgcggtttcgggagaggcggtcgacgcgtttttcgaatttagcgtcgacgaggacgatttgatgatttgttttaatgcgcgttgtcggcgtatcgagattatgtttaacgtttgtttttattttaagttttgttatagttgttatatttattattgttcgcgtttgtgtcgtcgcgaggattgggacgtttataaggcgcgttgcgtgtacggtcgcgtgggtagcgtgtgtcgttacgtattgtagttttgtcgcgatagcggttcggtgtatcgcgttttttcgcgtatcgcgcgtgtcggttttttgtcgcgcggtcgcggcgtgttttttttgggttttttaagtttaggttcggtcgataattttttgcgttttggtttggaggggttgttgttattttttatttatttatcgttgcgtgagttggttatatacgcggcgtttttgggtagttacgcgcgcgagttggcggtcgttgggcgtttttacgaatcggtagagtgttttttgtttagcgtgttcgtggtcgtgggattcggtatcgcgttatcggggatatcggttttgttcgcgttcgcgttacgtagttacgggttaatagtgcgtaagttcgttaaggtagcgttggcggtcggtagtttcgcgcggtcgttttcggcgcggagtcgcgagttcgatatggagacgttgattttgacgttatcgtcgggtacggcgggtttggattaggacggcgaggcgggtcggcgcgcgcgcgaggtggtttttatttatatttagcgcgagttgcggttgcgcggcgtttttttgcgttacgagttttcgcgcgtttacgagtagttttgcgagttcgtcgaggttaataggcgttttacgtttattattatttattttacggatcggcgtatcggtcgtttttttatgtgtatgattatggtcgttttcgagtcgcgcgcgttcgattgggtggttagcgttaatttgttggacgatattatgtgaggcgtcgggtttattaggtttagtttaggcgttggttcgaattttgttttgtttatttaggtttcgttcggtttatttagggtcgttttcgagtttcgttagggttttatttcgattttttttaggtttcgtttttaattttttagttttttaagtttcgtttagttcggtttttagtttcgtttaggtttttatttttcggtttttcgttttcgtagtgttttttataggtttttcgtttttttatttttagtaatttttttttttttttcgggtttttttttttttttagttcgttttcgaggatttttagaagaagtcggttttcgttttcggtgtttttcgttgggaggcggggtgggtttgaggatcgtcgagttttgtttttattcggaggggttattattgtatagattttattcgtagagattcggttttcgtcggttcgcggggttttcgttggagttttttcgatttcggttttttttcgtttagaagttcgacgtaattaaagtttagtttgttattttaaatacgtttcgtttcgtttttcgcggttgtgttgttttttcgttggagaatattttggtcgatttttgtgcgttcgtgtgcgcgagcgcgtttcgtcgaggcggtgggtagggcggacggtgcgtagtgcgttttcgttggtcggagttagtatattaattacgttacgcgttttgtcgttttttcgtttttagtcgttgtagtttgggttttgtaggagttgggaaaaatcgtagggaggtttttaggtcgatatgtaagttttttagtcgaaggggtaggggatttgaataggggaagtagagtatttgggtttggttagagttgatatttggttaggagaggaaggattaagggacggggcgtttttaggtgggagtttggagggtaaagcgtggtgcgagtaggtgagggagagagttagttggtaagcgtggaagtttattcgagggggtttgatttgtttcgagaggttttcgtatattcgttttggtcgtacgtcgtattgcgggcgtggaggcgtaagttcggcggttcggtttttatttgttttttaagtgtattttggttcgcgtttagagttttttggagggtggggtatgcgggagaggggtggaggttaaacgtaagggtttttttggagtttttagttttatttcggagttaggggagggggtattaagtgagagaaattgggtattttcgttttcgtttttgttttcgtattcggtacgtttatttcgttttcgcgcgtttgtatcggttaggcgtttcgtttgtttattcgtcgtcgcgtttcgcgttttttattttagggtttttgtattcggttttatttttgagggtcggtcgggaacgtttttggatcggaataatttttagggggtaagagttttcgaattaagtaaaatagaatttgaatgtagcggttgtcgttgtttttttgtatcggtagcggggttggggacggaagttttcggtcggtggagaggagaaagggagaggttttcgggcggtggacggggaagagagggagtttttcgggcggtggagggggtggagagcgaggttttcgggcggtggagagcggggaggggggaggttttcgggcggtgggagggggagagagggaggtttttgggcggtgggggttacggggagggtggttttcggattacgtgcgggataggaggttagggttggtaagttttttaggtttttttcgttgttttagtttcgcgggtcgtttaattgtttcgttttaagggtgttatcggatttcgttggagaggaattttttcgttggttggattttattattatttattttcgattttacgttttttttaagcggggttggcggagtcgtaaggcggtaaggaattggattgcgattggttagtacgtgtttcggtcggcggtataattggttgaggcgttgggttttgggaagtatttttcgacgggattggtcgtcgttttcgtagagttcgtttttcgtagtataagcggttttcgggtcgggtgggaggaggggatttcgggaggaggaatatggcggtggcggatttcgtttttatttttgatgtggatatcgatttcgacggcgtttttaagtatgtgttgattcgagtttattcggtttttcgtttcggggtttcggttgtagagagtaaggagatcgtgcgcggttataagtgggttgagtattatggtgagggcgggatttgcgggtatgttaggggtacgtttggcgaggcgggggcggggttggcgggacggagacggggttgacgaggtaggggcggggttggcggggcgggggcggggttgcgggtcgtagcggattgcgttttgtttcgagttttgtttttgttaggtttgatttaggttgaggttttgggcgggaagggcgtgatacggtttgatattttttttagtagttttttagttttcgcgtttttttcggttttattttttttcgtttatttatttttgttttagttttaaggggtttcgttttttttggggaaggggttgtttagagttgggattttagattttttcggttgggagtttttttcgcggtttttaagggcggttagggtacgttttgaggtcgtttttttattttagcggatatttacgataaagtgtcgggcgatatgtagaagtaaggttgcgattgtgagtgtttgggcggcgggcgtattttttattagagttaggataagaagatttacgtgtacggttattttatggtgagtcgtagtttcgtttcgttttgtcg

SEQ ID NO: 6521 - DNA, 1089 bp, synthetic construct
  misc_feature 1..1089: note = Description of Artificial Sequence: Synthetic polynucleotide
  source 1..1089: mol_type = other DNA
gcgggaaacgtcgttttttttggcgtttgagatttggggttttttttttatttggttttttcgttttcgttttagtttcgtgcgttttaggagggtatcgtcgagcgtcgggttttcgtagggttcgggagatttcgcggatcggaggagggataggattttcgagttttgggggcgggaagggagggtggaaggaggaggggagcggggttggggaaagttggagtttcggtatttttttttcgggttaggtcgttttcggggttttgcgttgcgtttttaagtgttgggaagatttcgcggggaaaggtttgaggacgcggtcggttggtataggtgtggcggttttagagggtcggggagaatttatggtttcgaggttgtggattagaaatgtttttgattagaagttgagaatttttggttagggaggtggggcggcggggaggggtcgttaagtcggtttagagcgcgtttatttgcgttataagggagaagaggtgtttttcgttttttttcgtttatcgtcgttacgatgcgtcgcggatttcggcgatttagttcgggtagaagcgcgcgttttttttttttagtttcgtgcgtcggtttttgtttcgttagtttcgttatggttttttatttattttcgcgggagcgtttttgtttttttattttgtattttttttagagtcgcgcgttagtttttcgtttcgtggaagcgtttttttttcgatttcggttgattttcgttcgtcgtttttttcgcgggtgcgcgttcggtttttttttcgttcggggcgggtttgcgtgggcggtgtttcgggtcggcgggcggagtttcggttttttagttttgcgtttcggtggagttcgagtcggagtcggtagaggggcgcgggcgcggacgcggcgtttggcggggttttgggaggttcggacggggttttggcgttgagttcggtcggttcggagcgcggatttagtcgtaggggcggcgatgggtatcgagggattttcgttttcggtcgtttttcgcggacgttagggttgtttgttggtatttgcgcgggtgagtgcggttttttagcg

SEQ ID NO: 6522 - DNA, 1020 bp, synthetic construct
  misc_feature 1..1020: note = Description of Artificial Sequence: Synthetic polynucleotide
  source 1..1020: mol_type = other DNA
gcgggcgtgaggtttcgttttcgtcgttttttgttcgtttttagattcgcggttcgtttggtcgttttatttggtcgatggcgttggtggtgagtataggaaggttattatagttttaatttttgaggtaatggttgaagttcggcggggcgaagtcgttgtacgaggggtcggtattggtggcgatacggttggcggcgttggttgttagggtagcgttggcgacgttgacgtcgttggtattgggaggttgtttttagttagaggtattaggggggaaggtttcgtagtggtaatgtagcgggggcgttagcgtgaagatggggttcgaggttatgtttagagttacgaagagtatcggtaggtagtagaggtcgagttgtagttgttggtcgtcgtttagcgtttttatttgggcgagtagcgttttaaagttgagggggtttgggggtacggttagcgataggttgttgtttagttcgtcgtcgttcgcgtttttttttttttttcgttcgcgttttcgtttattttgtagttgtttcgtgggtatcgtattttcgagggtttcgatttgttgttggggggtagggggtggtaggagaagggtgaagcggaggaaatcgtagagtaagggtagggggtaggtgggagggagggttaggaaggtagttaggggcgagggatgcgtaggaggaaaatgttagacgtttcgcgggggcgggggtgttgggagaggatggcgtcgttatttggggttcgggtatttatttcgttggaggtgggggtgatttttatagtgttgtcgattttgtcgtcgttttcgttattgggttcgggggtttcggtggttattcggggagttagtttgtcgatcgtaggggttttgtcggttcgcgtcgaaaggatgcgttgttttttggtttagttgcgcgtcggttgttcggatatagatagttcgaagagatttcgttttgtagttttgtagtcgcgggcgtttttttggtttttgcgatttttgcg

SEQ ID NO: 6523 - DNA, 6343 bp, synthetic construct; identical to SEQ ID NO: 6520
  misc_feature 1..6343: note = Description of Artificial Sequence: Synthetic polynucleotide
  source 1..6343: mol_type = other DNA

SEQ ID NO: 6524 - DNA, 1109 bp, synthetic construct
  misc_feature 1..1109: note = Description of Artificial Sequence: Synthetic polynucleotide
  source 1..1109: mol_type = other DNA
gcgaagttatagtcgtatagttaggggttttcgtttagacgtagggagcgtagcgcgggtagcgcggttagggcggttacgttgaggttgcgtaggttgttgtcgttgagttttagtatttgtagcgattttagggtttcgaaggcgttttcgtgtacgtttattaggttgttgttagttaggttaagttttattagtttttcggtcgagcggaaggcgtcggcgtttagttgggttaagttgttgtagttgaggtcgaggaatacgagtttggtcgagtcgttgaacgtgtttttttttagcgagcgtagcgagttgtttttgaagtttaggtagattaggtcgtcgtagaagatgaagaagttttcggggattcgttggatgcggttgtcggttattagtagtttgcgtacgtttagggggaaagggtttggtacgttgggtagttcgcggtcgcggtagtttacggtgtgcgggtcggtgtaggcgtagttcgcggggtacgcgtgttcgggcgcgagtagtagtagaaggttgtagagttcgagcgtcgcggcggcgtaggttggggttcgggggcgtatggtcggggggttcgcgtcggtcgcggcgagaaggaagcggttttcggagcgagttttggcgcgggacggcgcggtgaggtattggttgtcgggcgcggggagttagagggcggttcgggcggggagggcgtgcgttcgggcgtgcgggggcgatggagcgcggcgcggacggattggggagtcgggatagtagggatggagaggggaggggcggggagggaggggcgagggatttattaaagggtttattcggataggaaattaattcgttagaaaaattttttgggagaggcgggagcggtaggggtggtcgagtggtcgtcgttaaaacgcggttttattttggtagttgattttcgagatttggtagtaagacgtcgcgcgtatcgggcgggttgtattcgacgtttaagtttagttattaagtttaggagcggtttttttaaggcgtgtttcgggcgtgcgttttgttttttcgcgttcgtttggtgttaaagtacgttttttgtacgttattttatgtcg

SEQ ID NO: 6525 - DNA, 1109 bp, synthetic construct; identical to SEQ ID NO: 6524
  misc_feature 1..1109: note = Description of Artificial Sequence: Synthetic polynucleotide
  source 1..1109: mol_type = other DNA

SEQ ID NO: 6526 - DNA, 1384 bp, synthetic construct
  misc_feature 1..1384: note = Description of Artificial Sequence: Synthetic polynucleotide
  source 1..1384: mol_type = other DNA
gcgggagtattagcggtttacgtcgaggaagataggcgtttttttttggggtgggtagcgtaggtttggtttgcgggtggggggtggagagtgagaggtacgcggggtattagtttagtttttttttggggatttcgtattcgtagtttaaggaatcggtggagtacgaattttatttttgagttggcgtaagcgttttttttttatggagatttatttcggtttttttttgaggttttttttttaagtattttttttttcgagtatttagtatttttttaattttagtacggttcggggtattagttttttagggcgggggttgttttatcgtttaagggaggggatagagggtcggtttcggtttaggcgatttttgtttttcgttaggggcgttattttggttttttttcgattgtcgttcgtcgttttcgttttttcggggggtgtgttttcgaagtacgggggcgcgggaggttaagggtgtttttagttttcgatcgagattttttttcgagtcggcggcgaatggtaggttttatttaaagagtgtttggtggcgcgcggtgttttttttggagtagttttcggcgttcgttcgtcggggtttcggcgatcgttgttttttttttttttttttttttttttttttttttttcgtttttttttttcgtcgtttcgttatcgtcgcggttagggttggaggcgtcgttgttatttttgtgtcggaggaatcggcgttgtcggtgtttgggggtcggggcgcgggcgaagtcgggtcgcggaggatataataggtagagtcgggggtgttcggtcgcgcgtttttcgcgtattatgtagttttttgttatttttttcgtttttaggttaaaattttgagtatgatggaagataataagtagttcgcgtttcgtatcgatggggcggtttagtcggttagttaggaggtgattaatttgcgagtcgaatttacggttattaatcggagattggcggaattgagcggcggcggcggtttcggttcgggttcgggagtcgcggttagcgtttcggcggcgggggattcggcggcgacgaatatggagaatttttagtttggagcgtaaggtaggatcgtttcggcgtttagggcggaggaaggcgagtagagtacgttcggtttcggaggtggtcggggattcggggttttttatattcggggcgaaatcgttttgtattttggtttgtaatttttttcgttcggcggtggttatcgttgtttttcggttgggagttgtaggttgttgttatttacgaaaattcgagcgtagtgtgtacggggttatacggttatatcggtttcggttagtttgagcgaggcgtagtcggcgggtttttttcg

SEQ ID NO: 6527 - DNA, 1384 bp, synthetic construct; identical to SEQ ID NO: 6526
  misc_feature 1..1384: note = Description of Artificial Sequence: Synthetic polynucleotide
  source 1..1384: mol_type = other DNA

SEQ ID NO: 6528 - DNA, 835 bp, synthetic construct
  misc_feature 1..835: note = Description of Artificial Sequence: Synthetic polynucleotide
  source 1..835: mol_type = other DNA
tcgtgaggtcgtgtgtgagtttttgcgtgggtcgtgagtgcggtagggagcgcggtgttcgggggtcgtttgtcggtgtgtttgtgcgtgtttgtgcgttagtttttgtttttgcgagtgcgtatttttaggatcgagtttgtttatatgagtttgtgtttgtgtgtgtgcgttttcggttttgcgtgtgtttgtgagcgtttgtcggggcgcgtgtgtgttcggaatttcgcggtggtgtgcgggtgtgttcgtgtgtttgtgtacgtgtaggcgagcgtttttatttgtgtgtgtgtatttgagtttgggttatgtgtgatttagggattagtttatgagtttgtttgtgtttttgagtcgatatttgtgtgtgatttagggacgagtttatgagtcgatatttgtgtgtgtttgggtgtttgtgtcgtggtgtgtttttgtaagcgtttgtgtttgtaggtgttggagtgtgtagttgtgggaatgagtgcgtgtgagtgtgcggaaggggtatcgcgcgagggagcgtcggtgcggaaggttaagcgagttcgcgttttttacggacggtgtcgttatttttttttttcgtttcgcgttatgtgtttttgtgtgttcgcgtcgtcggggtcgtttttgggtttcgggagggggttgagcgagcggttttttttttttagggatttcgggttcgtcgttagttttgggtatattcgtttttttttttagcggtttcgttcgttgatttacgggtattcgatgggtattcgggaggtaatggtcggagaggatgggtagttagcgggagggattgagtggcgtcggttttacg

SEQ ID NO: 6529 - DNA, 2248 bp, synthetic construct
  misc_feature 1..2248: note = Description of Artificial Sequence: Synthetic polynucleotide
  source 1..2248: mol_type = other DNA
tcggttttcgggcggtcgtttaggaggagatttattcgttgggtttttgatcgttttttaggaaaattttaagtacggaaattaagttcgatatcggtttcggtattttttttacgtcgttggtagtttaaggttcgttttgaagaagagttgtagaggaggaaggtggttttggttcggcggagttcggttcgtttggtgttaggcgttggtgttggcgtcgagtgaatttaggcggtttaggtgttcggtttggtggcgggcgtagggtttgcggtgatggaggtttcgttttagttcggttaggtttagttttgtcggtcgtcggttcgggatatgcgcggcgtttaggtttgtagggtgttttgggcggttataataaagttaaagatcggagtaagagttttcggcgagaagagacgcggagaagtcggagtttcggaaagtcgcgcgtagtttcgttagtcgtcgttagttgcggaggaattcgggttaattttaaaaatcgttggcgtttttgggtcgtttgttcgggtcgtattgggcggtttttatcgttttttttttttatttgtattgttttaggcgggagagaggttttggtttcgagggattagttgtagcgggtagcggggttttgtttttttaattttcgttttatggtacggggttgaatcggtattatcgaggttaagggcgattattaggagagaagatcggttgttttcgttatgcgaatttgtgttttgcgatttcgttgcggttgttcgagttatgttagaggtggggacgaagggttcgcggggagtgaggtgggtagaggagagaagttggcgttttttttagggtttttattttgcggagaagttcgatcgtagaattcggtcggttgcggtttatgttggtagttatcgcgaaatgcgttttcgattcgggatcgtattggaaattttcgttatattgtgttaggtttgattttttaggagcgcgttaagggtttttcgtttattgcggttcggcggttttttttttaataagtaaggttcgtgatttcgattttggaattttgtttttatagggaggagtttttggtggttatcgatcggtttagtagttcggagagaggttaggaaaattttttcggaacgcgttgggaggtttttttattttcgttttttttcgggcgtacggagattttcggttttagggagcgtttatcgattcggatgacgtggggtatttcgcgcgagttcgggatttagaaggcgtatacgaggagttcggtttagtatttttaaattagatttcggaggcgtcgttagggagcggttatcgttgggcgtcgtcgagcgtgttcggggcgcggtcgtggcgggttttttggggcggtagttttaggcgcgggcgcgtagtagtttcgaaggcgtcgtttggtttagtcgttcggttttcgagcgtcgttgtaagtggggggcgtttcgcggcgtcgcgtatattttattggggggtcgtttcgtcggcgttcgtttcgtttggttgtcgtttacgggttgttcgcgagcgaggtttttgggtttcgttcggatttcgttcggattcggtttcggtttcgattcgcgtcggttcggttttcgcgcgggtttttatttgtttcggttgtcgggttttggcgggcgggttgtacgcgttttcggtcgttttttttttagtcgtcgtcgatgttatcgttcgggttcgtataaagtttcggagtggagttgtacgcgcgtatatttttttttttagtttttttttttgcgttttgtttttcgtttttcgcgtcgttcgtcgttcgcgtttttttcgcgtattttttcgtgtatatatattttatatttatatttgtcgaggcgtatattcgcgcgtttatatttgcgcggggggcggggaaggggattttggttttattgtagggggacgttcggagaacgaggatttttttcgttttttagacgtttttattcgtttcgtcggttttagttttttttattgcgagggtacggagttcgggagttaggcgtggagcgcgagagttggtatcgcgagttgggagacggcggtagtttagcggtcggattagttggaggagacgcgttcgtcgggagtagcgagatcgggagttcgtcgtttgcggagtttggtttcgcggtttttacgcggcgggcgttggttggacggcggtggtagcgggagattgattcgggaatcg

SEQ ID NO: 6530 - DNA, 3541 bp, synthetic construct
  misc_feature 1..3541: note = Description of Artificial Sequence: Synthetic polynucleotide
  source 1..3541: mol_type = other DNA
tcgcggggagtaggggtcgcgttatgcggcggtcggtttgtagtagggtagaagttttttttcgtttgggtgtgtgggagcgtagattttttcggcgtggtcgggaattaagtcggggttcggatgaaacgaaacgaaaaatgaatattcgaattttttttgttagttttttttttttttttttgtttttttttggggggagggtagggtagggaaatataaggggaaaaataaattaggttagattaaagttttggttattttttgtttttatatatagacgcggttttcgcgatttttttttcggggtttcgataaatatagtatattgcgatttaaattaagggcgcgggcggagttagaaggattttaggagtcgagaggttttacgaataaataaaaatcgtaaaaaattaagttcggagaaaggggaaagcggggtggggcgtatttttataggagagaagaggcgtgtagcgaataaagtgatagttttttattttggattcgtaggtttaggagtttacgcggggagaggggatggagaatttttttcgtttcgttttttttttcggggaatttttaatttcgtattgcgttatttgtcgttttggggaggtcgttgtcgggattcggtttcgaatagttcgggggggtaggggcgggggtcgtcgaggggatgggggtagagagtaggcggcgggtaggatgttcggggtgagttggcgagtttcggattttcgtttttttttttcggggttcgggcgacgtagtttatcgggttgttttcgtcgtttatcggagagggtcgttcgggtgtttggttttgttcgaaagtttttgggtttttttttttttttgtaaaatttaaagtaatcgaataaaaagagtttaggtcgcgcgggcgggttgcgcgttcgcgttttgtagcgcgtcggcgggggttcggttcgcggggttattgtattgagtcgggtagtgtgtggtggtggtggtggtgtagcgtcgtcggcgggggcggtgggggcgcggagggtggcgatgcgtcgttttcgttaggttttagttttttaggcgcgtatatatcgtttatgggcgggtggttcgcgtcggtcgtaggggttatgcgtttttttttttgtcgtcggttgtagaattagacgcgtattatttttttttttagttgtaggttgtttgttaagtcggtgatttcgtgcgtcgagggtttggggtatttgagaaagtggttttcgagcgcgtttttgatttttatttcgatggacgtgcgttttttgcgtttgcggttttgcgtcgcgattttgtttaggttggtggggttgtcgttggacgagtcggttttttttagttatttgttgagtagcggtttgagtttgtatatgtttttgaagtttagttgtagggtttcgaagcggtagatggtggtttgcgagaatacgttatcgtagagcgtgtttagcgttagttttacgtcggtttgcgtaaagtttagtttgatgcgtcgttgtttgaattgtttggcgaattgttttaggtcgttcgagttgggcgtattttcgttcgagtgttcgtttatcgatgagtcgtcgtcgttcgcgttcgggtgtaggtgcgtcgtcgtcgcgtgtaggtcgttcgcgtgtgtatgttcgtgtgcgtgttcgtgggcgtttagatgcggcggcggcgacggttttagttgcgtttcgtggttattttcgtgtagcgcgtggtgtaggttcggtttcgcgtcgttatcgttcgtcgttagtatttcggttaggtcgtcgtcgtcgtttttcgggtaggtcgtttgcgcgtatagttcgagcggttggggttggtggttttcgttggtttcgggcgagggcgatatggtcgggtttaagtggtgcgttgtgttgttttgcgtttatgtcgcgttcgcgtgggtcgttttttggtgtattaggcgcgcgtggaaattttcgtcgtcgtcgtcgtcgtcggttcggtcggtgtcgtcgtcgtttgttttgtcgtgttttaggtgcgggtcgtcggtttaatcgtcgtcgtcgttttttttcgtgggtagttattgggggtgcgttaggtttacggggtggttcgcgttcgcgtttagttattcgtggtgtattagtttttgtatttcgcggtacgcggtttttgtatgtaatcgtttcgcggtcgtcgtcgtcgtcgtcgtcgtcgtggcgttcgggtgtataagcggttcggtgttttcggtttcgttatcggggtttcgcggtaggtattgcgcggtggtggttatgtcgtttcgcgttttgcgtcgcgtcgtcgtcgtcgtttcgtttcgtttgcgggtttcgtcgtttcgtttcgtcggtttaaagtttcgattcgttcggcgtttcggagttttatttcgttcgtcgtttattggttgttcgcggagttgtttttcgttttttttgttcggttttcgtttcgcgcgttcgttcgttattttgttcggttgtttagagttttttattgggcgtcgttttcggggtttcgcgcgtcggtcgtgttgattggtcgttggggttttatttacggtttttttatcgttcgcgtatatatttacgtttcgggggcgcggtcgttacgtggggagtggcgcgggggtggttttgggatcgtattttttttcgttttggttgtgtgggtttcgtttttttttagcgttggagatttcgagttcggtcggttttatattttacgcgagttgaattttcgttcgtatttcgttcgggtagtagggattgtcggtttcgggaggcgttcgggtttcgagaagcggtttagtttcgcgtttttttttttttagtatcgttgtcggcggattaggattttcgcgggttttggcggttgcgagcgcgaggcggcgcggattcgcggttcggtttcggcgcgattgtttatcgcgttcgtttcgtttttcgcggttgttagcgtgtattgggcgtttttcggcgcgtttgttcggttcgtttcggtttttttttttttttttttagttttagcgttataatttcgtcgattttttttgttttgagagcgcgttcggtgcgggcggagtcggacggattttggttttacgtttcgcgcgggtatattttttttcgggtattgaggtttaggtgagtatcgcgcgggtagttggggttgggacggcgggcggtagcggttttatagttttacgcgagtttttggtattcggtcgcgtttcggggttttagaaggagaagatttcgaggtggagattgtggtttcggggaaaacgttgttggtaagggcgttagttgggggtggacgttgggtttaggggtatttgatttgcgtcgttgtagttttttcgtttttttttttagtttgaacggtttatcggttgtggtcgtggtgggattacgtttcgggagaggagaaggatgggtttagggaaggggttcgggttttttagaaattcggcgtgtaggtcgggagttgtttagtttcg

SEQ ID NO: 6531 - DNA, 1513 bp, synthetic construct
  misc_feature 1..1513: note = Description of Artificial Sequence: Synthetic polynucleotide
  source 1..1513: mol_type = other DNA
gcggggcgggtcggggcgtcgttgcgggacggtatttaagggcgcgcgttgcgtgttgttttcgcggtttttcgggcgttatcggttcggttaggtttcgggagttgttcgttttaggtcgcgggggcgtttcgggttcgtaggattcgaaaatttttttttcgggtcggggcgggtgagtaggcgggcgttgggttgcgttcgacgtttttttaggtcgtttaggagagtttcgagggttgggagaagtcgtcggggcggttgggttggacgagcgagtttaggggttaatcgtttttattcgtcggtcgcgttgtagagcggtgtttttagggttggggtttgcggcgatttcgttgggaggaagggagagcgagaattgagacgtttgttttaagttgtttggagttaaaggttttcgagagcgtggtcgtggggttgggtcgttggagtggtcgtttcggtttagatattcgtattttcggcggtgcggcggtttttacgcgcgtatttatttagcgcgttcgggggtttgaggtcgtcgttacggcgtttcgtttcgggtagtagtaattagtacgtaggtatttttggaataggcgggattgttttttcgacgcgcggtttgcgtttaggcggcggaggggtttagtttttttttagttttcggttttagggcgtagggttacgagttttcgtttttattttcggtttttggtattcggcgtcggtttcgtcgtttttttttatacgtatttttggtagggtttcgcggggcgttttaaagtttgggggtagtttttaggtgtttttgggaagggaaagaaaggttataaagtaaaagaaggagtaaagagaaggcgagggaggagtaggggttcgggttttgtggattcgtttgggttgggagtggggatattgagagggttgcgaaggtttcgggggtcgcgcgtggttcgtaggtttatttttggttcgcggttgttttttttttttttttttgggtttttggttttttttagtgttgttttttttttttttttttaggtttttttttttttcgcgtagggtttcgttttggggattaagagaaaggagggaggggaaaggggaggggaagggaaggggcggaggagaaagagggacgatttttttaaaggcgggtgttgagttttagtttaggattttcgggtttaattgtttgtggtattttttatattttttattttcgtttcgttttggttttgttttagttttcggcgtttttttttttcggatttcgttgtatgtttcgtttgcggtggttcgatcggtttttttcgggagttttttttttttcgttacgttttcgttttttcggtcgttttcgcgtttttcggttttttttttattagttttatatttgttttttttatgggagggagcgcgcgtttttcgtttagcggggtttttagtagagtttttttaattttcggcgttttttttatatagggttcgttgggtcgtttttgcg

SEQ ID NO: 6532 - DNA, 3541 bp, synthetic construct; identical to SEQ ID NO: 6530
  misc_feature 1..3541: note = Description of Artificial Sequence: Synthetic polynucleotide
  source 1..3541: mol_type = other DNA

SEQ ID NO: 6533 - DNA, 558 bp, synthetic construct
  misc_feature 1..558: note = Description of Artificial Sequence: Synthetic polynucleotide
  source 1..558: mol_type = other DNA
tcgagagcgtaggattattaagagaggtcgggttatttttttcgtcgttcgttgatttttaggggttgggtcggcgtatagtaagggggttggaggtggggtcgtttttttttacgcggttgggtttttaggcggtgttttgggtcgagtcgtttggagattttagattagtatgtgggtgggaaagggcgtttcgttttgggttttttcgtttttgcgcgtagagtagagacgcgtagattcgtttttatttcgtttggtttttttggagtagtttcggcggcggtagcgatgggttgggaggggtcggtacgttggtttgcgcgggtttttagtcgtttttcgttattcggaattttttttttttaagcgttgatcgtcgatttatagtttttttttaattcggggcgagcggggtttttattatatatttttttttttcgttcggttttatttttttttcgtttttttttaggttttacggtttgtaagtatttttgtaaataatttttagtttatttatatcgtttcgttcgtatttttcgagagttaggtacg

SEQ ID NO: 6534 - DNA, 7244 bp, synthetic construct
  misc_feature 1..7244: note = Description of Artificial Sequence: Synthetic polynucleotide
  source 1..7244: mol_type = other DNA
acgtttagttagggcgtagagagagcgttgggcgaagaggggtcgatggttcgcgggaatagggttggggtttttgtttggggatcggtcggttgttaggtttttcgttttattgttttttcggagcgtcgttgattataggttcgtataggtcgtcgtcgtaggtcggttttttgtgtatcgtcgtagtagcggcggtcgagcggttacgtatgagatcgttaaaggcgtagtttatgggtgggcggaagtcgagcgtgggtattaagtcggtagtggagtagggcgttatgaaggttagatcgcggttgtgcgtcgtcgtcgcggagtaggttaggcgtagggggttgaggtcgagcggcgcgtttagcgggtaggcgttcgcgtcggtatcgaagtgattggcgttgggttgtagcggcgagaaggtcgagcggttgtttagcgagtttagcgttttaggcgttatggcgtcggttagtaagggtttgtggtgcggaggtgcggcgggtttcgtttgtagcggcgtaggtagtttaggtttttcggcggcggcggcggcggcggcggcggcgtcgacgcggttgggttacgcgtcgtttgtagttgttgtagtatttacggcggttttatttgggggcgtcgtagggtttaggtcggtcgttaggtttttacggtggtggtttagtatttgttcgatggtttgtattacgtcgtcgtcgtagttttgtaatattagttttaggacgtttcgtcggtggtttgggaatacgcgtgttaagatatttagcggcgttcgttgtcgtggattcgagttttcgtttagttttggcgtcggcgcggttttatttttttttttgttagtttttgaatcggatttagagtttagagggttagcggagttcgggttgtttttttcgtcgtcgtcgttagggttagcgttgtttgggtagttgttatttgtttttttggaggttcgagttaggggcgaattagaaaaggattcgttatcgtcgtttttcgagtttgagtcgggtcgtatttttggggacgacgtttcgggtttcgagtttgcgtcgtcgggtgataagggttttatcggcggcggtagcgggttgttcgggcggtttgtttgtagtagcgttttaggaaataggttaaatttttgtaatttggtttttgggaggggagaaaacgtgtcgtgaggagcggttagttagaagatagtagttatagtatttcggttttttggattttagtttttttttttttagttttatagtttttatttattaggttttagtgtttttttttttttttgttttagtatttttttcgttttgagtttttatagttttgattttagggttttttttttttttgtattttttagaattttaattatttgtgttttgtaaattcgatgtttagtgttgttttttttacgtttgtgttttaatatttttatttttaattgtttttttagttttgttttgtcgtggagaagtggttaggtttagggtttaaataagagataatataatttttgtttaattacgttgtatagaagagtttattgtatagaaaatgtttgttttggtagtgtagtttgtaaggaaaggcgttttggttatttaggaggttttaagtttttttataggtagaagtatagtttttgtttttaatttattttttttaaaattgagatttgagaagttttttttttttaagtttagagcggatttttttttttttttaacggttttggtttaattttttttttttttataaaaagttacgggggtttagaaaaagagggtggtgttaggtaggtagtaggaagcgaagaggaaaagatataggaaagtagatttgagaaattagggagggtgcggaagaaattagaaggagggagggcgtagtaagcggttgtttagagggcgttaggaacgcgagaaggggaaaagaaattagggcgttttagaatttagggcgttttaaaatttagggtgttagttaaagggggggggattttttaagggagttgggaaggagtagagggaaagggtttgtggagaagcgtagagcgaacgaagatgcgtaggtttttatttggggagaagacgaagtaaagaagtagggatttgtttgcgtttgggtagaggcgagtaaaaaaattaaagcgtgtatatttcggttcgatgtaggagaaaggggtaaagtgtaaatgttttagaagcgggagaaaggagagtttttgtatttacgttttatattcgaggttgggcgagcggtgaattttagtagtcgcggcgattggatacgggggttttattttttttgaatcgagataagtttttgggtttcgtgttttagagttacgattttgttgtttttatttgcggtttggtcgcgtttttatttgagttttttgcgttagttgtttcgttttcggttttcgcgggcgttttcgttttaggtttttcgtcgtcggcggcgtatattgaatcgaagatttcgtaggcgggtttcggggggatgatgtcgttggcggcggttagcgttagtttttcggtagtgtcgtagagtagttgtagttcgcgcgtttcgttttttttttgcgtttgttgtttgcgtagcgttatttgcgtcgttatgatacgttggcgtttcgcgatgagcgtgtatttggcgtataggtagtttttttagcgatagtagcgtttgtggtttttgagggtcgatattacgttatggttgcgatagcgcgcgtatttgggggttcgcgggtatttttcggttgttcgtagtaatagtggcggttttcgtagtaagtcgtttgttacgtttatcggtagcgatgtagcggtcgtcgcggttgtcgttatcgacgttatcgacgttataggcggtttcgtcgttgttgtcgtcgtcgtcgtcgtcgtgtcgggtacgttgggtagtttcgagcgtagttttatgataggatttgacgggaaagaaggtgggagaggggagagatttggtgaggagtatatcgcgcgttaggttaaagcgtcgttttgaggaatttaagttggagagggaaatttgggtcgcggaggttgggttagaggggttagaattgttgggaggaggtgtagtcggaatttttttgtgagttttagtatttttattttagtttggttatggttgtttttagatttgatatatacgttaggggtaagattttgtttgaattagtgatttcgttggaaaaaataaagagatatgtaaagtgtgaaagttattgatttagatggttgtaatgagaatttggaaaagttaagatgatattttaaagtttagtttaattggggtgagacgggtgagagaaatgttcgtttgacgggattgggattagagcgatagttttggtttagaagttaggttgatgttaagggtaaaataggaaaattcggagtaaaacggttagtttggtggaagggtgaagaggagagagatgtgaaggcgtagatgtgaaggtcggttgggtcggagttttgtttttttttgtttgtttatttttaatgtagtttggggtagaagttttggagagaaaaattaataatagaaagaatagttttaggaagtagagtgaggacgaggaaataatttgggtaaagttaggtttagtggttttgggattcgtaaaaatgtgagcgttaaaagttttacggtgagggtttttagagagtgagagataaaatgtatgtggaatttagtttaggattgggaagtattaaagagaaaaattcggttaaagaaattttttgtataggtaaatttagtttaaagatgagttttatgggtaaggaaaatagtgaaaagtagttgatttgggtgttcgggatttaggggtcgcgtttgggagaggggaatgtgtaagaaaaaattttataggtaaatgttgggggaggggattgggtaaaatttgtggtgtagttttttagtttcgtagtttggagtagtagtcggggcggaagacgtattttgcgaaaagttaggtatttcgggagggggatttttttcgaagattattttatattgtttttttttttttttcgggtttagggatagagtcgttagatacgtttttttcgttttggggttttaggggatttttttcgagcgtaggtttttgcgttttgattttagagttggggttttaggatacggatggtttagtaggtcgtattaagttaggggagtcgttttcgtaattggttataaacggatattagagttttttttacgtcgtagttttataaggtttaagtaggtttagtttttcgtttttgtcgcggttttttttgtttttcgcgtttttcgtttttgttagagttcgcgatagagtttttgtgttttcgttcgagagttttagattttttttttatgagcgttgtttttttttttagatttttcgggcgtttttaaggtttacggggtttaggtttttttaataggggtcgtagattaggtttttatttattgttttttttgcggtttttaattatttgttttgggtttcgggatttttttttttcgttggcgttgtacgcgtttttcggttttattggcgacgttggagtttttggtcgtttttttttgttttcggttttttatttgattacgttatttttttttagttattatgttcgaattttcggattttttagaacgtagcgtagtttaattttttttttagaaattcgggtcggaggttcgtttgcgggtcgcgtggttggaattcgcgatttgattttcgtcgtgtcgggttttttcgcggtgcgcgtcggacgttgcgcgtagtcggggtttagttgttcggcgttgttagatttttaatgagtcgttcgttcgttttattgttggtttttagggttttattagatagaattggataataatgtggcgtttgttattggttaggggaggtagacggcgttttgattggtcgggttcgcgttcggggagtttcgtattttgtagtgttcgaaagattcgaaattttaaaagttttattgcgtgtttttgggaggggagggggcgcgttaggaaaggagtggaaaaaagtgggcgaggaggagcgttgaaaattttttgataagtagttttcgtgcgttcgagagcgtgtgaattgtttttaattatcgtgttcggtgcgtttttttgcgtagatttgtgtaatttttcggtttttggggcgtcggttcggttgtatcgtttttattggtttggggcgtttggtaaagtcgagttttttaagtggttttggagttttgaggcgggatggggggtaggtgataatttaattattgcggtcggggtaggggcgggataagggtgcgggggtggggaagggagggtgtttaaggtataaatgttaggacgattttttttgttttttttttgttatgtttcggcgcgtttttaaattcgacgagtttggggtagttgggggttgttttggttttttttttttgtttttttaaagtttagttattttattttaaaagttttgatacgatagttattttggagggtaagtgtggtttatgaagattttcgtgtttaaagagaagtttagcgaagagaaatgagattgtattttttgtcggtgttcgttacgtttttcgcgttttgagtttttttttttttcgttttttttttcgcgttttttagttttttttgagtttttttttttttattttttagtatttcgatttttttttcgtggtggtgggattttttttgtcgttattgtaaatgaataaatagttttttttttttttttttttttttttaaacgaaagtaaaaagtggtttttgtgttttcgtagatttttttaaatttaggacgcgtatcggtttgttcgattttttcggtaagagataaagttattgttgggaggttttttcggatagtttttagttttaattttcgttttattttcgttttgttttgatgttacggttttgaggaatagttcgttttgtagaagaggtaataggttttagattttgttttttttttgaaaggttgttgttttttaaatatttggaattaatgtcgcggttttcgggcgagtcgttttcggtttttgtagttttgattttatttttgtgtttttttttttttaatttttaaagttttgtttttttttttaattttgtttttttttttaatttttaatgttttgttattttcgtttttgttttttattttttttttttttttttagaataaagaaaattcgtttaaataatgaggaaaatgagcgtttttgtcgttttttttttatttttgatcgtgcgtttttgcgttgttttttcgaatttttaggtcggcgggaatttgggcgcgtagattcggttcgggtcgtcgcggttttaggacgtagtttatttcgtttggtacgattattgggtcgcgttttgttagtttattagtttttgagtttaggaatgggggtgggggaaggacggtgcgattaacgggtttttattcgaagatcgtagaatttggcgtttcggaagagttttggaagatgtttatcgggaggttgaggttggagggaggagtgggtgggggtgattcgttggaggatcgggcggagagtttttagaaagtttattaggtttcggcgcgagggcgtttcgatacggataaggtttatgatagcgataaaaagttggttattcgtttttagaaaatgttatttgttggagtttgtgaatgggtttaggagagagaagggtgttagttttcgcgagggtttttcgcgtgaagtgaggataagggagtgttttagggataatatgttttttaggagcgtaggatttagattttattttttaatatttggaggtttcgaggttaagtatgtttagtttcggttgtatttgggtaggtgagttatggggtcgggggaagagcgtcgataatcgtcggatttcgcgtaggggtcgttaggcgtttgtttttagagtttttttggataaagttttcgggaaattttattaaatcgaaaacgaaataaattatataaatttgtttagtttttgagggggcggtggtttaggtatttttttcgtttgaggttaggttatcgtgagatttttttatttcggatcggggatttcgtagaagttaagggtgtagttacgaggattcgggaattcgaggcggtttagtagatgcg

SEQ ID NO: 6535 - DNA, 824 bp, synthetic construct
  misc_feature 1..824: note = Description of Artificial Sequence: Synthetic polynucleotide
  source 1..824: mol_type = other DNA
acgcggattgagcgaggaaatgtttaagattataggattgaatttttcggaagtttcgacgttgtttagttagttagagtttagtcgtcgacgcggatgaagttgttttttcgggataggaagggttaaatggttgcgcgttaattcggtttcgattggggtgttagggagtaagagtcgtttgtttcgggggatttcgtttggggggtttttaggggtcgttttggcgtttcggttataatttgggcggttttgtgcggcggttttcgtttgcgtttttgcgcgttatttaaaattttgcgtatattgtagtcgtcgttttttcgtttttcgcggtgagacgcgcgtcgttaagtgtcgtaggtagttttttatagtcgtcgcggtagtcgttgtttggtttttggttttagattttttttttattgtttttagtttttatttaggaggttttttcgcggtcgcgagagttcggcgttcgatttatagtaggtagtgcgggtatagtgttgtagattattatttcgttaggttcgggtagcgtttattagacggataggcgttcgcggtcgtttttatttcggcgcgtttatttcgagttttttacgtcgcggcgggcgggcgtaatatatttttttatttttagtcgtcgaggattatatttttcgtttagttttttcgatttatttttcggttgtagtagagggcgagcgggtttcgtttttgttttttggggttggtaggttcgtgtggggttagggcgcgcgggagacgtcgcggagttgggtatttcggagaggggatgtttatttttagcggtttcg

SEQ ID NO: 6536 - DNA, 824 bp, synthetic construct; identical to SEQ ID NO: 6535
  misc_feature 1..824: note = Description of Artificial Sequence: Synthetic polynucleotide
  source 1..824: mol_type = other DNA

SEQ ID NO: 6537 - DNA, 1415 bp, synthetic construct
  misc_feature 1..1415: note = Description of Artificial Sequence: Synthetic polynucleotide
  source 1..1415: mol_type = other DNA
tcgcgttgttagaagtcgacgttagcgagggaggtgtgaagagttggttagaatgattaattttttttttatatttattttttttattatcggtggttcgttgttgttgttttgcgaggaagaggagtcgtgggcgggtcggcgtatttcggtgttatttttgtattcgggtttggttatcgggggtacgttggttaacggtatggttatttatttcgtgtcgttttttcgaaagttgtagattattagtaacgtttttatcgtgaacggttgcgtcgtcgattttagcgtttgcgttttttggatgtcgtaggaggcggtgttcgggtttttgtttatcggttttgcggagtttttcgtagattgggacggcgttgggggtagttatcgtttgttacggggtgggttgttgggtttcggatttacggtgtttttttttttttattgtttcgtggttttgaatcgttatttgtttattattcgggcgttcgttatttattaggcgttgtattagaggcgttatacggcgggtatgttggcgttgttttgggcgttcgttttgggtttcgtgttgttgttttcgttttgggtatcgcggttcggcgtcgcgttatcgcgagtttattattcggcgttgttggtcgtcgcggcgttgttggcgtagatagttttgttgttgtattgttatttgggtatcgtgcgtcgcgtgcgtgttagcgttaagcgggttagcgtgtttaatttttatttgttgtattagttgttcggttgcgtcgtcgtcgtcgtcgttttttcgggcgtttagtacgcgtcgggtttcggtggcgtcgcgtattcggcgtaggtttagtttttgtcgttcgcgttgtattcgcggcgggtatagcggcgttttagcggtttgtcggtgttgttgttttgttgcgtttttttgttggttacgtagttattggtgtgggtgagtttggttagcggtttttcgttgtcggtgttttggggagtgtaggcggttagttggtttttgtgttgcgttttgttcgcgtttaattcgttgttttatacgtggaggaacgaggagtttcgtcgtttcgtgcgtttagttttgtcgggcgtcggcgacgcggcggtcgttgtcgttgtcgttatagtcgtgttcgtagtgttttaggcgtaattgggtattcgcgtcgcgggttagtattggtaatttagtcggggttcgagggaagcggagattttcggttttcgacgtttttgggtatcgtcgttttttttttttttagggtattttttgtttgaacgaagattttcgtcgcgaagttcgatagatcgggggaaaatggggttttcgattttagcgggttatttgaattaaggcgtttttttaagtggggcgttcgaagttattttggacg

SEQ ID NO: 6538 - DNA, 1415 bp, synthetic construct; identical to SEQ ID NO: 6537
  misc_feature 1..1415: note = Description of Artificial Sequence: Synthetic polynucleotide
  source 1..1415: mol_type = other DNA

SEQ ID NO: 6539 - DNA, 3039 bp, synthetic construct
  misc_feature 1..3039: note = Description of Artificial Sequence: Synthetic polynucleotide
  source 1..3039: mol_type = other DNA
tcgcgggattagttttggtttttatatttcgttgtagttttgtttcgcgtcgtattgtttttttcggttattgtggggttattaagcgatttgtagaattcgttgaggtttaggtttttgtagttttcgtcgaagatttaaagttagagtggatataaacgtcgtgggtaggatttcggtgaggtttcggtgttttttttgggggtttttagcgttggtttagaagttttagttcgggtttaagaatttgggatttttttcgattttggcgatcggtcgggttattcggtttagggttttagcggtagcgggtaaaattttagtaggagttttttgtcgagggcgtgtttcgacgttagagttaaattcgggatagattagttaagcgcggacggcgcgagagtggttggtagcgttagtacgtagtttgggtttagagtaaggttgggcgtttttagtaaagggcggtttggggttgcgcgggcggcggattgtaggcgggagaagagcgaggtgcgttaggttttggggcgcgtaattgtttagtttcgtgaaagatcgcgtcgtagatggggcgtagttgcgcgtttattcgtgtggattggaaacgtttcgagtcggttattttaaaaatcgggaaataaggcgggtttttttttcgttcgttattttttattaagtaggttgtgcggttttgggggttgattgtttttaagtagttaggttttatcgcgcgtcgcgttgcgtcgaggttcgttttgtcgtagggacgttggtagttcgttgaatatcggtaagagcgttagaggttagcggtcgttaggatttttattaggttttgttcgtattcgtttgtttttttttcgtttggtttgtttttcgtttaattgaaatcgttaatttttttatttttttgtttttattttgatatattttacgttttaaatatgtttcgtttttttttgtttagtttgttttttttttttttgtttttttttttttttttagttattcgtttcgttcgattttgtttttgttttttttattcgttcgttttttatttatttattttagtttattttagttcgtcgattgttatttattttttcgttttcgtcgcgtttttcgttgttttgtttaatttttttttttttttttttggttgtcgttcgttttttttggttttttttttcggtatttcgttgttaaggttatttttgtcgtcggatttcggggtgttgggtttttttcggtcgttcgtttcgtattagcgttttttgtagttcgcgcggtatcggtgtggttcgggggttcgagttgtcggtgtcggatgcggcgcgtttagtagggacgcgggtttgggggggtggtttttgttcgacgcggagcgttgagttaggtcgggtatttgtttttggcggtgtttatcgtattgcgcggtttttgtcgtttggttgggattagaggagttaggttaattgttttttattaagttttaattgtggtttttattaggaaagttttttttaaagggtatagatacgaagtttcgcggattcgtttatttttttcgttgatttatatatattttttcgtttttttttatatatttttatcgtttcggttgggcgaaagtcggagatgttcggttatttcgtggaggttcgcgaggcgttagtcgggcggcggtagggggttgaggcggattttggaggatttagttttgggtttaggttgcgggatatggtagcgtagataaggtgggtgtagtgcggaagtcgagacgttttataggttatagggtgcggcggacggtcgtagagttgtcgattagtttgttaggtttttgtttttaggcgtattttcggatgtcggcgcggtttagtcggttttagtatagggtatcggttcgtgagttcgcggcgttagggggttaggttgtttagggttgtttttgattgtttagcggtgatgatttagcgcggggaagttaagattgttagaagggcggttattatagtgtataacggtagggaggttagtttagtatgagaaataagaatatagttatttcgttttgaggatagttttggtattgtacgattagtcgcggttagattgtgttagtttgtcgtataggtagtattttttttgtgaaggttaggttcggggaggagagacgggttaagattaggtcgtagtttttagtcgatttcgatttgattattttaggttgaggtttagttttagggtttttaaagggcgttagatataaaagtcgcgttttttcgttaggttttagtgtggttttatagttttcggtcgggtttgggttttagggtaggtggtagttttagtttaatttcggtagagtatgtttttttttttttaggtttaattgttttcgggtttcgattggatttcgggtcgtcgttattgtattttttttcgatttttcgttttttattttcgtcgtcgaggaacggtggtttattttttcgttttatattggtttttgtttggttcgggttagcgttaattcggttttcgtggaagtcgtggcgaaaggcgagaggggtaaaaagttgagaaataggcgagcgggagagataagtaggaaggttcgggtgggttcgggtaaggaagaagaagagagggtcgggttgcgcgttacgtttcgcgtcgcgcgttatttttcgcggggttttcgtagaagtggtcgtcgttgagggtcgggtcgggttcgaggttttgtaggtatttggcgggcggtttggtcggttttgggaggtagggttttaggggttcgtaggtcggaaagcgggttagtcgcgggtcgcggggcggcgcggggtgtaggtgaggcgtagcggcgggggttttttgcgggttcggaggttcgtttttcgaggttatataggggtcgggtgtaggttttacgcggaaaggcgcgtagtgttcggggtttatgtcggtttagggcgtataggttttcggggtttcggggttcgcgttgttcgcgtcgtttgtgagcgttcg

SEQ ID NO: 6540 - DNA, 1277 bp, synthetic construct
  misc_feature 1..1277: note = Description of Artificial Sequence: Synthetic polynucleotide
  source 1..1277: mol_type = other DNA
tcgttttacgtttatttttttcgtttacgtcggttattagagtttcgttcgttgttcgagagtttcgtattgacgtcggttcgcgcgtgagttaagtttgcgttacggcgtttcgtcgttagggtggtttttcggaaagcgagggaatagtgcgcgtagcgtttcgtttagtttcgttttgtttcgtagagtcggcgttgttagggcgtagggagggcggtattcggttttagttttcgtaatttcgcgcgtttttttcgtcgtgggatttgggttttcgcgtcgtttttttgagtttcgagcgcgcggcgggcgggagttaggttgggattggtggtgaggtagggagtgaggagcgagcggagtcgcgtgcgtcggcgcgtagtttcgggtcgttttagttttagtcgggggtttgtggttcgggggaggagttgtgcgttcgcgattcgtcggggatcgtagttgttcggtcggagtgtacgggtcgagtttgcgcgattatttacgcgtgataggtgagtcgttggtcgcgtttcgtttggttttatcgggtcggttattgtaattttttttgttttggtttcgttttagttagggagggttgaggattaaggtgtgaggcggcgttgttttcgtattcgttcgattttgcgttcgtttcgggtttttttcgtcgttttagtcgtcgttgtttggcgacggagtttcggggttcgttttttttcgcgtatcggggtttttagcggcgtacgtacgggttggatatcgggttttagtttttggtgtttagaagggtttaagaatttcggaggaaattgggtttagttgcggaggtaagcgttcgcggagaatcggagggggtttgttcggtttattcgcggtttgaaattgcgcgtttagggcgtagttttattgggagttttttacgtagttggagattttagttttagtcgttcggttttaggtttgtgattttgatagtaatattggtaagcgaagtagaattgttacgttcgagatgaatatttaatttttagttttggggttggttttcgttggattcggagttagtagagagttttttttttttcgtgggaagcgtatttggggaacggaatggttgagataggggacgtgcgtgtggtgtttatttggagggggcgtcgttttggcgggtcgagaggtttttgttgtatttatgtttgtgtgcgtcgtgttttgaagcgatgttggatgttcgtagtattatgggtgggtcgttttttaggggcgcg

SEQ ID NO: 6541 - DNA, 2394 bp, synthetic construct
  misc_feature 1..2394: note = Description of Artificial Sequence: Synthetic polynucleotide
  source 1..2394: mol_type = other DNA
gcggttcggtttgggttgtttcggtgtagcgcgtttcgtatttggtttcgtcggtttattttcggagaaattttttttgttttgtcgtggtttatagggttgatttttcggtattcgaaacgttagtagttttgggagtttagcggagagtcggagttattttggggttagtgacgtttttcgttgataagaattttaaagttgttttagttttttttttttttttttttttcgcgtttaattttgatattattatttttttattttttaggtatttttttaaagtcgtgtcgggattgtaattcgtttttcgatttagttggggtcgggttttatttagttagttaaggggcgagttagcgatgcgaatatcggtttggggggtacgattttcgtttacgtttttcgtaggcgcgtaggggatttaattttatatattttattttcgaattacgaggaaaaatattttattttttaaaaaaataatttgttttttatataaatcgttatttaaaaatatataaataaggtttaagtataaaatttaattttggggttggcggtggagggaaggtgagggagggggttttggtatacgtttttcgtgtgtgtttgcgcgacggttgatgagggcgcgttagggattttggcgtttaaggagatggggttgtagggaggcggacggagagcgttttaggcgttcggtttcggttttgttttaatcgtagagcgcgttttaaagtcgagggtagttttaggtgtcgttttgcggttttattagttttaggagattagggcgggggatgttaagtgttggtaggcggggaagaggttaagcgtcgagtcgggatcgaaggtagggtagttcggtagagggtaggcggcggttggaggggcgtcgtattttttttgggtcgcggcggtttttatttcgttatcgtcgtcgtcgtcgtacggttgttcgtcgcgaataagtatcggtattattacgcgacgtagtaggtcgggcgcggcgtgtagttcggcggatgttgttaggttaggcgatttcgtcgtttttggagcgcgagcgcgttttagtttgtagcgatgattttggaattagattttgatttgcgtgggcgtgaggcgaagtaggttcgttagttgttcgcgttcgggcgtagataggtatcgttgttgtcggaagcgtcgttttaattttagcgtttgcgttttggagaatagtattcgtcgttttttttttttttcggcgttcgagttcggagacgcgggtttagcggacggtcgttgcgacgagtttggcgggttggtttttaggttgttttcgttcgaggttagggatagtaaaggagatacgggtgggtgagacgtcggattttacgagggtttgttgtttttttggcgcgggcgtggaggtattggttagagggtacgtttattagttcgagattttcgggatgaggttattttttgagtttatatttggatatttattttttcgaatgcggtgattttatttatattatagcggttattagcgggtttgagatcgtgtttcgaaaaaatttatttcggggtttttttaatatgttcgtatcggtagttgcgttggtcgattagtttattataagttgggttattagcgtcggttttttttaggtcgattgtattgtagtgtgtcgaggtttgcggagttttgagtgggaacggggtgggggtaaattcgttaatattggttattttagacggaggtttggagatcgtggtcgtgtttttaggtatggagagggggcggggggtggggtgggggcggtaggtggcggcgcgttttaaattttaattatttcgatttttagaaatcgttagatatagaaattttaaatttcggagtattagtgttaggtagggatttgtttttaggatgtgtcgatcgggatgaatgcgttaggggttcgaggatagggttttcgtttttaagattgaggaaatttagattttgggttgggatttcggtttttcggtttttcgtgggttgggtttttgattttgttgttttacgttttttattttttatttcgtatcgtaatttattacgtatttataagggtagtggtcgcgtttcgaatttagttaggcggcgtaggggtcgggttggggggcgcgtggttttggttttcgtttcggtaggtgttgcgcgttttgttcgggtaaatttagaaggttgcgtacggtgaagtttaggcgtttagaggtggttatggtcgaggaggggaaggaggcgggggtagggtaggttgggaacggaggggcggtcgggacgtcgtttttacggatgggcgtgggaggcgttcgttatgcgttggtagtcgggatattagcgtatttatagcg

SEQ ID NO: 6542 - DNA, 1627 bp, synthetic construct
  misc_feature 1..1627: note = Description of Artificial Sequence: Synthetic polynucleotide
  source 1..1627: mol_type = other DNA
tcgtggggttacggttacgttgttttgcgttttgggtattacgttttttagttataaggtgcgttggagtaaggtggagtttggggagtttcgggaaacgttgatttttattattaacggattgtacgttcgggggtatgggtttttgggagggcgcgttaggatgcggagggggtatcgattagacgtttttttggttatcgcgggcgtgcgtttggaggacgagggtcggtatcgttgcgagtttattaacggtatcgaggacgagagcgtggcgttgattttgagtttggagggtgaggttttttcgttttcgttttatttttgtgtagtagcgggttcgtttcgtttgggttttttagggtttttttttagtatttttttcgtatttttggggattttagtttttttttttaggtcgcgtcgtttttttttttttttcgtttttattcgttggttttttttaggattttcgttattttttaggtgtggtgttttcgtattaatttagtcggggtcggtattagtttaattattacgaggcgaagtaggcgtgcgaggagtaggacggacgtttggttatttatttttagttttattagggtgagcggtcgaatttagtattttttaagtttcgcggagttgttttaggggttcgagagagggcgttaggcgagtttagtttggtttttgtttatgacgttttttattttcgattttcgtcgtttttcgttagtttggatcgagggtttggattggtgtaacgcgggttggttgttcgagggtttcgtgcgttattttgtgtttatcgtacgcgtttcgtgcggcggtcgaggtcggttcgggattcgtagttacggatttcgcgatcggatgcgcgatcgttacgacgttttttgttttattttcgcgttggcgggtgaggcgcgggacgaaggtagggttttggggaggggtttgaaaaatgtgggggacgaggagtggattttagtttgagattagggtagggttttcgggtttttttaaggtatcgtttttttattagttcgttcgttcgtttaggttttagtttatttttttaaattttttttgtatttttgtttcgattttttaattttttttatttaagttcgatttagtatttttgcggtttcgtattttaatttcgttttttgggtgttagtcgttttttttcgtttattttgttttcggtcggtgattcgttgtggtttttaggttaagtgtttttcgtgttcgggcggttgacgttgtttgaagtttacgcggcgtgtcggcgacgcggcgtcgtggtggttaaggttgggtatttttacgtcgtttggaagttttcggggttagattagtgcgacggcggttggttggttgacggtagtgtgcgttttttaattattacgtcgaggtcgcgttgcggggggttttcggatttcggagtgcgtagtttcggtttttttaggttttaataggtagtttatgggatttattgttacgtcgagaattaggcgtttatcgtgttttttttagcgcgcgcgaagaagtttgggagtcgtggcgggggtttttcgttattttttttcggagagttttttttttttttagattcggagcg

SEQ ID NO: 6543 - DNA, 271 bp, synthetic construct
  misc_feature 1..271: note = Description of Artificial Sequence: Synthetic polynucleotide
  source 1..271: mol_type = other DNA
tcgttcggtggttgtcgcggtttttttcgcgttgttttttacgtttggtttattatgtacgaggtaggtaatttgttttttttttcggggatttatttcggagataagaaggtagtttgttttttgtaatggtttttgttggagtgcggcggggtttaggcgcgagcgggggtacgggcggggagttggtagcgaaggatgcgttcggcgtttttcggcggtcgttcggagttcgaggtcggcgcgggaggagcgttgatttcgcgggtcg

SEQ ID NO: 6544 - DNA, 884 bp, synthetic construct
  misc_feature 1..884: note = Description of Artificial Sequence: Synthetic polynucleotide
  source 1..884: mol_type = other DNA
acgtcggttgtgaaatttattgaagtgagcggcggcgttaggatttttgggatttcgatttttttgtagttcgtatagttaagggcgagggcgtttttcggtagaagtagtaaatcgtcggtaagtttagcgaggagggttgtcggggtttgggtttgggaattggttggtatttagcggaaagggacgtgagttgagcggcgggggagaagagtgcgtaggttagagggcggcgcgtagcggcgtttcgcgaggtttttacgtcgggcgatatggggtgtttgttgtttttgttgttttgggcgtttttttaggtttggggaagcgttgaaggtgggtggaacgagggcgtttgagtgtattcgcgggagggcggagagagggagttgggtagggacggggagggtaacgtttgatggggattggtgagattcgggacgtattggcgcgatttaggtagaaaattcgttgttttttggtttcggggagaggtagcgcggtatagagttcgttggtattagtcgttttttgaagtttatttttttttgttttttttttttttttttttatgttggttgttttttcggttatttgttatacgtttttaatttttatttttttttagtttcgtaaaggttttttttttttcgttgtttttagatttcgtttttcgttaatagtagttggacgcgtatcgacggtttggcgtggttgggggagttgtagacgtatagttggagtaacgattcggatatcgttcgttttttgaagttttggttttagggtacgtttagcgattagtagtgggagacgttgtagtatatatttcgggtttatcgaagtagttttattagggacgtgaaggaattcgttaaaatgttacg

SEQ ID NO: 6545 - DNA, 1007 bp, synthetic construct
  misc_feature 1..1007: note = Description of Artificial Sequence: Synthetic polynucleotide
  source 1..1007: mol_type = other DNA
gcgacggtgttcgtgcgtttttttattagtgtatgtgcgaggagggttggaggtatgagcgaaagagggaaggtaatttcggtttttaaaaaatttaggggatttttttttttagtataagcgtttatacgtgcgttcgcgcggatatatatatatatatttatatttatatataaataaatttttagtatttgtttcggaaagttttttttcgtaggttggttcgaaggcgcggtttcgttagcggagagtttttggatttatcgtggtattatttttaattaattttgcggcgcggcgcggggagcgtagggtgggttttaatttcgggttcgtttgacgttatttgggaacgcgcggcggcgcggggcggcgcggattcgggacgatttcgtcgcgatttggtttcgttttcgttcgcgcggggttttgtttcgcgggaattaaaggaaggagaaatgttagtatatttttaattggaaatcgagttttttttttagagcggtttgtttatttaggattgggtattagaatttaggggaggttttaattgaagtgacggttttggagattatggggaatatatggttttatcgtcgggttttttatttgtatttttttataaaattgtcgttcgtgtgtgtttttgcgtttggttttttgtatttttaaggggtttttgaagatagggtcgaatgcgcgcgggggttttaggtattttgcgttttacggcgggtttcgtagttcggttcgagtcggttttggaagtttcgttttggattagattggtatcgacgtcgtttttagtttgagcgttgagagggaaaacgagagttagaaaggaaagaaatcggattggtgattgtttggtaggggtgtaatttaaattgttgtgagtagacggtaggagggagttgttaaggtaacgggtgatttttattcgtcgttttttcgttaaggttggggagagggaagttttcgcgtgttgggttagggttaagttcgcg

SEQ ID NO: 6546 - DNA, 2191 bp, synthetic construct
  misc_feature 1..2191: note = Description of Artificial Sequence: Synthetic polynucleotide
  source 1..2191: mol_type = other DNA
tcggacgcgatcgttcgtagtttgcggtttttggcggttgaggagtcgcggcgatttttggtttttatcgtagtagttaagttcggcgcgtattaatcggcgttgttgaaagttggagagtttttagttcgtcgatagaattcggcggtgggcgttaggggaattttttttagtgtcgtaattaggaaagttttaaaaagtaaggattttagatagataagagatttatttttttttttagtataagaaatatttcgcgtcgcgttagtcgaacgttgttcgtataaggttattcgttttttttggtcgggacgtattcggtgttttttagttttttattagaattggtttagggggcgcggaaatagagaggtaattgtgttcggtttgtggttttagacggaaacgttttcgggttttttggttcgggggataagggttcgaaattttaatagtcgcgagggtaaggatagaattattaattttcgttcggatgttcgggatttgtttttttaagttcgtttcggtttttttaaaggacgcgcggtatagtttatgcgttttcggtattttattttatttttttatggttttttttaaatttttttcggggagttttataaagtatagacggcgttttgaaattcgttaggtattcgttagttatttttattttcgtttttcgaattttttttgtcgcgtttttttcgtttcgtattttttttttcgcgtttttgggaagttagaagtaaattacgagaaaatgttttcgtaaggagtttttttatattcgttttgttattgaaataaaagcgtagggaggagggaggtgggagaggaggcgggaggaaggtttagaaagacgatggggatagtagtaggaaggagttggggaggggggttaaggtggtaagtagagttgggggtttagagttcgttttcgtgtcgcgcggcgagtcgtttatatgtttaggtcgttgtaggtgttgaagaattttatttgattgtacgtttgaatttagtttattatttaggtttcgtggcgggggatggggggtatgattacgcgggcggaggttttgaagtagggggttttgtagcgtaggacgatgggcgaggttttttcgatgcgcgtggggtattggtcgatggtggcgtatatatcgtatattacgatgttttcgcgtcggattcgcgttttgtaggtgatgttttggatatagtttattttgtagttcggtgtcggtacggcgcggcgtggggtagcgcgggggttcgcgcgggtagtcgggggcgttcgttacgtcggtatggcgacgcgtcgttcgttttcggttagatttagttcgtatttaggagcggggagtcgtcgggtatttttggggaagttttttttttttgtagtcgcgcggggttttcgttgtttcgacgttcgtttacgttcgttttttcgtttcggtagggcgcgcggagggtgtatttttaggaggcggcgggtgttttcgtcggttttagcgttcgggcggagggtagggaggggagcggcgttgcgaggaatggtgtttatttcgggtcggagtttttcgtttttcgtcggagaggaggaggcggtagcggcggcggtatggagtcgggggagggcggcggtggtagcgttcggtttgtttgttttcgcggcggtagtagtagtagtcgtcgtcgtcgtcgtcgttgtatgaatttttgtattacggttgtttttcgcgtgtagcgtatttagcggcgggcgagcgggcggtttaagaggtaggcggaggtagtagcggcggcggcggcgatcggagttttcgtcggtttcgtttcgtagtcggattatatcgatatttttcggttcggttgtttcggttcggggggcgttaggaggttgtggttcggggtggagagttttaacggttggagtagtataggacgtgtttcgcggaggaaattggttgtacgttatgagttttgtttttattcggttgtcgttcgggtggggggggggtaatgtgtaagggtgggggtgtttaaagggtcgttagcgtcggggtggggtttcgtacgtggggttgaggcggggcggggttttggtaggtggtgttttggggtgggggtgggggattagggcgggtttaagcgttatcgggtgggtgaggtcgagtagggcgcggcg

SEQ ID NO: 6547 - DNA, 859 bp, synthetic construct
  misc_feature 1..859: note = Description of Artificial Sequence: Synthetic polynucleotide
  source 1..859: mol_type = other DNA
acgtagaggtcgtggtatttggtcgtagttgggttgtagtgcgtgcgcgtttggtttggtggttcgatgggaagttcggggcggggtagtcgcggggcgggggcggggcgtcgcggagataggttacgtttttgttcgttcgcgtaggcgcgttgcgggtcgttagttgttagagttaagcggcgggttggcggcgggtttcgacgtttgcgttaggatttggttggttgagttcggcgtagtagtagtagttagggtagcgcggtttttattttttgttaggtcgtagaggcgagtagggattagttggtcgtcggtttttcgggtaagatggggaatcgggagatggaggagttgatttcgttggtgaatcgtttgtaggacgcgttttcggcgttgggatagagttgtttgttggagttgtcgtagatcgtcgtggtgggcggttagagcgtcggtaagagttcggtgttcgagaatttcgtgggtaggtaagcgcgtagggcgcggagtaaggatgcggtagtggggcgatttcgttgcgggtcgttggaacgtggacgggtagcgggagttagagggtggatggattaggcgttgcggtggaatggggggtagagtggaatggggggtagagtggcggtgttcgtggggcgggcggggttttttagttttgggtatttttcgttttttgttatttttcgtttggtggtttttttgtttgttttttatcgtgcgatataaagttattttttttttgttttttagtcggggagtcgggggaggggttcgtttcgggttcgatttttattttttcggtgcgcgttagtttcgggtagtttttttgcgtagcgcgtcg

SEQ ID NO: 6548 - DNA, 791 bp, synthetic construct
  misc_feature 1..791: note = Description of Artificial Sequence: Synthetic polynucleotide
  source 1..791: mol_type = other DNA
tcggggtattcgtgtgcgcgcgaggattttttttgtagagaatgaaattatcgttttttttcgttcgtggtttatttcggggtttttattttacgtaagtgttgtggaatttcggggtgatgagtttcgggggaagttagtattttttgttttttagtgtcggcgttcggtagagtttcgggatttttagtttttgtcgtcgttgaggacgcggcgcgggttgttggtcgcgtcgtcgagggagggttcggatagttttgtagcgcgttttagcggagttttgggggtcgcgtcgtttttttaaatatgatttagaatcgttcgttagttttggttttagcgtttggcgcgagcgaatcgggtttggttgtttcggtttcgtttgaattttgcgggtcgcgggttagggcgcgtcgggattcgttgcgttaggattttgtagattcggtcgcggtcgggtcgagtgtttttcgtcggggttttacgtttacggtttacgtttgtaatattagggttgtacggcgggttcgtagttgggtttgcgtttgggattcggggttttttgcgtttttcgtgtcgtattttttgttttaattttaagcggacgggttttggggttttatcggttaggtcggagttttagttttataatttttttttttttatcgtattgttttttttgcgttgtggcgggagttggggattggggtcggagaaaggagacgcgtcggtttttaagttttttgagttatttcggtttcgggcgcgttttttagggttgtagtcgcgcg

SEQ ID NO: 6549 - DNA, 586 bp, synthetic construct
  misc_feature 1..586: note = Description of Artificial Sequence: Synthetic polynucleotide
  source 1..586: mol_type = other DNA
gcgaagaggagggagtttcgaaaggagggaaacgagtcggtaaggggcgataggagcgagtcgggaagggagagtagcggagggttgtagagttgcgggcgttcggatcgtgttatatatttttcgcggggtacggagggtattgcggggggagatatataaagatatgcgaagaggggttgaacgaggttcgcgtataaagacgtcggggcgtacggtagttggggttgtatttatcgttttcgcgtcgcgtcgtgtcggggtcgggttagcgagtagttcggggttgagcgcgtggcggcggcggcggcggcggcggcggcgggtaggcgcgggattcgggtcgttcgcgtttttcgggtgattcgggttcggtagtaggcgcgcgcgggggcggcggcgtttaagtttaatttggttttcgtttcgttttttgtttagttcgtcggtgttttttttttttcgcgatttcgtttttttttacgttttttttttcgttttttttcgcgtttagtttcgttttttttattttgtaaaataaagtcggggaaaatgtttgttcgtgtagttcggagcgcgtagttcg

SEQ ID NO: 6550 - DNA, 1678 bp, synthetic construct
  misc_feature 1..1678: note = Description of Artificial Sequence: Synthetic polynucleotide
  source 1..1678: mol_type = other DNA
tcgataggcgaaattgtaagaatcgggaggggcggttgcggcgtttaggcgcgaggtatatattatattttttcgtagttttttattttttttagacgtacgtgtttaaagagtttttgttttaatcggtttcgttttattttcgttcggtttttagttttgtttgtattgttggttttaagtttttttcgagaggcgggcgtgtatagttgtagtggcggcggtagcggttattaagcgttcggcggcgtttcgttatttatttttttttagttttcggcgttgtagttttcgttcgtcggggagggcgcgtttagcggaataggagtcgagggtggggcgtcgagaggagggaatttcgggtcgtatcgttatagttttcgtagtggtaaaggcggcggcggcggcggcggtagcggtagtagtaggtggagcgagttatagcgtttggtttgaaatttattgttgtagttattcgggttggagttggttcgttgggtggagttagtgttcgtttcggttcgattttcggttttcgggatatttgggttgcggaggtcggttggtcggagttacggttggggacgggcgcgtttcggagcgtacggttgcgttggaagtcgcgtttggggcgtaggattaacgggatttattttttttcggttatttaaagattttttttttcgggaaagagcgttgttcggttttgggatttgggaggagttcggaggtcgttcgggtatttcgttggatattattcgtttgcgtttcggtggcgcgggagggttcggagcggagcgttcgtttttttttagcggtttagtggagaaaagtagagagttttttttggggcgaatgggattttttttttcggtttttcgtggagtcgtcgtatcgtttgtcgtgttggtttcgaggggtttatagtttggtattaatttgtaggtgttcgttgttgatttggtttttttttcgatttgcggacggttttttttagcgattttcgatatacgtttttttgttttcgtcggagggtcgggtttggggtcgtcggagtttgcgggaatttagcgtttattcgttgattttcgagtcgtttcgttagttgtgcgtttttttgggtattagtttggagaggagcgtgtagacgcggttttttggagggagtgcggttttttagggaggtatcgggtttttaggggttttttggcgtgtgtggtgggattggggttcgtcggttatggtttttattttcgttgcgttttgttatatgttgtttttggtgttgtgcgttgcgtttatttttttcgttatttggtacgtgagtaatacgttttggttttttttttttcgttttaatttcgttaaattttttcgattttattttattttttttattttgcgggcgtgggcgaatcggaaggttggattttttgtcgttttattgtttcggggtaggaggtagttcgttgtatttcgtcgggcgcgttttcggtgttttggttggaggcgaggggtcgttggtgtttaggtaggatattttttgtagggttcgattgggcgtttcgggtttcgggcgtcggggagtggcggttataattataattaatttttttttttttcgtttcgtttttttttgtcggcgggaggcgaaggagaagcgtcgtcgtcggtttcg

SEQ ID NO: 6551 - DNA, 1600 bp, synthetic construct
  misc_feature 1..1600: note = Description of Artificial Sequence: Synthetic polynucleotide
  source 1..1600: mol_type = other DNA
tcgacgatattgttattggaaaagtgttggttacggttttcgttttattttttttatttacgggttcggagtttttaggagtagttagatcgattatcgtttttgtagttttatttgttttcggagagatatttataagttagtttacggagagtttggattcgttcgttttagtatttacgtttttttcgcgttcggttttagcgtcgttttcgatatttattcgcgggtagttttttatcgtcggtattttcgaagcgcgggggcgggcggtttcgtagcgttgcgttttagttcgcgtcggtttcgttttttttcggtttttgtgcgttcggggcgcggggcggtggcggggcggtttttgggggtttcgggggttcgcgttcgtcgttcgaggaggcggtcgaggaggagcgcgaggcggtcgaggtgttgtagaaggggttttcgtcgttgttcgggtcggattcgtcgaatacgtcgttcgagatgtgtaggttttcgtagcgcgcgcgggtagtttcgagtagcgtcggcgttttttttcgcgcgttttcgtcgttttcggttatggtttcggtcgtcgttcgcgcgttcgtttttatagtgttttttagtcgtatacgtcgggttttgggttcgcgtcgcggttcgtcgttttttattagcgtagttcgtagtatagcgttcgtcgtttcgtgttcggtcggttcgtcgttttggtcgtttcgggtttagcgttcggggaagcgttttcggagttcgggcgtcgtaggttgcgggtcgcggcgggaggcgagtcgcgcgcggggttggtaggggcgatttagagcgggcgggacgtagaggttgcggtcgagattaggcgtcgtcgtcgttatcgtcgttattatcgttattatcgtcgtcgttgtgttttttcggcgttcgtcgtttttttgttcgttttttttacggttttcggcgttcggttgtcgattttttcgggcgcgagtcgttagaggcgggttttgtcgttttttatttttcgttcgtcggttaatggggagttcggttcggatagtcgcgggggagttgggcgggttcggcgcggggaacgtttttattttttttcgcggggcggggcggggcgcgcggtcggggttggcggttagggggagggtcgtcggcggtagtgtcggtttttttttatagggacgcgtagttcgggatcgttacgcgtagcgcgggagggggagggcgggatcggggaataggaggggagggggattcgggtgtttttagcggttcgggttcgcggacggagtgcgggtcgatttcgtttattgttttttttcgtagttcgcgtgtagttttagggagttgttcgtttcggtggttttgaattaggcgtcgtcgaaacgttttaggtaggcggcgggttcgaggttattatattcgcggcggcggttgttgtcgaggttttttgggggttattgttagttgcgtcgtatgtttttataaatataggggttgtttagtttttgggaatttcgttttaattaggagttcgtttcgtcggtttattgttggtcgttggttagatgttaatttcgtttcg

SEQ ID NO: 6552 - DNA, 2394 bp, synthetic construct; identical to SEQ ID NO: 6541
  misc_feature 1..2394: note = Description of Artificial Sequence: Synthetic polynucleotide
  source 1..2394: mol_type = other DNA

SEQ ID NO: 6553 - DNA, 1160 bp, synthetic construct
  misc_feature 1..1160: note = Description of Artificial Sequence: Synthetic polynucleotide
  source 1..1160: mol_type = other DNA
gcgcgttcggtgttttaaggtttttaggcggagcgcgggcgcgaggtgcgggtttcggggcggagcgtacgttcgggaggcgggaagtgggtagtagcgttttcgtttggtttttgtgcgtttcgattcgacgttttttcgttcgattaggtgtttcgagagcgtatagttgggagggttttttcggtcgcggcgagatttacgtttgcggtgtgttagggcggcggcgacggtgacgggcgtggggcgcggcgttgtttcggttgtcgggtcgttgcggcgagcgcgcgggtcggtttggagttatcgggttgaatcgtcgcgtttgtatcgtgtcgtacgtcgcggaggcgttcgggtatagatcgcgcgggcgcgtataaagcggttcggggcggtcggcgcggcgtagattttcggtgggtagcgtattttagtttttttaggttagcggttgtagggagtttcggttcgcggttttttcgttttaagtttgggagttgtcggttttattttgtttttgtttatggggattcgagagttttttagcggcgtatttaggggtaagagtattgtcgtgtgagtagcgtttcgggcgtgggtgagcgagtcggcgggcgggaggtcggagcgtcggggtagttttttgtagttgggatattgggtagtttgaggttcggggaagggcggcgcgcgcggtggagttgttcgggaagttttagttattttttttttcgttattcgttttaattcgtattgtttcgagacgtttaggatagggtattggggatagttgttcggggaagtgggtgagtggcggcgggaagggaggagcgcgggttttgtcgcggcgttcgttttcggagggtttcggtcgcgtttttgttttcgttttgggatttgttttttacgaatttttttttttttgtttatgttttttttgtttatttatttgttcgtggcgtttgcgatcgtagtggtatgaggaggttatcggacgttagttttcggagattgttcgatattagtttttagtttcggtagtttaagtatttggtggtggacgaggcgattaaggaggatttgaaatggtcgcgtttcgtggaggattttattagcgggtcggtggggtttacgtttatcgaggagcggattttgcg

SEQ ID NO: 6554 - DNA, 588 bp, synthetic construct
  misc_feature 1..588: note = Description of Artificial Sequence: Synthetic polynucleotide
  source 1..588: mol_type = other DNA
gcggggttgggcgtttcggggaggagggcggagtaggtgagttgcggggtgggagtagggagtgtatttgtacgtgacgttggagtttgtagtaatttttaagtaggaggttgtgcgcgcgtgtgtgtggagtggttgcgcggtcggggaggatgtgcgttgtagggcggtcgtcgtagtgagtaacgcggtaatcggagttcggcgggtagtcggggaggtcgggattgagaggggcgagtcgttggtgtttttcggcggtagagggtcgcgtcggttacgggttcgggagagacgcgttttagtcggttttaggatgtaggcgatcggcggtagcgtttttgtaggcggtcggtttattatgaagaagtattcggttcgggtggtttcgtttagcgtttgtaatagttcggttttgatttttattaaagtggaaggtaatgcgcggtcgtttcgtttcgggggtttttgtattttagtcggggaatgttgttattttgaggggggttgtttggttgcggggcgtcggggttgggggtattgtttttttaggacgcggtttcgtagtgtagagcgtcgtcgtttgcg

SEQ ID NO: 6555 - DNA, 878 bp, synthetic construct
  misc_feature 1..878: note = Description of Artificial Sequence: Synthetic polynucleotide
  source 1..878: mol_type = other DNA
gcgattcgcgattgtagtcgttttttaaggttagtttttcgttcgtagtttgtttcgggcggtagtcgtgttagtttttcgttaggattcgtttagggggacgtgggtatcgggtaggacgcgcgttttgggcgttggggacgttcgggatattcggggtttcgttttgcgttttagtttcgggtcgcggtatttcggttttcgtttcgcgtttttggagggaggtatcgagggacgcgtagcgaaggggttttgttaattgttaaagtaggaagtgagttcgtggaagaagcgaaggaggagaagaagaagggaggggaaggcggaggagggtaggggcgcgtagagttacggtttgttttaggcgcgtcggaatcgtaggattttttattttcgtggttttacggttttttcgcgtttcggaggtttgttagtttcgttcggacgttcgtttgtttttaattcgtcgttatggttttatcggacgattttttgcgcgtaggtaaagggatatagcgtcgcgttcgtttttggagcgagtatcgcggggcgggagttcgggaggcgttcgtagtagtcgtagggttatcgaggtcgggtttcggcgattttcgagggaggttcgggaattattttcgatttaggcgttagattcggagtcgtacggggtttttagtttagtttcgcgagcggttgttgatcgtttttttcgcgttcgttagggtttttgtttcgcgttagttatcgcgcgttttttttttgtttatgtcgtagttttcgtggtttttgttttggattcgggatgttaggttgagatacgttttgtaaatttttggtagaaatgggcgtaagggggtggatttcgttttcgtttttcg

SEQ ID NO: 6556 - DNA, 561 bp, synthetic construct
  misc_feature 1..561: note = Description of Artificial Sequence: Synthetic polynucleotide
  source 1..561: mol_type = other DNA
gcgcgggtttacgttggtcgttagcggcgttaattttatttattcgttaatttgttagtttttggattgagtaaaatagtttttaaagacgcgggtaaacgtcgttttaaagtttattattatgtaacgttaggttgttcggagttacgttggtggtatttttttttcgtgtttattttgtataggtatttttagaatttcgtgtaaatgaattttatcgggagacgtaggtgggtaggtcgggtcggtagggattaagagtttgaaagggaatttgttttttttttttcgtagttcggttattaaggtaagaaattgtaggtagagaagttttcgaattcgatttaggacgtcggcgtttgttaggattttttcgtttgtttttcgcgtttcgcgcgcgtttatgttattattacggggagggtgtatgcggtaggtgtttggtcgaggttttcgggagcgagtcgtttttacgtgttttagtttgtttttttttcgaagttagacgttggcgttgtagttttgttgtttgacgttgttgtagaagttcgcgtttattcg

SEQ ID NO: 6557 - DNA, 1235 bp, synthetic construct
  misc_feature 1..1235: note = Description of Artificial Sequence: Synthetic polynucleotide
  source 1..1235: mol_type = other DNA
gcgatcgtagggtttcgtttattttttttttcgggatagtttggatgggagtagttggcgcgagggttcgttttttcgtttttgggtaatttttttggtattgggagacgagatggttttcggagggtggaaggtagtgttagttcggtcggttattggggattgcggggttcggagacgcgcggggttttcggggagtttttcgtcgttttcgttttatttcgttcgggttttttaaatatgtcgtagcgtggttgtttattgttttttttgggtaagaggaggttttagatatttttacgggatttgaattttcgagcgttttgtacggagtagttatttcgttagtattttaaagtgaagttgtttataacggataagttcggagattttatgagaggtcggggtggagaagtcgggggtgaaggggggtaggggtcggcgcgttacgcggtttttattttttcgtttggattttcgtttttttttttttttggatttgtatttgagttgattgtttagttttttagattttttgtcgttttttaggatcgaggttatggtcgagatttaggcgcggagtttagagtcgttttttttttgtatttgtatttgtttttttttcggtagtcgtcgtcgtcgttgttgcgaagtttgaggttgtaaattcgggagcggtttattttttaggattgagtaggaaagcgcgtttcgtttttttgtttttcgaattgttttttatgatttgtttttattgggttgggggtttcggttgggcgtttggagcgagttgttttttggttagggagggcggggaagggcgcgcggcgttttgagtgtttcgagtttttcgcgggttttgttttttgttttgggtttttagcgtagggaggttatttttgcgtttttgttagttgtttggtattagttattttgaagttaattacgtagggagtttgtttatttgttgtagtagcgtttaattagatttaattataattgttttttggttttgatattagtagtagtattagtcgtatcgtcgtttggtcgtttgtaaatttagttttcgtttggacggtgaagtttttaggatcggcggttggagggaggttgttttcggggaataaggacgcggcgcgggtgcgtttgggagagatcgggggagtttttaggagggattttgttcgggaggacgaggttttttgtcgtagtttcgcggatagtttagttcg

SEQ ID NO: 6558 - DNA, 5964 bp, synthetic construct
  misc_feature 1..5964: note = Description of Artificial Sequence: Synthetic polynucleotide
  source 1..5964: mol_type = other DNA
gcggtaatcgagttagatttaagaggggtcggtttcgtttaaattggttttttattaatggtttcggattagtcgcggttgtgttgcgggagtttttaggacgcggttggggttggtgcgcggggtttcggaattttaaattcggttcggttcggtaaggtttagggagataaggtagagaaggttggggtgagcgagaagtcgggcggtcgatcgttagggttacgagtttcgttttgtttttttggaattttatttaattttaaaggtttaaagattttgaaaatttcgaaagcgaaattgcgagttggtttttagaagtttgagaacggttttttaggttttttagcgtcgtttcgggattttcggatattataaacgttattaattacgagtatcggtgttcgtggttattgtttcgaatggtttttattcgcgttttcgggaattttttcggtttttcgcgtatttaggtttttagttttagttattggtgcgtttcgagtttttaggtgttagagcggtggtcggtcgggtttttgtttagtttcggttttttttttttttttattagaaggaaaaatttgggtttttcgagaattttgtggaatgttttttgtaattaattgtatattcgtttttacggtacggtttcgtgtaaaatcgcgggtttcggggttttggagtaaattgcgtttgttagcggcgacgttaggaggataaggggaggggttcgcggttgaaattgtagtttcgtagtatagagttattttaggttgttttttatttcgcggggtttatgggaaagtcggtttcgggagggcgcgtttaaacgtaggttggaggagttacggacgcgttttggtcggcgtgtcgttatcgtttagtttcgttgtttaggtgggaggggttatttgtcgcggggtttttaagttagtgtcgtttgttttcggtttttatttattgatagtacggcgttcgagtgattttgtttagtttcgttttgcgtttttgtaaattacgttgttgcgttaattataaatttggttaatatgtttttgtaattttattatttaaaaacgtttttaggtatttggtcgttgttagattaggttcgcgggttcggaggaggtttttttatttgttttcgttagtttcggggatcgtgcgcggttttcgtgtggttttcgtttacgaggtttttcgggtaggaatcgtcgcgcgatttttgtttagcggtcgcgttttggttacgggcgatttttgtcgggaattttgttttcggttaagttgcgttttcgtatttcggtggtttttattcgagttcgcgtttgttggttttttttttggtttttttgtttgatttcgattttgttttcgaattttatttttagatttttttcgttttggaacgtcgatttttttttcgtatttcgtcgtttatttatatttttcggcgattgttcggtttttatgttcgttaagataagaagatgttttttttcgatgcgtcgagagggtttttaagtcgagtaagggataattttttttttaaacgttgtttttattttttattttttttagagcgcgaaatttaaaagtaaggaaggtaatttttcgtttcgattttacgtgtttgttttttagagtcgcgcgttttcgtttttttgttttattttattattattattattattttggttttttttaagtttcggtttcggttttttattttttattttagagcggcgtggaggaaagtaggagtttattattaagtgtagcgcgttttttgtatatacgaaattcggttggcgtttgtagttcgattgtatttaatattcgggatagttagtttttttaataagtattttttcgttttatttattcggggatttattcgcgtaggatttagtatatataaggcgagagttagttcgttttttagaaagataaaataaattattttttttgtttttatgtattttatattacgtgttcgtagtttgttacgttaaattatggtagggtttggttttaagacgtatatatatattcggggtggttttttttgatatatatatttaaaaaaattgcgtatacgtaggtttgtatattaatttataggtatatacgatagttgcgtttcggtgttttggttcgggttaggggtatttttttattttttttttttttagtaatggatttgatatatagattttaattacggaaaaaaaaaatcggatagtttattttttttttttttttttatttaattcgttaaagcgttttttggggtagttaaagagagtcgaaattaaggggtggaaattttagttgggtttttttttattttaaaatttttatttttagtttttaaaagttattttagttcgttatattgaaattggtacggtttttaaagatttttttttcgtagttgtggcgtttttaagaaaatacgagtacggattaggttttggatgagtgttcggttatcgagaattagttattttttattttttaggattttttagttttttttagtttttttttatcgtttttggttaaaattaataaatatatttcgtagtttttatagttgtattttggcggatttttgtaaaatatatatatatatatatatatttacgtacgtatattaaaaaataaattttagaattagtttaagttagtaattttgaaagggggtcgaataagaggagataatcggaaagtttttaagtgataggatattattttaaagagaaaataatgaataaaaagattattttcgttggagtacgttttaaaattattattgttaattttattttagttgtttaggtaaatgtttttaagggagcgatttcgaatgtttgtacgatttttatttttatgtcggttttcgatttttcgtttttattattttttttttttatttaaattaaaagaaaggggagattttagcgcggaggagacgcgggagcgcggggtaggtagtagcggcggttgcgtcgttaaaatgagtgtagaaacgaggaaggtgggcggcgggaggggataggttgcgttcggggaaggaggatattttgtaatttcggacggattttcgtacggttcggttttttcgagttcggagacgtaggcgaaggggattcgggaagtaaaaatgataatttggagcgtatagaggagtttgaagtttcgtttaagtgtagtcgttttttttttttgtttttttttttcgtttttttgtattttttttagtttttttttattcgttatttttaattttagtttttttaggtttttttttttttttttttttttttttttttttttaggttggaaaaagtttttgattagcgtatttaatttgcgggtcgaagggttgtttttcggttagtttgggcgtcggggatagtagtcggcgcggcgttttatttggtgaagttcgttttgttttcggcgtggatttaggtttcggtcgtcgttcgggagggtatcggtttcgttcgtttgttcgttcgttcgtttttgttcgttcgtttttcgttcgtcgtttttttcgcgcgttcgtttcggtttttcggtttttattatagtttattttaatatggtattttttttgtgcgtatgttcggcgtttttttttttttttttttttttttttttttaagattttgtgtgtgtgtgtatgtgtgtgcgtgcgcgtgtagcgaatttttttaacgattttttttagcgtttgtaaaattttttaagttaattagtttgcgggacgtgatcggttttttttttagttagtttcgcgttattttttgcgtttaagtaggcgggtatttttaggattttgggattttttacgtttacgcggttttttttttatcgcgttttttttttttttttttgtgagttttttttatatatgatttgtagaaagtttttatcgcgggcgttttcgtatattttttcgtaaggataattgggtaaattttcgtttttttggttgcggttcgtgagttgggtttttaatggtttagtcgatcgtgtgtataaatttgcgttttattcgtcggggatcgttgggagcggagataaatttaatttttagggtaattttggtttcgttcgttttattttattttgtgtttaaatagagttttttttgaagttgcgaatatttttaggttttttgggtagggttggaggggtcgaggagagttattcgagggaaaggtgtttcgaggggtaggaaattaagttggggttgttcgggcgagttgttaggtagtcgtgttcgttacggcgttttatggggtatttagttagtggcgggttttatagggcgggaaaagaatcgtcgtttatattttagtaaaacgtggttttcgacggttcgttggagagtttcggcggtcgtgagtttcgggtagggttggacgtttgcggagttttcgggtattttgtttcgggcgtttggggaggaacgcggagtttttagggttttaggtgtaacggttgcgtagagtttaaacgaaatgtttttagtgcggaaaagtcggtgacgttttggtagtaagattaagagttttcgaagaacgttgcgtttttaattagggggtttcgtagagatgtttgtgtgggtttgtattgtatatttttgcgaaatagcgaatggatacgtttgtttagggtttttatggttgttaaagggggtaaaattatttagttttttaaatttgtgttttatgaattttttttatagtatttttttttagggggttaagaggttttttaggttttcgtgggttcgtagttttattcgttttttttcgttttgtatttttaaggagaggtgttcgttttgaagggttaggggttagttatggagtgaggggatcggggttgattacgcgcggtatagatagaggtttttaggcgggtttttttttggacggtggggtcggagttgatttagaagaaatacggagggacgtgtcgagaagtcgttttttttcgtcgcgattttggagagcgtttttttatttaaaggatttgtcgagttgagagatttagggcgggcgttcgtagtcgtgaggttttttgcgtcgttagtatgggaagattttgtttttttatattttggagaacgttgggcgacgattaaagcgtttttcgtcggtttgttattttatgtgatataggagttacgtgagatttagaagagtttagcgattcgtcgcgcggcgtattttaaattttagtttgagtttgcgatttttttagttttttagtttttagttgttggggatattaagtcggagttttgggttttttgttttgtgggtcgttgaaagtagagattttttaaattaatcgaatcgggcgtattaattttttcgtttgtatttcgttgtttttcggttgagtttcgaggcggttttaggtagaatttgttggattgattgcggcgtttagaaatttggagtgtgggttttagatattttttacggtttggtttcgggttttaatatttaagtcgttttttttggtttttttattatatagcggggtttgtggaaagggaggggtcgagagattcgtcggcgtattattgttttcgaggggtttttattttgtgtattgttgaagcgtagggcgcgtcgcggtaggaatggtttcgagtgcggattttttgttttgagttttttatttttggttcgcgttgcgtttatttagtggttttggtttcgtagggcgatagcggttgtttttttttatttgcgttttagatcgcgcggtttcgtttagttttcgggagtcgataggcgtttgttttggtgttagcgtagggtttttcgggggtttggggtaggggtaggggtgcgggggggaaggggagaacgtaatttttttttgtaggagtcgtggagacgtgagttgtaattagttatcgcg

SEQ ID NO: 6559 - DNA, 5964 bp, synthetic construct; identical to SEQ ID NO: 6558
  misc_feature 1..5964: note = Description of Artificial Sequence: Synthetic polynucleotide
  source 1..5964: mol_type = other DNA

SEQ ID NO: 6560 - DNA, 5964 bp, synthetic construct; identical to SEQ ID NO: 6558
  misc_feature 1..5964: note = Description of Artificial Sequence: Synthetic polynucleotide
  source 1..5964: mol_type = other DNA

SEQ ID NO: 6561 - DNA, 703 bp, synthetic construct
  misc_feature 1..703: note = Description of Artificial Sequence: Synthetic polynucleotide
  source 1..703: mol_type = other DNA
acgcgaaataaacgattttaggtttttagtaaagaagtagcggcgcgtttttttttttcggtttagcgtgaaaatacggaaggcgaagggttgtcgttagtcgtttttttgttatcgcgatcgggaaataaagatatattattttttattttttgcgtttttaagggattcgaggaatttttggttgtaagcggttggtatttcggaacgggcgttttattcgttcgggcgaaggtttttggtttattaggcggttttggcgttcgtagttggcgagttttcgtttcgttttcgtcgtcgttttcgtcgtgggttttcggcgttagtttatagttcgttcgcgtttttcgcgtcgagtttggttcggcgttagtgagtttcgtcgtcggttcgtttttcgttcgcgttcggttcgtcgtatggtgcgtttagcgcgtttcgagttagttttcggcgcgttgttaggtcgggtgttaggcggttatcgcgcgttatcgtcgtcgttatcgttcgtcgttcgattttggataataatgcgcgttttcgtttttttagaaagttagggacgtttttagtcgtcgttagagttggttcggttttttagttttttttcgtggtattcgtaggcgagataaagttcgttttcggtgaggttgcgcgcgtttaaagcgtgcgggatgtttagtacggaggtttttaagcg

SEQ ID NO: 6562 - DNA, 1315 bp, synthetic construct
  misc_feature 1..1315: note = Description of Artificial Sequence: Synthetic polynucleotide
  source 1..1315: mol_type = other DNA
tcgcgttttttttaaatatacgtatatttttatatttattcgcgtcgttttagtttgtttatttttaacgagtttaagtcggtgtagtcgcgttttatgttcggttcgtagttttcgagttttagttcgttcgcgttgggcgtcgttgtatttgttagtggcgcgcggtatcgcggtcgtcgggtttcggagcgtttttagcgttgcgggggtgtcgtgggtggtttttttgtttttttttattagaattttgtatagtcggggagaaaatttaagttgttatatttcgtcgggagttgttggttgaaaggttgggagtcgcgttttttgtttggtagggagatttcgtatttttcggtttttaggttaggtttttagttttagagttggaagagttttagggcgggaaggaagagatagtaaggattagaatggggagtatgagattttgatgcggaattcgacggtaggtttcgttttatagttgtttcgtttatagcgatgcgcgttagagttttcgtagttttgatcggtttttttgttttttagtcgtcgtttatcggtcggagggtcgtttttttgcgatttttttttttattttatttttaggtcgtcgtcgttcgtgggttgtttttcgtcgcggttaaaagttttcgcgttcgaggggaagcgatgggcggtttgggggttcgggggcgttaggcggggcgcgcggcgcggggcgcggtcggcgggtgggtgggttatttggcgcggtcgggcgcgtttgtcgggtattagagtaggtgtagtagtagtagtagtagtaggttggcgagtagggcgagtagtgcgtttttcggtcgtattttgagttataggcgtcgtcgttatcgttgttgtcggggcgaagtatagttcgggcggtttcgattcgcggttttcgtcgtcgtcgttatcgtcgtcgtggtcgtagtttcgcgtatttatagcgtttataggcggtagcgaggggcgttcgtagtttattcggtagagttttcgcggcgggcggagaagaagtcgcgttcgggttcgtttcgggttttcggtttcggttcgcggagcgtcgcgatcggttggtagatgacgattcgtcgagttcgtcgtttgttttttcggaggcgttcggagttgttgcgggtttcggtcgtcgttgttattgttgttgtcgtcgtcgtcgtgcggggttatttgaaggttggggcgcggaagtttaatttcgtgttgattgggttttaagttttttgcgttttcgtttcgtttcgagtgttcgcgaatttttcggacgtttacg

SEQ ID NO: 6563 - DNA, 1316 bp, synthetic construct
  misc_feature 1..1316: note = Description of Artificial Sequence: Synthetic polynucleotide
  source 1..1316: mol_type = other DNA
gcggtcgtcggtttttagttttgggattattttggtttcgatacggagtgataggggatttttacgcgttttcgtatttagggcgtttttttagttgcggcggaggtatagagaggttttggcggcgttgtggtttcggtcggtatcgggtttcgcgtagtcgggttttttattttgagtggagttgttttttaagtatttagtttttgttaattattgtgtttaatattaagttttcggggcgttttgttttgcgttatcgcgcgttcgttcgttcgttcgtttaatttatttgttgaagattaggtagtttaggtggttgattttgtggtcggagcggtggcggttgtagtttttttataggtttttgaaggtcgtgatggttaggatgaagagtatcggcgttagtgttaggtcgggttggaaggcgtttatcgtcggtacgaagttgagtagcgcgatgaagataaagtatacgttggtcgggcggtggaattgttcgaataggtttttgggtaggaaggatagtagcgtgtatttggtagttttgagtcggttgtcggttaggtgttgggtatattcgcgtcgtcgtcgtcgttcgtttttggtcgcgttagtcgtagggttttcggcgttcgggggcggtagtaggttggagcgtatcgtgcgcgttttgttttttcggcgttttcgtcgtttcggaggttcgggtttttcggttttcgtcggttttcgttttatggtcgcgtgtcgtcgcgttcggttttttcgtcgtttacgttcgttcgcgtcggttttttaggttattattattcgcggttcgggcgcggcggtgcgagtttttcgtttgcgggacgtacggagatcgcggttagcgcgtcgtttggtcggtttagcgcgtttagttcgcgtttagtttcgtttattttcgtttagtttcgtcgttcggtcgtagtttttagggcgtaagttgggcgggtgtcgtatagagtttttttgttttcgtcgttcgttttcggttcgggtcgttttcgtcgcggtggttacggtttcgttttcgtttcgcgttcggattgggttacgtcggatagcgggaaataaaaaaagttcgagttggaaattttagagaggtttagtttcgttttttagaagtattagttcggttttaaaacgttgtaaacgcgcgttgtttgtagtaggagagaggaaatcgcgaagcgcgagaaaaggcgttttcgtttttaagtagttcgcgcgtttttttaggggttagatttgttttattttggacggcgaaacgatttcgggagatttcg

SEQ ID NO: 6564 - DNA, 1110 bp, synthetic construct
  misc_feature 1..1110: note = Description of Artificial Sequence: Synthetic polynucleotide
  source 1..1110: mol_type = other DNA
gcgtcgggtttggtttttgtggtttcgtaaattttttagtttgtgtgttacggcgacgcgtagcggttgagtcggagtttacgcggcgcgcgtttttcgcgaggaatttttcggtttgtaggttgtttgttattttcgtttttcgacgcgtttttttttggttcgcgttttcggagttttttttttttttggcgaggatttttttcggcgttcgcggtttcgattttcgtcgcgttgcgttcgttttttcggtttcggttgtttcgttgagggttttttttttttaggtatcgtagtcgcgttttcgcgtttcgtttttcgagcggttcgtttcgttcgatgtttcggtttcgtttcgcgtattgagcgtttggtagtagggcgtcgagtttcggggcgttgcggggcgttgcgtcgagaacggtcgggtttgagttttgggcggtttttagagtcgattagagcgcggggaggcgggggcgaggaggaggggattcgtcgtcgggggttggttgtttcgtttcgagtcgatttttcgttaatggtttaaagggatatgtttaagtcgttttttatagcggcggcggcggtggcgtaggagatttagatggaattgttagagaacgtggttttcgcgggggcgttcggagtcgtcgtataggtagcgagagcgcggcgtttttttttttttttgtgagtcgtcgggtagggtatcgatttcgggttttttcggcgtttttattgtagggatttttagtttcgtatttttttttttcgtcgtttgtttattttttgttttttttttggcgtcggggattttgtttttttgcgtttttttttggttttgtttcggtttttatttttttttgttttcgaaaagttagtggggaagggcgggggagatttgttagtttttttagatttttttcgggttgttttagttggtttttttcgttttttttcgggagaggtatatggagagatatgaattaggggagtggattggatttgttgaagatcgtgagttcgggtgggcgggagggggttcgtttttcgtagcgttttttacgatgtcgatttttttggttacgtttcgagtcggggtgggcg

SEQ ID NO: 6565 - DNA, 1655 bp, synthetic construct
  misc_feature 1..1655: note = Description of Artificial Sequence: Synthetic polynucleotide
  source 1..1655: mol_type = other DNA
tcgttttcgttttcgttgatattttgtaaagtcgcggcggtagcggcggggattacgttgcggtgtattatttttcgttattttttcgcgttgggttggggtcgagggggtttcgtagagtcggtaatcgaatcggttttggtttgttttttttattttttagttattattagaattagttttcgcgaaggggcgagttgtggttaattttttcgtgtttagggagatttcgttagggtcggggcggggcgcgatcgtttttcgtagtcgggcgcgaaggcggttcgggagttaggtgggtgtggggcgtagttggcggagttgtttagggcgtgcgagtaggttgcgaggatggcgtttcggcggcgcggaggtatcgtttcgcgttttttcgatagtttttcggtttgtttttttttttcgcgttttggggtagtcggttgtttggggcgtacggggttggagtggttttttttttttttttcgttaggttttttcggtttaatttgttggtcgcgattttttagttagtttcgaggaaagtgtagttattggataggtttgtgcgggttgtcggttttagggaggaaggtgggagaagtttggaggagcgaaggggagggcggagggaggagggaggagggtgcggcggtagatttggtaaattgcgagttgttttttttttttaaagtgtggagaaggagcgcgggggagcgtggcgacggtagcgtttttttcgttattaaatttttggggtttcgcgggggtttggggttatttttttttgagttcggaggaattttttttcgataggttttagcgtgatttttttttattttattttttttttttttttttttttttttttttttttttttttaaatatattttttttttggtttcggattttagattgttgtagttttaatttttttagggtttagttttttggagttgtttattttttcggttgcgagaaaggacgcgcgttttgcgtcgggcgaagaaaagaagtaaaatttgtcgggagggtttcgttattaatttttttttcgtaaatttaaattttttgtcggggttatttttagatagaggaaagtttttgtagagtcgattagttttagtggatttggggtaggtagcggcgttggttgtggaattagatttgttttgaatttagtggagcgtatcgttggggttcggaagttatcgttcgcgggtatcgggttggcgttgttcgagtggaatcgatagtttgcgagtttcggttgtaagtggtttttttttttcgcggttgttgtttagtgtcgggtgagggttgcgagtgtggtaagttgtaaagagagttttagaggttcgaagagcgttgcgtttttattcgcgttcgttttttttttttttcggttttttattgtgaaatcgtagcgatatttataaaggttttcgggttttatcgagatcgattcgtagcgtttggttcggtcgtgtttattgtatcgggagttttcgagtatcggcgaaggattggcgggtggggtagggaggtggcggcggcggtatggcgaggttttcgaaggtcgatttggtcgttgtaggagttatgttattttgttatttttttacggattagttttagttcgtcgatgggaaattcg

SEQ ID NO: 6566 - DNA, 1655 bp, synthetic construct; identical to SEQ ID NO: 6565
  misc_feature 1..1655: note = Description of Artificial Sequence: Synthetic polynucleotide
  source 1..1655: mol_type = other DNA

SEQ ID NO: 6567 - DNA, 304 bp, synthetic construct
  misc_feature 1..304: note = Description of Artificial Sequence: Synthetic polynucleotide
  source 1..304: mol_type = other DNA
gcgggcgttggaaggggggcggggtaaatgcggtcggcgtagaggtggggagtaggtgggaaaggtggaggcgggttcgtttttggagatttatttttgtttttattgtttttcgtttgttagttttatagataggtttgaacgcgtagagagttttttggagtgttttgattttgttttcgagagggtttttaattttcgtatttttttagtggttgttttggtaggtgcgcgttttgcggggagttgcgtttcgggggttatcgtcgagcgggagttgttttttggaattttgtttatcgcg

SEQ ID NO: 6568 - DNA, 1666 bp, synthetic construct
  misc_feature 1..1666: note = Description of Artificial Sequence: Synthetic polynucleotide
  source 1..1666: mol_type = other DNA
gcgtattttttttcgatcgttagtagtataagtggcgatatttttatggagcggtcgcgtcgtagtttgtcgtatttagcgcggacggtttggtcgcgcgttttttcgttcggacgatcgggcgcgtttgatattaatagttcgcggtttaggtacgagcgggcgtcgtatttgatttaatttaatttataatcggtcgcgtttgtaggtgtcgttttttgaaatcgttatttaggcggtcgttgtttatttttcgttgcgtcgcgggttttgtagaagcgtaagaatggggttgattatttcggtgtttatatgtcgtttttatacgtttttattttcgttcggcgtaagattttttttggttaaaagaggcgtttaattagttttggggtcgcggagagttagcgtggtcgataaagttcggttttttaggtaattcgggttttttgcggattcgggagggggcgcgcggggtcggagtatcggttttgggttgcgcgtttttttcggcgatattgtcgtttttttggttttcggttcggtttttcgtaggttaaaggtttatttgtcgggtttgggtggttcgggttagcgtcgtttgcggttttcgagtgcggttggttttaaggtcggcgtttttttttcggtttttagtgtttagagttaggttagcgggaaagaaggtagtatggttcgtaaaagataggtggtagtggtagttttgtatgatatttgttttttttttttgttttttattttggggaaatattggaaatatttttttttttatgcgtattcgcgttttagtatcgagtgttttaagttttgcgcgtagcgtcgggtttggaaggcggcgaatggttgtttagtcgtcgtttttattagtgatattcggtcgttagttttcgtttaggatgtgtatatttgttggtagtattggttcgggtggtagttatcgggttatttattttataggtataatcgtatttaatttaatttggaattcggagggttgtgcgcgtcgagttgggatcgcgttttagcgagtcgggtttttggttgcgttagggtttaggtcgagttatttcgtcgttcgcgtcgtcgcgaggcgggatatcgtgtgatatttttgtcgtgggttgggcgtcggtcgcggggcggagagcgggtgttttatttcgttttattatttgattttcgttagcgtttgaggacggcgtatttaattcgttttattcgttgcgttttgtgaattagcggcgggtagggcgggggaggtcgggttgggggagggtagggtggttttaatttttcgttttcgtttcgtcggtttcgcggagtataagtgttgggatttttacgggtaggcgtgttttgcggttggaggttcgagcgtttagggtttaggagacgtggcggatatagaggggtttgtaggtacggtgattttcgtgtttttgttttgaaagggtttgaaaggagcggtttatggtgtattattagttaagggtttaggtattagcgttttgtgtcgggaattcgggcggtcgttcgtgttgtaggtgtttgttatataaacgtttcgggagggggagggtaggtcgtcggattgggggtcggggaggggttttcggtttggtttgtttttgttattcgcgcggtttcg

SEQ ID NO: 6569 - DNA, 5030 bp, synthetic construct
  misc_feature 1..5030: note = Description of Artificial Sequence: Synthetic polynucleotide
  source 1..5030: mol_type = other DNA
gcgttacgtggagagttatacgaattttaagcgttttcgttttttagtttttcgcgggaaaacggattagggtgttaatgggttttgattatttgtattagcgttatttgcgagtcgagggttaagagtattttttcggttttggtggggtacgggttgttacggtgtttgtaaagttattgtttgaggggtcgcgttatgttttgtagggtttgtcgtttgtgttttattttttcgttattttgtcgggcgttgggatatggggagaggaggcggttttggtgagcgacgcgtttgttcgttcggacgttttacgtttcggttaagttcgggtttcgtatttaaattgcgtatttttgttttgcgtttttgttttgcgcgcgtttagagtgtttgggagaggtaggaagtgggagttatatagtttttggatggggagattatttcgataggtttattttgaatagggggatattttgaatttaatattttaaggttagaggtttagaagacgaaggttaagtgatttgaagaatattgttattttagtcgcgtatttgggtagcggggttaattgttattttttttttattcgttggcgtcgtattttcgagtggttttggtttggtaggtttggtagggtatgcggttggttttcgaaatttttttcggggattttttgtttgtttttagaggtttttcgtcgtttgtggttaggggaaaggtcgtcgattggatatagggaataaagtaaaggagtattgtcgtttcggttttttttaagttattttttttgattttttaggaaaagggggaaattttttaaaggagttggtggtttgtggaggaaagttgtagaatttaaaaatatcgtcgggtcgtttttcgattaagggagggttaaaagtacggtaagttttgttttattatgtaaggtaaaaagattttaggaaaagtatatttaaagggggaggaggtagaggtagttaggagtttggagcgtggtttggggcgttgcgtttttttacgggttcgggaggtgtcgcgcgcggtcgttagcgagtttagtcgtttttcgaggtttgcgcgtttgcgtcggagttttttgggtttttgtttttttaaatattttgaaatgtaattttattcgaaacgattggtagtaatattttgacgaaatcgaatttttgttttattaagtagcgacgtcgtagaataagtagttgatgtaatcgtttaggtggaggcggttaggacggtcgttttttttcggcggggcgttcggggagtcgtcggatcgggttaggtagagtttgttttttatttatcggtagtttgagtagttggtttattcgtaagttatcgttttttttagtatattttttatttcgttaaatttaaattcggtttcgtaggttcggggttttttttttcgggttcgtcgcgggtttagtcgagtcgcgtttacgttcgggattttttggcgggaggcgattttttcgattttttgggttaggcgagtcgcggggttttggcgaggggttcgagtgatcgaagagaagttcgcggagtttgagtttggatttttcgattgttcggtttcgtttgtttttttgtatcgagtttagtttttttttttcgtttttagtcgcgtatcggtatttatagttcggagaggggtaaataatttttaatttcgaggtttaggtagcggagggtcgaggggtagtttttggcgtttttagtttttattaagttttttggagttgtttcgacgaattgattttttatgttttaagataggagttttttaatatgagaatgcgcgagttttggaggggtagatttgtatttttagggaatttcgggttttttttcgtttattcgttcgcgttgttacgggatttcgttatagtttattatttttattttttcgggtcgtaggcgggtagggtttttaggggagtgcgtatattcggtttttcggtgttttaggtcgaggttgtttttgaggggcgggtcgtcgggaatgtttatttcggggcgggcgtgaggattgtttaggatatcgttgtagggtcggttatttcgttttcgtttcgaggcgttttcgtttttaaatagtatcgtatcgttgagtttgttgaagacgatggtgtttatggtgtcggttggtagggacgcgcggcgcggtcgtagagtttcggggttgggtcgtcgggagtttcgtagcggggttcggtttttaggagaggaaggtgtatttcgttatttattggttgagagtgtttagatttttgtaggtttagggttttgaatttggtcgggtcgtcgggttgcggagtcgaggggaggagcggcgtcgtcgtaattggtagggattttgcggttttttttagttggttatacgttttcgtttttgtaggtttttcggataggtatttgtttttttttttgtttgggcgatcgatttttttaatttttttattttttagaattataatcgggaattatttattcgtagaggtaaaggaaacgaatttttaaacgagtttttgggttttagtttgaatttgggagaggtatatttcggattgcggagcgcgatcggcgtgaggtcgcgcgtggttttttaattatagtagaagattaaagtttttaggaattttaattcggggcgttaggaggggttggatggaagggaagatttggggtaatgtgttaatcgtatttataagattttttagtttatgagttttaggttatatcgggatttgggggattttcgtgttttttagatcgtggatggtttggttgaaattttcgtattttttgttcgttaaggtttttcggggtgaggttgggtttaaggataggaaaaagttaagtggcgttaggacgaaagtattatttttttttttttttttttagaatttttttattattttttaacgcgtttcgggaagtgtatggttttaaggtttaaggcgttaggatttaggtttttagagtttttaattagtgttattttttttcgtagcgcgggtgttagtcgcgagttcgtagtttttcgatattcgtttttttttggggttttcggggatttttttagaggttgtaaaggtgttagaagtttaaggtaggaggtagtttggtcggcgtatttttcgggttattgttgttattgtcggggagagttagtagtttatttttggggtcgcggaggttttgagtttttgtttgtcgcgtatcggcgttaggagtaagttcgcgcggtcgcggagtcgtagagttatagttttaaggcgcgcggcggatttcgttcgttttattttttcgtttcgcgtttcgggatagttttcgtttttttcgagcggttttagtttcgttgttagcgttttttttgttcgtttagtcgcggtatgggttgttattttattaatatacgcgcgcgcgtatatatatatatatatatatatatatatatatatattttttgtttcgttaagcgtttatattcgttaacgttttcgtttcgtttttcggttatcgtagtagaggttacgcgtgatatttaggattacgcgtgattatcgcgattaaacgacggttacggtttgtgttcgtagggaagtgaagttagatttttgttggatgtcgtgtgttttttaggattgcgttttttcgcgtagataggtacgtgtttggggtgtgtatatagtttcggtgataagtgttaaagagaattttcgtgtttgtagtttttgttttatagttaagattcgcgttggtgtttttttttaaaattatgtttttagggatgtgtgtttatgttgttttatttgtataagatattttttttcggttcggtttttttcgagttattttagcgcgtttttttagatgcgacgacgtgttttttttagcgaagttattacgaggttagttatttcggatattttttcggtagttttaagtttacgtagagatcgtagatatagatattcggcgcgttgtaggtttgtaggtagtaggtttagaggtaagcgatggtaaaggttcgagcgttgttttgtcgtaaggggttcgggggcgtgtgaattatatttgttgatttttttaggattttcgcgcgcggttattcgcgtttttttttaaattatttatttcgatttattttagattgtggtcggggaggttattttttgtagaagtgttttttttttttaacgtcggcgaataattttaaagtaaaggaggcgcggttaggtgggtttttaagtttcgcgtagatttttgggttagttttggtcgttattcgagcgtttttttattagattttggagggaagttgggggaagggcgggagagtatcggcgtttagggcgtaggggttagagcgagtttggcgtttcgtcgtagtcggttgagattcggcgacgcgggggttgtatttgtggttgcggggtcgacggtcggttgtagggcggttggttttttcgtttcgagattaggcgtatttttattttcgtcgtatgttttttacgcgggttttagcgcgtttattatcgttatcgtcgtcgtttcggttttatttatttagttcggcgcgcgtcgttcgggaataggaatagcgaggtttttttatgttttttgattgtcggttttagtcggcgaatattttgcgggcgcggtatttacgttttcgggcgggtggagaggaagcgttcgcgttcgttcggtcgcgggggttgttgttaatttttagtagaggagtcgttgtcggggagtttcgggttcgtcgagtttttcggagtcgggcgcggtttttagattcgtcggttttgtagtcgtggagtagacggggttttttttttcgtattttaggagagaaattggagaagttgtcgggagcgttcggtttcggttttagaagttgagaggttgcggtgtaaatttcgtgttttagttggttcgattgtcggaaattttattgcgcgtggttaggcgggagaggttattgtgacgcg

SEQ ID NO: 6570 - DNA, 2868 bp, synthetic construct
  misc_feature 1..2868: note = Description of Artificial Sequence: Synthetic polynucleotide
  source 1..2868: mol_type = other DNA
acggttttacgcgaggaagagggcggggagcgcggatcgggtgtgggaggtcgaggtgatagtaggtgagggtcgggtgcggatggggaagtgagataagtatcgtgtgggtattatttatttcgttttattaaggaggttgttggtaagcggaatttttagttttttttttaatttagttgaagtttaattttattgaagttattttttatttcggttcgtttggggggaaattaggcgtttttggaagggaagggaagggagttcgggttgcgcgggttaggtagttttttttcggtcgtcgcgtgttttcgtcgtttttaaatttgtttttttttttattaagggaatttttcggggagtttagatcgcgatttttttttttggtttcggggtgcggggggcggatacgcgaggcgtgggattgatggtagttttgtttttaggaagtaggtaggcggggatttttgggcgttcggaggggtagtttcgagggtatagggtatagggagaattagttagatttttttttgtttcgggtagtcgcggcgggtgtggttagcgcggaggtaggacgtcgtcgagtttttaattttatttttttaatttcgatagttcgtcgtttttttgatcgcgtttttacggtttttcggtattcgtttttttttttttattatatttgaggaaaatttttttttcgttttttaatttaaatttagtagtgtttacggttgtcgtaaatcgttcggtttttagtaataaggtttcggtcgtagagcgagagtttttaggtgtaaggaaggtgatgtcgtaaagtcgggagtgtcgtaaattaggtgcggtggggaggggggaggggtggaggcggaggggtgggggggaagggggagggagggggaggaggtgattcgagtatttagatataagcgagaggattatggcggatggttttaggtgtaagcgtagaaagtaggcgaattcgcggcgtaataacggtgagtggcggaggggatcggggagcggcggagttagggggagttgggtagtcggggcgttttcgggggtgaggggggcgagtcgggttgggggtagtcggggtagggacggtaaagtggagtgggaaagtagaaagtagtgttttttgttttttttcgttgtcgtcgttgtcggagtcgcgtcgcggtcgttcgttttttttgaatcgttatgttttttatttggttttttttcgtttagcggttttcgtcgtttttgtcgtttttttggatcgttagtcggcgtcgacgtcgtcgtattttcggcgtagggcgggcggtcgggacgtattggttatttttttggtttcgggtggagcggttgttgttttttttcgtatttttttttatttttgtgtttttcggcgtttttttttttttttttttttggtttttttagcgcgatttttttttagcgtttaggttttcgggagtcgcggaataaatttgtgttcggcgttgatcgtgtaaagtggttttcgcgcgtcgcggtttcggtcggcgtcgtcgttgtcgttcgggtttcgcgattcgggtcgggttgtgggcgcgcggtaggcgggttgcggcggcggcgggacggggcggtcgcgggttgcgtggggtttgtgcgcgcgtgtgcgcgggcgtcggttgtgcgcgtcgcgggcggatagggttcggtcggcggcggtaaagttgggattcgcgggtcgggcgcgttcgcgtaacggggattagaggcgcgggggcgcgggtttttaagcgttttttttttttggcgtttttcgttgttcggtttagagtttcggtttggggatttcgcggcgagtttcgcgagtggggtttacgtttggcggggcgcggcggggcggcgcggggaataaggtaggaaaggtatttatttaacgtcgtcgggagtcgcgcggatgggggcgagttgggcggcgggtgtgtttgcggagttgttatttgggtttagagatcgggaagtattatagatagatttttttttcggggtagacgaggtttttgcgtcgggatgggtcggtgtgcgtgcgtttcgcgtttttttttttcggtttttggggaagttgttatttgggtcggacgtacggagcgttgaagtcggataatggggtttggatggcgttttgggtttcgggtggaaggagggtgggggagggggcggacggatcgacggacgcgcggggttgttatttgtatcgtagttgtagtgtttattgatttgtgttgttgtgttaagggaaatatatatttttttgtttggcgtgagagttaaaaaaaaagagagatagttcgagggatcgagatttgaatatgtggtggtggttgtatagtcgttttttttagtttggagagacgttgtaagttgattgtatttttggttatttcggggcgatgttatgttttttttttttttcgtgtagtagcgaaatgtttgttgattgttattgtttggatagtttttgtggcgagaggggcgagatttgttcgttcgggggcggcgggagcgtagggagagtagttttcgtttgcgtcgtttcggtatttgtttgtataataatgggcggtaacggttttgtcgtcggtcgtagtttaggttatataaggaattatacgtatatttcggatcgaggggttcgttttggtttttgcgttatttttaaaacgatttttaagagaggggtaataaatgcgtttataatgggatcgttgtagcgtcgagaaaacgaggaaatacgtgtttaggagaaaattttttcgtgtttttttagttttatttttcgcgtttgggtttttttttttttttttttttgggatgcgaaacgcg

SEQ ID NO: 6571 - DNA, 2678 bp, synthetic construct
  misc_feature 1..2678: note = Description of Artificial Sequence: Synthetic polynucleotide
  source 1..2678: mol_type = other DNA
gcggttggacgcgcgtttaggttcgcgtcgttgcggatcgcggagttgtgtagaagcgcggtttggcgggtggtataagttcgatagttgcgtcgcgtagttcgttcgcgtttggttaagagtttcgcgagggtgtggggagaggatcggtttcgtagggagcggaggttgcgcggttgtatcggattttatagttttaagtcgcggtatgaggcgaattttgtaaagcgcgttttcgttatgtatcgttcgatttttagtattgtgcgtagtaggatttcggagtttattcgtttgtggaaatcgagttcgtagcgggaaggtagtgggtggagggtgggtaggtaggggtttggggttcgcggttttttattttcgcgttttttcgcgttagtttcgaacgtttttttggggcgtttttgtttagttgtttcggttgatttcgttttgtagttagtttgaggttaggcggtcgttttttgtaggttataaattttcggcgtaaaagtagggttttgaacgcgatatcgtattagagcgtttagttaagcgagttgtttttatttttattgtgtcgggcggcgtaaattgcgggcgtaggtagaggagtcgcggttttgcgtcgggcgggagtcgaagtttagagtttcgttagggttttttcgtcgagcgtatttatcgtcgttgaggtagagcgcggttagtacgaggattagtacgattacgattttggcgtttatggtgcgggcgggcgggcgggcgggcggacgagcgcgggtcgggggtcggacgtcgagcgggtaatgcggttgacggagagtgaaagtgcggcggtgggaggcgcgcgtcgggcgttttagaggggagagttaggcggggcggggcggggcgcgcggtgaggggcgggttcggagtcgagtgttggtcgtggtcggggtttttgacgcgcgattttttcggcggtattttttatttatttttttcgtttttttttcgttttttttgtgttttcgaggcgtagtgcgtttcggtttttgatttttttaggtttcgttgggtttcgtatcgttggttcggtttgtagtgaggttcgtagtttgagcgacgtcggttggagggtcgtttattgtttttgtgatagggttttattggagagattgaggattttaggcgtaaagtggggcgcgcgtggaaagttgcgggacggggtttttcgatggcgggaattgaatgagaattaatgaaaagtaaataagttagtttcgggcggagggtttgttggcggtggcggtttaaggtagtcgagggggttttgttttttgtgcgtgggggtttaagttcgttatttgttcggtttgcggcgtagtcgtcggtagagttcgatttgcgggaatgagattcgtttttgtagttagcgtggttcggattttaagtttacggcgttattagtcgagttttagttttttcgtttgtataaataaagtagaaggcgtcggcggtttttagtaaaagcgaatgtagtttttgtattttcgattttttaatggtgaaatgagttaattataggtttatttcgcggagtgggacgggagatttaatgagattcgttttacgtcgcgaaattttttgtatcgtgtttgataagtagatagtatttaataaatggtagttgtaagtaagttttttaaatttaagtatttattgttttatttaagaaaagtttcgtgcgatttaaagagttgagaatttttttatttcgattttcgatttttaggatagtattattggcgtttgttttttgggtttagaaaattttttttacggagtcgtttttcggcggtgtttagtttttcggatattttcgagatattttagatggttttagttcggtggcgaagggagggtgtaggtcggtatttaggagacgtgggggtgaggagagcgtttttttgggtttcgttttgtgatcgtaggttgttttagttatttttttgtgttttttttagtatagcgtttagcgaagtggggttagtcgtcgcgtttatttaggggtttgttttggggatacgtttttgtttttggggagttttggtcgtcggggagtgggcggttagcggttgtattaggcgggagcggttaataggaggttgcgagggtttcggaatttcgttggtgggagtaggtgttttttgtgtattttttttttaaaattattttggtcgttagatggttgtgggtcggtattttatttatttatttatttatttatttatttatttatttatttatttatttattttgggtattgggtttggagtcgggaattttattgatttggttttgtttttaaagaattgaaggtagtgaggtttagtgaagaaggtagtcgtcgggcgtttttaggtttttgttgggttgggtcggggagtttggtcgtttatcggtcgtagcgttggggtttcggcgttttttggtggcggcgttttttttttcgtttttagagttttggttagttttatttttgcgtagttgatgaaattcgggagggcgaaggggttcgcgggaaatttatattcgggtggaggggcgttttggagttcggagattcgattttgcgggagtcgcgcgtagtttcgtttgtttttaaatttggttaaagtaaacgttatcgtttttcg

SEQ ID NO: 6572 - DNA, 2756 bp, synthetic construct
  misc_feature 1..2756: note = Description of Artificial Sequence: Synthetic polynucleotide
  source 1..2756: mol_type = other DNA
gcgggagggcggtagcggttaggttaatattcgcgatttcgattggggcgcggtaatttttgtttttagtttttataagttttcggtcgcgattcgcggtcgagaaattttgcggaggggtcggtgggttagagttaggttaggtagttgttgagtttttttttttttttttggcgggagtgtgtgtgtaaggggttagggggcggagtcggagaaagggttgggggtgttcgtgtttagcgttttttcggacgcggttttataatttagttgcgagaatagatggacgtagcggcggtttatttcgggggttttttgttcgttgtgcgtcgaggtttaggttgaagcggagatcgtaagtttttggttttcgttttttttaaggggtttcgaggaatcggttgtcgcgtttttttttttaagaggagaagagcgggcgttgatttcgcgagttttagaatcgcgggcggggggtaggtagggggcggggggtagagggttagttatcggcgcggaacgtttattttaggggttggtttaagatttttatatcgagagttttttttgggtttttagttttggagtatttggagagcggatttttgttcggttacgtttcgttttcggttttcgtttcgtcgacgtcgtattagtatgagcgacgtaagtggttcgggtattattcgggggttgggattcgtcgcgttatagtttcgagtggaagggaaaaaaaaagaggaggcggcggaggaggtaagagtcgacgcgaggggaggggagcgtagcggcggggttaacgggcgggtaagcgggcgggcggtaatagtatgtttttcggttagcgcgggcggttttttagcgcggcgggggttgttttgggcgcgtttcgggcgaagtgcgtttagttttcggtttcggtttttcggcgcgttcgatttttcggtcgtttttgagtttagtagtcgcgggtttcgggatcggttaagagtagttgtaacgtttcgtcggacggagtttttttttttttcgggacgttgggttatgagtttcgcggttatttgaggtataggggagtttgttcggttaggatagttttttcgaagtttcgtgttttcgtttttgtattgcgggacgttagcgttcggttttggcggaggcgttttcggaagagtatcggggtgggggtatggaattcgcggaatttgcgggttaggttcgggcggcggttattaagttgtcggaggttgtgggcgcggcgttgtaggagtttcggcggtagaggcgtttggtgtttgttatcgtgtgcgtggcgttgttattggataatatgttgtatatggttatcgtgtttatagtgttcgattatatcgtttatatgcgcgggggcggcgagggttttattcggattttcgaggtgtgggagtttattttgtcgttgtttatttcggttaatgttagcgtttatacggttaatatttcggcgttttcgatagttgcgtggttagcgggtttagtttttcggtttcgttattttacggagagcgaagacgtgaagatcggggtgttgtttgtttttaaggttattttgtagttgttagtgaattttttgagcgggttttttatcgatcgtatgagttacgacgtgtcgttgttgatcggtttgggcgttatgttcgtttttatagttttgttcgttttcgtcgaggattacgttacgttgttcgcggcgcgtagtttgtagggtttgggtttagttttcgtcgatacgtttggtatagttatgatcgtcgataagtattcggaggagtcggagcgtagtcgtgtattgggcgtggcgttggtttttattagtttcggaagtttagtggtttcgtttttcgggggtattttttatgagttcgtcggtaagcgcgtgttttttttggtgttagttgtcgtgtcgttttttgacgcgttgttgttgttggtagtggttaaatttttttcggcggttgtacgggttcgggttaatttgttagtgggtatttttatttatcgttttatgttagatttttatattgtcgtggtggtcggcgcgtttattatttgtaatatttttttcgtttttttcgaatttattattgttacgtggatgaagtatacgatggcggttttcgagtgggagatgggtatggtttggttgtcggttttcgtgttttatgtgttgggcgtttattttatcgtgcgtttggcggcgcgttatttatatttgtagtggttgtacggcgcgtttgggttggttgtgatcggcgttagttcgtgtatcgtgttcgtttgtcgttttttcgcgtcgttagtggttttattatgcggtttttgttttggtatagttttagtcgatatagtattgttgtttacgttcgtttttttggtggacgtgcgttatgttttagtttatggtagcgtttacgttatcgtcgatattttttattcggtggtttacgcgttcgggtttatagtggtaggttatattgtgtattcgttgggttttgagtagtttagttttggtatgggattggttaatttgttttatgttttcgttttgttgttgtttcgtaacgtgggttttttgacgcgttttcgtttcgagcgcgatgtgttgtttgatgagttatcgtaaggtttgtacgatgcggtgcgtttgcgtgagcgttttgtgtttggttaggacggcgagtttcgtagttcgtttggtttttttgatgcgtgcgaggacg

SEQ ID NO: 6573 - DNA, 990 bp, synthetic construct; identical to SEQ ID NO: 6343
  misc_feature 1..990: note = Description of Artificial Sequence: Synthetic polynucleotide
  source 1..990: mol_type = other DNA

SEQ ID NO: 6574 - DNA, 829 bp, synthetic construct
  misc_feature 1..829: note = Description of Artificial Sequence: Synthetic polynucleotide
  source 1..829: mol_type = other DNA
gcggtgcgacgaggttaggttcgcgttcgttaagttttagggtcgttgtcgtcgacggttatggaggacgagtagttcgatagtttggagggttgggcgtcgtttcgggagggttttttcgtcgatttttagaggtatcggttgcgttttttggtggtttggaacggcgcggagggtaagtttgttgtgatttgttacgatcgtatcgcgtagtagtcgtagcggcgcgagggggttcggttggggttggagtataagttcgaggtcgtcgtgttttcgtttagttgggtcggtcggttttcggtcgcggggtttcgcggcgcgcgtcggtagttagcggcgttgtggtcgtttttggaatattgttttttacggttgtcgtcggagttggacgtgggcggcggcggggtttgaggtttggggttcgggcggtgggcgttgttttggtcggcgcgcgtgggtttcggcgaggcggcgttgtaggagttttgcgggtagttggagcgttatttgggcgcggcggtttacggttgtggcggcgttatcgtgcgcgacgtttttttcgcggttaagggtcgcgcggtcgattgcgagagttcgcgcgagtttcgggagcgggttttgcgcgtttgatgggtcgaggcggacgcgcggttgcgttaggtaagcgaggtcgggtcgtcggcgtttgatcgcgtttgggtggtttgggattttgtgggaggttttttcggcgtcgagagttttggttgacggttgatggggaggagtcggcgggcggagaaggttacgggttttttagtatttttatttgcgcgggatcgttgcg

SEQ ID NO: 6575 - DNA, 4119 bp, synthetic construct
  misc_feature 1..4119: note = Description of Artificial Sequence: Synthetic polynucleotide
  source 1..4119: mol_type = other DNA
tcgtgatggtgttaaatcgagaggagagttcgagaagggggtgggtgatttttcggttgttttttattttcggcgttttgtgtttttttttttttttttttttcgttgcgttttagtcgagggttgttggagcgaatgggggatgtagaggaaggagttcgtaggttttcgtgtttttttaatttttttcgtttttttcgatagtcgcgcgttttcgttttagtttaaggttagtggttcggtttcgaggaaggcgcgggggtcgcgagagacgattttttatagtatcgttaaggaaatcggcgtcgtcggtgttttcgcgggtttttttcggtagttcgggggttgtttttcgtcgttgcgcgtttttttttattatttattcgttgttttcgtcggtcggagttttcgttttattaatttttttaatttcgcgggcggcgggtaggtgggggcgcgtttttaggtcgtaagaagggagcgtttcgagattttttcggggtcggttttgtttaggagggagttatcgacgtttttttttggcgttttttcgtcgttcggttttttaggcgcgtagtttttttcgagagtttcgaattttatcgttattttgtttttgtttcgggagaggggaggtcgaagtgttgtcggttagagggtttacgtaagtttcgaaattcggggggacgttttttttatttttatttttgcgttcgttcggggttgggcgcgtcggggcgtacgtacgtcggtttgttggcgatttggcgtatttgttcgcgcgttttggttttagttgtcgtaggttttttttgtatttatttttagtttttaaagttagtgtagttagtatcgtttatttggagttttaatttttttttgcgattttcgtatatttattgtattttatttattattttcgggtcgcgtaggttcgggtttgcgaagatacgcggtttattttcggttatttcgtttatttggttaaaggggttttttagttcggtattgggaaagatggttatcgacgtggcggcgaggttttttatcgggtagatgttgttagatagttggtgtataaaattattgagagttattgggattttgtttacggttttggcggttattatttgtttttcgtataatttggagatttaattttttcgttatttggagtgttagaaaagtcgttttggagaggggttggattgagtttgggatggtatttttttttgttttttatatttaaaaataattattatatatattaagaaaaaaaaattaatagaaataaaagtagtaaataagttgttgttttttaagaaataagaaaaatgtttatttgttattgatttttttttgtttgtgtttcggttgttgggaagttaggagttgttggtgtagtgttattataatagttagtgagttttttcgtcgagttattaattaattgtttttcgtttagttagacggaaagtgttgttttaagtatttatgggtaggtttttaatattcgtgacgtcgttgtttatatatggattgaggaatagggttgggttaggcggtttttgtcgttatatggttgatttgtatatacgggttcggtcgcgcggatttcgtcgggttcgcgatttttagttcgtaggcggcggggatcgttggggtttcgggcgcgcggttttagttgtagtttgggttcggggcgtagggatcgcgggggagagggcgcgttatggatttagttatagttatagtaggagagcgagttgttttaggttgcggtttagtttttcggggcggggaggaatttcggttttttgggattttttaaaaaaggcgaagattcggtgtcggcggtttcgtttttttagtttttgtttgggagttatttcggaaaattaaatttcggaaagaaatcgagcggagtcgagatattatagttaaatttttatttatttttttggtagtttaaaatcgtaagtaaaaggaggtagcgaagaaaaaaaaagttatatgtatttacggaagttgattgtttttttttgaattatttggtggaaagaagtggttggtgataagagtgaatgcgtattgtttttttggaaagtttgttttatttatataggagcgaaaacggaataggtttgggttgtttgtttgtttaagtattttgggtattttgggattgggagggtaaattttaggaggagtagaattattgtggggagtttcgagagaaatttttagtcggagatatttttttttttttgttcgcgcgtttttcgtttttttttagttgttgcgcggagcgggcgtttttttcggcgcgtttgggcggtcggttgcgtgggggcgtttagatggaagtttggatatttattttgtttttttagatatatatatatatatatttatattcgttttattttcgttatatattttcgttttcgttgttttttttatatattcgtttatatattttatattatatatttttttgttgattgcgttcgcgcgtcgtcgttgttagtagtgtttcggcggtagagcgggtttcgggttcgttggataggaggttttatgaagatattggtttaatttttattatcggtttttgtagttatagaatttttttgatttttatagtttaggatttaggatcgcgttttgttcgtattcgagttagaatatacgtattagaataaatattttttttttttttttaaaaaatatttcggtgagtttagcgcggtttttagtgacggtcgaaagtatttttaattatttttaagacgttatttttattttttaatttattcgttttattttgcgagatttcggtagaaatttttttgtttcgtttttaaagtaatttttaaaaatttttttaaagtttaaatagtagtaggttttggtttgttgggcgtaaagtttttattttttagtgcgttttagttcgtaatggatagtcgggtttgttcggggttttataggaggttggtttcgggtgtttaagtttagcgtatcgtcgtttgtatgatttatttatggtcgtttgtgtaggttgcgaattgttttagagttttttttcgttttaaagtcgcggaggttagggataacgcgtagggttagtttcgtaggtttgttttgttttttttttatttcgggttcggagcggttttagtttagtgtgggtcggggcgggcgggagttacggcgttacgtcgtggaggaagcgcggcgttgtaggcgggtttttagtcgtttatttgtttcgatcgttgtagtcgtgcgttagttttcgtcgggtttagcgtatcgcggttagggttttgaggttgtcgggagcggtttttttttttgtttttttattgaagcgttgtttttttttttttttttaaaatagtcggtatttagcggtcggttatttttttgatttaagttatttagagtatatttgggaaagtttttcgttcgcgttgtgcgtttttttttaattggggatgaaaaggatatggaaagaaatcgtagtaaggttagtattttagtagatattttattttagtaaaaatgtgtaaagttttattttttaagaaagaaagaaagaaaagaaaagtaagaaaagatagttgcgtttttattacgtgcgttagtttatttcgtttgcgttttggcgggtttcgcggttttcgcgttgattatgggtaagacgacgtttcggaagggagttcgattcgtatttcgggttttgagttcgaaagaacgggggaaagtcgaattatgtaaatgcggatttttgcgatggggttcgggttacggttttcgtcggttttttaggtgaggtatttatcggtagtaagcgcgggcgaggcgattgttcgcgtttcgtttttttttgcgtacgtgggcggatcggtaggcgggcgagttgttcgggtcgtttcgcgattggcgttgttgttaaattcgtcggcggtcgtcgcgcgttatttcgagggggagtttttggacgttcgagtgttcggttagtagggcgcggagggtaggatcggggttgggggcggggcggggtgtttgagcgagggaaaatcgcgaggttttcggttgttatttttttcg

SEQ ID NO: 6576 - DNA, 1575 bp, synthetic construct
  misc_feature 1..1575: note = Description of Artificial Sequence: Synthetic polynucleotide
  source 1..1575: mol_type = other DNA
acgcgtttatggaaggtggtgttcgttttatcgttttcgtggaaggttaaacgagttttcggtgtgaattcggagaaagagagggaagtgtagcgttagttttattttatattttttttttgtttataaataattttaagtgttattttaaagaggacggggagcgcggtagaggggttttcgggtcggcgggttggggtcgtcggatttgtttattacgttttttattttgggcgagtttgtataaataaataaatttaagtcgtcggtttcgcgggaggtggaggaggagtgacgaggaggaggaggaggagggaggggggagggagagattagtttgggaagtagtacggattgtttattcgattcgtgtcgtcgtagggagtgtgttaagttatagaggcgtcggaatcggtttttgcgtttttcgttagtcgttacgatttatttttgtttatggggtttttcgtgtgcgttttttcgttcggggattgaaattgattggttcgggagatacgaggcgtttagaaggattgatagcgcggtattaattgttttgtagatatttgaagggaaagattgggcggagagaaggagagtcggttagatttttttaatttttttggatttggaacgtttttcgaaataattttttttttatttaggtgtattttaattatcgttggttgtgttttttcggtatttttttttttattgttaattttttcgttttttttgtcgggagtagcggaaagggacgttttttagcgatataagttttttttttttgtttcgtagtttggatagagttttttggtagcggttgtcgtttttatttattttatttatttatttattggtttttaagacgcgagaggatggtagcggagcgtatttataaagcggtagttatcggtgttcgcggttttggggagttgggcgcgttcgggacggtggttttggtggcggcgcgggcggagcgcggcgtacggttgtcgagtttagggtcgtgcgggttgttgacgttggttttttgttcgttggtatttagtttgttcgtttattttcggacggtcgagttgtaggttcgggtgttgcgtttggaagcggagcgcggggagtagtaaatggagacggttattttgggacgagttaattaattgttggacgaggtttgtgttttttgttgttggtttttattttttttcgcggcgttttttcgcgtagtttttagattgtttagtcggtgttcgcgggcgttcgttttttgcgagttttaggttcgcgcgagttgtttgcgggaggggtcggggatacggatagacgttgttttattagggattcggaggatttggtgggtaagagtatgatttagcgattttcgtttcgggtaagcgttttcggtttttagcgttgggagcgttttgggtacgtcgggtaggtggaggaaggttgggcgcgcggaggttcgcggaggcgggtaagttttatttttttttttcgggattcggttagggtggtgtgatagtcgtttcgcgttcgcgtagcggtaagcgcgtttagaggtttaggtcg

SEQ ID NO: 6577 - DNA, 2401 bp, synthetic construct; identical to SEQ ID NO: 6353
  misc_feature 1..2401: note = Description of Artificial Sequence: Synthetic polynucleotide
  source 1..2401: mol_type = other DNA

SEQ ID NO: 6578 - DNA, 1579 bp, synthetic construct
  misc_feature 1..1579: note = Description of Artificial Sequence: Synthetic polynucleotide
  source 1..1579: mol_type = other DNA
tcgaagtcggggagcgggagcgtacgtgcgcgtgtttattttgttttgggtttttcgttcggggaatttcgggggtgttagggtatttagggttagggaagtaagatgtcgggtcgtttattttttttatttcgtagttcgtttcgaaaattttttaaatcgagatttaatttggatgtttagtttcgtttttttttttttttttttttttttttttcggtcgaggttttttttagtttagtttttttttttatttttttttcgtcgtggatttttattagtatgtttatttgggaggattcgttggggggcgggagatattcgaagttatttatcgttagcgttttttcggcggttttttcgggcgatagcgtttcgggagttttattcgtataagtgttgtttttaattaattgtttgggcgggggaaggaaaggggtttcgtcgtcgttttcgttcggaggttggagtgttgttcgtcgggtcgtgcgttcgttcggtagcggcgtgtattagtattatttttgcgtgtaagtttgaaatgtgagttgttttcgatttatattcgttcgcgttttttcgtagcgaagtggttgggttgacggtttgcgcgcgcgagtgagtgcgggcggcgggttggggggcggggtgcggacggcgaggttcgcggggcggggagggcgcgcgcgagtcggggttttttggagacgttaaggtaggtttgttcgttttttatttttttttcgcgtttttttttttttttttttttttttttttgtcgcggttggtttggtttttttcggagtttttagttttacgcgggtatacgtagggtgggtggttacgttcgtagggttcgcgagcgcggcgtagagcgcgggtcgtgggaagttttttcggcgcgtttcgtgcgttttcgtttttcgcgcgttttcggtttattttcgtttttggagagttgtcgtttgcgttcgggcgcgcggttggttgttttttcggcggcggcggcggcggttttattagcggagttttcgtttatgattggtttcgttcgggaagttggagacgggcgatgaataattgatgtgtgcggtgcggtagtcggacggcggcggcggtggcgggtagtagcgagcgggagcgcgggagtcggagcgttttcggagcgggtagcgcggagcgagcgggcgtcggattcgttcgggttttcgcgtcgtcgtcgtcgtcggggcgcggagcggggatgtaggcggcgttcgttgtttgcgcgtagtttttgttcggcgttggttgaattttattcggagtcgttcgtcgcggtcgtcgtcggtcgggttttaagttttcgagggcgttagggcgggatcgcgatcggtgtaatttttaggtaagtgcggggtcggaggggtcggcgtttgggcgtttacgggtcgggttttgggtttttttcgggcgcgggggtgagtgtgcgtgtttgtgtgtgatagaggagggtcggtgtattgtgggtagcgtcgtgtgttgtatggtgttagttttaggtttggtcgcgagagtggtatcggcgtgtatcgggtcg

SEQ ID NO: 6579 - DNA, 919 bp, synthetic construct
  misc_feature 1..919: note = Description of Artificial Sequence: Synthetic polynucleotide
  source 1..919: mol_type = other DNA
tcggggcgtttagtgtggtttttttattcgggagtttggaagggtttttcgtagttcgtaggagacgtagcgtttttcgtttagggggagtaggaggatagttggtcgttttcgggagttttaggcgcgaagcggttttttttcgttttaggtgagttttgttcgacgtttaaggtttaacggttagaatcgtttttgttcgtcggatttagcgaagttaggggaataaattttaaaaatagttcgggttttttcggtgcgtttatttttatatacgcgtttgttcgttatttaggagcggcgtttcgttgttaggtaacgagagttcgcgttttaggagttagtgtaggcgtcgtaaagcggaaggggcgcgcggataggtgagtagagggtacgcggtgggtagcgaagggggaacgcgtagtagagaggagagggcgtgtaggagtaggagtaggcggtagagtagagggggcgcggtagagtagagggggcgcggtagagtggagggggcgtgtaggagtaggagttcgtcgtagagtagagggggcgcggtagagaggagggggcgtgtaggcgcggggcgttcggtagagagaaggggtcgtgcggaagggggcgcgcgttaggggagggggttagagaggagggggcgtttaggagtcgggtttgcggtagagatgaggcggtgtgtaggagggagagcgcgtacgagggggtaacgggtagagaggagagggaatgaaagaaggggagcgtggtagagagaagcgggcgcgttttagggggcggggtttagggaggagggggagcgtaggatcggggcgggaggtagagaggagcgggtacgcgggacgggcgtgtgttcgtgaggggtcgaggaaaggcgtatgtggaggcgcgcggggtgggtgagtcg

SEQ ID NO: 6580 - DNA, 944 bp, synthetic construct
  misc_feature 1..944: note = Description of Artificial Sequence: Synthetic polynucleotide
  source 1..944: mol_type = other DNA
tcgtcggagcgcgcggggacggcggcggcggcgttatttggaggcgcggtggcgggtaggtgttcgaattgtacggcgatgtagaggtcgttgtttagggggaatttgtggtagtgtagtattttaggttaggggaagtcgtaggtttttatgagcggcgcgtagtcggcgcgtacggtttcgtatagcgagcggtacgggtagatgggtcggtcgagatagacgggcgtaaagagcgagtataggaagatttgcgtattcgagtggtagcgtttggttagtagcggtagttagttgttcgtttgttgttttatttcggttaggttttcgtgttttagtaggttgggtagtcgtatgcgtttgtagtttatcgtgtggtagagcggtaggtcggtagggatgttaaggtattgcggcggtttggagtaggagcggtcgtgtagcggttcggtttgttagttatagtagtcgtatttttcgtagcgcgtcggcgtttagtgtagcgtttttagtagtagcgttagcgcggtcgttcgtacgttttttttcgtcgtcgtcgttcgtatggttgcgttttttttaggtgcgcgtcgcgtagtttttcgacgttcggtgttcggcggtttaggtgtttcggcgtgcgttttcggttttgattttatttagtcgtcgtcgtcgtcgtcgtggaggtcgtttaggtgggtggtagtttgcgttgcgggcgtttcgattgattttggcgttttttatttcggggttttagttcgggtttcgtcgtgcgttttagttaattttcggtcgtttggttttagttttaaggcggggaggtagtgggggcggtttttagtttttttcgtattttgttcgagcgtttcgtttagcgttaggttttgcgtttttttttcggttcggtttttttgtcgtagttttggtttcgtttagcg

SEQ ID NO: 6581 - DNA, 1096 bp, synthetic construct
  misc_feature 1..1096: note = Description of Artificial Sequence: Synthetic polynucleotide
  source 1..1096: mol_type = other DNA
tcggttacgcgttgggttcggggaagaggcgcggtcgcggtcgaggcggggatagggaggcggtagttttttttgcgtagcgacggcgcgggcgggcggaggtcggggcgttttagtttttcgttttcgtttttttcggtcgtgacgttagagtcggacggggtaaattgagcggcggcggcggggcgttggggcggagattgcgattcggagtcgttcggattgacggagtttattgcggtgcgggcgttggcgcgggtacggaggattcgggtaggtatcgtaagcgatttcgaggtaatacggtttcggttttttgttcgtagggcgcggtgtcggaggggagcgggttcgggggaggtagggaggtagggaggtttttagagttacgcgggcggggttgcggggatttcggggtagtcggggcgtagggcgtagggcgtaaggtgtacggggtcgagcgtgtagtttgggaggtggtatagttgggggcggcggggattagggtagcgttttgggggttttaggttgggtttttagattgggttttcgacggcgttcgcgggcgttttttttagggagcgcgggttttcgtggggacgcgttcgaggtaggtgagtcgaggttggggcgttcgggggtgttttcggatgtcggtgcgcgcggttttttgattcgttttttcgcggtttgggggacgggagaatggggggtttacggtcgttttgggtttttatcgcgtatcgcgttcgtagcggagtttcggagttatggttttgagcgagttggcgttggttcgttggttgtaggagagtcgtcgttcgcggaagtttattttgtttatcgtgtttttggcgttgttgttggataatatgttgtttattgtcgtgggtacgtgcggatagggtatttttgtttcggtattttagttttagcgtttttttttcggtattttatttatttttgcgcggtttcggagtttcgttaaggttcgggaaagttggagaattcgttttgtaaaaaagatattttttttaggttgtcgcgtcggggttaggaggagtcgcgttgtgtggtttcgtttttttgatgttcg

SEQ ID NO: 6582 - DNA, 4048 bp, synthetic construct
  misc_feature 1..4048: note = Description of Artificial Sequence: Synthetic polynucleotide
  source 1..4048: mol_type = other DNA
acgttagagatcgtggggcgagagagggagagagttggaagtttattgtttcggcggggtcggtagttttcggttttaattcgtaaacgaacgagtcgggttaagaatcgcgaacgtatcgattttgggatttcgaggttaagcgtggttgatggggtgggaggatttcgtattttttattttaggattttttttggtttaggaaatcgttgggagttttgttaagtgtggggattggtataatcgaacggcgtttttagttcgggaattagtttttgttcgtttattttcgcggtgtttttggggcgattttagttttttcgacgcggggtcgcgtaaggtagtagcggcggagcgttaggttagaggaatttgtttgtttttttgttttattagtttgggcgaggtaggttcgggatttagggggtcgtagcggaggcggcgtcggttagggattttgtagggatcggggtgtttcggagggagtggtgttggtggaggaggaggcggtggttgagggggagtaggtggggaaagaggaggaggaagaagaggaggaggaggaagaagaggaggaggaggagaagaagaaattggaggaagaggaggaggcgaaggaggaggagaagtcgtagcgggcgtcgtaggagcgagtgagttgggagcgaggggcgaaggcgcggagaagttcggtcgttcggtgggcggtagaaggtttagtcgaggcggcggcgtcgatttcgttttattttcggttcggatttaggttttcgggtttttaggcgtttatttttttttgacgtattttaaagagtttttttttttttattttagggcgagtaatagcgattaattattaagttatttattaggtttcggaggaagttgtttatgtgattttcgtattaattaggtttatgaattaataaatcgtttgtataatttgtgaagaagcgaatatttttatggattgtttttggatttagggcgttttgttcgttttttgtagaggagaaaaaatttttttttttttttgtttttttcgagaatttttttttttttttttttttgtttttaatttcgatttttttacgttatttcgttaaaaaaaaaaaaaaaaaaaaaaaagaaaaaaaaagaaaaaaaaagaaaaaaaattattttaatttacgtttgtaaatttttttggaaggatttttttttttttttttaggttgggcgcgtttggtgtaagattttcgggattttcggttttgtttttttttttttttttttttttttttttttttttttttttttttttttttttttttttttttttttttttatttttatttttattttaaataaacgagtttttaattttcgttcgttttcgtcgcgggtagcgggcggcggaggtagcgtgcggcggtcgttaggagttgggagtttagggcgttcgtttttcggcgtagtatgttttagtcggcgtttaagcgttgttttattatcgagtcgttggtggttaaggatagttttttgttcgtttcgcgtttcgaggattttattcgtttcgcggtatttagttacgttaattttagttttataaattcgttttttaacggtttttattcggtcgtcgtcgtcgtcgtcggtaggggcgtttattttaattcggatttggtgttcgtcgaggcggtttcgtattcgtttaatttcgtcgtgttagtgtattcggtgtcgtcgtcgtacgttttggtcgtttattttttatttttttcgtattcgttatattttttattcgtttcgtagtagcgggattcgtttattttttatttttggtttatttatcgttatcgatatttgggttatcgtttttaaggtacgtgttacgtcgcggaattgtagcgcgtcgttttcgtcgtattttttattgttttcggtttgtttcgggtgggcgtttggtaaggtttgggcggaggttttttcggttcgcgggttagcgcgttttgttgggaaattaggcggcgcggggtcgggcgtggtgtcgatttttagttttcgaagttacgattggtttggagtgatggtttgcgggtcgtttgattttttgggaaggggtgcgaacggagaagttgttttttagtgcgttcgaattagagtaggttgggttgtgcgtgttcggcgtcgcggagtttagagttcgcgggatttttaggtttttggtattttcggtaatgtttttaatcgttttggtttcgaggggcgcggataggattcggtcgttaggtttgttttcgattgcgttcgattttgtttattatttattttgcgtttttttagtttagattcgcggttttttagttttttatttttttttggaggcgagaggattttcgcgtttcgggagaaaagtatgggatttgtttttttttttttgtttttcggaggtttggggaggggcgggaattcgtgcgggaggaaagttttagggtttggcgttttcgtcgcgatttgtttaattggggcgtcgagtagttatagcgggaaggtaggttcggtttggtttttgtttttttttttttttttaaaaaaaaaaaaaaagaatttggttaggaaattgttttagagggaaatatttgttcgtgtgtttttattttttgcgatattttttatttgtttgtttttttttgggtacggggtgggaggaggagagttaaaattttagaaaaaggagtaattagtttacggattggagttagtaaaagatttattttcggcggtagtcgattaatatttcgcggtttgtttatttattaatttattgcgtttttgtcggagtttagaatcgggtagatgttatttttttttttatattttaaaaaattaaattaaaggaaaaaaaatttaaaaagttttttatttttaatttcgaattggatttgtttgtattttgtttggattgtcggtttgtttttttttgtttgggttttcggtgaatcgattttttatgttaatgagtgaatttaaaattttgaggttttgtttgaaaagtttagggttgtttttttttattcgttattagttatgtttatggtttttttattagattcggagtcgttgggatttttttgcgttatagattgttttggcggtgtttgtaagtcggtaatttttcgggtttcgattttttcgttcgcgttttttttttagttttcgggagtcgggagtttcggagtttagttcgcgagaggtagtagcggttgtagttaagtatattcgtcggttagatttttgtttcgatcgggttttaacgattcgtttcgtttttatattttttcggaggggtaataaaataaataatttaaaaataaatttttatgaaaattttggagagtagttcgtcgtttttttatcgtgggttaaagtttttcgagaggttagaaagaagagaaagtagttttttcgggttgtgggcgttaattttttggttaggttttgcggtttttttttttgtttttagcgttcggcgaggaggtggcgaggttcgcggcgttagggcggttgcggagtcggtcgaggttaggagtttggggattggtttttttgcgatagcggttggttgggtgtcgtatcggtggagattcggcgtttcgggtcgggtagttgagtaggcgtttttttcgtgagtttttgggaggattatcggttttcgtaggtcgagcggcgcggttatgcgaaggttttgagtacggtgtcgggttagttcggttcgggagaagtgcgcggtttcggttagagtagttttttttaatgggatttttgttgtgtttttcgtagggaacgatattagtttcgagagtttttttttgtataacgcgttggttcgaaagtttaagcggattcgaatcgtttttttttcgttttagtttttaaggttggaatacgtttttgagaagaattattacgtggtgggcgtcgaaaggaagtagttggtatatagttttagttttacggaaatttaggtgattgcggttcgggcgcgaggaatttatttaggcgtgcg

SEQ ID NO: 6583 - DNA, 3292 bp, synthetic construct
  misc_feature 1..3292: note = Description of Artificial Sequence: Synthetic polynucleotide
  source 1..3292: mol_type = other DNA
tcgttgtcgtcgagacgcgtagcggatgtcgttgtttgtcgcggcggaggaagttacgtcgttgcgttttcggtttattttgtttttattaaagcgttagttagatagttttaaacgttagttggtcggagagattttttgggagaaagtgttgtcgtcggggttatagattcggagttgattcgcgagttttgggtatcggcggttagagtagaggggtgttttttcgagagtagtcgtcggtgtcgagaagttgttgttttagtagttttatcgagtgacgcgcgggttttggtcgggttagcgcgtatacgtatataggtatatttatttttggtttcgggggaaggtttatttttcggttttttagggttaaaggttaaggttacgcggatttttgagttcgaagacgtagtgcgaggatttatatttggatttttttattatcggttggatggtgggtggggaatttaaatttttttttttttggtttcgttttttttagtaggttttaggaaaaatatcgaggtcgtcggattttaaagggtaggaaaatgatgagtttttcgagggtcgaggttacgttttgttttttgggtcggcgttgcgtggttttttagttgcgtgggggcggcgggtttttgtttagttttagggggcgggggagcggtagttgcgagcgtagataatttcgaggtgattcgggagggtttggttcgttttttttttttttcgtaggtttggcggcgggaagcgggtttttgcgtcgtaggggggagaggtaggcgcggttttcgggttcgcggtcgttagtgcgtttcggttaagggcgtcgtttgtttcgcgtttttcgttcgttttttgcgttcgtaggagcgtttcgagtgtttttttagcgggagttaatatttttttgtgttaataggtttgtttttatttgttgtttaattggattatataaagttaataacgggcgggtttttatagttcgaagttaaagcgttaaaattcgagggaaggcgaggagggggcggtggcggaggcggttgcggggtcggggttcggttgagttttcgtttgtttaattttatttgttattgtacgcgtttaatcgtcgtatatttttcgtatttaatttggatgatattttgattttattattagtattcggcgtcggattgacgtagtttcgagtcggggattgtttttgttgtttttttcgcgggagtcgtagtcgtagtcgagtcgtttcgatttttcggtgtcgcggtagggtcgtttttcgttttttcgtattttttttttatgcgagttcgttcgtttgggtttttatttcgttttttcgtcgttggatttgcgttcggggcggttttcgattttgcgtttcgtagttgagtttcgtttatggtttgattttcggtttttcgtttgttcgtttcgtcgttcgtttgtttcgttttttttttttcggggattcggaggagaggggattatgtcggaattcgggtcggacgttgtcggtatcgttagcgtatagttttaatcgtcgtcgttttttttattcgtttttaaggagttttcgttttttattaagaatttgtttaacggagattattatcggtcgttttttaagttttagtcgtttttacggacgtttttcgcgttagtttcggttgtcgtcgtcgtcgtcgttgtcgttgtcgtggcggttaagggggttttggagggcgtcgcgggtttcgcgttttcgtaggtgggcgatttggttttttttcgttttgagatttcggcgtagaggtttgttttgttcgcgtattatttggagcgttttttagtttggtggtatttttatattttgattttcgtcggcggttatttttcgcgatttgaaggtatcgatttttttttgaattttcgttgtttttttgcgcgttcgtttcgttttcgtttcgcgttgttttttttcgtagttttgggattttagtattcgtaaattttttgttcggttagtttttttcggtttttagtttgttttcgcgttgggttgcgttgttcgttaatttaattttatttggtgagaaaagaagtggaattggagtttcgggtacggtgtttttcgggaaaagtggtttcgggcgtgaatagggaggtttcggacggtcggggtttgggatacggtttggaaggagggggtgattttaatgcgtttaagtcgaaagggaatcgttttgtcggtttttggcgaggaagttgagggaatggaaggaggtggtcgcgttattattatttgtttgtttgttttcgggaggagggggattttaggattcggcgttttttttttggtttagtcgagaaggaggtagttcgcgggaatggtgaggttttatggtttgggatttggaggtcggcgcgggttgagtttgtcgtttttaggcgtcgggtttcgtttaaggttgtgtcggtgtgtatgtgtgtgcgttcgtttgtttgtttttttagtttcggagaaggttttgttgagagatttttttttcgttttcggtatagatcgcgatttttcggagttattgtttaaggtcgatttcgattataaggagttggattttaagagttcggacgagattattttggaggagagcgatttcgaggaaagtaaaaaggaaggcgaagcggcgttaggcgcggtcggggcgagcgtaggggcggcggcggttatttcgggcgtagaagattggaagaagggcgttgaaagtttagagaagaagtcggcgtgtcgtaagaagaagacgcgtatagttttttcgcgtagttaggttttttagttcgagtttattttcgatatgaagcgttatttgagtagttcggagcgagtcggtttggtcgcgtttttgtattttatcgagacgtaggttaagatttggttttagaatcgtcgtaataagtggaagcggtagttggcggcggagttggaggcggttaatttgagttatgtcgcggcgtagcgtatcgtgcgggtgtttattttttattacgagaattcggcggtcgagggcgcggcggttgtagtcgcgggggtttcggtgttagttagttagtcgttgtttattttttcgtatttcgtttattattcgtattcggtggtttttttcgtgtcgttgttacggtcggtttgaggttttagaggggtgggggagggagcgttcggtttttttgttcggatttcggaggagattgggtcgggtcgagggcgtcgagaagtttagcggtttttaggaattggggtttgggcgcg

SEQ ID NO: 6584 - DNA, 3753 bp, synthetic construct
  misc_feature 1..3753: note = Description of Artificial Sequence: Synthetic polynucleotide
  source 1..3753: mol_type = other DNA
gcgcggagattcgtcgtttgcggaggcgtcgagttattttagtttcgagtttcgtatcgtttttgtttttggagagaagggtttaaggggtttaaggagtcggagttgtcgtagtcgttaggaattcgggttagaatttgtagttgtttttagttttggttgtttttggttagacgtcgttgatgttcgttaggttttcggcgcgttttgggggcgtatcggtgttgtgtgtttggtcggagcgttttgaaatttttcggggtcgttcggcggcgttgcgattggtcgcgttcgggtaatttttatgtaaatgaggtcgcgtcgttttcgcgtcgtcggagattcggcgagttggcgggcgaggaaggggtatttgtatcggggttgggcgggcgtatttagagttaggcgggtaggaatttttgcgtagttattcggtgtttgtatgtttttggcgcggaagggacgttttattagtttcggcgttttttttttttagatttttttttcgtttttttttattgtttgtttgttgtattattttttatttagattatttagatcgtttttaaagggagtttttggtttttttcgattttttatgaatttaggatgggtagtaaagaagatgcgggtaaggggtgttcggcggtcggtggcgtttttagttttattatttagtttattttgggcgggggtttttcggaggtatcgcgggagttcgtcggttggttagttaggaagcgtagtttgttcgtgttttcggaggaggaggagtcggacgacggttggaaggcgttcgtttgtttttgtttagattagtacggttttaaggagtagggttttaagtattatttttttattttttttttttgtttgggtaaggatcgtacgtcgttagtgtggtagcgagcgagcgcgaggggagggaggttgagcgtttcgttaagattttcgcgtcgggttttttttggttagagttgcggtagtcgggggttcgggatcgcggggagaggggcgcgtattgtggtgtttttttcgttcggtgggtttttgggagtaggcgaatatagattcgtgtcggtttgggttttttggggaaggttgagttgttgagagagtggattatagcgagagggatacgcggtcggttttatattcggttgtttttaattattgtatatttggtatttttttttcggatacgaggtggagatttgtaagtcgggtttgggtagtttgtttttatcgtaatttttttttgagtttttttttttattcgtttcgtatttttgttttttttttttttttttttttggaatgattagtattttaagatgattgataatggtgtattttagagacggtttttttttataatatttgacgaaggggagttttgcgttagtttttagcgtgatttttaaataaacggtttgtgaaatgatgttattttataaagttcgaggaatttttttagtttaattattattaagtaaattcgttttttaaaattatgttaatgtttttttttttagattttttttttttgttgtttttggtttatttataaaggtgggagtatagagattttatattttaagtagttgggttttttttttgtcgtttttaaaggacggggtgttgggtttggggggttagtgagagggataagaggaggggattggtaaggtgggattaaggttgtaggcgtttgttaatcgtttggttttagggagagttggcggttttcgaggttttttaattaattttatggtttttttgtttgttttcgttttttaggtatttttaagggtagcggaggttcgggttcgggcggtttggagcgtacgttttttttttttttttcgtattcggattttaaagaagagaaagagaggtttttgttcgcgggttcgttttcgtcggggttcgagcggtcgcgggacggcggcgttgagcggtaggtcggcgcggttaagaagaagacgcgtatcgttttttcgcgtagttaggtgtattagttcgagtttattttcgatatgaagcgttatttgagtagttcggagcgcgtttgtttcgtttttagtttgtagtttacggagatttaggtaaagatttggttttagaatcgtcgtaataagtggaagcggtagttttcggttgagttggaggcggttaatatggcgtacgcgtcggcgtagattttggtgagtatgtcgttggtgtttcgggatagttcgttgttgcgcgtgtcggtgtcgcgttcgttcgtttttttcgcgtcgttttattattcgggaagtaatttttcggttttatttttttataatttatataataagttcgattattgatcggttcgtcgtttcgcgtcgtttttagttgttcgtagagtcgggcgcgtattgtattgtaagtagggtttcggagtaaggcggcgtgtttttagaaatatgaagaaatatattatgtgtatttattagtttttatttatggtttttgttttattttttgttttgattgtttcgggtatttattggtattttttaagttagagagtttgttttttatttagatcgaattagtacgttttgaaaattattcggagtgagatgttttcgggtggtggtgggaaagggagttttggttagataggttgtggttggtagggaaaaaaattaggaaaatatttataaaattaggtatattttttttttatatatatatttgtatatatgtatatgtatatacgttcggttaagttaggtttttagaggttttggataattattaaattgttttttttcgttttttttatttcgaggatggtagggacgaaaaggggagagtttagatttgtaaatatttttaaaaagaaaaaaaaataaaatattttaaatatttttgttaattttggtgggtttggttattcggtatgataacgtacggaaggtttttaggtttttcggtggaaagatttgtatgcgtttgtttgtggaagtttggttcgttttacgtggagggtgggatcggggttaggggttaaaggtcgggattttggcgtcgtttagattgtacgtggttggagttgttcgtttatttttttttttaacgtttagaatcgtcgcgcgggttggggcgtatttcggttggaatttagtttaagagttcgcgcggagaaagataaagattgggaggtaggtttcgttatttaagcgattgttttttgggaataagcgagttgggtgtttagcggtatattttcggtattgggttcgttttgagtttggttatagtagttttcgttatgatatgttttgtgtcgcgtattttttttttaggggtataaagtaggcgatggcgttgtttgtatttagtaaagtttttattttgttcgtcgcgagtttggcgcgattagtttgtcgttgcgtttagttattcggtcggtggtagagttatgtgtttcgcgcggagagggaattgggcgcggtgaggtagttttgcggtttaggagagattcgaggttcgggattaggtaaagaaggtgagggaggtaaaggcgtttttttatatttttttgttgttaatagtttgtattggtttagcgtgtggttggattatcggttagtacgcggtcgtttgttttgaatggaattttgacgcgcggcgggggcgtttacggattttttcgttttgatatttgcggtcgcgtaggggttgggagggcgttgtatcgagagaatagtcgcg

SEQ ID NO: 6585 - DNA, 829 bp, synthetic construct; identical to SEQ ID NO: 6574
  misc_feature 1..829: note = Description of Artificial Sequence: Synthetic polynucleotide
  source 1..829: mol_type = other DNA

SEQ ID NO: 6586 - DNA, 1328 bp, synthetic construct
  misc_feature 1..1328: note = Description of Artificial Sequence: Synthetic polynucleotide
  source 1..1328: mol_type = other DNA
gcggggtcgttgcgcgtttttttaagtgtgttagcgggggaggcggggttggaaaggaaatttggtgaagggttggttcggagtttggggtggggatatttattgcgggatagggttagtaagaggattcgatacgtatcgtttcgagtgatacgtgtaaatgttaagatatagagatatttgtaaatgttatttaagagggtgaggacgggggagcggtttcgaggttgtgtttttcggggtaggtattggtttttgtggggttgcgggttaagtgtcgtttttttttaaggaattggtatttggggggggggggtcggtttcgtcgcgttggaagcgtaagtttcggggtttcggagatgcgtcggggcgcgtcgtttttcggggtagttttggatttcggcgcgtttaggcgtagcgtgcggtgttttcggcggggcgggtagcgagtcgttttagttcggcgatttatttcgggtttcgtagggcgcgagtagagtatcggttagggcgagtaggagggcgcgggcgggggatacgggtagcgggcgcgttgttatcgtcgtcggtttttagtgtagtagttttcgggttcggcggcgagcgttgtattattttacgcgggcgtcgagtcggggtcgggcgtcgcgatcggagggattttttgtttcggcgagttagtttcggagttttcgcgtagcgttcgcgtcgtcgttgagtttttttagttttttatttttaaaaaagttttttttcgtgtgtgtgcgtgcgtgcgcgcgcgcgcgtcgttttggtataagttagttttgatcgttgtaataaatgagtaaattgttcgagttggttcggggattaggaagagcgttagtgagagaaggtaggtttgtgaaatggatttacggttagtagttatcgtttttattatcgcggaataaattattgtttttttcgtattttcgttagttggcggcgtttcgcgggttttagagatcgttcgggttttttcgttagggtttcgtttcgagtcgcggttcgtttattttcgagggtgggcggtttagacgtggtttagtggcgttcgggcgttcggagcgtatacgttttcgttttaggatgatgtggtcgtagggttcggggcgttcggttgttaagcgtatatgcggcggtacggtttagttttttaggttgaagttggaaacgatgattttgttattcgtttttcggttttttgggaattttcggagtgcgggttaggtttttatcgcggtttatagttcggcgcgcgatttcgttcggttttaagcgtttaaaggggtatttttcgttcg

SEQ ID NO: 6587 - DNA, 2957 bp, synthetic construct
  misc_feature 1..2957: note = Description of Artificial Sequence: Synthetic polynucleotide
  source 1..2957: mol_type = other DNA
tcgtttttttcgtataggtgttcgattcggagttcgggaggcgggttttttttttaggtatttagtttagcgttagtttgggtttatttttcgttattttatagcgcggggagtaggggaggtcgaaagtcgggtagtttggggggtcgggataattcgggttgtagtaatttcgggcggtagtaggattggagagttggtgtcggacgtattgtagagacgtttttgttttcggcgcgtttttcgatatttagtagagagtttggcgtttttcgttttgcgcgttcgaggttatagcgcggagaaatttggcggggtttcggatttttcggtttgggaaaagcgatgattgttttgaattgttggggcgttcgaaatttttagggtttcgatttttcgtggggtacgcgcgatttcggcgtagatgttagttcgttgtttttcgggttgagggagcgaggattttagacgattttagggtcgttgtttaggtttagtttcgcgttttttatttcgttatttcgttttgcggttttagtttggagatttacggattttattgcgattttttgcgtagtgtagtcgttttttatttttagtttcgagtttcgggtaatttaggggtttcggcgaggcgagtttttttggggcgagatgtttcgagtcgagtaaaggggtcgcgtattggacggggtttttaagttatagttttgggggttttgaggagtcgtggtacggtttagggtagtcggggttgcggggttcgtgaagttagacgaggttacggatttagggtttttgtaattaagatcgcgagcgattgtggattcgggacggatcgtataaaggaggaagggggaattagaggggcgttcggtttaggacgtgttaggtttgggcggggcggaaaattgatattagggcgaggataaggatttcgtttttttagggttgttaggggaggggttcgttatcgttattttttatgggttttggtttcgacggtgtttaaagggcggagggttgggtcgggttggtcgtattcgggcgttgttggcggttaagttggatgggtcgttagtgagtttcggtgcggtatcgttggtttaggttcgggcgcggttggatatggttatttattgcgacgatttgggttttttttcggtttcgttcggttaggtttaggttatcgcgtatttttcgggttatgagttaggggatttgggcgcggtgggcgggggtttttttttgtgggtgaacgcgttagcgtttagttttaagttttacgtttcgggtttcgggtttgcgtcgttttacgcggtttcgagttacggggttttcggttcgtttttcggcgtttcgggcggtttggcgggcgtcgatttcgtttggttgagttttttcggttagtaggagttgttgaggttggtgcggtcgttttatttttattcggcgtttatcgttatggttatttagagcgcgtcgttgcggaagttgacgtttagttagatttattagtacgtggttggtaatttttttttttataagcgtagtaaggcgggttggtagaattttattcgttataatttgtcgtttaacgattgttttaagaaggtgtttcgcgacgaggacgatttaggtaatagcggcgcgtcggttcgtttcgtttaggattttttattttttcgtcgggtcgcgggtatttcgggggtgggagtattttagataatttaatttttttttgcgcggttggggatattcggggaggagggagaaggggaagaagtgtttgggtatggataggtttttagatagcggttgagtttattataggttcgcgtttatagtgcggcggtttcggggtttttaatttttgtgcgttttttcggaggaagaagcgggagagttagtaagttgggtgattttgggagtgatttaatttttttgggttttagtgttttatttggtaaaatggggaagatagcgtttattttaaggatgggtaaaataaataggatgttcgtttggaaagttttggagtttatttgggggtttggcgtggtttgcgttgtttttggtagagcggttggcggagttttattattagtatttcgtaggtttttttttattttaacggggttcggttttttttagggttttttttttttttttttttggattgttattttttttttagttttgttgtggaggtttatcgggtatagagtgttcgttaagggtggaatgggggcgaggatttagattttttgtaagggttagtaggggatttttttgaagttgattttttcgttggtttatattacggttcgttaaagttcgaattttttgaattgggttgtttttttttttgtaggtaaaggtaattattggattttggattttaattgcgagaagatgtttgataacgggaattttcgaaggaagaggaagaggagagttgaagttagcgcggtcgtgcgttcgggagttaggagcgtgggaggggtcgaggcgttagcgttggagttttcgagcgcggtttgtttggatttgtaggtttcgttttttttattcgtattcgaggtcgttatttgttttttcggtttcgtttttgttatgagcgttttggttggcggttttggtatttttttcgggggtttggcgggcgatttttttttcgggaggcggttatcgatagtcgttatttacgttttttagatttttaattttttttttggtttcgtttttggttattagatcgcggtcgtcggttttcgttttagttattttttttatagtcgggaagggatcgaagtttgaagggaggttggaggttagtcgggtgcgggtttagaggtgttgagtttaggttttcggttttttttggtgatagttttacgtgttggcgttgaaggttttggtgttttgggaggaagcgtagagtcgggggcggttcg

SEQ ID NO: 6588 - DNA, 1860 bp, synthetic construct; identical to SEQ ID NO: 6360
  misc_feature 1..1860: note = Description of Artificial Sequence: Synthetic polynucleotide
  source 1..1860: mol_type = other DNA

SEQ ID NO: 6589 - DNA, 1422 bp, synthetic construct
  misc_feature 1..1422: note = Description of Artificial Sequence: Synthetic polynucleotide
  source 1..1422: mol_type = other DNA
tcgtgtagttcgttcggcggcgttttcgggcgagggtttggtgttggggagcgagcgcggagcgaggtgtttttttaaatacgttttgtagtgtgacggcggtcgttcggttggaagagttatttttattttgcggtaggagttcgttcgtcgttatcgttcgtttcggtttttatggttacgcgtttgttttcggtttcgggttttcgttgtcgtcgcgggaggtgcgcgtagaggcggcggcgttgttggtcgggttgggtcgttcgtgcgcggggttgtgatttatcggtcggcgtcgtagtttcgtaatttgttgataattcggttttagttcggtcgttgttttcgcgaatggagagcgggttttcggcggggggagcgtagcgcgtttgttttcgggagcgcggttcggtcgtttcggtagtcgtttcggttatagtaggtgggaaggacgcgcgggtttgggcggcgggagggacgcgcggggtcgcggttcggtagaaaagttcgcgtttcgaggtgatattggtcgcgaggaaagtagtttcgagtaattttcggtttcgttggggcgggaggcgttacggataatttagggttttcgtttcgcgcgttcggttcggagttcgagttatatttaggtagagtaggcgtcgcggtcgggttggggcgggcgggttattcggtgtcggttttcggtgtaaatttttcggcgcgtttttggttttgtgtagttcgagatggttgagtttggtttcggagtcgggagtggggcgtagattgatttttaaatatggagaaggagacgtatttgtcgttggcgcgttcggttcgagttttttatcggtttttatcggtatcgttttcgttagttttaggcgtagtttttaggtcgttcgcggaggggagggagcgataggggtcgcggttgttttttggcggggtcggggttgcgagttgtttttcgcggggatttttcgttcgtttcgttgatcgtcgttgtttttatagatgggagtagttttcggattgcgttcgtttcgtcgcggttattttgaggttaggggttcgggagcgcgattttttggtcgtcgtttgggattttgattttttagaggttatggaggttggcggggagtagggcgttatttgatcgtttttttttggacgttttttttagcggcgtttacgttttcgtaattttgtagcgtttatggtgagtacgggggtttcgggggttttgtagttgggggttaggtcgttgcgggggggcggttattcgtatggggatttttaggttggaaaagttgtggaatggcgagttggtgatcgggttttcgggtttagtgtcggggtgggaggttttgtggagtgggggtcggggataggtcgcgtgtttgggtatttttgtttttcgcg

SEQ ID NO: 6590 - DNA, 1479 bp, synthetic construct
  misc_feature 1..1479: note = Description of Artificial Sequence: Synthetic polynucleotide
  source 1..1479: mol_type = other DNA
gcggttttttttaagttcgaagtagggattcggttttgcgtatttggcgggtgtgtttagattgtaattttcgtattaggtatttaagaacgtgttttggatatattcggcggtgggagcgggtgtttggtttgtattagggatgaggggtggagtagcgaaagcgttcggagcgcgtatttatttatattttttaagttagggcgcggtcgttttgggcgcgaggttttaagttaagtttcgcgttcggttaggagtcggggagtattttaggttttcggtttggggtcgtcgttattttattttgcggcgcgtatttttgatttggtttcgtttttcggcggtcgcgagtagcgggcggagcgtaagtagagaggcgttttgggttgtgcggtatcgttttttttcggtgtttggggagggacggagggatcgggcgggagagagagaaagtttgatcgatcggttggcgaagagttgtatgtaatcggtgggaggtcgggtcggttgggtttggggttcgggtttaggttcgtatcgtttttcggtaggtttttggcggtgagcgcggacggttcggaggcggcggttttgagttggtaggcggagggttgttttttgcgttcgtttgttcggcgcggttcgaggatgcgggggggcgatgttcggggttagggacgcgttttgttattaggcgttgtagttgttggtcgagttttgtgttcgtggggttttggagtacgatagttgttaggattttatttattatttgcgggatcgtgttagatttcggtttcgcgatttaggtgagtgtcgttatcgtcgtttggagggatttaagggttttgggttgggatttggggtcgtatcggggtttgaggtagaatagcgacgcggattgggagagggcggggggcggttatcgagttaggagagtgattaagaattagcgtattgtggtttgatgttgtaattaggcggggattcgggcggtggttattgtacggaggtcgatttcgggtcggttagggtagggttggagggattacgttcgttatttgcgtttttatcgttaaggtttttgggggcggttttttagtttcgagttacgttttttatttttcgggttatttgtatttagagcgaggggaggtcgcggcggtttcggagtcgtgggaagggggacgaggtcgaaggaaattttgggaagttgggagttggggacggtttcgggttggggtcgaattttatcgggtgttgtttatttttttttttaagcgtttagtttttttttttggtatggggtgagaagggcgggacgcgattcggcgttgggtcggggatagggtgtttttggttttgggtagacgggtttgaattcgttttcggcgggtcgtacggtatggaggtggtttgggtttgggcgttaggttcgattagcgattatcgtcggttacgatggggttcgtagattcgtcg

SEQ ID NO: 6591 - DNA, 446 bp, synthetic construct
  misc_feature 1..446: note = Description of Artificial Sequence: Synthetic polynucleotide
  source 1..446: mol_type = other DNA
tcgttattcgttgataataacggaatcgtgggtattggttttttaacgtcgtttcgttcgttttttttagttagtttggtggatatttcggtgaaggttgtagatttttagagttattttttttttaagtagcgtttttcgtatttttcggcgtcgggaagtttagagggagttggtttgtttttatttttaggtgtcggcggcggtttttgtcgtttttcgcgggataggaaggttttgggtagtagtagcgatagagttaggataagtttagaagttagagcgattttttgtattgtggagtacgttatgattgtttacggtggtcgtaggtgtagacgttagtcggaatcggaatcggaatcggagtacgggttgtcgttttcgatcgaatcgcgggcggcgcggacggcgtcgcgcgagggataaggtgcgcgaggcgtacg

SEQ ID NO: 6592 - DNA, 2991 bp, synthetic construct
  misc_feature 1..2991: note = Description of Artificial Sequence: Synthetic polynucleotide
  source 1..2991: mol_type = other DNA
gcgcgcgtagttagcgtttttcgcggatatagtagtcgggtgttggagaggtttggaaagggcgtgtcggagagttaagtgtagtcgtttagggttgtcggtcgttttttttttttttgttcggtaggggatttagcgcgtacgttagtgtggaggggcgggttggttggttagtttgcgggtttttgcggttatttcggggatttttttaagtttcgtttcgtagtgtttttattggtttcggatttttttttttttagttgttcgtttgggtttcggggcgtttaggttattacggataaatagtttagggcgtttggcgagaagttaggggtgaggaagttttggggcgttgtcgtcgttttttttaattataaattaggtcggataggagagggaggggtgggggatagtgggtgggtatttagattgttagtattttgttatttatagtcggggttttcgagcggtagaaagtttcggttattttttgtcgtttgggttgggcgaagttaggatcgtgtcgcgttatcgttaggatatggagttattgtcgttatcgtttcgcgacgtagatttgacggttttcgacggttttttttgtttttttgttataacggacgatttttatgacgattcgtgtttcgatttttcggatttgcgttttttcgaagatttggattcgcgtttgatgtacgtgggcgcgtttttgaaattcgaagagtattcgtattttttcgcggcggtgtattcggtttcgggcgtacgtgaggacgagtatgtgcgcgcgtttagcgggtattattaggcgggtcgttgtttattgtgggtttgtaaggcgtgtaagcgtaagattattaacgtcgatcgtcgtaaggtcgttattatgcgcgagcggcgtcgtttgagtaaagtaaatgaggtttttgagatatttaagcgttgtacgtcgagtaatttaaattagcggttgtttaaggtggagattttgcgtaacgttattcgttatatcgagggtttgtaggttttgttgcgcgattaggacgtcgcgttttttggcgtcgtagtcgttttttatgcgtcgggttcgttgttttcgggtcgcggcggcgagtattatagcggcgatttcgacgcgtttagttcgcgttttaattgtttcgacggtatggtaaggtcgggattttaggaagtgaggaagttagggcggcgttcgggatattagggacgcgttttcgagggcggggagttggttttgcgggaggtttgggttaggatttttttcgagagagaggatttttttgttttgggtagttgttattggggtagtttgttttggaagtgtgcgggtaagcgttcgagttgttttattgggggcgttattagaatattgtagcgcgaacgtgaagatttttttttttatttatttttatttttaaaatgtaaatttgcgttttttggtgattgttcgtttttggtttggttttgtatgttgtagattttattttttatttattcgtaattatttttttaattaggataggtttgggttcggaattagagttttaggttagagttagggagggggcggttataggaattggtgttcgggtttcgagtcgtttcgcgggtttgatttagtcgtttttgttgtttgtagatggattatagcggtttttcgagcggcgttcggcggcggaattgttacgaaggcgtttattataacgaggcgtttagcggtgggtatttcgggtttttttttgttcgtttttttttttttatggagttgttttggtttttatttaggacgtttttatttttatttatatacgtttatgttttgggaagtggtgtaggagatgaaatattaagtaagtagttttttgttttttggattgtttcggattttaattaaagtttttagtttttaatttgttttaaagtattgggttcgggggtgggaggtttgtcgcggttttatttttgtttattaatcgagtttttttcgcgtagaatttaggttcgggaagagtgcggcggtgtcgagtttagattgtttgtttagtatcgtggagcgtatttttatcgagagttttgcggcgttcgtttttttgttggcggacgtgttttttgagtcgttttcgcgtaggtaagaggttgtcgtttttagcgagggagagagtagcggcgattttatttagttatcggacgtcgtttcgtagtgttttgcgggtgcgaattttaattcgatatattaggtgttttgaggggatggtggtcgtttattcgttcgagggatggtgtttttagggtttttcgcgtttaaaagattgaatttaaatgttttttttttaatagcgttttaaaagcgattttttttgaggtaggagaggcgggagaattgaagttttcgttttcgttttatagggtaaggatatagcgcggttttttttacgtagtatttttttcggagatttattgcgatggtcgtttcgtgtttttcggtgggttagagttgaattttgaggggttaggtttagttttttcgcgtttttttttatgggggtgagattttcgtagatttaagttttgtttcgggatgtatcggttatttgggggggcgtgagatttagtgtatttcggttttaaatgtagtaggtgtaatcgtaatttatttttaattcgtttttcggtttaggattattttttgtaatatttttgtaatttatttttgtaaataagagttgttttgttagagtaggagtttttggggttgtatttatttttgaggtatggtgtgtggtgttatagggaatttgtacgtttatatcgtaggcgggcgagtcgcgggcgttcgtttaggtgattaaaataaaggcgttaatttatatcgtcgtggtttcggttttttttggatatgggtgtgggattcggaggaaaattcgtaaattgggttagttgttttttagcgacgtttgtaggcggtaggcg

SEQ ID NO: 6593 - DNA, 928 bp, synthetic construct
  misc_feature 1..928: note = Description of Artificial Sequence: Synthetic polynucleotide
  source 1..928: mol_type = other DNA
gcgggggcgagggggcgagggttggtcgttcgtgaaaggaaaaataaattttaaggaagtaagaaatcggacgaaaggattttattttaagtgatttttttgaacgcgtttttttaaatttcgcgatagtttaaggagttgcgcggcgcggcggttgcggttaagatttgtgattaatgttatttgatttgagtttatggggttttgtgcgttttgttatttattgttatgtcgttatttttaagtttatttcggagaaattattcgcgttttttgttttaaggttgagttttttgtttattttttttttaagagaaaagaagacgggaggggaaaagagagaatcggagtttttggtttggggtttaaggtttttgtttacgttgcgggggaggtcgtagtagattcggttggggtttttcgggtttaggtggttaaagttgtcgaaatttgttttggatagtagaaagagcgtgtcggaacgtattttgggggtttcgtttttttcgcgtaggggagagcgagtatgtttttgtttcgggcgtcgtgcggtcgtagtagtagcgcggttttttttagtgcgagtcgtgtttggaatgtttcgggtaagcgaagggttagtaagcgaggcgaaacggatattataaagtagagagtggtgtgagttttttcgttttttgaaaagatggtaagttttcgtttcgggaaggttgtaacgttaaggttattttttgtaggtttcggatttttagttttttatgttttttgtcggagtagttaatagagtgagagcgtattttggaaagattggtcggatgtcgggcggcgatagggaaaagcgttcgacgtttggttttggggtggggggtgtggggagggggggtagggagttaacgggcgaggcgaaggaggagggttgcgaggttcg

SEQ ID NO: 6594 - DNA, 1267 bp, synthetic construct
  misc_feature 1..1267: note = Description of Artificial Sequence: Synthetic polynucleotide
  source 1..1267: mol_type = other DNA
gcgaatttcgagtaattgtttttcgagggggttcgtgcgcgttcggtggcgtcgtttcggtttgggttttttcgaggaaaaatatttattcgcgagggttcggcggtttttcgattcggcggggatgaattgtggtaatttcggtagtttttatcgcggtgcggaagtaaagagggtaatattggcgattgcggttcggaggggttggagcgcgtgaagtcgtgggggcgtcgtgcgtttttcgttttttcgtttcggtcgtaggttttgggatttcgatttcggtgtttcgggtgatagcggttgcggcgtttgtagtttagattttcgtagttttgcgggcgaaggaggcgaacggaatcggtttttagtggggagcgtaataagttatagtagttaaatttcgcgtttttgttcgggtttttagacgaacgtagtcgtagcggggggtcgggtttcgagttttacgtcgtcgtcgtcgcgttagcggtggggggcgggttgggggcggggcggtcggggttgttttttcgggcgtatatgcgagcgtagtattcggcgttgtcgagttatttttttcgtcgttcgttagtaagtttggcggttttaagttaggcgcgttttaggatttaggtttatttgtttttatttagtttcggtgttttttgttaggcggggattttcgagagcgatgtcgatggatttgattttagttgtgtggttttgtgtgtgtattgttaggataggtaagtatgattgtggcggttagagggattcgggaaatgggggtgtttatagattacggcggcgtggggagatttggagtcgagttttgcgttggtttggggaacggcggtagcgtggatcggtttttgggatttttttgttttgttcggagtgatagggtgaaaatagggatttacgggtttgaagatgttttcgttgagtgtttttttttaggggattcggttttaggggcgtaggagtgaggggcgcggtcgagtaggcgtatttttttgttgttagtaatcggtttttcgttttagggagtcgaaattcgtagtagggcgggttcgcgtgtttcgagttttcgaatttgtaaggtgttgtggaaattattttcgtcgattttcgttaggttgggaaggggtagttgcgggagtcgtattcgtagagggagcgttttcggttggcgggcgcggtcggggttcgggagggcgcggtgcggcgagggtagagagttgcgggagaattttgggatttcgcg

SEQ ID NO: 6595 - DNA, 1225 bp, synthetic construct
  misc_feature 1..1225: note = Description of Artificial Sequence: Synthetic polynucleotide
  source 1..1225: mol_type = other DNA
gcggaagtcgtttcggattatgtatggaaggttaattgaaaagattagtcggggcgtttgtggtagttttgttattttgtgatagtgtttcgtttcgggaaattgtatcgttacgataaacgggatcgtgataaaacgatttttttcgtttttatttgtagattatttagacgagattgaattgtatttgtttttttttcgaggggagtcgcgtttttagggtagtcgaaggtttggggttgagggggggtttttattaaggcgcgggtgggggtcggagttttaattcgatgagaagtgataggcgtttgggggatttgggtttcggtcgggattagcgtaagtagggattttgcggggatatcgtttttttaatagagtaaggtttggtttacgttttcggttttttttaatttttttttattgtttttttttgtttcgtaagttttatttatttttttagttatagagttttatttttaggtataggaagtttttcggaaaaagaaaggttgttttagaaagagatcgagagagattttttaaatttcgggtatagttacggtaatttttagtttgttaatgttaaggcgggcgcgtaaggtcgtttaaatttagatttttttttttatttattttaaaaaataataacgtgttagttattttcgtagatatcgtcggttggtgtttgtttaggagacgttagggttagagcgttatttttagtatcgaaatggtagagagaaagcgtagttttaaatttttttttagaggttaagttttaattattgtgttttttttttagggattgttggcgttttcgtttattggcgatgattatgcgtttagaattcgatcgcgaagtaattaataggaaaatatatggtgttaatttggatgtttcgcgtttcgcgtatattcgggaacgagcggtataaagttttgtcggtcggttcgcgatttcgcgtttttcggggtttgttagtcgggtcgtagcgataaacgtttagggttgcgcgttttggttggggttcgttcgagagatagtttgcggttggggagtttgagttttaaggggagagtttagtcgtcgaaggcgagtttatcggttaagttttggggttcggtaggttttgtataattattttcgtaaagttcgttatttttgtgttttttttttagttacgcgtttattagtttcggaagtattagggggcgatcggcg

SEQ ID NO: 6596 - DNA, 1627 bp, synthetic construct
  misc_feature 1..1627: note = Description of Artificial Sequence: Synthetic polynucleotide
  source 1..1627: mol_type = other DNA
gcgtagtagagcgtcggagaggagggacgcggaggttatcgaggggttagtagggtcgcggcgttagggtgggggtttttaggcggcgttggttacggtttattcgcgagggcgagcgcgttcggtcggtcgcgttttttgtcgttcgtgttcgggggtgggattcgcgtcgggagttgtcgagtgcgtggagggagttaggtttcggttcgtttgatggattgatttggagatggatcgaattatattatttgtcgtgtatcggtttgttttgtttttgttttgttttgttgttgttgttgttgttgtaaggggtggtggcgagttttaggattttattaaggaagttaagatttaaggagatagagggatatttatttttataatatttttttttatttttttttttttttgcgcgtggtaagtttttttttttttttttttttttttttattagtttttttttaatgaggtaagatcgtttttaataatttgttaatgtttttgtggcgttcggtgggggtcggaatttgagatttcgaatcgttgtgtgtgtgtgtgtgtgtgtgtgtgtgcgcgcggtgggggtcggaatttgagatttcgaatcgttgtgtgtgtgtgtgtgtgtgtgtgtgtgtgtgtgtgtgtgtgtgtgttgttattggatagttgatttattttttaagttgttttttttgtttgtcgtgtaagggacgcgtaaagggttagagaggtttggcggacgcgttaaaattggtaaagttggcggtttagggggaggggtaagtggatttggaggtttttttttattgtgtatttttttggaaaaaaagcggagggggtattaagtaaaagttttttgttaggtagagttagttcggcgtttttcgtatatagttggggttagtaggggttgtttttttgtcgggtatagcgtttttaggagttagtcggggagagttgagttaaggtcgaaggagtcgtttgcgggtttagtcgttttttttcgttcgttggttttagagcggacgttgggacgttcggggtttggtagttttgcgttcggttaggagcgggcgggcgagtattagtttgcgttttggagaaggggcgtagcgtcgtagttgaggtcggagtagtttttcgcgggcgtaggatatttgttagtgagcgttcggattgtacggttttcgggtagtgtttgtcggcgaggggcgggagttcgggtgatttggttatttttattttcggtttaggttcggagggcggtcgttttttatcgtttttttttttttattggtagagcgcgttgcgggcggattttcgggttcggagtagtttatcggttattttatcgtttattcggttttcggtgttttttttcggtcgttttatttagtaatttttcgtgttttgtttttcgattggaaatgttttacggaagcgttttggatagggttttcgttaggcgataagagttcggtgttgagatgtgttacgtttttatttttttattaattatggatggaaataaataaggaagagttaattttgttgagtttttttttcggtaacgagaggcgttttgtagtcgggagggagtcgtcgttcgcgtcggtagtcg

SEQ ID NO: 6597 - DNA, 1857 bp, synthetic construct
  misc_feature 1..1857: note = Description of Artificial Sequence: Synthetic polynucleotide
  source 1..1857: mol_type = other DNA
tcgcgttgtttaggtaaagggattcggcgattaagatattttcgcgagggtttagggcgcgtttttttcgttaggttttagatttcggttttgcgttatttttttttacgtttcggcgcgggcgtagttagttcggttttttttaggtttttaagtttcggatcgagtgtggggtcgtttttttttttcggaaggagttatcgtcgttttaagtggaagaggagaggaagggggcgggggagcggggggcggggagcggaggcggaggagggggagggggatttttttggtttttacgtggttcgggcgtttgtgaatcgcgtttatcggagggttttatagcgaaatataaaagtagttgggaagcggcggggattcgagtttttagcgtcgggcggagcgtcggatagagtttcgtagcgtttcgcggtcgcgatggggtcgaagcgttcgaagtttcggagtttataaattgtcgggttcgtttcgtcgtcgggattcgggtgtttgggttcggtttgaagcggcggcggcgtatcggtatagtcgcgggagtatgggtaggaggatgcggggcgtcgtcgttatcgcggggttttggttgttggcgttgggttcgttgttggcgttgtggggagggtttttgtcgtcgcggatcgagttgttcgtttttcggtcgttcgaagatcgatttttacggcgttcggttcggagcggcggtttcgcgttcgcgtttcgtttttttttgttttcgtttttggcgtgggacgttcgcggcggttttttgaaaatttttcgggcgttgtttattttggcggtcggcgcggacggttcgtttcggtagtttcggagcgagtttaggtggtacgtgttagttaggtagtttcggtcggaggagagcgtcgcggtgtacgggggcgttttttggagtcgcggtttggaggagtaggtgttttcgggtttttcggaggtttaggcggcggcgtggttggaggcggttcgcggcgttcggatggtggttttggagcgcgggggttgcgggcgtagttttaatcgattggttcgttttgtcgacggtattcgcgtttgcgtgcgttacggtattaattcggagtagatttagggcgaggttttgttttattatttggcgcgtttgttgggtttttagcgttacgtgtcgtcgttggtattggttcgggtggaggttcggggcgcgtagtgggcgtaggtgtaggaggagttgcgcgttgcgtattggatcgagggtagcgtggtgagtttgatacgttggttgtttaattttacggacgtggtggtgttcgcgttttggcgttcggaggacggtcgtttgcgtttttttcgggatgtcgggggtgagttggttaattttagttaggcggagttggtggatttagtataatggatcgatttaatttttttcgattatttgacggttaatttcgatcggttcgtaagtaatttttttagtttgtagtgggattcgcgcgttatgtagcgtgttattagtaatttgtatcgcggttcgggcggggcgttggtttttttggataatgaggcgggtttggtgtacggttatcgggtagtaggtatgtgggataagtataacgagtcgttgttgtagttagtgtgcgtgtttcgcgagcggatcgcgcggcgcgttttggagttgtatcgcggataggacgtcgcggttcggttgttgcgtttttatcggcgttacgagtttcgttttttcgagttggtcgtttttgtagatttttacgtttagttgttatagcgtcgtttcgattttttcgttaagtatattttgtattgtaaggttaagtacggtcgtcg

SEQ ID NO: 6598 - DNA, 2423 bp, synthetic construct
  misc_feature 1..2423: note = Description of Artificial Sequence: Synthetic polynucleotide
  source 1..2423: mol_type = other DNA
gcgcgcgcgcgtttgcggaggggggtggtaaggatttagaaggggagtttattttttttttcgagtttagttttggggagtcgggcgtttaggttcgttaggttgtaaagagagttgagagttgtttcgcgtttcgcgtagaatcggcggtggaataattagcgttttaagtgtgtgtatttgggattagggggcgggggagggggatttgcggtttcgcggttaattcggttggtgtagatttggggattttagaagggatagtgttcgtttagtcgcggcgattgagggtttttgttcgggcgtagttcgggttagtcgcgtgtttcggggtcgcggtttttttcggaattttcgcgggcggggtttgtttttcggagtcggttggcggggggcgggcggcgtcggggaaggggtcgttatttttttagagcggcggggcgacgttaggcggaagggcgcggggcgcgtacgttttaaatggtattcgttgttattcgagtttagagtcgtgtgggtagtcgcgggttatataagtcgcgagtttggtcgtcgcggggtagacggcgatagtagcggcggcgagcgtttcggagcgcggcggaatagcgtttttcgagtttcgtgtttttcgacgggttcgttcgttcgttcgttttttcgaggagcgtcggttcgggttcgcgagggtcgtcgttatttcgtagtagatttggatttttcgttcggcgagttttcggttgttgtttttcggggggtttcggcgtagcggtcgttttcggagagtttcggcgtttcgtcgttcggtttcgtagacgtcggaggcgttatggtcgttaagttcggcgagttgatgggtatttgttttagttattaggcggtgatgtcgtatttcgtgtgtttggtcgacgagttttcgtagttcgtgcggttcgttaagttgtttaagggtcggggtcggttgcggcggtcgcgttagtttcgttttaagacgtagtcggtgattttcgacgagatttaggaggtggaggaggagggggtgttttttatggaggaggagaaggttaagaagtcgtttttgtagagtttggagtgtttgcgtcgtagtacgtagagtttgtcgttgtagcgggagtagtttagtagttgtaaattgaggaatagtttggattttagcgatttcgattcggttttgtaaggggcgtcgttcgcgggggggacgcgcgcgttcgcggttcgcgcggggatcggcgtgtgaatttcgagagtgttcgcgttttgttttcgggggattcgtaaggattcgggatcgtcgtttttcgcgcgttcggattttcgtttcgttgcgaatcggtcggtgcgtttttcgtcgcgttcgttttggttcgggagcgtcgggagcggggtcgtttttttcgtttttgtaaatgtttattttttaattttttttagtgcgaattttgttgtgagtgtgtgcggggaggcgcgttcgcgttgagtcggcggcgggtagttattttatgtttttgttcgatggtttgtaatttcgattttgtatatcgttttatcgtgttttttagcgtatatttatttatatttacgttaatattttcgttgaatatttttataattgttaggcgtggtcgttgggattttgggcgtagcgcggttgttattgcgtttggaggattgatatttatttttgtattgcgatggttgaaggtatttatttaacgatttttttatttggatatgtttgtgaggtttttgaaaggagataaataaagttaatatatttgtatagtgtagttttttaggtttttgattttttgtattttcggggtttaggtttttaagattcggggaggtgggggaggaggtggtagggggatgtcggattagggagtcgggagtggagttatttttataagtttcggttatcggaacgaggttgcgttatcggtgcgcgggtcggttgtttgtttttttaagtggatttattttcggtttagtgtgtttttgcgtttttggtttattttttatcgtcggtattcgggttgaagtgaagtcgtaggaggggcggaggtagagttgacgatggagagttttttttttcgtatagtttattttttagagttggggttagggttttcgtttcgtattcgttatagaagacgtatttttttttgcgttgatttttggcggcgggtggggagatgtcggagttagtaatgcgagatgtttgggcgttgggattcgagagtgggttggaggttagtttgggttggtcgagagtgtgggtgcgcgttcgttgtcgcgggtaggtgattttttgatcgtagttgatttagcgtagtgtttggcgtttttgcgttgcggggaaaatcgcggtcgttatgtttttagtcgttttttgcgtttcg

SEQ ID NO: 6599 - DNA, 1146 bp, synthetic construct
  misc_feature 1..1146: note = Description of Artificial Sequence: Synthetic polynucleotide
  source 1..1146: mol_type = other DNA
tcgtcgtaggatttacgttgattacgtttaagtcggtttcgtttattcgtttcgtttatcgttaattttacgcgttttcgttcggatacgcgttttcgtagttttggagcgttcgtatttatttataagttttcgtgtttagttttcgtgttttaggagtttatatatatttcgatttttacgaagcgttttaggtttttattttcgcgtttaggtatcgggcggtcgtttttcggggtttattttcgttgtagaatttgtcgtcgaagttcgtgtggttgtagtcgtagtttatttcgtcgggggttagtacggtgtagaggtcgtcgttggcgtaggggttgcgcgcgggcgcgtatagcgggtcggcggtggcgtcgcgtaggttttggttgtttagtagcgcggggggtcgttcgtttagttttaggttggttaagaggtcgcggaagggcggttcgtatttgacggtgtttagcgtaagcgtcgagaggcgtacgtcgggcgggatgtcgtttacgaataggtcgttggttatttgtatttcgcgtcgtttggagcgtatttcggcggcgcgggtttcgtcgtttatcgttagcgtcgtgcggcgcgcgtcgcgggttagtagtattatgtgttagcggtcgtcggttatcggcgtgtttagttgtagcgtggtcggttcggcgtacgaaagcgtgaagcgtagtcgtaggcggtcgtttattagtagtagttttaggaagtcgtagtcgtcgtcgtcgtttaggtagagtagtagcgcgcgcgtggcgttggtgcgtaggttgaagttgagttcgtcgttgttcgtcgcgttcgtttagcgcgcgtagcgagtttattgttcggggtcgtcgtcgaattttaggtcgttcgcgcgcgtcgttagcgttagtagtagtagtaatagtagcggcggtggtgtcggtcgttatcggttttcggacgttatgtttacggcggtttcggtttcgttcggttttcggttttcgtttaggttttagagtcgcgggcgtatggggcgggagggggtcgggcgtttttcgcgttgagcggggtttttttgtaggtttatagtgttatgggttcggtcgcggggcgaggcgcgtagaggtttagatgtcg

SEQ ID NO: 6600 - DNA, 577 bp, synthetic construct
  misc_feature 1..577: note = Description of Artificial Sequence: Synthetic polynucleotide
  source 1..577: mol_type = other DNA
gcgggtatagtcggtttttgacggcgtttaaggtttcgttcgtgcggcgttgtttattttttattattagagatcggttcgtttagcgggtaggttttattttaatgttaggttaaagtttttattttttggattcgggtttggcgttttcgttttcggcgcgtttttattcggcggacgcggtcgcgtataaggtttagtacggttcgcgttttcgtagttcggtcgcggttgaatatttttagcgcgaagcgggtgggcgttagtagtttcggggacggcggtttttaggtttgaaagttggcggttcggggttgggcgggggcggttattgcgttcgggagtagttttagtagcgataggagttgtagttagggcgttatggcgagggcgaagtcggcggttcggatttaatagacgttttatcgatttatcgggtatcgagttcgcggttagcggggtttgagttttttttttagcggggcgacggtacgtcgattaatgggcgttggtttgcggcgtttgcgcgtttttttgtttataggaggtacgtggggcgcgtagggtagggagagcg

SEQ ID NO: 6601 - DNA, 1721 bp, synthetic construct
  misc_feature 1..1721: note = Description of Artificial Sequence: Synthetic polynucleotide
  source 1..1721: mol_type = other DNA
acgaagaatcggttggttacgtcgaagatgtttattacgtttcgttttacgggcgagagttttagtaggtttgggggcggggcgtaggttattgcggggtaggtgatttttggtttatttcgtttttcggtttgttcgttttcggggattttatttttggggtggggttggggataaagggttagggttttcggcgtagtcgtttttaagggtttttagagtttaagttgttttttagggttttcggagtttaagtttgcgttagtttagattagtttgtttgtgtaggggattttcggcggtcgtatttagtttcggatttttagacgcgagttcgattttagcggttttttagtttgggttaggtcggggcgcgtgtttcgggttttttgtggttgtatcgcgcgttttgtgtttacgggcgaaggcgttggaattcggcgttcggagttcgagtttttgaaggcgggaggcggcgttcgattttaggggttgcgttgggttgtcggagttaagagtgtttgcgtttttagtttcgcgttagaagggatcggagttcgagttcgtttcggttttcggggttttcgagtaggtgttcgtcgagggttttagagtgtgattgagcgggttggttcggcggtcgttgtttttcgttttcgttttttcgcgtttggtcgcgttatttattgtcgcgggtgttcgcgtgcgcgtcgtcgatgcggtcgtcggggagcgtttggaggtggaagtcgatgtttacgttgtagtagagtcgtcgtagtcgtttgatgtttagtaggtagtcgtcggcgtcgttttggacggtcgtttttttgggttgcgttgttatcggtaggcgcgttaacgagagcgttattaggtttttttagcggcgttttagttcggtttttagcgtgtcgttgggtgtagtgggtgcggcggcgttttttcggttcgtttagggcgttagtaaggttagtaggatcgtcgggagtagcgttatcgcggtcgtttcgggtttcgatatttcggttcgagggtcgtgcgtcggttaggcggttagtgcgttcgggaagttggggggtagagttgcgtttgtggcgtttcgcgggagcgtacggtcgatttcgggtaggagtgcgtaatcgaggaggtgcgggaggtaagcgacggggttttcgggcgtcgggttttatttcggttgtatggagcggcgagtcgggcggaaagcgcgcggttggagttgggattttgaggagtagtgcgcgtttttttgagcgttaggttcgttcgaggtcgagtcgttatatatatagttcggcgtttttttttattcgttcgttttcgcggggggtcgttcgcgtttttttgggcgttcggggcgttgtggcgttcgcggttggtcgtaggtcgtttgttaattagggtcgggggaagggaggaggttggggattagcgtcgcgagtgttatttggagggatttcggtttttatttttggtttcgttcggtttacggatttgttcgtttcgttttttggcggtttttatatttttgttttttagttagttttgttttttgtattttgtttttgtttgttttcgttttcgtttttttttttgtttcggtcgttttggcgtagttttaattcgggtattcgaagtttttagtgggcgtagaagttagcggttgttgtttgtttttcgtttttcggaggtttacg

SEQ ID NO: 6602 - DNA, 1721 bp, synthetic construct; identical to SEQ ID NO: 6601
  misc_feature 1..1721: note = Description of Artificial Sequence: Synthetic polynucleotide
  source 1..1721: mol_type = other DNA

SEQ ID NO: 6603 - DNA, 615 bp, synthetic construct
  misc_feature 1..615: note = Description of Artificial Sequence: Synthetic polynucleotide
  source 1..615: mol_type = other DNA
tcggcgtttgtcgagcgcgtagcgtcgggcgaggcgcgcgggattagcgggtgttgcgggcgcgcgggttagaggcggtcggcgttttttgttcggtgggttcggggtcgggtcgcgggggtttggggttcggcggggcggcggttttagtagcggcggcggcgcggcggtcgcggagggaggttgagcgcgggtcggttgtgttcgttaagggttttaggcgtcgcgttcgggcgtatttgtattttgtcgcgggaagtaggtagttcggtttggcgttggtttagcgttggcgttttttttggggtatcgcgggttcggtggattggttattcgagaaataggtttatttttttttttttttttttgtgcgggttttcgggacggacgttttaggcgcggcgtcgagtggaggcgagggggttgcggagggggaaggggttacgcgggttacggggtttaatttttgatttttcgcgacgttaagaatgtaggagggtagagttgagggagattttaggtggaatttttaggtggggaaggttgagttgtcggggttgcgggtatcgggaaggtttagggtaaggcgttcggcggtgcgtgttcggaatttcg

SEQ ID NO: 6604 - DNA, 1542 bp, synthetic construct
  misc_feature 1..1542: note = Description of Artificial Sequence: Synthetic polynucleotide
  source 1..1542: mol_type = other DNA
acggaggcgcggcgttttttatagtcgtttttaatgaagggaagcgtgtttcgaagttagtttcggtgcgtttttttttttttcggcgtttttttttaaatttcgtcggatttttaaaggttggaataggcggtgcggttgtagttcgcgttgtaatcgtaggatatttgatggggcggcggcggcgggggtagggcgtagtttggaaagaagggggcgaaagaggttaaatggtttcgttcgtttttttcgtcgggagaattcgtagcggcggggtatagggggtttaagggttcgtttaaggttaagtcgtcgcggggggtagttagggggttttttttggtcggggagtagttcgggacgttttagggttcggggtatagtaggttttttattattgtcggcggcggtttaaagaggtcgggttttagtttcgggggttttcgtagtacggaggtttcggcggggaatacgtcgagaggttcggcggtaagtaagattgtcgttttcgtgtcggcgtcgtagtcgggttttagtagtttaaagaattttacggttttcgcgtttttttttaggtcgtttaagtttacgttcggtttcgacgggttatattcgtcgtcgtttgttcgggacggtttcgtgaagaaggacggaggtagattgcgtgttcgtagcgggatttttttggtttttgggatcgtcgtggttttcgcggggtttgttacgttttttttcgcgtttttagtgttcgtattttttagttcggtcgtcggcgtagttattttatttttcgtcggttcggtattttcggggacgtggcgtagcgagtcgaagagcgcggttagatttcggttttgtaagttggcggtcgcggcggtttgcgacgtttttcgtcggggggtagttttgtcgtgggtcggggtcgcgattgtcggggcgttaggggcggttagcggtcgtttggttggcgtgtcggcggcgttcggggagggcgggtcggggggcgcggcgtttatgaggtcgttgtagcgtttgatttgtttttgtaggtatttgcggtggtttatttttcgtttcgatttgttcggtttgtttagcgttagtttgatgttgttggacgtcgagttaatgaagttgagtagatcgcgggtggtttcgcgtacgttttttttttcggttttcgatagtagcgtattcgtcggagtttcggttttatcgttttcgaaatagtagtttttgtttagggtttcgaaggcgttttttagttcgttcggggagttttcgaagtcgaagggtacgaaagggtgcgtgttgaggagcgtcgtttgtatcgttatcgtcgcggttttcgggttgttcgtagcgttgttcgtgcgttttcgttagtttttgttcgtcgtttagatttagttttcgtttcggcgcggcgcgcgcggcgtagtttattagtttcgggtttggttcgttgcgttgtttttcgggggagtttattaggttttgtaagtaaggggcggagggagggagcgcgcggcgatcgtttcg

SEQ ID NO: 6605 - DNA, 1542 bp, synthetic construct; identical to SEQ ID NO: 6604
  misc_feature 1..1542: note = Description of Artificial Sequence: Synthetic polynucleotide
  source 1..1542: mol_type = other DNA

SEQ ID NO: 6606 - DNA, 1768 bp, synthetic construct
  misc_feature 1..1768: note = Description of Artificial Sequence: Synthetic polynucleotide
  source 1..1768: mol_type = other DNA
gcgcgtcgtgttttttatcgtttttttttttggttcgattggttttggttttttttacgtttttagtttttaaattggcgttcgttttatggttcgtgtaggacgttaaaagtacggtaaattttagggcgatttttagtagacgttttcgacgtatgatgtcgagtcgttatcggttttcgtcgttttttgtcgcgttcggggttcggtttgcggtcgtcgttgcgttttgaagcgtatcgcgtcgtcggggtttcgttatttcgtcgttcgtttttcgggtcgggtttttttcgttttttttaggcgttgtttttattttaggcggtttttgttagttgtaatatagagataaattttcgaggcggggagatttttagggtatcgggatgttgaagtttcgcggtttttatttttaagtttaattcgtgcgtcgtttgcgcgtggcgtagttaatttgggtaagggaagatcgtttggtttatagttggttggaaagtttaggttttcggcggtagtagtttcggtcgatttttcggtttttcgggtttcgttagaagagcgcggcgtaaagtatttatatttttagcggttttaagtttcgggcgagttttttgggtttattttttttagcggtacgaattgcgcgcgatgcgcgttttgaacgttttattttttagtttgtttttttcgttaggttggaagttagtcgcgtcgttttcgtcgatttcgggcgatgttatcgtttttcgaatatttgacgcggagttcggtattaagagtttcgggttaggaagttgttaggtaggggagggttagcgttagttgtggacgtttcgggatagttttttattttagtttttgtttttgttttcggcgcggcgtaaacgtaaaagttttcgtggtcgtagttttagtttcggtggtcgttcgattttcgtcgggatttcggttgtatttattggagaagcggcggtttcgattttcgaggaggcggcggcggttgtttttagtcgtggtcgttatagttattgttcggtttcgttcgtagttgttttagttgtggtttttgttcgtttgtggtatttatagtttttgtcgcggttttcgtagtttttttttttttttatttttttaagtatcgttcgcgtagcggtttttcgcgagagaaatattttttttaaaaaaagaaagaaaaagaaaatgatattttttttttcgtcgtttttattattattttatttttcggttttatttattttttttttttatttttttttgttagttttcgtttcggtgcggggtttttcgttcgtaggattagcgtagtgggaggaggtagaggtgattaggttttgttcggtttgggattttttgttttgaggtggggaggggagaaatgggaagaggtggagtagcggttttagttcgttttgcggttgcgaggtttagattcgagattaatttttttcgcgataggtgaagttttatcggagtagaaagttgttttatttgtattaagaatgcgcgttggagacggttgtttcggaggttttggttcgagagaaaattagttttcgttgttcgcgtttttcggtagcgcgttttttgcgtttttttcgtcggatatttagtagacgtcggaggtcgggaggttaagattgggcgcgtcgtaggtcgggatcgcggtagaggttgttgtgtcgatcgaggagagggttttgtcgtttttatttgttttgggtgtcgagagtttattttagacgcg

SEQ ID NO: 6607 - DNA, 2656 bp, synthetic construct
  misc_feature 1..2656: note = Description of Artificial Sequence: Synthetic polynucleotide
  source 1..2656: mol_type = other DNA
acgtttttttcgcggtaggaaagtacgttggtgttattttagagttttagagggttgagggaagattcgagttttaaaattagtcgtttttaggttcggcgtcgggaatgttttttagttcgtcgcgtttttttcgtcgttttttttcgcgcgtttttttttttttgcgttacgtttttagatcgttagttattttcgtcgtcgaggtttttttttttttcgtttttttcgttcgcggtttgggaggaggagattgcgagagataagcgcgagggggagattggagaggggtttggtcgtgcgtcggcgtcggttgtgatggggagttcggagtagttaggcggcgagtagtagcggcggcggttgtagttcggagtagataggagagtcggcgttttttttcgtaggttgcgttgtgaattggtttgcggattgggatttcgcgtttttcgttttttttttttcgttgttgttttttttatttcggtttttttttttcgtttgcgaattttcggcggcggcggcggcggcgtttcgagcgtagagcgtttttgttcgcggttttagtttcggttagcgcgcggtgggcgttgcggcggtagtagtcgggggatcggttcgttcggagtaagagcgtcgagtatcgggtgaagaagattacgggggaggcgtttcgtagagtcgtggatcgttagcggaggtaagggtgcgtggggatttgtagcgtgatgatttggttgtttggtgtatcgattggagcgcgtttgtcggagtatagttttagttgttgggtgtaaatgggttgcgaggtgggttggggaggcgagagtcgacgaagcgcgtgggggaaattttttattttgtaaagttttaattttcgcgtagtttcgagtcgtcgttgttatcgttgtaaataggagaagagggtggtttggtttcgcggcgggagtcgggaggtttatacggagagttggttaagtttggggttgaggatttggggaggggttgcgaggggggttgcggattagtgtatttattttcggtttttagtcgtttttgtaggtggatgagaaggtttaggtggcgagtttgtttggtagtcggtgtttttcgggcgtagtgggggatgtttagatgtcgatggatgatgtatttaggggatttcgaggtgtaagttgggttatcgttaggcgaggcgcggcgtagagagggagtttagtttttattttcgttaggaaagggaaagggttattagtttgcgggttcgttttttacgtttgattcgggtttgcggggtttgtggttagggtgagatgtagtgaacggcggcggcggtttttcgattggggacgatattttttacggagtggttggggatagagattgtttttgttattttgataaggagagggaatcggaatgttttgcgagagtgtatgatttttggcgggcgtgtgggaaggttgtttgtttttgaaaagaaagtagcgcgggtttgattatttttaggagtgcggaggagttgttttcggattgggggcgagaacgttaggggtattagtttcgagtttaggttttattttcgggcggttcgggacgaattttttttataggttagtgtgtgtgtagggtaagtgtagggggttgaggggcgttggcggggaggtagtagaggtggtttggattattttggcgcggcgcgcggtgagcgcgaggatttcgttagtgggagtcgttgagttaaagtgtatttggtttttcggtttgtatgatggcgagttcggatatttttagttgtgttgtgatttgaattttttttttttttttttcgttgatttttgttatatgtgtttttcgagatggtttaatattgaatatgattgggttttgcggaaagtaatttttatttattttttatcgttttttttttgtgggcggggggtggcgggggcgtgtttggggtaaggatgtaggggtggtcggagtttggttgcgagttaagagagtcgtttgggttgttcgggatgagaggaataggggtgttttcggggtgtgggtgtgttggcggtgatattttgaggttgtagttcgttggaataatgggtttaaattaggcggtggagaggggttttcggaatggacgtcgggggcggggaggttgcggagattttgcgaggttttcgtgaaggattaggaggggttttcgggagggagtggcgtttgcggttcggagcgtgggcggtcggtggttttggtacgcggaatttggtggatttttagcgtttcggtcgggagttttagttttatttcgtcgtcgtcgcgcgtttaatgggatttagtttcgggtttgggcgaatttgtagtagtcgcggcgggagggagggacgttgggatcgcggtaatgattgaagttttttttttttttttttttttttttcgttttttttcgtttttagattttggcgcgtttgttttttaagttggattttatttttatttataagtgttagataaattcgcgagaattttttttaattcgtttcggttttagttagattagggagggcgtttagggggagggggcgagttgtttgggtagtgtttggggaggtgcgacgcgtttattcggggtttgagcggttggggtttttgtgcg

SEQ ID NO: 6608 - DNA, 623 bp, synthetic construct
  misc_feature 1..623: note = Description of Artificial Sequence: Synthetic polynucleotide
  source 1..623: mol_type = other DNA
gcgtcgtagcgttttttgtttataaagttttgttagtcggagaaggtgtagttgttttaagagaagaagtgcgaggtattgggtacggttagggtcgttttcgcgttttgttcgtcggttcggttttcgtggggttcggtggttcgtattaaggggaggagatagagtagtaagaggtgagggattattttgtaggagttattttttttttgggagtttgcgggtcgggcgttttttttcgttgggatcggagcgcgtagtcggggtgcggggcgtatagtatataaggtcgtttcgaggagttagggagttcggacgcgcggagtatcgcgtcgttcgttattagttcgcggtcggtacgttagtttcgggtttgttggagtatttttatatttttgtttttattaggttgttagggagcgtttttgtttattgggtagcgcggcgtttttcgcggcgacggtgacgcgttttggttttgataagtttggttttttttattttatcgggtggcgtcgttgttgattttacgtttagtcgtttttattttcgtttgaaattttttcgatagggtttcgtttcgggggtttagtttttagcgcgtatatattcgcgtggtgtcg

SEQ ID NO: 6609 - DNA, 1967 bp, synthetic construct
  misc_feature 1..1967: note = Description of Artificial Sequence: Synthetic polynucleotide
  source 1..1967: mol_type = other DNA
gcgcgtcgtttttgttgtttagtcgaatttcgttttttttagggttgcgttgtacggggttgttttttcgagtcgttagcgttcggcgttttttcggcgcgttcgttttttttattttgtgcgttcgcggcggtgggagtagagtcggtcggtttttggggatttagcggtcgcgttggtgatgggtagcgttttttttttaaaggcgggcggcggggcgggggaggtcgcggttcgggtggtgtcgtcgtacgggttcggatttcgagggggaagtggtttgttagtttcggtttcgggaagagtgaataataaggttagggtagtcgttttagatcgttatatttttgggtttaataaagttaggatcgttgttttgtttttttcgttttagaagaataacggtttgtaaaatggggtaaaatgggtagaatcgtacggtcgttgttgttggtgtgatcgttgttgtattttagtcgatatgacgttagttttttatttgttaaattgttggttagttgtaaagtttattttcggtcgcgagtattgaaggatgggagggtcgagcgtcgcgttttgataggaggaagtgcggaggggcggagggcgaggagggcgtgattggggttgtttggtgtgtgcgcgcgcgtgtgcgcgcgtgtgtttttatacgcgtcgcgtgtttagtgttgtacggggcgggagaagaatggtaggtagtcgttcgaaatatttcgttttgttttttttttttgggcgaggttttcgattttggtaaagtgtgaataatagggagttgggaggaagatagtagtgatgttgtcgcgggtggcgggggttgcgtcgtcgtttagagaatttcggtagtgtgtagggaggtgtattttattttggttatttttatttcggtttttttggaaaatttttttgtgcgtgtttatttttttttttagttgttatttttttatttttatttaaggatttgcgttttggttttgatggacgggagggaaggaagaaaagtaggggtcgtagagagttgggtgggttgggcggatattttgggcggggggcgtgtgttgggaagcgatcgaggaaagtcgggcggaggggttgtgtgtcgcggtcgtagttttaggtatcgttgtatttgttttggacggtcgattttcggttggggagcgtacggggcgggttagggagtatttagtgcgtttttttcgcgggcggtataagagtagcgttcggtcgtcgtttttagttaattcgggttttttttacggcgattaattagtgcgaagttggttgggcgggaagtcgcgagaggtttttattgcggcgcgggtggcggttaggagttgttaggatagtttttcggtgttttagtttaacggtttcgtttatttatcgttaagagaaatttcgttttgcggtcggtttttcgtttgttcggtagttttcgaggaaataaaatggagattaggtggttatcgggagtgtttttggttcggtcgttcgtgttcgtttattttcgttttttttacgtcgatttggagtattttatcgttttcgttagcgtttattttcgcgtcgcggaattcgggtttgagcgcgtcgtcggggagggtattttggtaggtatatttacgcgcgtgcgttgatcggtcgatcgcgggtcgggggttttattgacggcggggcggggtcgtggtagggttcggagaggaggggtggggattaagtttagttcgtttggttttgggttttcgttgttatttgggcgggggttatttcggttatgttttttttcgcggtgttcgtgggtgtcgcgacgcgatttgtttatatggggcgggggaaggggggtgtttttgagatattttcgttttcgggtgggagcgtgataatggagttcggatatttggtgggttttttgggggatcgtttggcggttttttttattatcg

SEQ ID NO: 6610 - DNA, 2558 bp, synthetic construct
  misc_feature 1..2558: note = Description of Artificial Sequence: Synthetic polynucleotide
  source 1..2558: mol_type = other DNA
tcgcgatagttaaaaacgggtgtttcgtttcgataatagattttcgcggattttttggtatttggtttattagcgttcgcgaattttgtttcgggagatttattgaaattcggatgtttaagtcgggaggcgcgtagtaattaggaggatgagagggtcgggtttgggttaggaaagcggttttttaaaatagatgttagggggattgtagtttcgagttatgagaaaaaagttaaaggcgagatgatacgtattgaattggggtaaatattggaagaggagataaaattgcgtgtttgagtatcggggtgcggggagggggggataaaattcgtatttagtgtaaattaaaattttgggagtaggtgggggttgttgcgcgttttttatttttagtttttttattaaggattttgagtttttatgtatttttgttttttggttttttttttttttttcgttcggtcggtgagaggcggtcgtcggcgttttagtagtagttagatgttaggcgaagttcggagcgcggagcgtggggaagggaggggaagggaggggaggggaaaggaggggtggggcggggagcgcgcgcgggttcggttagtgcggggtggtgggcgggttgagttcggggacggcgcgggaggggggagggaaggggggtagttgtgggtagggagtcgggttcggtcgttagtattaaagatggagaggcgtcggggttttgtaggggagggggttcggcgttgacgtgggacgcggcggaggcgtagtagtcggtggtgatttgttaatttcgtagtagagaggagttgagggcgatgagagcgggtattgcgaattgtcgggcgatgttgtcgttgtcgtcgtgatacggagagtaatagttttttagtaatattttttttcgatataggtatatatttttcgataggtacgtatatttattttatagtgttcggttcggttgcggtgagtgaggggtcgggaagaggcgtatcgtttagcgagcgtcgcgcgtcggggtttttcggggttggagaggtttggggggcgcgcgttcgtttcggttattcggtcgttgggtttgtgttttttttatttggcgtgttttttttttgtcgttgtagtcgtcgtcgttatcggttgggggtcggttagaagggggagtttcggttgttagtttgggcgtagttgtttttttagttttttttttttagggtacggtcggggtgagaggtggggggcgtagcggtgtgcgggggttgagggcgtgagtagaggggtcggggattcggaggttttgtatcgttaggggttggcggagtaatagagttcgtgggtgtttttatgtatgcggatcggtgcgcgggcgtaagataaggttgtggtttatttatttgtgtgtttattcgtcggtcggttgggaagttagaatcggaggagttgacgagtagatttgggggcggaggggagtaggattgggattgtttacgttttgtttttttttgagaaaacgtggtgggtttttttttgattggatttgatttttattttttttttgtaggggagggagggaagttttagagggtttgtagcgttgcgggtttttttcggttttcggcgggatcggcggtgatatcggagttcgtcgtgcgttttcggtcgttttcggtgggtgtcggtttttgtatttgatgcgttcgggatgttttttttattttggcgcgttcgtcgttagttcgtatagcgtttcgtatattttcgtacgcgtttgaaatgcgtacggtttcgtcggttcgcggaattattcggacgtacggagcgtttcgtatcgattcgttcgtcgttttttcgagacgttcgtatcgtgtttgggtcgggcgcgttggtcgttggcgtcgttggttagaggtttgggatttagtcggtcgtttttagggggttacggttttgggtcggagagggagggcgggtagattttttttcgtttttttttttataattcgttgcggggtttttgtgtttttttttcgtcgcggggcgggttcgttttttttgtcgttttcgtcgcggagtttagttcgttcggattgtcgtcgttttttttcgtttttttcgttttttttcgtttttagtttagtttttttttttttaggagtttagtttttcgggaaaagttgtttttttaagtttgttgaagtcgtttttaagtttcggtgggggtcgttgggaattgggggggtgtgagagcgcggtcgattttcggagttcgggcgggttatcgtcggttttttttcgcgtcgtttggttggacgttgtagttagcgttagtcggatcgcgggcgtcgagcggcgggtgggggagacggttgttcgtgggcgtttagattttttttaggatttaaaaggtttgttttagggcgttaagtttttatttttttggttgtttttttttagtttttagaaatttcgatgtttgcgggaaagtacgcggtggttcggttcggttgaatgtttattttaattttgacggttttcgtttttatttcggggcg

SEQ ID NO: 6611 - DNA, 2558 bp, synthetic construct; identical to SEQ ID NO: 6610
  misc_feature 1..2558: note = Description of Artificial Sequence: Synthetic polynucleotide
  source 1..2558: mol_type = other DNA

SEQ ID NO: 6612 - DNA, 1508 bp, synthetic construct
  misc_feature 1..1508: note = Description of Artificial Sequence: Synthetic polynucleotide
  source 1..1508: mol_type = other DNA
tcgtttcggggcgagaaggagaaaagttagagggttgaataggtgacgttgagtttgttggagcgtgtgtgttttattacgtaagggcgcggagttcggtcgttttatttttcgttatttgcgcgttcgggggtacgttttttgcgatagtttggaatttagattatttgcgtttgtttggtttcgatttagtgtttaggtggttttagtcggaaatgtttgtttttttttaatttttcgatttcggttgtttcgcggattaggtacgtagcgttttagtcgtaggtttggatatgtcggatatttggatttatttttagtaatttttttttttcgggaagagggatacgttttttagtttgaagatttgtttttaggtttaattggttaggcgcggaagcggagaatttcgtattttggggcgcgttgttcgaggtggttacggtggcgtattaagtcggggttaaagtcggggtagaggggtggggtagggtcgggggagggtgatttttgggtttggagaataaatttgttattcgagggatttttagttttcgggatttttattatttttattttgtttttagttaatgcgcggataagcgttatgcggtgcgttaatattcgcgttagggttggggttcgcggcgggagagggacgtacggatatagcggaggaattagtcgtcgagttcgaggtttgaataagtaaggatttttaggttaagagttacggtttgaggatttttcgattcggagggtatttcggggttttagtgttattaagtcgtaggaagagggtaaggggttgggggaggggtttagggtagaattgtcgtcgtgtagggagtagggagatgaggggtttttttgttattatttttacgggcgcgttttaaaacggtagacgcgggtggttggcggagcggtcgggggttgatttttattcggtttttgttagggtgtttgttttttttcgttgcgttttattcggggttttgtatttcggtcggtttttttacgtatttggagttcgtcgggtatttcgtttcgtcgttagtcgcgttattttggtttcgtcgttttcgtcgtttagtcgttcgcgtaggttttatttttgtgtaaagagtttaggagtaggaggaaagttattagttatatgttataaagaggttttatttttcggggaggtggttttgtggtcggtcgtgcggtagcgtttttttttcgtttagcgcgtttttagtcgttcgtattcggcgtttcgttttttttgttttttagtttagcgttcggttgcggcggcggttttttttttttcggtttttcggtttttgttattcgcggggttgggttaggcggtcgtttttttcgttttttcgcggtatttcgggtggtgagcgtcgcgcgagttcggagtttagacggattttagttttataagtttaggaataggagcggcggttcgggttagatcgtttcgattcggtttcgttgtttgagaggcg

SEQ ID NO: 6613 - DNA, 1119 bp, synthetic construct
  misc_feature 1..1119: note = Description of Artificial Sequence: Synthetic polynucleotide
  source 1..1119: mol_type = other DNA
tcgggcgcgtaggcggcggttagcgttggagttttagttagttttttttttttacgtgcgcgttaggttttggttattttggtaattcgtttcgtttagacggtattaggtagttgaatttagttttttgttacgggggaaaatgtttttattgaagcgtcggagcgtagtttttgttttttattgtaagcggcgttatcggattttatttgtaaatttattagtgtgcgttcgcggggagggggttcgggaattcgggttcgggtaatcggcgtcgtatgttaattagggggcgttcgttttcgttttgttcgtggtttttttttttcgatttttcgacgtttcgggaggagtggggtcggagcgtagggttgggaagggttttaggatttaggaaggagacgggtgttttttagagaggattttatttttttcgaggttcgggcggttttcggtttttttttggggtgtcgtagtttttttcgattcgttttttcgtagtcgtagtcgttcgggtttggaggtggtcgggtatcggtgtcgacgtcgcgagggtagcgttcgcggcgggaatattaatgtattttaaagggtacggtcgtcgtcgtagtaggtaattagttggatcgcggcggagcgcgcggaggtggttgttggttgtaaggattgcgtttagttttcgtttcgtttttcgaggttttcgcgtgggtcggcgggtagtgcgtgggttataggaagcgggttgattggattcggtttaggatttcgtataagggtagttttttgtttatagttttttttttagtttttcgtttttttttcgtttatcgtttttttttttcggcgatcggtttcgtcggttgcgggggggtggggggggtggggtgttttgtgtagtcgtttattttttgtttcggtttcgtgttttcgttggggattgtttgcggtgagtttgtcgtacgtacgttagggtcgaggtagtgatgcggggtagcgtgggaggacgggttgcggagttcgcgttattttgtttgtggggagcgttgtgtttgtttttttgttagcgcgtttagttgtttcggtcgtcgttacgcgggattgtttgttatgtcgttatcg

SEQ ID NO: 6614 - DNA, 1119 bp, synthetic construct; identical to SEQ ID NO: 6613
  misc_feature 1..1119: note = Description of Artificial Sequence: Synthetic polynucleotide
  source 1..1119: mol_type = other DNA

SEQ ID NO: 6615 - DNA, 653 bp, synthetic construct
  misc_feature 1..653: note = Description of Artificial Sequence: Synthetic polynucleotide
  source 1..653: mol_type = other DNA
gcggagaagttaggagcgatgaggggcggggcggttttcggcgtttttttttttagtttcgttttcgcgttgtcgtcggagagggattcggggcgtagtcgtttcgtttttgtcggggttttaggaggaatttaagaaaagagagatggagggaggaaatggtatcgttttaggaaggggtaggatttttaggatcgaaggcgttttttttttttttttttttagcgatattgggaaataaagtttcgcggttgaaaagaatattacgcgcggttaggattcgagtagggttttggggcgttaagggcggggaaaatagggtattcggagtgtaggagattttttagggtcgttttttttttcgggggtgttttgaggaatcgcggcggggattcgtcgttggtagtttgcgggttttggtgttagcgcgtatgggcgggttgtgcggacgtggttggttttttaaaggttttagatttcgttcgggtcgtttagttttttaaagttgtgttttaaagtttaggggagatagcgaggttggggacgtcgggaagtttttttgaggtgtggggtttttgagtagaaacgcgcgggggattgttagggttgtagaaattttggttcgaggcggtggttggttcgttttattttcg

SEQ ID NO: 6616 - DNA, 1768 bp, synthetic construct; identical to SEQ ID NO: 6606
  misc_feature 1..1768: note = Description of Artificial Sequence: Synthetic polynucleotide
  source 1..1768: mol_type = other DNA

SEQ ID NO: 6617 - DNA, 1101 bp, synthetic construct
  misc_feature 1..1101: note = Description of Artificial Sequence: Synthetic polynucleotide
  source 1..1101: mol_type = other DNA
gcgttaagtcggttttttaatttggtttgttgaacgtaaatcgttgagagtttgttgtatcgttttttggggtttttggttgtcgagtttcgttaaggtaaagacgttagtaagcgaggaagcgtagcggaagaaaaataagcgggcgcgcgaggggagttttaggagggttgtcgagtggttggtaggcggttttcgtttttttcgggtggtttcgtcggcggttgacggttcggaggacgcgcgtttcgaaaagttagatttcgggcggcggcgcgttacgtcgcgttttttcgcgtttttttttcgttgcgtttcgggaaaggaatttgttttttcggttttaggattggggagtgtgtcgcggggtcgagggtggggaatagttagagggagacgcgaattaggtcgttggcggagggtttagggggagcgtagaggcgacggtttttatgtcggcggttaatatgatggagaatcggtcgttgttcgttttgtaggtgttcgagtcgtagggtgcgttcgagggtagttcggtttggtttagttcgtcgatttttacgtttcgtcgtcggcgttttaagatgcgtcgtatgaagaacgtataggagtagagtttggaggtcgggttggttcgggatttgttcgtcgttttggttttcggtaaggagtttttgtagttgtcgtttatcgagattacgttttttagcgacgaggatatttcgtggtttaattgttttatatttagcgcgttttcgcgtcgaaaacgttttttttttcgtaagtggttgagggtgagggagcggaaggagtgtagtgaaagtaggtacgttttcgtttcgttcgttttttttttttttttttcgttttttttagagtcgtttagggtttcggggtattttgggggaaacgttttgggggagaataggagttcgttattagaggcgtttttggagggcgttgcgtttggttttagggatggtggtatttagtttttacgcgtgttattcgttttttaatttagggtgaggggttttatgttgtacgatacgtttacgtggggttttacgttgtattttattttttttgattttcgtagcg

SEQ ID NO: 6618 - DNA, 1101 bp, synthetic construct; identical to SEQ ID NO: 6617
  misc_feature 1..1101: note = Description of Artificial Sequence: Synthetic polynucleotide
  source 1..1101: mol_type = other DNA

SEQ ID NO: 6619 - DNA, 2341 bp, synthetic construct
  misc_feature 1..2341: note = Description of Artificial Sequence: Synthetic polynucleotide
  source 1..2341: mol_type = other DNA
gcgtggttcggagagcgtggataaggtaatttgttttggatgttcgggagaagggagttcggtcgaaagggtttagtttttcgaggttgttttaattggggcgcgcggcggtttaggagggaggcggggaggttttcgggttgggtcggggaacgtcggtttttaggttgggtagggaggacggtttagagcgcgggttttcgggttttatttcgggaaaagtttgggtttgttttgcgttgttgcgtgttgcgtttttgggatttgttgattgttttagagggaacgtttcgcggtagtgttagttttttggggattaggaagggcgatttttgtttgggagttagtgtttgggtcgtcgggttcgggtaagcgttgggggtttggttcgagaagatgcggataggtggtttagggcgtcgcggattttcgttttttgcgggtatcgggagtttagggtcgaggcgcgtcgtttcgaggggtttttttttttaataatgcgttcggaatggagttcgcgttttgatagcgcgggttagttcgaaatcgtttagaattcgtttcgatgagtgggtgagtcgttttgggagtttgtcgcgtttcggtagcggagggtttgagtggaaaaatttttattggatgtattttttaatggttggtttgtttcggttttcgttcgagtttttttcggtagtaggcgttgggttattcgtagttttagttaattttttttttatattttttttattttatttttaaaaagtttgttttcggttggaaaaagtattaatgaacgtatttgtgggaagaaacggaaagtgaatgagttaggagggttattttcggttaatcgttttaggaaaagtaaagaagttaaaggtttttggttttggattttgggggaaggtgatggggggaggtttagatttcgggaattagggcgcggacgttgggcgtggatttcgttattgttttcggttagtttttattttttaggagtaagtattttgtgtgcgtagcgtatgaatgtgtttgggtattttcgcgtatatttatatagtgtgtgatgcgaaaagtaggattagtaggggaggaagagggggtgtggggggggagggaagatgagggagagtagaggggagagaagagagaggagagttcgaggcgagagagagagagagagagagagagagagagagagagagagagagagagagataggatttttttttcgattcgtaaagtgaagttattttttaaaattagttgaaaaaaaagttttattcggttaattgtttttttcgtttcgttataataataaacgtgtataggggagtgagggtagggcgttcgtagggggtacgtagggagggtttagggcgttagggaggtcgcgtcgggttaattcgaaggggttgcgaggttaggttgtaatcgggttaatgtgtggaatattggggggttcggttgtagatttggttaaatggacgggattattaaggtaagcggcggggtaacggacgcgggcggcggggatcggtcggggaggcgaagcggcgggcgggtaggtgcggggttcgcgtttcggaagacgtggtttttttttttttttttcgcgtttcggtttcgcgtcggttttttcggcgttcgggtggcgagttttattcgcgggttagtcggttaggcgttcgtattgagggcgattttttttcgaaattttagtttttaaagtggagtttcggttttttttttatttcgttgttcgtcggggttgtaggaggggacggcgggaaatcgggggattttagggtacggaacggagttaagggcgagagatttcggggtttattatttttatcgatattcggggttttcgtggttttagcgttaggtattgggtttttttttcgtagaggcggaatacggcgggggcgggggttgtagtcgttcgggttcgggtttttgtttggtgggttttggggtgggtaagtggtttcgttgtacgagggtaggggtgtaagtgagtgtgtcgggggatttatttgagcgggtttttttagatggaagtttttgtttatatgttagcgttttttttttttttcggtatttagtcgttcggttttaggcgttggagagtcgtcggtttcgcgggatttttgggtcggtttcgtcgttttttcggcggggaattttttttagttttcgttcgtatagatttttagcgtttcgagttttcgtttttcgcgtttaggcgtgcgtcggttttaggattagggtttttggagttgtcgttttcgaaagggttttgcgtttttcggagtcgttttcgttgtaggggtcg

SEQ ID NO: 6620 - DNA, 3857 bp, synthetic construct
  misc_feature 1..3857: note = Description of Artificial Sequence: Synthetic polynucleotide
  source 1..3857: mol_type = other DNA
gcgaggggcggggggcggggagggaggcgggtcgcggcgttggtttcggggttcgcggtacggttttttttgtcgcgttgtttagggttcggattttgttcggcgttgcgtttatcgcgagggtgttagattcgtcgcgtcgtcgtcgcgtttttttagtcgcggttttttttttcgtcgtttttttttgtttttttagtttttttttttacgtgtggatgacgttaaaatttcgcgaaaaagtcgcgtggtggtttttcgagcggaggcgcgatttcgtcgtttagcggttttttttcgggggcgtttggagggggagaagggcggaggcggtcggtttttttttttttcgggaggtaggatttttcgacgtcgatcgtcggacgtttttcgttttaaagtttattggaaaatttatttttgtaaagtaaatgtatttttagagttattttcggtcgcgtgaggcgtgttttaagttgaattagataggaagagggggaagttcgggttttttaatttttttttttttcgaagggaggggagtgagatgttaggtgggtgatagacggtaggcgttcgtttttttaatttacgtttgtcgtatttgtcgttttagtaatttagtttcgtttaagtcgaaattcgtcgaagggagtgcggatgtataggtttggcggattttgtttttttttagaacgtagcggtttagcgtttcggcgggcgcggttgcgattagagggtttcggaagcgagtgaatatttgtaatcgtattgttcgtttttatttattttgttttttcgtgtttttcgtttttcgacgttttttttttttttttgttcgtatttttttattttgtttgtattttttttttttttttgatgtgttttttatgtgttttttcggatttatgtgttttttcgtattttgttagtcgggttttcggttttgattgatcgtttatttttttacggagaaatataaatatagttttattttttgggggagtcgaggggaaggtagtggtttttatttttgagtttgaatttagttattattcgttttttatttggtttaggcgtttttgcgcggagaaggcgggattcgaattcgcgttgttttcgggttttgagtcgatcgcggaattatttggttgggaggtattttttaggtaagtttgggagtatgtgtgtttagtgttgtaggtttttgtagaaaagtgtttataaatatttaatattttgttgtattttttatttttaggttttgtatattttttaatcgaaattttaaaacgttagcgtagagggtggggagtcggtcggaaaaagaataaaagtttaataaaattggcgttcgttaaagtttattattagttttatatgggatatatatatatgtattttttttttcgtgaagggtgaaaaggagataaggaagaattaataatttattttttttcgtcgttttttattttcgcgttacggtgattagtttggattttaaagttagagtataggtttttgcgtttttttttgaaatcgaagtttatattgaaagaaagtgtgtatttttgtttagaaggtaatatgcgttttttcgcgtgttaggtggagtgtattttaataagatattagggttttaatatatggttggagtggcgattaaaagggaaaatttagtttttagtttaagttttttagagatatttttgttaattttcgtatttttttacgttttattttacgtgtgagagtttgtaaaattatcggggattggattcgatggcgagttttacgttcgggaatagttagtaatcggaaggggaagtggataggggaattttaagaggcgagtttgttacgcgggaagcgttcgaatttgcgggtttttatgaatgtagagggcgtcgggaagggggggtattcggtcgcgattttttttgttttttttattcgttgttttttttttcgttggaatttttttgtaaagtaagacggagtagggggagggggagagggaaggggcgagagggttttcggtttattttcgagacgtgaggattcgttatttaggtatttttttcggggtgggttgggtttcgggacgattattcgtttttttttcgttttcgttgtttttatttcgggagatttagagttttggatgttttttttcggagaagggggggtgtgcggagtcggggtggaagagattttgttcgtagagttatattaagtgatgtttagaggttgggagtttcggcggtttttgttttttgtttgtcgggttagatttatattttaaaaatatttttcgttttttttttttttttcgttttttttcgttgtaattttttttgattcgtttaaaggtggtttaggtgaaattggagtaatttttttatgggggttttaaaatgtaagtgaatgtttttattcggggtgatttaaaagtttaagtcgggaagtttaacgtgattaaaattaataggtgattgttcggggtcgattgtgtgcgggtgtatacggtattcggttcgggtgttattcgcggcgttggattgttttattttgagtttgtaatttgggttttttagcgagttttttttttttttgaaagttaatggtttttatagtaattagatatttttttcgttcgtttttttttttttttttttttatatataggagatgggatatttattttcgttgttattgataaggtcggaggcggtcgggtttttttttagttttcgttcgttttagcgttcgtttttttttcgtttttttttggtttttttttgatgtagtggggaacgcgttttattaaaaaaaaaaaaaaaaaaaaaaaaaaaaagtaatttgttcggtaataattagcgcgtagtagtaggagttttagagttattggttatgtaaatagagggaggggagacggcgttttaaatttttttttatttttttaaagcgatattttttttttttttttttattatttttttcgttttattttcgtttaaagaggttggtttcggggtttgagttaatcgtttgtatttttagtttattcgtttttttttttcgttttgtagggaatttagtgtacggtttatttagttcgcgttttatttcgttttgttggtttttcgcgtttttgttcgggttttttttttcggtgagggaggtatttagtcggtttcggtgtgtttagagagttcgagttacgttatgttcgttgtacgtgttagtttggttagtatattagggcgttggtttttttttttttttttggagtgaaatatattaaagggcgcggtgggggtggggggtgacgggaggaaggaggtgaagaaacgttattagatcgtattttttgtaaagatagttttgatttaagtatgcgttagagtacgtgttagggtcgatcgtgttggcggcgattttatcgtagtcggtttttagggagaaagtttggcgagtgaggcgcgaaatcggaggggtcggcgaggatgcgggcgaaggatcgagcgtggaggttttatgttttcggggaaaggaaggggtggtggtgtttgcgtagggggagcgagggggagtcggatttaattttttattcgttttttttttttttcgggttattttttagaaagttgtatcggtgtggttacgtttagcgtagatatttcgggcggtttgttagtagatgtaggggcgaggaagcgggttttttttgcgtggtcgttggtcgcgggggaatcgttgggagttttgttttcggtttgcggcggttttagacgttgtatcgcgtcgttttacggcgttcgaagagtttttagaaatacgatggtttttgttcg

SEQ ID NO: 6621 - DNA, 1439 bp, synthetic construct
  misc_feature 1..1439: note = Description of Artificial Sequence: Synthetic polynucleotide
  source 1..1439: mol_type = other DNA
tcgttattatcgttattttttcggaattttttgggttcgcgttagttttatttggttacgattcggtaggcgaaggggtgcggaggcggttttattagttcgtttttagttttgtttcgagagagaagttcgttgagagggtagatagttgagaaattcgattttaattttttagtcggcgtttttcgaatcgtttcgagagtttagattagtcgggtagtggatttcggagtaaagtgttatgtatattttggagaggagggaggcgtggagggaaagggcggtaaaaatgaaatgtttttaagttagtttcgtaatttttttcggttcgagggacgggcggagggtagaggaggtagcggcggttagcgcgaggtgagggatttatttgaaggtgaggacgtagagcggtcggtaggatttgtggttggtgttttcggttatgtttttgttttagaagtcgttggtgaagatgttttagcggagcggggcgtcgggtcgtacgtcggggttgtttacgatcgtttatacgtcgtcgtgtacgaattcgttttgtagggagcggtcgtagtataggtagtttgtttcggttagtagcgtcgcggtttcggtcggcgttagttcgtagtttcgtcgtcgggagggtgtgcggttttcgtcgtcgtttcgggtagaggtggttattattatcgcgtcgtcgtcgtcgttgttgttttggtttttttcgggcgtttggtatttttttttatcggggtttcggcggcgcgcggcgtttgttcggaggggggttcgggtatggtgttgcggtagttggattcgtcgcgagtttttcgcgtttcgtcgtcgtttgcgtcgcggagttggtttagttgtaaataaatagtagttttttcgtttttttcggttatcgttatttttttcgttttattgcgtatgttcgttcgtttttttttttatcgttttttaatttcgggacgcgggtcggttttttcgtatagttcggcgttttttgttttcggttcgttttgtttgtaggtggatcggggttcgcggcgcgcggttgttcgggagttgcggggaaggatattttaggtttttatttgcggtgttcggttgtgtttatttttacgttttcgtttttatttttttttttcgaatggggttgggaaggggtatatttggcggatttttttcgggggatttaggagggtttagtaggtgcgtagtttggaatttttatatttattttttagggagaaaagtgtcgttgtttttcgggaagttttcggttttttagtattcgggataatagtagcggcgttcggagagacgttttttattcgtttcgcgttcgcgtttagtcgtcggttttgtgtttttttgttcgggtttttttttattcgttcggcgcggcgtttcgtttggcggaggaattcgcg

SEQ ID NO: 6622 - DNA, 1288 bp, synthetic construct
  misc_feature 1..1288: note = Description of Artificial Sequence: Synthetic polynucleotide
  source 1..1288: mol_type = other DNA
tcgataggttgtagtcgcgggttatttcggaggttaaggtagttatttttgtaagggagttttgcgtttaagtatggtttgttcgtttcgtttggtttttattaataaggtcgggattagcggtcggtggaacgagcgagagtagttttagttttataggtgagtcgtttttataagtagttaagtcgcgagtcgtttcggcgtcgttatcgttcgtatttatttttttatttcgggagggagatgggaggcgtgggagaacgcggagaggcgcggcgaggttgggagcgggagacggcgtcgggaggcgggaagcggattagagaatgggagaagttcggtaggtggataggaggaaataaaatttaaacgttttattttcgaagtcgttaggagttgagcgaaggaaggagcgaggtaggaaagcgtggcgttttaaatatgtcgcgggagcggcgcgggaggcgtagaatttcggagtttgtagtttagcgcgcggggttttagcggagcgcgaggacgcgagcggagttttttcggttatttgtgttgttttcgttttggttgtttttgtttcgagggaagatgttcgagtattttttttattttatttggtcggcgaagtatagttcggtgacgatgtgtagagttttttggtatagattgtttatttcgttttttttgtggaaatttatcgtttggtttttttttcgtttttttttttttttttagttagtcgttttttttttttttcgtatttttaatttttttggcgttttaagttatagttcgttcgcggtgattttggttggagattgcgtcgttgagagtcggtaatttttaggagttttacgttggttttatggcgggagcggagggcgtaggggaaggagaggcgcgcgaggaggttgcggttgtcgcgaggtttgcgttaattttttcgtcgcgcgagcgagtcgaggcgcgttggaattagagattcggtatggagtgttgaggggaggggggagtcgtaaaaaagttaaagtaagttttcgattcgtaagtacgttttttttttttttttagcgtattggtgtttttggcgggtgtttggcggcgacgcgtttaatcgtagttcggcgcgggcgttaggtgataggcggcggagcgcgtagattcggtttttcgcgttttttgaagaagggattcgtgagggagggagggagggagggcgggcggttcggcgtttttgtcgaggtcggggatgtttatcgttgtttagagttggttcgaggagtttttttcg

SEQ ID NO: 6623 - DNA, 1006 bp, synthetic construct
  misc_feature 1..1006: note = Description of Artificial Sequence: Synthetic polynucleotide
  source 1..1006: mol_type = other DNA
gcgcgtgaagaatttagattttttaatgcgtatattatttttatacgtagggtcgaggcggtagcgcggttcggagggggttcggagggaggggtcggattcgtttcggcgcggtttcgtcggggaattagttttcgagtcgaataaaagtagttaaagattcgtatattcggtagaaggggggcggttttaagaaagttcgggttggggcggtttcgtattttttcgtttttttcgtcgttcgaatttgttgtaaaggtagagataatggagaaagtttcgggagacgcgcggagagattgtttttttggggagggaggggcgggtcgggggaggcggggtaaggaggagggaggggtcgtcgagggcgaggtcggcgtttagcgtcggtttttcgtacggttttttggatgttaaattcggtttagggagtttaggagtcgttgtagttttagtttttttttttttttttttcgatgattcgggtaatgttaattttttttcgggattgaaagttttaaatttaaggtgttaagttgatgggcggtttttgtttttatttttcgatttcgggcgcgtgttttgaaagataggagagaaaaaagattatttagttgtaggaggtaaggttggagcgagtagcgttcgtttgttttttaagtaaaggagggaagtttatgtgtattcgtgtattgggtttcggagtagtttcggggtgtagggtattttttttttagggcgtgcggaggaaggttattaaaatacgttgtattgtcgaggtggagttgggtaaagtaggtagagattggtggggacggatggcgagtttgggaagtttcgggtgttttggtggagaggttttttgtcgggggcggggcgttggagagttttttcggcgcggagagtttttcgggcgcggagagcgtagagaatttggttaggaggtgttggatagtttcggaattcgcgcgttttttgttaaataaagcgtggagattcggattcg

SEQ ID NO: 6624 - DNA, 1185 bp, synthetic construct
  misc_feature 1..1185: note = Description of Artificial Sequence: Synthetic polynucleotide
  source 1..1185: mol_type = other DNA
tcggttttttttgggcgtagtgcgtatcgtcggcgtttttagatttttggattattcggtttgggggcgcgggcgcggttggggagggaggggagagttggtttatttggcgttgaaggttggaaggtatagtttcggtttttcggagttcggttcggtagtttcgtattgttcgtagagggattgagtatttgaaaagtttatcgcgtttcgtagggcgtttcggcggggttaatttgttcggttgcggggtatagttttaggggaattgggttagtaggtaggggtcggagttgcgcgttcgcggtggttagggcggtcgtcgggtcgtggggcgcgggcggttgtagtttgggcgttggggcgttttcgattcgtagtaaattttcgattaggaaatttttgtttaggttgttaaagtcgggcgtagcggggaggttgaggagcgcggaggaagttataacgttttagtacgtatcggcgtgggttgcgatcgcgttggggagtatagtgcggcgttaatcggtttgttgcgcgttcgttttgcgttcgtttgtcgttcgggcgtttcgtatcgtatttagagtcgtagtttttcgtcgtcgtttttcgtagggttggagcgcgcggagttaggtagggaggaaaggttattcgggacggcggcggatttggaacgatattatttatttgcgttgggcgtttttttaagggatgggaggagtgagtgtgggagggggaagttgtgagtttttttggtcgatagcgtaggttttgggagcgtaggggggagtttttttttttttttatgtagatttggacgggttttttttttgttttttgtttttttttggacggacggaaggtgtgtttagtttatttatttatgttattagttttataaagtgatagacgcggttaataataagggtagtgttgtggtaaggggaggggattcgtagtgggaggaggtgggcgtggaggcgacgtgaatcgggcgcgttcgttattttttcgttgtcgtgtagagtcgtggtattttcgttagagtttaagtagttttttaggcgtggggtttggtggacgttggtttggagcgttcggagggcggggtgggggtgggggggacgcgttgtcgtttggggtgttttcgcgtatttttgttgggcgaattttggtttttcg

SEQ ID NO: 6625 - DNA, 409 bp, synthetic construct
  misc_feature 1..409: note = Description of Artificial Sequence: Synthetic polynucleotide
  source 1..409: mol_type = other DNA
tcgtttttcggggaaggggtttttgaggttcgggtggtcgtttgggtaatcgtagtttgtttgcgttttttttttttttcgcgtgggttttagtaatatttattgtagtcgggttaggcgagtcggcgcgtattatcggcgcggggggaggagagggtcgggtttgggaagatgttgcggaggacgttgcggattcgcgagttcggggtaaggcggcggcgtatcgttttttttcgtcgttttttttttatttcgttttttatcgtcgtttttagttttttttcgggatgagagagagtcgcgttgcggagtaattttagtggatgggttcgcgggggttgagcgggcggaggacgcgggaatttcgtgatatcgattagttgacgttgttcgcgtgaaattagagtcg

SEQ ID NO: 6626 - DNA, 1813 bp, synthetic construct
  misc_feature 1..1813: note = Description of Artificial Sequence: Synthetic polynucleotide
  source 1..1813: mol_type = other DNA
gcgggcggcggaggagggttggcggttagatatagtatcgttggagtttagagagtcgggtagaggttggcggagagtcgaggttggtttagtttttaggagatcggcgagttggggtgtgtgggagcgggatgtttttaaggcgaaaagaagcgttagtttcgtaagcggtttttatttgggttgtttaggtcggatgtttaggagtttatagtaggggggatggagcgaaggatcgaggggttgggaggcgaggtcgtagcgtattgacgtaggttagcgaggtcgttggtttcgacgtagggcgttcggtaaggtgtttggtattacgagagttaatttttgcgcgttattttcggaggttagtgcgtttagggcgcgtcggttcggtaggagggtgggtgttagtttttttttttatttttcgagtttttttttcggcgtttacgtgggcggagtagcgcgagggtgtgcgtggtaggggtcgcggcggcgtgtgtcgtgcgtggggtggggtgcgggttgggcggtttcgttttcgggtttcgcgtcgtcggggcgcggtttttagttttattttttttgttatttgggcggagatttgggggattgtgatttattttgcggaagatacggaggggacgggtcggttatatttttcgcgttatttcggtaggtatcgggtgggtttttttttcgttttttggtttgagggcggaattcggagaagagtggaaataggggtggcgtgaaggagagttgggggttgggggcgggatcgggagggggtgttgggggaagcgacgtagcggttgggagattttgtaagggggtttgaagaggagtgggggatgggtatggaagggtgggggattattgaggtgggatgcgagagtggaagggggatttagagggggcgcgatggtcggaggagggggagatggacgatggggcggggcggtatcggtcgtcgcgttttttgtcgttaggttcgtttttcggtcgtcgggtttacgggttttttttggttagcgttcgtttttcgtttttcggcgtatttgtatttatttgttcggcgtttaggttcgagtcgggtagtagtagcggacgtagcgagcgtagtttcgcgtcgtatttttcggtcgtttttttttcgttgcgagtttacgtcgttgtcgtcgtcgttatcgttttaaaaaggataaaacggaatagaaaatgaatgtatgtataaaaaaaatcgtaaaaagtaattgaggaggatggtagtcgcgcgcgcggttcggcggggcgggagtcgagaggtcgcggtattggtggtcgcgattcgggtaggcggtcggcgcgtgtcgtacgcgggtggttgtagttttttcggtcgttcgcgttcggtttaggtacggtatcgttttttttttcggggagttttttcgattggtttgtttttttgttagttaggtaggagggcgcggcgttcgtttcgtttcgttttcgttttcgttttgggtagatgtcgggagtttttttgtcgtcgtgggagggggagttgagttgtcggagcgtgcgtattgggttagcgggcggtcggggtagggttggggtttcggcgttgagcgtttttagtcgcgtcgggtagtttggcgtttcgttgagtcggagtaattttcggtaggagtttttaggttttggttaagtttcgggattcgggaagttatttttgttttcgggggttcgagtttggagtggggtttgtaggtaaagcggggttggggtcgttttggtcgttagtggttaggaagacgtagcgatttcg

SEQ ID NO: 6627 - DNA, 1294 bp, synthetic construct
  misc_feature 1..1294: note = Description of Artificial Sequence: Synthetic polynucleotide
  source 1..1294: mol_type = other DNA
acgtttttttcggatgcgcgtggagcgttttataggatcgtcgttttttgcgcgttggcgcgtatacgtttttcgttagtttgggcgtcgggtttcgaattttcggtttgtaaatttgcgtattttttttcgtcgcgttcgttagataatttggcgaatagttcgttcgttcgtatttcgtttttttcggttttttttttaaattttaaacgtatcgtcgtgttttaaagaaggtgtttacgtcgtttttagatttcggagcgttttttttttattttcgggattttttaggtcgtttatttttttcgtttttcgtttagatttgagagggatcgaaaatatattttcgattcgggtagttagggtcgaaattgttaagaggagaaaaggtaaagcggaaggagggtggttataaatagatttttttgtttttttttaaaaggatattgtcgttttaaaagtttttttttcgggtttttatttttcgtattttcgtattttgggggagcgtatttaattgaggtaacgtagtttttttttagtgtttgtagaaaaattaaagttaggggggtgagttcgtcggttgttaattttttcgtcgtttttttcgttttattttgttttcgtaagtcgagaacgggttgtaaaagtttgtaatatttttggggggcggaggggggaggggaggggggtttttcgggttcggggcgtcgtcgtaggttcgcgcgcggtcgtcggatttcgcgtttcgggcgttcgttttcggtcgtttttcgtttcgcgttcgggttttcgtcgttttttttttagtttttttttagttttttatttttgttggtgttggaatagttttgtttgcgtatcggggtaggcggttcgtttttgcgggcggatttttggtttagcggggtttttttggagtcggcggtcgcgttcgcgtcgttgttgtttggttcgttggcggcggggtcgggggttgtcggagttgattttatgtttttttttaatgtagagatcgttggagatggcgagtttcgagattttttttattttttgtttttagagtaattttatggtattaaaaaaaaaaaaaaaaaaaaaaaaaaaaaaaaaaaaaaaaaaagaaggagaaggcgatcggcgaaagtaggagggaaaaagtaggcggcggcgggcgggtaagtaaaagcgcgagggagcgcgcggagtgtttgggtggacgtgtgtgtgcgttcgaaaggggataagaggcgggtttggttataggtagcgttagcgagagtttttttagtcg

SEQ ID NO: 6628 - DNA, 939 bp, synthetic construct
  misc_feature 1..939: note = Description of Artificial Sequence: Synthetic polynucleotide
  source 1..939: mol_type = other DNA
tcgatgtcgagagtggttttgttggagaatcgtcgcgtttgtagtttttgtattttttttcggagttgcgttagggaattacggacgaattggaaggggtcgagaagaaaggttttggttattatttttagttttaagttttttcgtttttttagattttggatttttttcggggaggatttttaggagttttttggtagtttttcgtcgtttagggtcgatttttttatttttttttttattttcggttttcgggcgagggaggtttcgcgtcgttttttagattggttgcggtcggaagattgtagtcgttttgagtttattttttgtttttttataattaaggagtatggtggagttgggttaattttaggtatagtttagtcgagttaggcgaggtttagagagatttgattcgtttggtagttttaacggatttgttttcgtagtcgttgcggatttttcggtcgttatggcgattgtgaaatgtggggtggggcgtatgcgttggaagttattcgcgcgggtagtttttgagtgtttttttacgtgttttttagcgcgagtagtattttcgtttttgcgttttttagagcgtgtagttttcggtgagggtagttttacgtatagttttttatattttttttagcgtttgtagttttcggtgcgcgtaggttttaagtttatatgcgtagtttttattttgcgcgtagttttatgtatagtttcggacgggtttttagttttattggcgtagaatttattatcgtttgttttttacgcgttttattgggagtgtagtttttatttcgagcgcgtagttttacgtagtttttttatattttttttagcgtttgtagtatttttagtgcgtatagttttgttagtcgttttttcgggcgtcgtttttgtattatttcggtttataattttgcggcg

SEQ ID NO: 6629 - DNA, 939 bp, synthetic construct; identical to SEQ ID NO: 6628
  misc_feature 1..939: note = Description of Artificial Sequence: Synthetic polynucleotide
  source 1..939: mol_type = other DNA

SEQ ID NO: 6630 - DNA, 899 bp, synthetic construct
  misc_feature 1..899: note = Description of Artificial Sequence: Synthetic polynucleotide
  source 1..899: mol_type = other DNA
tcgaacgtagttacgcgtttattggttttttgtttttggcgtttttgggtacgggggagttggggcggtttcgtttgcgtacggcggtgtcgggattgggggcgggtacgtcgttttcgttttttacgcgttcgttcgttcgttcgttttcgtttttttcgtttcgagcgattttttgttttagttttgtaggtttcgtattgtagatgtttgttggtttttttgcgttcggcggttttcgcggtgtttcgtaagttttcgtgattttttagtattagtcggttgtgcgttttttgtttttacgggtcggttagtcgtagatatttatttagtttcgcgagtttagtcgtttagcgagtggggtagcggggatcgagacggacggtagtcgtgttagagttcggggcgttttcggatgcggtaggataagttgatcgggtttttgaggcgcggggggagatgtttgaagcggtagggcggcggcgtgggtattattttgagtaatgtgtttaagaagcgtagttgtatttttcggatcgcgtttcggttgttgtgtattttggagtcgggtgaggattttagggttgtagatggggcgttgtaaagtagcgtcggggttgttcgcgtttttgttttagtttgatttcgtttaggtcggggagttttggggaaagttcgcgtgttatttggtgcggggtatcgcgttggtatttgtagggagcgattggtttggaagggtagagggtagacgggggtttgggtggggtagcggttattttaggcgcggagaattcgttgtttttatttttttttcgcggatttttattttgcggtttgtgtgttcggtttttttcgcgtggcggggaagtgcgggtggttgttcgggtttttagaggtcg

SEQ ID NO: 6631 - DNA, 899 bp, synthetic construct; identical to SEQ ID NO: 6630
  misc_feature 1..899: note = Description of Artificial Sequence: Synthetic polynucleotide
  source 1..899: mol_type = other DNA

SEQ ID NO: 6632 - DNA, 547 bp, synthetic construct
  misc_feature 1..547: note = Description of Artificial Sequence: Synthetic polynucleotide
  source 1..547: mol_type = other DNA
acggtagatttcggagggggtgtttaggatagtgacggttgatatgaagttagcggtgagggatagcgttacgggtattgcggttattttgcggtcgtttattaggaagtttttggaggtttgttggtcgtttttagcgaaggcgtagtagatgtcgatggcggtcgagatgattagtatgttcgcgaatattacgtagttttatattacgaaggtgtcgatgtttcgtggcgtgtttatggtcgtacggtcgtttgagttttgcgcgtaaattggtggtttcgcggcgcgtagtcggagttcggcgcgtattttttatttcggatttttggcgcgtaggcgtggcgtttcgcggggattggaggcgttttttaggtgtcggttttcgaacgtatttcgaggcggggtgagggttggtagtcgtttttgtattcgtcgttgcgagtcgcgttttttaaatttaggtatgggatttcggaaaatcgattcgttgttttgagtgtttattacgtgaggaattggagtggtcgagttcgttaaggcgtcg

SEQ ID NO: 6633 - DNA, 2505 bp, synthetic construct
  misc_feature 1..2505: note = Description of Artificial Sequence: Synthetic polynucleotide
  source 1..2505: mol_type = other DNA
tcgagttaacgcgttttagtggtaggtggcgaatggtcggagattcggttttttagtggtgtttatcgttacgggttttcgttcgataggtttatttttttttatgttggagtaaatttcggttgaaagagggtcgtattaattggtttgcgtattcgaagtgggaatagagagggaggaaaattatgttttaggtgttacggggggaaaaaagtgaaatgcgaatcgtaggggagagagcgatcgttaggtagatattttgtgaatcgcggtggagagtatatttaggtggggaggttatcggtttaatttattatttttcgggagaatgcgggtagggatagtagtagggggtagtatttacgtttttacgtttgtaagggttttttaagtttttggttattgttttttattttttgtagtttcggtgttcgtcgggggcgtgtgtgaggggcggggtcgtatggggaggagggatttaaaaaaaaaaaaaaaaagcgaggtaattagtatttttcgattttattggtttttcgtcgtttttgttttgtatacgttcgttttattggttgttcggggtttgttggggttcggtaaggtttgtagtcgttacggtcgttgttgcgtttcggtgtagggtaggttggcgtcgagcgaattagggtcgggaattgggagtcgggagtcgggagttagttgttcgcggagttgcggcggcggcggtatttggggtggttttagttttacgaatatcgtggtcggcgttcggtggttattgcgtttagcggggtttagggaagagcggtttagatattttttattttggaagaaaggggtaagtttcggcgggagtttttttttcggtttggttcgttttttattgcgtttagtttcggttcggattttggaagatgattttagggtttgttttgtatattttagcggcggtagtttcgggaggtagtcgaaagtattaatagttggtagtagcggttagtggaaaagtgagttaaggcggcgcggattcggtttttttcgcgtttcgcggtattcgttgtttttcgtcgttttttttttttggtttttaggcggttgtagtatgaagtggcgtagcgatggttaggagaggtaagaagttcgtggtgagaacgttggaggatttgacgttggattcgggttatggtggcgcggcggattcggtgcgtttttttaatttgtttttgtgttgtttcgattcgtattcggcgttttcgtatggcgggagttgttggtcgtttttagttgattttatgtatagtcggtataatagttttgatattgttaatattgttttggtggaagatttcgaggggttggattgcgtcggttagtattgttcgcggttgttgtcggatttagacgaggttttttggattttttaggagttggaggcgttgttgttgcgttcgcgggattttcgggtaggttcggcggttttcggcggtttgtttaaggacgcgttggttaagttgtcgacgttggtgagtcgggcgttggtgcgtatagttaaagaggcgtagcgtttgagtttgcgtttcgttaagtgtattaagtacgagatttagagcgttatggagatcgtgttgttttggggtttggtcgcgtattgtacggcggttgcgttggtcgtattgtttttttataatatgagtagcgtcggcggcgatcgtttgggtcgcggtaagtcggttcgttgcggttttatttttttcgtgggtcgcgtgtatcgttggatggtggatagtcgcgtggcgttgcgtatttacgagtacgtcgttatttatttgatagtttgtatggagagtttttttcgggatatttattcgcgggtcgtggttttcggggtgtttcggagttgtagtggttttgggttaggttcgggtttcggtttaggttcgagttcgggttttggtgcggttttcgcggcggataaagagcgggaggcgttcgggggaggagcggcgagcggcggcgtttgtagcgtagttagtagcgttagcgggggtagtagttgttgcgtttcgtcggtcgtcgcggtcgtcgtagtttcgtcggtagtcgtcgttaattattattattattattattatgcgttttacgaggcgtttaagtttatcgtggagattttggagtatacggttaataacgattcggagatttggggttttttgtagttttattagtatttgatttgcgggaagaacgttagcggtaagtgtttgcgcgggtgttatttttttttatttaatttggttaatttttggcgtaagtttgtttcgcgtttttttttcgcgtttttttagttacgcgttgttgttttaagtcgttgaggaggcggtcgggttggaggtagttagaataagaggttgtttgtttgtttttgtattcgggtgcgcgtattttacgttgttggtgttgttttaggttcgggagcgcgaggtttcgttttcggtgcggggcggggcg

SEQ ID NO: 6634 - DNA, 1587 bp, synthetic construct
  misc_feature 1..1587: note = Description of Artificial Sequence: Synthetic polynucleotide
  source 1..1587: mol_type = other DNA
gcgcgtttcgatagtttttaagatggtcgttaatgtgggatcgatgttttaatattggaagcgatttgatttacggcgattttaggttagtgcgggtagcgtcggtcgcgcggtcgtgaggagttttcgggcgcgttttgggcgtattggggaggttttcgggcgggtaggcggacgttttggggcggcgggcggcggttgtcggggttcgtcggggttcggtcgttcgttgtttatcgataggtattaggaattgatttcgtcgttgttttttgttcggtttagttatcgattagttgtcgcgattatggagaagcgttagtgagttttcggtcggcggagcggtcgagcggttaggcggtcgggcgaggagcggggaaggtaggggttacggtttcgggtagggggttgttggcgggaattttcggcggttttttttgagtcgtattttgcgcgttttttaatttcgcggcgttcggggaggtcgcggagcgcgtcgtttgttagttcgtattcggttggggtttcggcgagggagggagggagttggcgggtagggaggaggaggaggagaggaggaggaggaggagagaggaggagggagtcggggttggcgaggaggcggtttcgcgtttcgtcgttcgtcggtattttagttttcgtcgttcgtttggttgcgtagttcggacgcgtcgttattcgggggtcgtcgtcgtcgtcgttagagtcgtcgtcgtcggattggtcgtaagcgtcggtagatttttttttttcgggtcggggttttggggttcgttttgttttttgtttttattttttcgttttttttattttttttttaagtttagatgtagacgggcggtggaggtgggttcgggcgttcgtaagtttgcgtttttgtttttagggcggtggagagtcgggagcggcgtagagtaggtgatttttagttttcgggtttaagggaatttttaaatgagagatttttttgtttgttttgttttttgcgttttttttcgttgtttttttcgttttttttttttcgtttttgttttttttttgtttttttttttttttttttgttttttttttttttttttttagggcgatttttcgaaattttattattttttttttattttttttttgtgggagtttgtgtgttttttttagatttggaggtgttttttgcggatttcgtaggagtcggggttgggaggtggaattttagagaacgtatcgtggaggcgcggtttcggtttttgttttttttcggagtgtttcggacgcgtttggtaaggttttttagttttggagtttcgtaaagtttcggcgggtgcggcggggattaggggcgggaaaatggtgcggataatagggcggttagagtattttgttttgatcgtgatattcgcggaagacgcgagattattagtttggagataaaaagggatttatttttttttttttttttaattcgtcggtaaatttcgttaagttttttttgataagtggttttagtattcgcgtttttttttcgttttggtcgttttttagttttcgttttttcgaacgttttatttttcg

SEQ ID NO: 6635 - DNA, 5693 bp, synthetic construct
  misc_feature 1..5693: note = Description of Artificial Sequence: Synthetic polynucleotide
  source 1..5693: mol_type = other DNA
tcgcggttgttgggagagtattggcggtgggttgaggtttttggagagttcgcggggtggagatgggggtcggttttttttcggcgtttagtcgaggagtagttgttagttgagtgcggattcgagagagaattttcgagggatatttacgttttttatcgcgtttgcgtcgggcgttttggttttaggaggttgtttcggggcggggttttcgggggtcgagcgcggggggcggttcggcggttttattatacggcggtttcgttgagttcggggttgggatgcgataggggttcgttgtagtcgttggtgtcgtttattgggaagggcgggttgggttcgtcgttgaatatttcgtcgggtatggggtgtagcgtgttcggtaggtttggttcggggttcggtgtgttcgggtgcgagattatgtcggtgaatttggggttgttcgcggcgtgcgggtcggcgagcggcggttttagcgtttttagcggcgtcgagtcggggttagaggtcgttaggaagttggagtcggtcggggattgcgtttgcgaaggcgggtcgtgcgcgaagaagtcgtagttgtttttcggcgcgtagtagtcgttttggtagtttgtggagggggagcgggaaggagatagggcgcggtgagagaaggcgaagtaggcgggggattcgggattcggggaggggattcgggcgggcgagagaggggagcgcgcgatatcgatttaaggttagagagatttgcggaggtcggcgttttttgagacggtggacgtcgtaggtttacggggagggttggggagagagataatgagagatttcgaaagggtaagagatttagattgttagagattatatatagagacgggagagatttcgagatcgtgggggatatacgcggtaaaaattcggagattttagttataggttttttgatatttagagatggagagagatagaggcggttagagacgtagagatagataatgatttttaagtgttttagggtcggtgagagatatagagatgcgggatagcgagagatagacggagagatcggtagaggggtagagagaaaggcggaaaagagatttagagatgcggagttcgcggttgagattcgaaagttcgagatatcggagggtcgcggaggagtcgaggagacgtagagagaggaaagacggtcgcggttagagatacgcgtggaaattttcgggggcggtagcgagggagttaggagtgagttcgaagatggagagaagtcgatgcgtttagagaacgtaagacggtggattagagatgagttttaggaatttttagagaagcggaggttgataggttcggggagaggaatcgggtagggataaattagcggatagagtagagcgcgaaatggttgagatcgggaagcgatttggtcgggggaaattggattcgggtcgcggtaggagcgattggtgggttgggtcgggcggggcggttttggcgttttaaattcggtttttgcgttttattaatttagtttaagtttttcgtttcgttaagtacggtcgtcgcgtcgatttcggtgagattatttgtatcggtttagtttagtttgagaaagagaaaattgagttttagcgatttgggagagggggaggaggatacgaagattttttgggttatggttagagtttcgcgggttttttggggtagaagttcggttttttagttttgtttcgggttggttttgttagtatttttaggttttgaagtatttgaggatattgagattttttgagaagttggtgatagttatgggtttttttttaaggaaaatgtaaggatgagaattttgtttataaatttaggaggtgtagggatttcggattgtaaatttattttgttttaataaatttgtattaattttttgatcgttttatatagttttttttttagaattttcgggatattttgtttttttttattaggtggggttttgaaggattgacgtgggggacgttacgaaaggattattttgtattaggtattcgttttgtacggcgggaaaattagcgagtttagaagtttgagttttttttgtaaatttattttttttgttgagttttgggattttagttaaggggcgaatttttgatgttttttgttatttttttttttttttaaattttgaaatttgtttaaatggggggtgtttggaggcgtggtttggaggtagtttaagtaatagttaaaacggttgttaattattttttaaaattattaatttaatttttttcgaaagtgaaggggaagatggggagcggtaaatttggagttttaaagggatagggatgggagacggtcgcggttcgcggcgagtcggaaaattagcgaaggtcgttgttttcgcgtcgtgcgcgtcgttttcgtttatatggcggtcgggtcggaggtaattggaataaacgtcgtttgaaaagggtataaaagtcgtagttggggttttgttcgcgtttttacggggagtcgtcggtttcgtcgttcggtttttttttcgttcgttgtcggtcgttatcgtcgggattttttagcgcggattaggcggggttgtttcgttgggggttggggagttttttttattattacggggaacgaggggtttttagtatttagttttttattttatttagcgcgtagggagaggaggcggtgggataggtcggggcgggggcgaagtggttttcggggaaattttggttaattatttaggcggggaaaaatttcgggtcggtatcgtttttattatttcgttgtttcgggtttagattttgtagggaaagaggtaaatttaggtggagagagtcggtgagtggagatttcggaagatacgtttattattcgggttttttagggttgggggtttgttcggggttgggggtttgtttagggttggggggttgtttagggttgggcggttggggcgttttagtttgagttttgttattgtttggggtttttgttttgaaaagtatagtttggtattttgtttataatttttaggggtttcggttcggttttaaggtttaatttttttttaggttttcggatgtgttgaggttagtgatggggttattttttttttttttttgcgtttatttgggtgtttagtttttgttttgttaatattgttattgaatttattttttaagagaaattgtttttttttaatttgcgttataatttagaagtgtagatgttttttagatatagatagttttggggtttttttaaatttagaagttttagaatagaagaggagaggtgtttttttgagtttttagttttgggaagaataggatagtgagtttggtgagtttaagtaatgcggtttagggtaaggagttgaaaaaatcggatagggggagttgggatggtttattaatttagtgtgagggaagtgagaggaggaaaagttgaggtggtaaggggatagtttattttaggtttaagtttggtattattatttgaagttttttgtaaattggggtttttcgttttttgtagttttaaagacggtggaaatttggggttggtttaatatttgtgtttttagtttgtaggaattttaggggtttcggggttggagggtggattatagttttgtttagagtaattgtcggtatttgggttaatattgttagatgttgtgcgtatatatttcgttatatggaataggagttgttgttttcgatgttagtgagtaggcggtttggaatgaatttagatttttattttttttttttatattattttttagcgttcggaatttattttatgttaagtatattaggtatagggcggtaggaaggttgtgcgtttgttcgtgggggtcgtatgtatgtggatttgttagtattggttttagtgtgattggtgggagtgtgcgcgtttgtggagttgtgttttcgtgagtgtatttgtgtgtgagagggtggaatttatttatacgtgatcgtgcgatcgtgtttagacgtgtgtttttggagtttttgaacgtaagtgtgagtgtattttgtgttttgcgtgggtgaatgtgttattgtatttcgtgtgtgtttttgtgtgtattattgtatgggtgagattatgtatttgattttgtgtttaggatatgtgggtgagtgtatatgtgtttgtgatcgtgtgtttagcgagtgggcgatgttttggagcggcggaaagcgtgttggtcgggatttttcgtttttagttttcggaataggataggtgcggaatagcgaatttcggggcgttttttattttcgtagtaggtgtacggggtggattttaatattttagattcgtttaagcggtcgtttagcggacgtatgcgtcgcggatttcggaagaaggcgtgttttcgggcgtttagggcgtttagttgttttattcggcgttttttggatcgtcggttttgaaattatatttgggatagaggagggggttgtgaatttaggattaggagtgttttttttttttttttttttttttttttgattgggttgtttttgttgggtttttgcgtttttttcgtattaggattttttcgaggcggggtcgggtcggattaggtcgggaggggtggagagaggtttcggcgaattagttaagggtgaaggatttcgcggattcgtggggcgatttataaagatttgggttttttggttttcggttcgttcgcggtttgacggttttataaaggtttttttttcggtacggttttcgtttcggtttttcggtttcggagttagtttttggtcgtttgtttgttcgcgtttcggcgtagggagggagggggtatcgtttgtttttttgttcgaaaggtggaggtaaagagggatttcggattttagagaggtttataattttttataagtaaggcggggggcggaatttagagaggtaaagtgattcgtttttaaatcgtaatattaggaggatagtagggttagatggaatttttcggtttatagttttcgatttcgggtaagtgttttattcgggcgtacggtttgtttttagattagaattaggcgcgttcgtagttaaggaagtttggcgggagattttttcgaggttttcggtttttaggttagcggggttaaggagttgtgttcgtttcgggtcgtatttggatgacgcgtatgttgaggtcggttttttgcgttagttgttcgcggatgtggcgcgtgggtttgggcgtggcggcgaaggtagttttgagcgtttttagttgtttggttttgatggtggtgcgggggtcgcgtcgtttggtgttcgagttttgtttttcgttttcgttgttggtcgtttttttgttcgacgaggtcgagttgttcgtttttttggggtcgttttgtagtgcgttttggaggttcggggataaattgcggttcgtataggatgatattgcgggcggacggatcgggaaggggatagcggcgttagcgacggttagacgtttttttagtttagtggcgggttttcgtcggtttaagttacggtttgtttaggttacggttagtttcgttggatttttttttaaatttgcgatagttttttttttagggattcggtgttcgtttattttttttaggcggggttgggtttttggaggggcgtttttaagtttttttcgcgcg

SEQ ID NO: 6636 - DNA, 589 bp, synthetic construct
  misc_feature 1..589: note = Description of Artificial Sequence: Synthetic polynucleotide
  source 1..589: mol_type = other DNA
tcgtttcgttttcggggttttagggaggcggcgattggagtttcgttgtttatttataataaaagaaagtagggttggcgtttttatacgcgtttttatttattgtcggtcgcggggagaattttatttcgcgttttcgttagggtttcggggagttttgggttggcggaggcgaataagatgcggtttgatagaattaggtcgtgtttttgtaaattttaatgtcgtttcgttagtcgcggcggttttttagattttatttgtcggggagtttcgagtcgcgtaaaatttttgtaagttgtgttttgtagaatgtaaagtcgggttggaattcgttattttcgtcgttttagtcgattcggtcgacgagtttttttttgagtttttcgggttatttgtcgggacggttatttcgttcggtgaagtcggtgtatttattatattttttgttgtttttagtagggaagtcggcggtgaggcgggggagtaggtatggtggtttcggggtttatgcggggtttattgtttatttagaatagcggttattgttgtttattagggcgtatttatcgttggagttttcgcggcg

SEQ ID NO: 6637 - DNA, 1294 bp, synthetic construct; identical to SEQ ID NO: 6627
  misc_feature 1..1294: note = Description of Artificial Sequence: Synthetic polynucleotide
  source 1..1294: mol_type = other DNA

SEQ ID NO: 6638 - DNA, 1373 bp, synthetic construct
  misc_feature 1..1373: note = Description of Artificial Sequence: Synthetic polynucleotide
  source 1..1373: mol_type = other DNA
gcgagcgtttggcgttttttggggcgtagtttcgagagagtttttttcgggatttcggacgtaaggtttttgagtggttttggaagttggatttttcggggattttgtttcgaattttggttatttggaagtaattttatcgagcgttttttttattgtttagtttcgaatcgtggcggaacgcgtttttcggtttttttagagttttttttgcgggagaagtataatttttttaggttttggagacggcgtttttatattttaatttcgtttagacggaagaagtgagaggtgcgggcggtttcgttatgatcgcgggaggagagcgtaaggaggtttttcgtaaagttggaggttaggtcggagcgatgtttcgggagcggagtttttttagtttcgggtttttagtcgcggatagttggtagtgttaaagatttcgttattatttgcggttcgtagttgcgattcggtcgtagagtcgggtatcgaggaaggcgtaaagttgagtttgggtaggtataacggtttttagggattggtattttttagttcgggttgttcgcgggagggtagcgagttgtgttaagggtttcgttattatcgttagcgtatagttcggagttaagcgcgcggttgaggaacgattagggttttgtaaagttggagtttgggcgcgtagattttcggatcggagttttcggtttgaggtcgttcgttaggaggaaaatgaggtcgttcgaattaagttgggacgcgtagtaaagttcgagtttttcgcgtatattaggggttcgggcgggagcggggagttttggggacggagaaggggcgcgggacgtttggattaggaatttatttgacgtcgagtcgggtagcgtcgaggttgttttttcgcgttgcgtattcgttcgttcgtttcgtattttttttttttttttcgggcgttcgcggtcgtcgcgtttcgggttttgaatttttcgagttcgtcgtttcgcgcggttggagggcgtcggttgtatttattcgttttttggtaggagtcgcgcgcgtttttttttttttttttcgttttgtgtttttaagatttttttttatttttttttttttagtttttattttttttttttttttttttttttttttgcgtttttttttttagttttagcgaatttaagttcgggacggaggttgcgggttttttcggcgtagtgttgggcgtttcgcgcgcgtttttggtttatttcgttcgttcggtcgttgttcgttgttcggtcgtttttcggaggagtcgcggcgttaagtagttttttatttagcggttggaaacgcggtataaatatgtagggattgagtcgtgagtttagcgagggtcg

SEQ ID NO: 6639 - DNA, 1524 bp, synthetic construct
  misc_feature 1..1524: note = Description of Artificial Sequence: Synthetic polynucleotide
  source 1..1524: mol_type = other DNA
gcggttttgcggattttaggtttaagggggtatcgttttaaatattcgacgcgtttttattattagttttttattggtaggttttaagcgggaacgggattgggaaggtttcgggtttggggggttttatttcgatgttttaggggcgttttgaatttagttttagttaggcggcggtattttaggtagcgtagggagcgcgatcggttcggggagggggaggacgcggcgttttcgttttttttcggttcgtttgtttatttttaggtttttttgttcgtcggttttttggttttgtttattttggggttggtggtgggcgcgggtcgggtttaggtttatgttcggttttttttattgtttgttttttttttttattattttattttatttttttagtgttcggtttcgtttcgttatcggattttttggaatgggggacgcgggcgcgaaatacgaatttagttatcggtagttttttttttacgtgcgttcggttcgtagcgtagagggcggttcggggtgggggcgttttatttttgttttttatggcgtgtacgaagtttttttggtatagttggttgcgaagttttttttttaggttgaagtcgcggacgttgacgattttttttacgttcgataagttttcgttttcgtcgtatcgttggcggttaatcgggcgttgcgaggatttaaattagagagttcgggatattattgtgggggttggaggtcgttttttaatttgggtttagtattaataggtgtagtagtcgagcgttttttgtattttattattgtaatttaagtaattttgcgtaattgttaaagatgttgaaaagtaggataaggagaggggttcgtatttcgagggtttagttgcgttttacgcggggtattttttttcggtgttttcggaagtattgaagggatatttggggatttttttttgtttttcgttttcgaaatgtgttgggtttcgtttattcggtcgggagtttggttatgtaattcgcgaagggggtttcggatacgggttggcggggtaaatgtaggttttaggaggagtcgttgcggcgttcggttcggcggtaatagtagttttagcggtcgcggcggtagagtcgggaagtcggaatcgggggtcggcggtatttttaaagttggagtcgttttcgagttatcggggaagttggaaagttgaaatggaagggttgagattttagtcgttttcgtcgttcgttcgttagtgtaagaagaggaggtggggggaggagaatcggggtttggaagggggagaggtagacggttcgttataaagttcggatcggagattttaaaacgtattagtagttgttttatttttttataagcgcgcgcgtatatttattttttaaggagatttttttattatttttcgtatttttttgttttttttttttatcgtttagcgttcggttttttagttttttagatttcgggcgaatttcgagttcgtttagtttttttttacgttttttttcg

SEQ ID NO: 6640 - DNA, 1009 bp, synthetic construct
  misc_feature 1..1009: note = Description of Artificial Sequence: Synthetic polynucleotide
  source 1..1009: mol_type = other DNA
gcgtttgtagcgaaggattcgcgtgggagcgagaaatgtttttgtttagtgtttcgcgcgttggatcgcgggggcgagtttgagggtggagaggtcgtcgggtggaggcgcgtaggggtgcgtgggtgggtgcggaaggagtgtagggtatggaggggaattttggggcggcgcgaaggaggagcgtttggaaaggcgcggtgtttggttatagaggggttcggagtgggagtgtaggggtgcggggagggagtgtagggacgcggggagggagtggaggggtggggacgtgttggaggggcgcgtttcgatagaattggagaaattggaaaagtggaggggcggggtagtggttggaggaatttttgaagcgacgcggggaatatgtgaaggagtgttatgttggaatttggaggggaggggggatgttggagaggtatacggtgatggatatggaaggattcgggaggtgtggagtggtgggttcggttcgtcgcgggaaggatatagagggatataggttgttttggagaggcgttttcggatatttggaggggcgtatagtgttgggatttggcggcgtttggggcggaggggcgcgtcggatttagtcgggcgcgttcgggggtcgggcgtagtgggagttgacgggcgtttagtcggcggcgttttgggttcggttaggcgtaggacggttttggtagcggtgtagtagtttaggttagtttttggggggtttttggttttcgttttttcgcgcgtttcggttagtatcgttcggagttcgggcggggaagtgggcgttcgcggtttgggaagttgttttttcgttttggagtagagtcgtcgttgcggtcgttgaggaaggacggagtagaggttcgcgttgtttggggagaagattgtggtgttatttcgtcgggaatgaagggaaatgtagcggttgtttgcgtttcgggattttaagaagtatagtaggtaaagagaatagttacggttcgttatttcg

SEQ ID NO: 6641 - DNA, 961 bp, synthetic construct
  misc_feature 1..961: note = Description of Artificial Sequence: Synthetic polynucleotide
  source 1..961: mol_type = other DNA
tcgtttttttcgatatttaaaagtttcggttttgcgtaatattgcggattttttttagtttttcgttcgttttttttttcgcggggtttcgtttagggtcggtttttcgtttttacgtcgtagttcgggttagcggggttcgtcgcggtggcgttcgcggatgttgtcgtattggtcgttgcggtacggacggcgtagtttcgggcgcggttcggtataggcgtcggcggttttcgttagttagtagttcggcgaggcgttggtttatttatggttttcgggcggcggtttttgcgtttagttttgcgcgtagttttcgtttttcgttcggggtcgtcgagttttcgatacgggcgagatgttgaacggcgtaggtttggataaagtttttaagatgtttttgtcgcggaggtcgaggattcgttcgttcgtgggtgagttgggaggggcgcggcgagggagggtgggttcggggcgggggcggcgcggggcgcgtttgcggttatgcgatattgtttcgttcgcgtttcgtttttttttttgggttttttgggttttttgggttgtaggattcgtcgacgcggcgcgttggtcgtacgggggttgggcgtcgttgtatttgcggggttaaaaggttttaggtcggggcgaggtgagcggcgggcgttagagattttcggttcgtttttgtatagatgtgtgtgtgtgtgtgcggtttttttgtgcgcgtgttcgtgcgtttttacgcgcggatgcggtttagggatgcgatttaggcggtagttatcgcgatggtgggtacggtttggcggcgtagagaagatgtagttttttttgtcggcggtcggtatcgttgtgttgtagagtttaaaagtagagggggaaaaaggtattcgaagggtttttcgagtgatttttattatttggagtttcgggttttcgcgcgtttatagcggcgacg

SEQ ID NO: 6642 - DNA, 961 bp, synthetic construct; identical to SEQ ID NO: 6641
  misc_feature 1..961: note = Description of Artificial Sequence: Synthetic polynucleotide
  source 1..961: mol_type = other DNA

SEQ ID NO: 6643 - DNA, 980 bp, synthetic construct
  misc_feature 1..980: note = Description of Artificial Sequence: Synthetic polynucleotide
  source 1..980: mol_type = other DNA
gcgtgagcgaggtaggtatatacggattcgcggcggtttgtttgtaatagcgttgggaatgtatattggaaaattatattttgtatgttgaaaacgaataattgtttgatatttgggttgttgtcgagaaaattacgcggtagcggtaggtttcgagttaggggtcgttattttcgatggaatatttaaatcgtttatttttatcgaatttttattttttaaacgtatttttcgcgcgcgtgtatatttttaaacgtattttcgatcggaataaagaggggttttagatttttttcgtgcgtacggggtagtcgggagggttacgagagggaggtgtgtgtaatggaagtatcgagatagatagatagatagatgtttatgtattgttgtcgattttttggcggcggggacgggagtcggacgcgagggggatagatagggtgcggggataggcggttcgcgggggcgggggggttatcgagggggttattttggttcgtttaggtcgagggggttttttcggtgttttcgaagcgcgtgggttattcgtgtcgtatgtcggcgtagttgttcgttgtggtaaggggggggcggtcgggtttcggagcgggtcgggagggcgcggggcgcgtatttcgcggtaggtgagcggcgcggttgtaggtgagtagtagtttcggttcgcgcgtttagtttttttcgtcgcgttcgttcggtttatacgtttttcgcgcgcgcgtcgttttcgtttcgcgcgcgttcggtcgttcgttcgttcgtgggattttcgcgaggtcgcgcgtttttacgggttagggttgttttagggtgcgggtaggcgagggcggtttaggggcgcggggcgaggggcgaaggagttaggaggttgagaattgtatggtagttttgtttgtttgtcgcgttgcgcgttttattttagtcggcggtttcgggtttgtatcgggcggggtaggggagcg

SEQ ID NO: 6644 - DNA, 408 bp, synthetic construct
  misc_feature 1..408: note = Description of Artificial Sequence: Synthetic polynucleotide
  source 1..408: mol_type = other DNA
tcgtattttttgaagttcgttgggcgcgttttgggttgtttttttttgagtagtcgggtttagagttaaggcgcgatgattgtcgcgtaagttagggtttacgcggtcggggtttttttttcgtttcgggcgtattagaggttagaaagcggaaagcggttttgttaggttaaggtcgatagaaatcgagagtatgtcgttatttgtcggagagaattgttttgttaggttgttataggtgatttgttcgcgcgagttacggtttttgcgtagagtttttttcgaaggggagagttagagttattcgcgggtttggtcggggttttttttagttcggcgtttacgtttcgcgttttgcgttcgtttttgcggttgtttatgtttaggtgtttcggaagaggcgtcgcg

SEQ ID NO: 6645 - DNA, 2190 bp, synthetic construct
  misc_feature 1..2190: note = Description of Artificial Sequence: Synthetic polynucleotide
  source 1..2190: mol_type = other DNA
gcgtttcgaaatttggttttttgcgtttaggggaacgaggtataaattttcgttatttagttttattgagtagagattgcgagttcgaatttttaagtttttcggggttttgattttttaatggcggcggtttaattgttggtaaaattttcggtttttgattgttttatcgttcgttttttaaacgtttagcgaaggttgatttaggtggcgggcggattttatcgattttttaaattatatcgtttggttaaaatcgttcgtttttttttcgttcggattttaaaggttaggtttgtaagttagtaagttaacggtatttgggttttgggttgtttttgtgggttagggttattgatgttcgcgatacggattggatcgcgtattacgtttgttttcggtagaggttttattcgggtggttgagcgtagcgtattggggtttcgcggttcgagagcggcggggaggagcgggcgttcgtcgagcgtttttcgggatagttcggtttggggatttaagcgggttatgggatgtcggcgttggtttttttttgagatttttttgttttttcgtaggtacgagttttttttaaatcggttttttttttatattttcgtgacgcgaggtcgcggttagtgtttaatattattaaagtttcggttttagtttagtttcgggtagtttggtaggtttttaggagtttttgttttcggtttcgggggattttgcgtatttgttttaggttttttgggaatgggttttgggtgttaggtaggtttcggtgcgtgttgtttttagtgtttagggtttcggtagtgagattttaattcgatagttggataagggattagcgattttgtcgtaaacggatagttttagcgcggattcggtttgagcgttgatgttcgcgggtttaggttagttatttttcgaggcgttttttcggagaaagggcgtagcggttttaagcgtgttcgttgtaattagtgttttaggttttcgtcgtagttagttttttcgggttatagtttcgttttttcgcgtgtatttcgttttggtttcggaggttttgtttttcggtcgttttatcgtagttcgttttaggtttcggtttttagtcgcgttttatttgtgagaagtagatagttgagtagcgcgtatagtaggatttcggtgttttagtagttgattatggtgagcgcgacgcggtttgttcgttcggtgttcgcgtttttcgcggttaacgattcggtcgttagagttcgttttttcgttcgtcgtcgtcggtttcgcgttttgagcgttcgtttcgcggttttagttaggagataattattttttcgggtaattttcgtcgttaggcgttcgttggtcgttgtattcgagtttcggagttcgtttcgagtcgtcgtcgttgtcggggaggagtcgagaggagtgttcgtttggcgcgtttcgagtttttcgcggatttcgatgaagagtagtcgagggcgggggcgatttataatttttttttagtttattttttatttcggtatttttttttggtgacgttaaggggttttttattttttattcgtttttttatttattttttttttttttttaggttcgtttttttgcggttacggagaggggcgggggtcgacgagggcgggtggttcggggtcgagcgcgcgtggggaggtgttggcgacgcgggttcgggagcgcggtttcggtaggtttagggtttttgtttcgcgtttttttgtttttgtttttttttttgtttatcgcgtttaggaaatttttgtagattttttttattcggtttatttagttttgggggtcgttcgaaattggggaagggataaggttgaagtttcgtcgtttggttttaggggcggaaagttcgatttaagggaagttggtcgcgttttcgcgacggtgtttttggtacggaggattgaggcgtagttcggttgtttttttttgtttgtttttttcgcgttgtttcgtcgtttttgatttttttagattgtttcgagaagtttaggaaggtatcggagattttcggtataaggtattgaatttggagcgtttgaggggaattgacgtttgtttggtatttttgggaagattgcgaattagtttaggttttaggggagcgtgttcgtgtttttttcggtcgtattgatgtattcg

SEQ ID NO: 6646 - DNA, 2190 bp, synthetic construct; identical to SEQ ID NO: 6645
  misc_feature 1..2190: note = Description of Artificial Sequence: Synthetic polynucleotide
  source 1..2190: mol_type = other DNA

SEQ ID NO: 6647 - DNA, 679 bp, synthetic construct
  misc_feature 1..679: note = Description of Artificial Sequence: Synthetic polynucleotide
  source 1..679: mol_type = other DNA
tcgagtggagagtagcggtcgtagcgcggcgttaggttcgggttgggttggtcggcgcgaattttcgggggcgtttgggcggttaggtcgggtggcggttgcgtacgtaggagtattttttgagtttagtcgttcggtcggtttgattcgcgggtgatcggatacgagtaacgcgtgcgtttcgatttgtgttttgcgcggggtcgggcggggatcggtcgggggcgtcgcgcgttcggtcgggttgattgtcgggggcgattttcgcggggtaaggcgggggcgcgggagtagcgcgtagttgcggggttattttatttgagcgttttgaggttagggtcggggtttgaggatacggcgttgggtttcgggggacgcgggtttacgtcggcgttcgagcgttattttttcgtttttcgtcggtttacgtagtttcggggttcggtacgtgaagtgtcggcgcgaggttgtttaggttatcgtatgggtcgggcgataaataatcgtataggatatataatattttggattgttataagtttttcgtaggaaaagataaataatatttgaggcgttgcggcgcggttttttcgggttgaataaaaattaggaggtggggggcggtggggcgaagtaaataatagaatcgaagaattgtcgtacggagtttgggtcggcg

SEQ ID NO: 6648 - DNA, 2013 bp, synthetic construct
  misc_feature 1..2013: note = Description of Artificial Sequence: Synthetic polynucleotide
  source 1..2013: mol_type = other DNA
tcggtagatttggagacgttttcggttttttgggagtttttgagggtttaggtcgggtggggcgcgttttgcggtaagttttttttttttagttatcgttttgaggagtagaaggcgcggggatatatatatatacgttcgggtacgtcgtcgtatttttttaattgaattttggtgttttttttttgtttgtaaagatattttaggttttgggtttgggagttgttttcgcgcggttttgtttgattttagcggggttatagtagtttggcgttcggagcggttttagcgcggcgtcgcgggtttaggtgggtgttttagagagcgggcggttgcgcgattgaggagttggaggcgtattttttcgttcgttagacggttcggttcgcgttttcgttttatttttttcgcgtttttttttttggaaaggaaggtcggagttgtatttttaaagcgttttcgtttttatttttttcggttcgtcgcgttttaggggttttataaatttgttgtaagtcgtcggggttgtagttgtaggtaagggtgaggcggggtcgcggtttgggttgtcgagtacgtttttttttagttttaagcgtgtacgttttttacggacgcgtatttagtattttattttcgtcgttgttttcgaggttttcgtttaattagaggtcgcgcgcgtcgcgtcgtcggcgggtagatatatcggtttttcggtttgcgtttttgcggttttggtttcgttgtagcgtttcggttcggttatatttatcgtttcgggcgcgtcgttcgcgcgcggtttcgtttcgggtcggtatttttcggttcggttgttttcggttttcgtttcggtttcggttttcgtttcgtagggttcggtttcgcgatggtggtcgcggcggcgagcgcggtagggagggcgtgtgtatgcgcgtgagagcgcgtagcgtgtgtatgtgcgtgtgcgcgggagggtttcggtttttttgcgcgtttcgtttttgttttttgttcgttacgatgcgatgtcggtagaatttttatcgcgcgtttttattgttcggcgtttatattcgcgtatatacgcgtatatttaggcgcgtatattcggtttcgtattttcgattcgtttttttggagcgtttataaagattttttgtcgggacggtcggagtttgcggagcgcggttttgggttttttcgggattcgtcggttttaggtgtttcgttgtttttcgtagggatttcgcgggcggttcggttttcgtattttgtttggtcgggtcgcggtcgcgtttttagttcgaatttgggtttaggtgtcgattcgggtttttcgtattttcgcgggaagcgtcggtttttttcgcggcgtcgtcgttttttttttttttttttagttcggttttttcggcgtttttttgttttgttttatttgtttagttcggttttcgtttttttcgttgtttttcgtttgtttcgtcgtcgttttttttcgcgtttttttttttttatcgttttgcgttgttttttatatttttcgtattatagcgggtgtcgttcgtcgttcgcggggtttagggttcgagcgcgtagtgggcggcgaggggattcgttacgttcggtttcgtcgtttttttcgtttttcgcggtttcgcggttgttagtttcggtttggcgttagggtggcgacgtttcgcgttagtttcggttgtcgttgatagtttttatttcgttcgggtttaaagggatagcgtattcggttcgatcggttttattcgggggtttcggggaagggatttcgttgcgcgggaatagttcggggcggtggtatagtcggggtcgtgcgggcgacgtttttttcgtcgtcgtggagttcggttttcggggttggaggtgagttaaggagaaggacggttagattacgttatttagggggcgtttagcggttaagtttttgggtcgataatgggtgtgcggcggtgtaggttgagcgttttggattgcgtggcg

SEQ ID NO: 6649 - DNA, 1501 bp, synthetic construct
  misc_feature 1..1501: note = Description of Artificial Sequence: Synthetic polynucleotide
  source 1..1501: mol_type = other DNA
tcgaaagaggggcgcgggtgggcgcgttttttcgcgagtattttatttaagggggaattttttttagcgtacggcgaagttttttttcggttgttttatttggtagtttttttaggatttcggttagtttttaattggttttagtaatgtttagtcggagtttttttgggttttcgagtgggagaaaagtgagagtaggtgtttttttagcggcgcgtttcgttagggttcggtaggatttcgtttttaagtcggggaaagttggtcggcgtttttttttttcgacgaagtcgttttagggttgtttttagaggacgcgcggtaggtaaagagaatgaatttgagcgtttacgaaacgttttgtacggttttcgggagttgggagaaataggtgttttttttcgacgttcgcgggcgacgtttgtcgtattttgttcgttgtcgcgtttttttcgggtatttttcgttttcggcgtttttgttttcgtttttagtgttagggcggaggtagtttcggttcgtaggtaattattgttagcggagttcgtcggggagcgggggtgggcgcgtcggcggtgggcgggcgggcgcggcggggcgcgggtataaaggggcgcggcgcggggtttcggagtttggttttcgcgtagtatgttcgttagcgtttcgtcgcgtcgttcgcggtcgtcgtcgtcgtcgttgtcgttgttgttggtgttgttgggtttgggcggtcgtcgtttgcgtgcggagtcgggcgacggcgcgtagatttgggttcgtttttcgcggttttttgttttcgaggtcgcgggttttttttagggtatttttttcgacggttttttttgggtcgtgggtagcgtcgtttattagatcgagggcggttggtagtagtacggtaagggtgcgtttatttgggatacgtttatttattattttttggtattttcgggagattttcggaacgttagtttgtcgttgggcgtttcgtcgtcgttgtagttcgttatcggggacgtagttagcgatagttataataacgtttttcgcgatacggaggcgttgcgcgagttcggggttatttattatcgtttttttatttcgtgggcgcgagtgttttttaatggtagcgcgggcgtttttaatcgcgaggggttgcgttattatcggcgtttgttggagcggttgcgggagttgggcgtgtagttcgtggttattttgtattattgggatttgttttagcgtttgtaggacgtttacggcggttgggttaatcgcgttttggtcgattattttagggattacgcggagttttgttttcgttatttcggcggttaggttaagtattggattattatcgataatttttacgtggtggtttggtacggttacgttatcgggcgtttggttttcggtattcggggtagttcgcggttcgggtatttggtggcgtataatttttttttggtgagtgcgaggggttaggcggagggttacg

SEQ ID NO: 6650 - DNA, 668 bp, synthetic construct
  misc_feature 1..668: note = Description of Artificial Sequence: Synthetic polynucleotide
  source 1..668: mol_type = other DNA
tcggggtcgttcgtacgtaacgttttcgggtcgggttaggttggttagggtagggcggtcgtttttcgaggaattgcgggcggggcggcggggttaagttgagcgttcgttttgttttcggcgtttcgcggttgcgggcggagcgggttttgcggagtttttcggtcgtttttttcgtagttttcgtttttagggaaggtaaattacgtatcggttcgcggagagacgtcgtcgggggtttttgtggtcgcgttgggggtcgttttttggtgttgttttcgtcgggttgggcgcggtcggggttgcggggttgtagggttggggggcggcggcggggtcgggttgggcggtagtagttgttggagcgcggcgtttcggttgcggttattagtgtagggatgtgtttcggttcgtttttattgaaatgcggcgtttcgtatagttttattttagtttttttttttagaggagggcggcggcggcggcggcggcgggcgcgttttttttttttgttttattcgtttatacgttttttcgttttttttttttttttttttttttgcgtgcgcgtttcgtcgttttcgttttttttggtagggcgtatttattacggttgcgttttaggttttttttttttttagcgttttttttttatcgtagtaatttcg

SEQ ID NO: 6651 - DNA, 1006 bp, synthetic construct
  misc_feature 1..1006: note = Description of Artificial Sequence: Synthetic polynucleotide
  source 1..1006: mol_type = other DNA
tcgggcgttttgttcgttcgttcgcgcgttttaggatttaaagtcgggttttaagtcggcgttttacgtcgaggtttcgtcgtagttttcggagttggtcgtagataagaaggggagggagcgggagagggaggagagtttcgaagcgagagggtcgagcgttatgcgtcgcgttagtagagattatattaagtatttgcgtggttcggaggagatgggcggcggtttcggagtttcgtacgagggttttttgtacgtttcgtcgtcgtttgcgtcgtattagttttttgtcgtttttcgttttatgttcgtggtttttttggggttggggttgggttaggttgtttgtagcgtcgttttgtttttttattttagagcgtaggtgagtggttatttttttaggggatcgcggttgagagcgtttatttttttttttcgtatttggaaattgagtttggcggtagggttgggttatttagagtttgtatatttcggaagggaaagtgattttagaagggagagaggaagtgttgagtttggggataatttggcgtagggttgtcgggcgtattttgtttttttttcgtttacgtattttagtttttcggtgttttgggggcggatttttttggtcggacgatgggtttgaattttatttcgttttttcgttgggaaataatattggttttttattttttttggtagtgattgtatattttttttttttgttattttttatttgaagttaagaattaatttttgtttacgtaggaaaaaagatgagcgtttttatttgggtatttattttttttttttcgtttattattcggcgggtttcggtttttgcgtttggttgttttgtaggtgtgttggggttacggtgttggagggttgcgcggagcgggaggtcgcggtgttcgtgtttaggtcgtttaatgggtgggtagaatgatacggcgcgattagagaggcgcgggttcgggatgggggttttgcggttgtggcg

SEQ ID NO: 6652 - DNA, 867 bp, synthetic construct
  misc_feature 1..867: note = Description of Artificial Sequence: Synthetic polynucleotide
  source 1..867: mol_type = other DNA
gcgcggaataaggcgttgattgttttttagttttttttttttcgcgttttttcggtagtagcgaaaattcggaaatttgattttggttttaggagagtcgggttttatgaggtgtattgagtatgttttgtagggttcggcgtgggagggacgcgttggcgttttttaggttcgggcggaagcggcgttcgtaggcgttgaaagcgagcgattttttgagttcgggtggttcggcgggtaagggcggcgcgggagattcgtagggcgcgggcgcggattcggggaattagggttatcgttgcgggcggatgggggttatcgaggcggttcgtttttaggcgtatatttcgtatatttttttgttaagtgaaggggttaaaatgtatagatgggggagtttatttaggaatagaggcgcgagacgtatagttatttttgggttgggagtacgagttagtagattttcggagcgcgttaaacggataatatgttcggtgttgtaaatagaggtttttgttggtagggatattggaaagaagggcggagagggagtatagcgaaaggtggggatcgtagaatttggaatttttgcggagatcggaaagaaaattaatcggagtattttttatatgtagagttacggaaattgttttggaaagagaaagtggtagcgtttgggttttttcggttagttcgggttagtcggttgcgcgtgcgaagttttttttagcggagcgggatcggtcgcggcggtggatcgtggcggtttttgtatttttgttttagtcgcgtttggaaatttgagttcggattcgcggttgttgtaaaattcgtttttagtttattttattgcgaattttgttttcg

SEQ ID NO: 6653 - DNA, 1072 bp, synthetic construct
  misc_feature 1..1072: note = Description of Artificial Sequence: Synthetic polynucleotide
  source 1..1072: mol_type = other DNA
tcggttgcgtcgttttagtttagggacgttttcgttttcggttgttatttatcggttatcgagcgttcgtttcgtttcgggtttattatgtttgttgtagtttggttcgtattagaggcgcgataataaataagtgtattggattgggttttgtattcgtttcggagtagttgttttagagattcggtgttgtttatcgcgttgttattttttcggcgttcgggaggaagacgtaattttttcggagttttttttagagttatcgggttgttaggataagttataggtatagaacgacgcggttgttgttcgtttttttttttttttagaaattttaaaggatgtcggtgatagagagttttaattaatgacgattgtgcgtcgtatttggggaagggatatagaaaaaaattttgtaaatatcgtgaggatgaaattgttaaagggatgtaagagttttttaaatattaattaggggtcgcggcggcggcgggttcggcgcggagatagcgtcggcgggattttagcgcggtggtcgtcgttgcgttggggggcggaggatagcgtaggagttgtagtcgtcgttttcgttggagtagtcgaggggtcggtgttatttttgttcgtttttttattattatgtatagtgtgcgttgtaagaagaaggcgggagatgtatgtatattttcgcgattcgttttttttggttcgtttttcggcgtgcgttattgattaggggggaatgtggtgaagacggcgaggaggagagtcgaggggggaggggagggtcggtcggcgcgaatttaggtcggagggtgcgaggagttagaggaggttggagggggcggcggttatagttgggtcggagaaagttgttttttatgtagatggtaattgtgagtatttttgtgggggggagggtgtagcgaaggttgttagggatttcgcgatcgcgttttaatacgtattggagcgagtgtgcgagtgattatgagtgtgagcgggtgcgagcgttcggcggggttgatcgttacgttggcggggtcggcggggttaggtagtttttttcgcg

SEQ ID NO: 6654 - DNA, 1633 bp, synthetic construct
  misc_feature 1..1633: note = Description of Artificial Sequence: Synthetic polynucleotide
  source 1..1633: mol_type = other DNA
acgcgcgtatatatattcgttttcgtttgtttatttttttttcgggggagtcggcgcgcgtttttatttttgtcgtatatttcggcgagtcgagttcgtagcgttttaggattttgcggttcggaattcggattgtagttttgaatttttatggtggttttttaaatattttttttttttttttttttcgttttgattgtatcgtttttatttgggggttagaggagtaaggtagtagtttttttagttagtttttgttggtttgttatcgtttatttggtttataaaagtttgttgagcgtagtttagagggttgcgttgttcgttttttcggttggtagaagggggtgacgttgggtagcggcgaggagcgcgtcgttgtttttggcgggttttcggtttgaggggtaaggtgaagagcgtatcggtcgtggggtttatcgagttggatttgtatgttgtattatgtttttttggatcggggttgtgatttttttttttttggggttgttgtttttttttttcgtcggggcggatgtgaaggttcggagttgcggagaggttcgttaggcgtacggtgttaagggatttagtttggcggatattttttattaggagatcgtaggtaagcgcgggcgcgttgtaggggtaggttgtagttttcggttgtcgtacgttttattggtcgttcggcgtttttttttttttttttgttgttgagttggtgtttattttttgttatcgttatgggatttcgcgttttcgtgttgggcggcggatgtttttgcggttttttcggcgggggaaggtgtgcgttttcgtcgttttattgtgtgtatacgcgggagtattttggttttcgtttttcgttgttttcgcgtttttttattttttagttgatggtttaggttcggttggttagggagttcgggttatttcggggcggttgtaaggcgtagacggagagtcgagtcgggcgtttatttcgcgttttggttcgggtaaatttggaagaattgcgatcgtagtttgtttagcgttatagtttgagtggcgttttttttattttcgtttttgcgtcggtaggggcggtggagagacgcggagggtttttttagttttttttttttttattcgtttttcgggcgatagagcgttcggcgttcgggtcgggggcgggtaaggttgggagggattttcgtcggggatttggtttttggacgtcggcgttttaaggttggtttggggattttacgggttgtttgttttagatgtggggcgggttttttcgttagggttttttagtgtttttttagttgttgttggttatttagggttcggggatattttgttattcggtttggagtcggtttcgtttgttagcgaatagttaattttagcgggtggtttagttggggattcgggttcgggttcgggggtttcgtgtttttcgtatgttcggttattggtattgttttattaagagtttgagagcgtttattttttttttcggcgttagtgtgtgtagtatttggttttcgataatttgcgcggtagtttgggtgtttgtttttcggtttttagttttaatcgaattcgagtttttttggggttttgtgaatgaaacgtgtcg

SEQ ID NO: 6655 - DNA, 1143 bp, synthetic construct
  misc_feature 1..1143: note = Description of Artificial Sequence: Synthetic polynucleotide
  source 1..1143: mol_type = other DNA
tcgcggagttttcgcggagatttgttggagttaggttgtttatttttatttttttattcgcgcgttggtttagaggtttatttaggtagcggttttggtgtcgagggggtaggtgtagcgttgtagtgatgtttagtggtttcgtttttagttatttgttttttaatatttgttagatgtttaggcggggtaggttcgaggtgtcgtcggttttgggttttttaagttagtttaggggtatttcgcggtaggcgttttcgatatttacgcgtaggaatagggagggcgtatcgcggttttcgcgtttcggttaggtcggtaaggattttatcgtttcgttttcgggtggaggcgtttttttttatttttttttcgcgcggggttttcgttcgtagtttttttagtagtttttttcgtagttttagcgtttttgagtcgttttggttcggatcggttaaggaattaacgagcgcgtatcgcgggtttcgggcgtagggtacggagtcggtcgcgtcgtagtttttcgggtatcggcggcggtgattaatttgtaattttagcgtttagagttgttatggtgttcgcgggcggcggcggcggcgatagtgggcgatcggtaggattagtgttaggcgcggcgtttagggcgggcggggacgcgggttttttatttacggcggtttagtttaggtagcgcgttcggttcggttggggtcgcggtttacgttcgtcgtgttatttattgagcgtcgtcgtcgtcgggtaggttgggggaggggtgggagtcggagttttcgggtttttaaaaaattattattttatttaaatttttaaagttagttttgttatagggattgtagtgatgtcgaagggcgggtatcgtagaggaggttgcgtcgtagttggtggggagcgttagggtcggtattggtagtttttttttgtcggttgttattcgtagttagttttatagtaatagttaggtttttatttgcgagtttttttcgggggtttttcgtatttaatagtacggcggcggtgtgtacgggagttcgtcgggtatacgcggggtatatttaagtgtattgttaggaggtcgggagtttagcgtgcgagcgtgaggttagattgtgtacggtatcg

SEQ ID NO: 6656 - DNA, 1143 bp, synthetic construct; identical to SEQ ID NO: 6655
  misc_feature 1..1143: note = Description of Artificial Sequence: Synthetic polynucleotide
  source 1..1143: mol_type = other DNA

SEQ ID NO: 6657 - DNA, 1371 bp, synthetic construct
  misc_feature 1..1371: note = Description of Artificial Sequence: Synthetic polynucleotide
  source 1..1371: mol_type = other DNA
tcggttgagagcgtatggcgttttgagtagtgtaggtttcggtatcgagggcggaaagcgttttgagtttatagtcgtacgatagatcgtcggtttgggttttttaggaattttttgtagttttgttcggttttcgattttcgttatttattagtttttttaggtatttaagagttttttagcggcgggttagggtcggttttttttagtaggtttttttggagagcgggaggaagataggaggcgttttttcggtggagggttttttagcgacgtagttaggagcgttaggaggttataatcggaggagaggttggcgttttagttttagttttagtttcgaagcgattttttttttttcgaggtggttttggttaagtttttagttattttcgttaaatgaggaggtgggcgggatgtagacggtggagcgggaggtttgggcgcgttagtttgggagttagtgcgcggggtagggcgacgggtagcgcggggacgcgaatttttaatttttgcgtttaagacgaaggattcggtttcgatttttttattattcggcgcgtattagcgttcgtttagtgatttttaggtttggtggtggttaggggtgggaggtgagtcgaaagggaaaaagttattttatttaagtcgtcgtcgggttggagttagtttgcgcgggtttcgagttttcggcgacggcgttagtttttttcgttcgttcgcgcggtgttttcgtcggtagttttttcggatttcgcgttttttttcgggcgttcgttttttcggagttttaacgtttgtgcgcgtatttggtagtagagatagtagtagtagtagtagtagtcgcggcggcgatagtgttaggggtagcgagagcgggttagagtttatggttggtggtcgggttggtcgcggattcggacggtcgggagcgggcgcggcggtcgtagagacggttttttttcgcgcggttttagcgtagattttagatttggagtcgtgcgggcggagacgcgcggggttttttttcgtttcgtcgtcgttgggtttttagcgttttcggattcgcgggaggataggaattattcggagtgaagttgcgttaggtgcgggcgggcgggcgggcgtgcgcggggcggggcgtacgtgcggtaggggaaggggttttaggttttagtttttagcgtcgggcgagtttttttttcgtcgggttgggtgtttcggtcggcggcgttcgattagatttgagtaggtgttgttattattattaggaaggagagggatttagtttttgttttaggttttcggggcgtgtgtagttttcgtagggggttgggattatcgggttaggcgggcgtcgtaggagagacg

SEQ ID NO: 6658 - DNA, 1545 bp, synthetic construct
  misc_feature 1..1545: note = Description of Artificial Sequence: Synthetic polynucleotide
  source 1..1545: mol_type = other DNA
acgcgaatttcgcgggtggtttcgggtggtgggttttttttagcgcgtagttttcgttcgtttttttttcggcgttgtagtcgcgatttgggatcgaacggatatcgttttttcggggtttcggcggcgttttgatttttattttttttcgtcgtagtttttggtagggtatttttttggcgcgacgtcgcgttttttttcgggatcgttttttcggttttttagggtgcgtttagttgttgttcgtgcgtttcgttagtttgagcgtttcgggcgggcggcggtggagaagtttagtttagttttttttagtcgcgttttcggttcgcgttgtttttagtttgtaagtttatgacgtggcgacgtcgatcgagatataaagatcgaggttgagatcgttaggggttgagggtgaggtcgcgtttcggggtcgttggagcgcgggcgttatgcgagattgtttcggttgcgcgtcgttttagaggagttcgagcgttttttttagtcgcggcgcgttggttttggtcgggattgtagttaggtgggcgtcgcgcgtgtgagcgtcgcgcgtgtgagcgtagatttggattcgggcggcggaggcgaaagtcgttttattcgcggggtgtaattttgggcgcggaattcgggttgtcgggtgatagtgattagttgattttggagtttatcggaggcgcggtatcggaggtcgtgcggattattgtcgaatagtcgttggagattcgtagagaagggcgggttttgcgttcggggcgtttcggaggtaagttcggagagttcgggtcgggcggagggcgggagcgtacgagtgtgtgtgtgtgtgtgtgtgttcgcggtgtgttcgcggttcggtgtatacgcgcgcgggttgtaaagttaggagttgcgggagcgtttttttgtttcggtttggtttcggagtattgcgggtcgcggaggtgtgggggtttttgtcgttgcgtttagggtagcggcggaaaaggtgtgtgcggatgcggggcggggtcgtatttggtggatagagtagggattcgggaagagaagttacggaagatgattatgtagtttggggtaagtttttttggttgagtatcgttttaggaaacggtgttttgagggttaaatatgtgagttatttgtgtaaaaagtttgatatattagaggcgcgaagtaagatggaaagttggataagttttaggtggatcgatcggtgtatttaatttttaaattgagatttttagttacgttgatgtggaatgggatcgttgtttttttcgagggtttgataaggatgtttaattttatttgttagaaagtacgggagttgggtttggttcgcggggagcgtaagttcgtttatacgcggtttaatttaggtaaatgtagtatgttcgatttgttttgtcgttattttttcgaaagcgataatttttttgggttatcgaatttattagagtagttatttgttttttcgtcggcggtgcggggagcgtaatatttgagtagtttaatttttatagcgcg

SEQ ID NO: 6659 - DNA, 1545 bp, synthetic construct; identical to SEQ ID NO: 6658
  misc_feature 1..1545: note = Description of Artificial Sequence: Synthetic polynucleotide
  source 1..1545: mol_type = other DNA

SEQ ID NO: 6660 - DNA, 1027 bp, synthetic construct
  misc_feature 1..1027: note = Description of Artificial Sequence: Synthetic polynucleotide
  source 1..1027: mol_type = other DNA
tcggtttcggttttagtttcgataacgtttttagtgttcgtagaagcggttttcggatagcgaggatagttcgtcgtcgtaggtttattcggcgtttgatggatatggtggttacgttttggagtataacgtattgtattttattgcggagaggacgggttagagtatttcgggtttttcggttggggtaagggttagcggatgaggggaaaaggtggggtaagtcgttgcggggagaggattagtgcggagggtaggattacggttagtgtggagcgggtgggtagaggtggaagcggttggtgggcgtgagggggcggagtcgggtagttcgtggggcggggtaggaggcgagggagggggcggggttgggggcggagcgtatttgtggttgcgtagtaggcgtattagcgttttggcgatgacgtttattttcgttttgggcgttaggtggaagtagagttgcgttatcgttattattatcgcggcgttgcggttttgtagtaggggtttggtgttgcgtagtagtagtcggtggtcggggtttatgatatagggttttcgggagggggcggtcgcggcggtcgtttttttagatttcgcgtttttggtttcgtttttttttgagtcgtagaaggtttttttcgcgtttttttttagtagggatttttggacggggagatcgacgggtttgtgggcgttttttcgggatatatttcggttcgttttgtttgggttgggtttatttacgttttgggtggggtttaggaattgcgtgcgggcgtagcgggtgagtatgttgatgatgattatttggttttatttttttacgtcgattagtaggttatagagttttcggtagtttttgtgaattaggtcgatgcgtttcgggtagatttttttaaaggttattattatattgttcgttattagttggggaaagaataaagacgagagggtgaacgcgaagggtggaaggtcggttgtcggttattatttttttcggagcgtttttatatacgtatcg

SEQ ID NO: 6661 - DNA, 693 bp, synthetic construct
  misc_feature 1..693: note = Description of Artificial Sequence: Synthetic polynucleotide
  source 1..693: mol_type = other DNA
acgaataaacgttttattttcgggtagtcggcgggtgcggagcgagtattcgtggggcgggataagtgcggaagtcgttgcgttttcgtttttttattttcgggggacggttatttttagggttttcgaggagttcgtttcgtgtatttaggttttaggtcggtttttaagttttggttcgtcgttatattagcggttttttattcgtaagtataaatgtgatatagatattagtttttcgtgtttttggtttttagggttttttttatcgcgttttagtatttgtagtttttttatttttatagcgttcgtcgtcgttaaggtaatagagggatgttcggtgatagattcggcgtcggttttcggcgtcgtaagagaagcgttcgcgcgggcgttttggattcgtagagttttcggcgttttcgaagtttttggtgtggtcgggattcgggagaaggagtagggttggtggggttgttgtagtcggtgagtgtgtgttggcgttgggggttggaattttttaggttagtttttgggcggtgtcgtaggattttgttcgttgcggttttgaggcggaaataggggttggggtcgagcgcgggttggaagttttggtttttggagtgtcgtttttagtttggggtcgaggcggtcgtttgtgtagattcgggatttttaaatagaacgaattcg

SEQ ID NO: 6662 - DNA, 1496 bp, synthetic construct
  misc_feature 1..1496: note = Description of Artificial Sequence: Synthetic polynucleotide
  source 1..1496: mol_type = other DNA
acgtcgagcgattagatgtaaaattttttagcgtttgaaattatcgcggacgtcgtcgtcgtcgtcgtcgtcgtcgggtgggagtcgcgaggagcgtttagtggcgcggtttgtcgggtatggtggtcggttcggcgatcgttgattcgtcgggttcgggggttttggaagcgaggcgcgtttttcgatttcgagattttgtagggttgtaatagacggtggggaggtaaaaaaaaaaaaggaaaaggaaaaaatggtgttaaagttattaagttttatttattgggtagaattaaaacggatatattacgtatttgtaaaatatatatatttatttttatatatatatatattcggagttcgaggaaaggaagagaaggaagatgtagtaggagttgtagtagtcgtcgcgaatggttcgtcgcgcggttgtagaaatgtataagtgtttcgagttttacgaaacgtacgggttatcggagcgtttttttcggtttttttttttttttttttttttttttttttttttttttgtcgcggtttttttttttcgtttttcgttcgggttgggagcggtaggagagcggaattttttttttttttttttttttatattcgttttttttttcgtttgtttttttttttttttttatttatttatttatttattcgttggttcgcggttgtagtcggtatcgttattcgtagtttcgcggtagttcgttcgttttacgtttcgtagcgcggcgttcgttagtcgtagttcgggggaaatcgagatcgaagggaaaaagttgtatttgagattgcgagggtcggggttggggagggagagttggcgagttggttgtacgatacggaaaggcgtttttttttttattttttggttttcgcgttattcggttttgttgtaattcggatcgcggtaggaagtgaaatgaacgtggcggaggtgattggggagtgtttttaagttttgggtggggggcgtttttaagtttgggtgggtggggggcgtaggtttacggacggcgacggggggtgtcggagcgtatagatattttagagaagtatttagagtcggggatcgggatcgtagacgcgtagtttttggtttgaatgatatttattttcgtaatttagagtttggggttttggttttggttgggaggggattgcgggatatggtacgttaggtgtttttcgtgttcgttgcgtttttttggaggtgggttttgtattcggttttgagtaggtatggatcggggaaggaagaaataggggtcgaaagggttgcgttggagagtcgaggtggtttcgggcgagttgtgcgtgtaagagaaatggtcgggggaaattgagatgtaaggggtatattttggtaagcgttacgttagtatcgttagaggtcggtttttcgggtttagttttcgggtgagttgagttggttgtcgggtgagggggcgggcgggttgtttttttcggattcgggggcg

SEQ ID NO: 6663 - DNA, 5820 bp, synthetic construct; identical to SEQ ID NO: 6416
  misc_feature 1..5820: note = Description of Artificial Sequence: Synthetic polynucleotide
  source 1..5820: mol_type = other DNA

SEQ ID NO: 6664 - DNA, 699 bp, synthetic construct
  misc_feature 1..699: note = Description of Artificial Sequence: Synthetic polynucleotide
  source 1..699: mol_type = other DNA
tcgtggtgggcgaggtattcggggtttttttttttttggtttacgaatttttaatttcgaacgttgtgggattgtatgggtttttgttcgggttaatgaaatgcgttgtcgagaggaggttgcggcgcggtttgaggtcggatttttataggtcggagagttttttgtcggtcgcggtcggatttttcgggaaatgggattagagcgcggagggagtttggttaggaggttttttaggatttagtcgcgacgttgaaaagtatgaagggtcggaattaggtatttatttagcgagcgttattaattcgaagttatagcgttaattttttgattcggtcgtttttatacgtagcgtcgggattagaggcgcggtcgtcgttcgtttcgtttttatattttaaacgcgttcgtttcgcgttttcgaggttgcgggtttagggttaattcgtcgcgtcgcgttcgtttggttcgagcgcgcggcgggtcgggttcggttagttggggcgagtcggtttgttcgttggttcgggcgttcggtttcgggttgggtaaggagcgtttggttatgagtcgcgggatagtttaggcgggacggatgcgttttttagggtttaggcgaggtcgcgcggtgtagaatcgtcgggatttttttaattcgggtatgcgtatttatagtagcggtttttggaggtcgcggcg

SEQ ID NO: 6665 - DNA, 1845 bp, synthetic construct
  misc_feature 1..1845: note = Description of Artificial Sequence: Synthetic polynucleotide
  source 1..1845: mol_type = other DNA
tcgttttttcgtcgcgcgttgggggttgtttttaggtgttggtttttgtgtcgagaaaattttgcgaggaggcgagggagttggataaagagcgggcgagggagggcgtttgttagtttgaggggtgcgtcgggcggtgcgcgtatttttttgggtttagtttcgtattcggtcgttcgcggtggttagagtttagtttttttaggttaggagtggcgttcggttgtattttcgcgttttcgggagttgaataaagttaggcgggagaagtaaaggttagcgtttggacgttggagttggtgggaggaggcgagtagaggcgcggagtaaagttgttaaattgcgcgcggagtcgggcgtggggcgggggaagggagaggagggagggaggggtaggcgggagtcgggagggagcgagcgggttcgtcgcgtttgagtaatttttgtttgtcgttgtcgttgtcgttgtcgttgtcgtcgtcggttcggattcgttcggagcgtagggtgtttgtttagttgcgcgcggcgcgcggaggtttcggcgttcgtcgttgcgtttttcggtttttgtttttcgcgtcggttcgcgtgggtttcggcgggcgcgaatttattatgtagttgtagtttcggagttggatgttggtcgcgtttacgttgttcgtggttttttttattttcgtagatattttagagatcgaagaagaaatcgggtaaatagttgtttttaggttcgtgttacgagttttggcgggatttttttttttttttgtattttttatttttcgattttttttgtgtgcgtcgcgtttcgttgtagtttcgttggagagatggggacggtttggtagaaggtggcggcgataggggttcgggacggtttggggagaggagggtgggggcgcggttgttgtggggtgttttcgggcggggtttacgggaagtttttagttggttcgcgtcgggaagcggattcgtttattttgtttttttgtttggcgtgtttaagcgtagtgtcgtcggggtcgagggagggcgtcggggagtgtttcgggcgggcggaggggtcgagagtggagggaggtaggagtttttttgtttttagtacggtcgttttttcgttttggtaaagtgggtagggggcgcgtagggatttttgagttgggggaggggtttttggggtcggagcggagggcggggttttgtatgggttattgggaagcggaatgttttttgtatatatagataggtatacgcgtttttcgtcggttcgggagttcggcgtaggagttggtattattagagaagggttcgtatagttggattgagatttttcgttttcgtttggttttggacgtttagttaagttacggtaatttcggcgattttgggtttttgtgcgttcgtagcgcggagacggagatatttcgggaaagtttgtatcgtcgttcggtgggtttttgggtttttaggcgggcgatttggcgttttttttttttcgatttcgttagaggtagggtgggatcgcgagttcggattttttcggtttcggattttttggagtgcgtatttgaggcgcgggacgtatcggttgtgtgttttaggggttgagattcgcgtttcgtttcgtagttttcggttcgtcgggtcgggttttttttcggaatttttaaagggcggtagacgataggtggggaggtagtcggggttttgaggaggttcgaggagagttttttggttttgggtaaggggaaggtgaggttttaaagagggtagaaggtttttttttttgtgggatttgtgttttgttaggcgtttttttcgagtttcgcgtcgcgtgcg

SEQ ID NO: 6666 - DNA, 1844 bp, synthetic construct
  misc_feature 1..1844: note = Description of Artificial Sequence: Synthetic polynucleotide
  source 1..1844: mol_type = other DNA
tcggcgattttttggtattttggatagtttttcggggagtagtttatcgttaggcggcggttgttaagagaggaatttttttgacgcggagtttgtcgtttcggggttcgtttttcggtaggttcggggagaggtggggtgataatgggttggggtgcgcgcgtgttttataggtgcgagatagagcgagtcgtcggggtgtgagttagcgcgttgggggttaagaagttgggtgaatagttacggaattttatttacgttcggtttttttatttatttcgtttatagcgcgtgttttagtttagggcgtgcgtgcgttcggtgttcgatttcgggttgtgtgtgtttatttggcgagatgtcgagagcggggggagtgtttttgtcggtgtatttgggtttaggttaggggattttttttttttattttcgcgtgggtgtgggggtgtgttcgggttagggcgcgtgtgtttttgtgtttgtgcgtgcgtgtgcgggttagggtggtgggatcgcgtattagggtagggtgtttgcgtttgcgtttgggtttgtttggtttgtatgtcggcgcgatttcgatttggattcgtgtttttggatgtcgagaggttagcgtggtgggggtgtttagtttttcggaggagtattatgttttgatattttcgttttatcgttttaaagttggtttggggtttcgtagggagtggtttgtatggggagggttcgcgtgttgtgtttttgggaggggtaagagagtgggggcgtagggggcgggttaggtttttgggcgcggcgcgggttcgggggattcgcgcggttgacgttaggttattttttaaatagagtcggtagcgcgtttcgttcggtatttttcgaagagttagatcgcggtcggcgttagcgttatcgttcggtttattcgttagttcgtatagtcgcgtcgtcgtcgagcgtttcgtgagcggcgtttcgaggattaggaatggggtttcgggcgttgggcgcgtttcgaattcggcgtacgtaagagtttgggagcgttcgagtcgttcggttgttcggagttttatcgtttaggatcgggagatgttggaaatgtaatcgtttgtttttcgaggagtcgttgttttcgggattttttggtattgtgcgtattttggttagtagttttcggagaagacggcgtttttaacgttcgattcgcgtggtcgtggtagcgttacgcgagttttttaggcgatcgtagggttatagtagtttagtcgtcggtgttttttcggaaattatgattttcggcgcgggtttatggagttatggtttatagggttttgggtcgcgcggggttattttagtcgcggagggcgcgtaggttgtttttcgtttttacgttttcgtttttttgtatttatttgtgttatagttttttgtgttgttgcgacgatttgggtcggagtcgttttttcggcgcgtttcgttgttttcgcggttttagcgcgggcggttagaaatttttttagaagtttcgtttttgtgattttttcgggtcgacgtttagcgagtttagcgtttttagcgcgttcgtcgtcgtcgtgttcgtttttcgttttttcggttttaattatttcggtttatttaagttgggtattaagcggttgttttaagtttttattgtgggcgtgaagaaggggggtattcgggtcgtgttggagtttattcgagtatattcggacgtgcgggttttgggtacggaattttatttttttgataggaattacggtcgcgggttggattggtataggtaaggattaggagtttcgtttcgtgcgtcgggtttttgatcg

SEQ ID NO: 6667 - DNA, 1480 bp, synthetic construct
  misc_feature 1..1480: note = Description of Artificial Sequence: Synthetic polynucleotide
  source 1..1480: mol_type = other DNA
gcgggtgcggtttttcgggagttcgcgggatttttttattttttattttcgtttgggaggttcggcgtgggttggcgatgggggtggaaggttttcgggtttgtggatttgcggtaggaggggcggttggtagtaggagtttttgtattatttttatttttaggggcgtttcggggtgggtgggggtatttagtgtttcgcgaaaggaagaggaggagggggcgagcgtggagatgagtttaggagcggaaagtagcgcgcgttttttcgatcggtagcgggggtgggcgttttttcggggcgcgggagcgtttttaaagtcgcggggcgttcgtagcgggtaggagttttgttttgtatttttttacggcggggcgtttcgtacgtttttttatgttggttttcggtttcggaacggcgcgcgttttttgtttcggaacgtcgtttttagttaggcggagcgttgggagttgggtttaggcggcgggaggagggcgaacgggttcggggttcgggtttcgatggtcgcgtcgtttcgggggagtcggagtcgagttggtcgtcgttcgcgcgtatttattaagttcgttgagttttttttcgtacgagtattagatgtcggtgtggaaatttttgaagaggaagcggtcgtcgtcggttttttagttgtagagcgcgtcgttaggggggtcgtttttcgaggcggtggcggcggcggcggcggcggcgggggcggcggtgtcgttggtcgtggcgttggcgttcgagttggggtagttggcgcgttcgttttggtcgtagttcggtttggggattcgttgcgtgttttggtattagtgcgtggtgaggaaagcggtggtggcgaatagtagcgttagtaggtttagggttacggttaggagcgttcggtcgcggcggttagtttttatgtcgttcgcgtcgtcgggacgggattgtatcgtcggggagtttcgcgcgcgaagttggtagttggcgtttcgcgttagcggtcgttgttcgtcgcgtttcggggttcgggtgtttgagatcggcggcggcggacgcggcgcgggtttatgttttttttaatttcggggtgggggcgcggcgcggggggcgtgcggggcgggttggcggggcgggcggcggtggaggagcggttacggcgcgttcggagttcggagcgcgagtgtatttcggttaggagtcgttggcgtttggtagcggttacggcgtagggacgcgcgttttttcgtggggagatatttgtaggcggtcggcgatattgtttcggagttcgttcgtacggggagagggggtcgttacgtcgggcgcgggcgggggtttgggagtggagggacgttttcgaaagaaattcgagttagggtgagggtttgagacgtaaggagaattttaggtaaggcgtttttgagaaaagatttttacggcggacgtggggtaataaaattcgtcgggagcg

SEQ ID NO: 6668 - DNA, 5065 bp, synthetic construct
  misc_feature 1..5065: note = Description of Artificial Sequence: Synthetic polynucleotide
  source 1..5065: mol_type = other DNA
acgagtcggggatttgggggttcgggcggtcgtagtttagtgggttgaggtgtcgattagggttacgtttcggagttttgtcggggtttagtttttttttttatattttaaaatgtcgtttagggcgtgggtatttcgagtggtattcggagtcgttgagatttcgtcgagattgttttttgtgcgtttttttatagtcgagaggttagtatcgtgtcgggacgattcggggattcgagttcgggcgtcgttatatcgtttcgggcgttaggtttgggagttttgaggtcggtatcgtgaaatatttttaggagtaaggagggattttaggtgttttttttttgtattttaattttttgttcggattttttttattttttgttatagtttttatatataaattttgttttggatttgtttagttttttcgggatttatagttgtcgtttttatcggagaaaataagtgtttttgttttaggggggattttattttggttggttattcgtaaatttggaaaattattttatgattttttttttgatttttttggaagtagggagtattacgattcgtagagggcgtatatcgattagaaagattttggggggtagagggtgtaagtgttgtgggaagagatgcggagataaattttgcgagttagatttcgatatttttttcgttcgtttgtatcgttttcggaataattggcggttagtagtattttttatttcggtcgtaattttagcgggttaggcgttggcgtttcgatattagtttttatttttttgtagttttgaatttttaaagatattcggttttgtttcgtaggtcgagggggagtgtgcgtgggggtaggggggcgtagcgaatttttttacgttcggagtttagtttagcgttcgaagtaaatttttttatcgttggtagtaaggtcgggcggcggaggtcgggtcgggtgttttggggtcggcgtcgggagcgttaggggtttcgtgcggttaggtcggggcgatttttattcgtatttacgttttatggggttttcgggttttggtcgcggttgggattttcggaaaagtagggacggagaagttaggtcggtatgttcgttttttttttttcgggaggatttaataatttcggaaagattttgtcgggagatgtgttcgtttttttcggggtagcgggggaaagtttagtaaaggtatattgaaaattaaaaagaaaaaaaaaattacgtcgagtggaagaagtaatcggggtcgcggcggcggtgaggtagggggcgcgggggttagtcgcgtgtgagtgggttcgagtgtgcgtgagtgtgagtgcgtgtgtgtgtgtttacggcgcgggtcggagtatttattatttcgtcgggggagcgaggttatttcggggtcggattggaaatgttgaggtttcgtttgtttttttcgcgatatgttggtttaaatattagttggggtagaataaaaaattattaaaaaaaaatttttttaaaattacggaaatcgagcggcggcggcggcggcggtttttttcgttcgtcggttcgttcgtttttttttcggtttttcggtttcgggcgtagcgcgtatgtgttttgttataattatgattattaataatgtattgcgattaattatagaggggttttttgaaaggcgattggtatcgggttagcgttatttaaattcgttcgttttaattaattagttcgtgatttgttgtagatttttgttttttcgcgcgttggtttaataagtcggtcgcggggttggttttgcgcgtcgcgtcgttcgatattgggttaattttttttgcgatcgttcgggatttcgcggttcggtcgtcgggggtcggttttttttttattgcgggttcggcgtttcggtaggcgtttttcgttttttttttttttttttttttttttttttttttttcgtttttttttataatttcgggttgggtcgatttaaattagtatgtttttttcggaattgagtcgtttcgggtggggggtggggtcgggcggcgagggttggggattcgggttgtcggcgcgttgcgaattttttaattcgggggcgaggcgcgtcggttcgcggggggagggagtttcgcggcgggattaggggggagggcgtttcgtttcgtgagtgttttttcgtttttttaagagttattagaaagtagtttatttttatttttattaaaaaaaaaaataagcgagtggggaagagttagttttacgtcggttcgtttttcgtttacggttcggtttttttttcgtttggttcggcgttttttcgtttcgagttttttattttttggatttcgggttcgcgggggcgcggagaagaggatttaggaaaggtttgggaatttgatgggtttgtggttggggggaggggtagttttttcgttattttatttttttttcgttaggggtattgattttttagttttttgtttgttttttcgttttttttttttatttcggatatttttaggataattagggttgaagttttcgggagaagtagtttcgagttcgtgggataagggggcggttcggtttcgtttaggatttttttcggatttttttttcggttgtttcggttggttgtagggcgcgttatttcgcggggaggcggcggtagcggtggcgtcgtagagtttcgggcgggcggagagcggggatcggtttgggtttcgagtttagtttcggtcggggggaggggaggggttgcggtttatattgagcgtagtagcgagtatcggtttagggagatatagttcgggcggattcggtattggattgggttagtttttgggatttttgggtatttcgttttggggagggggtcgcgttttagtttttcgggacgaggtggcggcgtagagtcggaaagcggggtggggggagggcggtggggaggtgttttgttcgaggttgtttggcggcgtcgaagttcgtttttattttttgggtatttgtcgagcgcggcgttcgaatttttcgttttattattattttttttaagttgagatgtaatttttttattttcgttttagagtttagagttaggagttcgatttttttgtcgggtttaggcgttcgcgaatttgagattcggtacgcggtttagtttagtttttttttttcgcgtttcggggttttttcgttttaaggttttcgaagttttgcgttcgaaggattaaattaaattaaatttcggttgagtaatgggggaggaggggggtgtagatatataatttttgttttattttacgattaggaaaggagagggtttataaggacgttttaattcgcgagcgtttttgagtttggtcggtgttacggtcggttcgcgcgaagtgggtatcggtttttcgagtcgatttcgtgtatttcggatttgtattgcgtttcggtagaggattttttttttttttttagttttttaaatttttttttttaaggtgtaaatgtgtgtgtgtgtcgatgaatgtttttgttttttatttgttgattttatttttttttattggtataattttttttttttttttttttgttcgttcgttttttatttttttttttatttattttttgttttcgtttattttttaatatatatatttatatttttttcgtttcgttttttcgttttcgttaggttttgatgggtatagtagattttgataaaaagataaacgaagttattagtggggttgatgttgaagaatgaagataataatgtttttataggtggtgttttaaatgttattattttttattgaatatttaaagagatttttcggtaaagatggatttgcgtatttttggggtgtgagcggttcgtattttttagatttcggggaacgtgtacgggagtacgtgtaaatttcgtattcgtttttattttataaataggggttttcgtatatttattaatttatattgttttaggtatacgaacgcgtttgtgtgtatttgtatatttttttttcggaatgtgttcgtgtttggagtcgttcgtatttttttttaataattttggttttttgaaagttcgggtttttcgggtatcgtatgtagttaggaatttagcggagttggcggtttcgtaaagttttttttttggtgcgcgtcgcgtgcgtagtaggaagttttcgggaataattttatacgtgtttgttatttggtttacgtgtgatttaagattaagtgtaggaaaaaaaaaaattttttttttttaaaaaaatattataataaataattaaacgaaatgaatatgcgaaaagtagttacgcgatgtttaattaaaaatgggcgagtagagacgaataaattgggggatttaaattttaataatttttttcgtttttttgcgttttcgacggcgtagaggcgggcgtttcgatttgcgtttggcgtttttcgttaattttttgtttgttttttttttttcggtggtttcgggaaaggagatgggaggtggaggagggggggatgggaggagggggatggtcggaatggcggggagaggagaattggtttttattgttgatggtaatatattaattacgggttattgtttcggttttaagtttcgtggttcgttggtgcgggcgttgtagtgttagggcgttggcgaggtttcgcgtgtcgcgatgtaaagaaatatattaataaaaatagaagtagagtgggggttattttttatttttgtgcgggtcgaaagtaggcggcgagcgggagtgaggtgttatttttggagtttttttacgcgttttgtttattttagagatttgcgcgttttacgtgcggtagtatttttttaattttgggtggaggtggggtgggggggggattattggggaattcgggtagcgaagtttggatttgtaggtttcgttagagggtttggtatttaggggttgattcgtaatagcgaatggggatagttcgaagtgaggcggtagttgcgtcggggtcgcgattttattggcggagaggaatcgtattcgggggaggcgtttggcg

SEQ ID NO: 6669 - DNA, 2372 bp, synthetic construct
  misc_feature 1..2372: note = Description of Artificial Sequence: Synthetic polynucleotide
  source 1..2372: mol_type = other DNA
tcgcgattgcgtaaatttcggttttgatattttagttttaggttttaatttcggaagggtttaggtttaagtttgtacgtcgcgttgttatggcgatcgttggttgtttttttcgttttgttttttgagtacgtggtattaggatttcgcgttttttttagttcgagagttaggtttggtttagagtcgggtttattagtatttcgtttgcggcgttttttcgatttttcgtcgtgttttattaggttcgtttatttagtagcgatagattttcgtcgttcgcgcgattttatcgtttttattttagttttttttcgagggttcgtagttcgttttgttttcgagcgtgtttagcggttttgggtattggcgcggttttatttagttatgtagtgtttttttatatattggtcgcggttattggttgtagattcgtcgcggaaagggggcgttttgagtttcgttcgtaggtagcgcgtttcgagagattcgttttaaggtattttcgtaataattttgtgggggtatttaattttttcgtgcgtcggttaagatttttttatgttttttgtaatgtattagattagggaggtaaatatcgaaggtatttgtattgcgtttttattgggatgcgttgtgcgtaagagacggggatcgtttgttgtaaaatcggatgatcggagacgtagggagttaggagtgggtttttttaggatttattttatgtagtttttatatggtttttagagttttgatttcgtggttggagtgtttgtttttttttaagtattggtagtatacgggtattttgtattgtacgtagtatatgttgtggttttttagttcgtggtttgtgtaggtggagattttgcgtgggtttagttttcggtttatacgattttgggtcgggggtattaggcggtgtttggttaggggttttcggggcgggtggtagcgtaggcggtacggatcgtagtagaagatatcgtattgttcgtatatgacggtggtttttttgggcgttttttcgtagagttggtatttgagggtcgcggttttgttttgttggtagcggttaattattttttttagtacgcgatttttggggaagtcgcggagttttcggttatttaggatgaggttgcggtgatattgggggtaggtgatataggagttgcggggtatcggggttagggtcggtgataagtgggtggtcggtggcggtatagtcgggggaaatacgcggacgtcgttgggggatttttggtacggggtagtgggggcgttggcgaatttttcgtaggagttatagtcgttgttcgtttcgttgtataggtttattttgtttaggtttagatagttatagtcggagatttcggagttcgcggttcgatggttttggggggatttagattttggggtttgtattaggatgttgcgggcgtacgtttgatataaattgtgagagtagggtaggatgatgggttttcgatagaaggagtcgtatacggggtattttaattttttttttattttttttatggggatcggtttgggaggagatagcgacggttgtagcgggtgtttgagttggcgaggtggtcgacgggttcgttttgtttagtattttggttagcggcggcggttgtggtggtggtgttttttcgcgtagtattggtacggatatttagagaggcgttagttttgtgagtcgtagtcgcgtagtcgtcgcgtcgcgcgttagttcggatcgtttttatttgtttttttagtttcgtttcggtttatgagtagcggtttattgggcggggggtaagagatcgaagtttttattggttattagattcgttcgttttttcgttttcgtaggttatagggggttcggtagagtttgaggatagggtagttttcgttcgcggttgtaagatttttgaagggggtcggcgtgcggaggttaggggatcgggaaggaggagttaggcgggatgatttattttcgttcggtttattttcgattttcggtgtagttttttaggagttgggggcgtgagaaattttttttcgtagcgagtgggttgtcggagggggttggggtttttcgttagcgtttgcgtttggtttttagttttgagtttcgcgtttatttatcgcgggcgagtgttgcgtagtacggaggacgttttttttttttcgttgttggtagttttcgtaggcgttttattcgggtttaggtttttgtacggtagtggggttttttttttttttcgtgaattcgttgacgtcgtgttttggagtttttttatttcgggagtttgacggcgttggcgtaagttttggcgatatttttggttttttttattttgcgtttttcg

SEQ ID NO: 6670 - DNA, 2372 bp, synthetic construct; identical to SEQ ID NO: 6669
  misc_feature 1..2372: note = Description of Artificial Sequence: Synthetic polynucleotide
  source 1..2372: mol_type = other DNA

SEQ ID NO: 6671 - DNA, 2372 bp, synthetic construct; identical to SEQ ID NO: 6669
  misc_feature 1..2372: note = Description of Artificial Sequence: Synthetic polynucleotide
  source 1..2372: mol_type = other DNA

SEQ ID NO: 6672 - DNA, 2142 bp, synthetic construct
  misc_feature 1..2142: note = Description of Artificial Sequence: Synthetic polynucleotide
  source 1..2142: mol_type = other DNA
tcgagggtagcgtttcgcgtttgattttttcgtaagcgtttatttgtttttaggtggttaggaaggcgtgggtgggggtaaagcgcgtagagcgcgggaagttagcgcgtatatagcgggcggttaggtttagtattgcgggggaggtgttttttcggtataggattcggtttttgtcgtggttcgtgtcgatgttcgttagaaaaggggcgatggtcgggaagtcggtggggaaattatagtttatatattgcgtttttttggggaagttttgagtggagatgatgtcgttggtgtttatttgggagaggagagggataaaaaggtgatagtcgtttaagtttaaggacgttattttttcgcgtagggagggaagggaattgatttaggtaaaaagtttttttttttttttttattggttagggagtttggatttagggaaataagcgtaatttttgcgattgttttagtttcgcgttgtagtaggtttaggggttttaaaattcgtttatttatttttttattttttttataatttcggagttttatgttttcggagaggaagtttttaggtttgaagagggaatattttagtttcgtagacgggtatagttttttcgcggttttaattgtaaagttcgttggtcgttttagtaacgttattttttttgtttgggacgcgtacgtggttgcgaataatttttgtttttttttttaggttatttttgtttttttatagtagcggggtaggtagcggtatcgttttttggtcgggtattatcgtaagggtgttggggggttttaggagtggggtttgtttttttttttttggaggtagggttttcgtgagatcgattttagggaagaagttgcgggaaaagtgttaggagggggttgaatttacgtagaggttgttgaatcgggtttcgtagaagtgtaggggattcgttagttttattacggttgagttttcgtcgtcgtttttttgtaggagttggtttttttacgatttttcgtgtgggaagagttcgtttgggtgtagcgtcgcggttcgtaatattagtaacggtagtagtagtagtattggtaacgacgatagtatcggtcgttcggttattcggtttttttttatgttcgttcggtcgtgcgtttattcgttgtataacgcgtttcgtttcggtttttagtttatttttcgcgtcgcgttagtttcgaatttggattttcgcgggcgtttgggcggggcgggattttaggtttatttagtaagttaattggttgaggttttcggttggggattaattatcggttttgagaaagttcggtagtggttattatatttggttttcgttaatttttttaaggtagcggtcgttggagtagcggggttggcggggtaaaagtttttggttagggttgtttggagttgttttttttatttcgtttttagggagttttcgggttatttttttattcgggttgtttcgcggtttttaaggagttttattttcgggattaaatggttcgtaaggtttggggtagcggcgttgtaggagatgagtttagcgtaaagggaatttcgtagcggcgagtgcggttgttggtttgcgcgttgtggttttaataggttggtagggcgcgggcgggtggcggggttgcggtatgagttttgttttttgttttggggtttcgggcgtttttggttttggaggtttggttatcggttcgaaaagtaaagggatattgtcgtggttttttcggtcgtttcgttttatttagagacgttttgaggagaagcgagtttttgtacgaaggtagagggttgatttttaagttttgtttttttttcgaaggtcggtcgttagggaagatttggttattttttggaagtattttttttcgggaaaatcgtagtaggaaagattatgaaatattattgtgtgtgattcgtttcgtttggggagtaggatgaggtatttcgtttggttattaggtagaaaggggcgagtcgcggggatgggaagattttgattttttgtttattgttgcggtcgtcggagatgttttttttcgcggttacggaggcggtaatttgagttgtttcgtaggattggaaatcgtataatttcgaaattagttgcg

SEQ ID NO: 6673 - DNA, 544 bp, synthetic construct
  misc_feature 1..544: note = Description of Artificial Sequence: Synthetic polynucleotide
  source 1..544: mol_type = other DNA
tcgaatttgggcggtcgtcgggtagttttttcgttcgattatggcgattgatagtgagtgcgtttcggtcgcggaggttaggggtggggggaggtcgcggtgtttagggtgggaagttcgattttagacgttgtttttgtgttggttcgcggtagtagcggtcgggttttttttcgttttttatttttggttgtttggcggggtttgaaagggtaggtggttttggcggcgcgtttcgcgagggatgtggtagaagggcgtgcgtttggcgtcgaggcggagggattttcgatgtcgtgtggtagcggggtttgttatcgtagtttttcgcgggtattgtttttaggtttagagttagtttttagcgagtcgggtaaacgaaggtattgcgcgtttttggcgttgtgagtttaaggttcgtttcgagttttgggtcgggtttgtgcgtttgttttttggggattagggtggtttgtatggttcggttgttcggtggtttacgggttgtattcgtagcgggtagtataaggtcggttggagatcg

SEQ ID NO: 6674 - DNA, 2002 bp, synthetic construct
  misc_feature 1..2002: note = Description of Artificial Sequence: Synthetic polynucleotide
  source 1..2002: mol_type = other DNA
tcggaggttgtgtcggggttcgttaaaggttataaataaatcggacgggtgggaagtacgttttagcggcgattggatttttaaaaatttgttggtagagtgaaaataaaaattgttttttaagttggtaaaatcggcgttttagacggtgcgtaggagggttttgcgaggtttgttttcggagtttcgcgttagttttgtaggttcggttgggttcgtagttcggtgttttattcgtgggtcgggttcggttgcggggttttttcgtagtcgggatatttaggatagtagcggttggggagtcggggttaggggtttttttgtaattttaatgatttttattattattattcgtaaaggataaacgcggttaaggtcgggttttatagtggttgtgttggttatcgcgtggaggagtgtgcgttaatttaggggcgaggggggcgcgttcggtgtttcggggagagtttagaaggaagacgttttatcgtggtttttatagttagggatagtttgggtgttagaaatttttagagagaattcgaggggttgatgttttgggttattagtttttggtgtttgtggggttttttgcgcgtttatttttatttttttttttttttttaggttcgacggattttttcggaggtttaggatagtgatttatagtaagtggtgatagtggaataacgtgatagttcgttgtatttgttagttggtttttgggtaggtttattcgtcgggttcgattttagagtcgagttttcggagtcgtcgggtaaagttttttttttcgtttcggtgtagtttcgcgtttttcgcgttcggcgttgtcggggaaaagtggtataataggaaagtttcgttagagggttttttttagtcggttttttcgttataaaaagttagattttagtcgaggttttgattttttttaaatatacgtttttttgttcgcggttcgttattttcgttcgggtttcgggttgtgtagtttttttttaggtttgttcgggtttatgtttttttcgaagcggcgggagtcggtgtagttttaatttttattgcgtgttttaggtcgttaattagttttgttcgcgtgtcgttggttcggaggttgtcgcgttagtttttgcgtgcgtttgagcgcgttggagtatttgcgaggttagggttgtcgacggcgagaggatattttgaggaatacggtgttttagtttcgttttcgtttttcgttcgagttggaggttggggcgcgttgagtcgtagcgtttggataagtgcgcgggtcggagtcgtttaggtttgtattcgggggttcgcggtcgacgtatgcgtacgcgcggtggcgggtttgtaggttcgaaggttcggttttttttttaaattcggagcggggaagtttaggggttgagagtttcggttcgggtcgtaggagttggggagcggggacgcgggtaggttaggtttttttatttgtcgtcggggttttttttcgtagtagtaaaggggttttagtgttcgtggtagtgtatgttttagcggatacgttggtttttaaatttagagattagaggggcggttgagaacggggcgttcgttgtgtgtgatttttgatcgtggaggaagggcgggagtcgggagtaggcggtggggttcggggttaggtcgcggtcgtcggttttcggtaaaggcgttttggtcggggaagggggcgagggtgggcggtcggtttttgtcgtcgtagttatatttgggacgttgaaatgggttttggggatagagtttatttttagcgcgttttataggagaagttcgtagtttaggtttgggtcgtgtagatcgttgggcgggttcggggttcgaggagagtaatacggcgcgaggtttagtcgcgagtaataatttcgatagtacggtttttcgaagacgtgtttcgggtatcggggttgtgagcgggggagtttcgggttttgggttcgtttggtacggggcgggggcg

SEQ ID NO: 6675 - DNA, 983 bp, synthetic construct
  misc_feature 1..983: note = Description of Artificial Sequence: Synthetic polynucleotide
  source 1..983: mol_type = other DNA
tcgttttttttcggtttttcgagcggagtgggtaagggaggggggtgaggaaggtacgcgatgttttcgtcgttcggcgttttatcggtcgtagcggtttatcgttttcgcgggttgttcgtcggtcgtagtcgcgttcggggtatgttagttcgtcgtcgtcgttttttcgtcggggttcgtgggttcgtagttgttagggagttgcggggtagcgtatttggagcgcggggtttgggagggagggtgtttggggttagggcgaggggtttcgggaggggttttttcgtacggattttagaaagagggaaatttcgatttagagcggtgattggaatttacgttcgggagaggttcggagtttcggtcgcgggcggcgggggatttttgtaggaaggggtaggaaggtaagtagttcggcgcgttttggcggtttcgagggatttgggttcgggtttgcggtcgcgtcgtttgggttttttttgggttgggagcgcgtcgggttttcgttttgtacgttgttatcgcgggagacgtttcggtttcgtcgcgcgtagaggggacgcgcggagaggttggtttttgggcgagcggagagttttgtttattaagttgtcggaagaagttaaattaaaaagttaatttttaagtttttaaacggaacgttattttattagttgggagatagcgtcgtattgattgataagtcgcgtatatttattttcgcgcgcggaggggagatttttagaacgtttttcgattagtagcgaggaagtcgagttcgtatttcgtatttcgtatttcgtatttagagttttcgagggacgaatttagatttaatttttgtttcgcggttatttattttagtcgttggagtttggcgttcgcgtttttcggtcggtagtacgttaaaacggcggcgcgttttgatttggatttcgtcgagttgggagttttaggtagtaggcgggcgcgcggtatcg

SEQ ID NO: 6676 - DNA, 947 bp, synthetic construct
  misc_feature 1..947: note = Description of Artificial Sequence: Synthetic polynucleotide
  source 1..947: mol_type = other DNA
gcggagcgcgttagagcgcgagggacggagggagaggaggagcgcgggagttgcggaggcgatttcgcgaatttattattgtaaatatattcgggggtgttaggaggggtaggggtgggggtcgcggcgtttatattagttcggtcgcgtcggattgaggtagtagtgtggtttgagtagtttttagatttacgtcgggcgggcgtagtatttggagcgagttttgcgttcgttttcgcgtagcgtcgtacgttcggtttcgagttgttcgtatatacgcgtcggaggagagttcgtttagttttttcgtcgagtttcgggattttttaaattcgaggagtttcggcgtcgcggggtagttttttgtcgtttttttcgttcgttgtattttttttggggttcgttggtttggcgaagcggagagggggaggcggaggaggagagaaggcgggggtcgcggcggtcgaagttaagagaaagtggtatgttcgaattttggaggcggtggtggcggaggacgggggaagacgatgtcgtagtttcgtaggggacgtaggcgagagtaagcgaggcgagttgggcgtttcggtttcggttcgttgcggggaggcgcgcgtcgttttgaggtttcggttttcgtattttcgcgtttcgacgttgcgggcgatagggtttggttttagtagtcgtcgtcgtcgtcgtcgtcgttattcggaggatttagtaaaagtttggatttgggggagggcgcggcgttgagcgggattattattagggttggaaggagatttcgagaatttttgtaggtaacgcgcgtttttaattttttttttttatgtttcgtcgttgcgttttcgtttttttttagagttttttttggttttcgcgggtttggtagaaagtaagagggaggcgaagtttaagatttcggggatgagtatcgagcg

SEQ ID NO: 6677 - DNA, 1362 bp, synthetic construct
  misc_feature 1..1362: note = Description of Artificial Sequence: Synthetic polynucleotide
  source 1..1362: mol_type = other DNA
gcgttttttttattcgcgtttttaggtttttatgtacgttacgtgggtgggagcgtgttttatatattcgcgcgtttaaagttatattcgttacgttttcgtcggggcgggtttatcgcgcgtttttgggtgtcgagtttttataggttatatagtcgttatttgttgttgtatttttattgcggggataggggtatttagtgttttttttcgtttttttcgtttcgcgaaggttttttattttttagggttaggcggaggttacgtttttttcgggttttttttttaacgcggagagggaagcggagggaggagtttggttcgtagtcgtcggtttttttcgtattggagttttttttttttttttttttcgtttttcggttgtcgtagttcggttcgtagcgcgcgttagcgggggtttttcggagcgagtcgttaggtaacggggttggtttcgtagacgcggggtcggggaagttcgcgcgcgttattagtagcggcgtcgcggggcggggggcgtagagattttttttaatttcggtttgttattatttggttcgcgcgtagtttcggtttagaatgttttaatttgcgtcgattgttgtcgtcgaggtgttttttttttgtagggatttcgacgtcgttagttttttttttttttttcgtaggtgcgtattgttgtgtttgcggtcgggtgggcgtttcgtcgttgcggtcgcggtcgtcgttggtaagttgcgttttggggtttggggtaggaagtagtggggggcgttcgaagagtagggtagttacggttatcgtggtcgtcggatcggttatgtgttaaagtttttggggttcggcgtttcgttgggcgcgtagcgcggggagtagacgcgtcgtgggtggggtagcgcggtgttgttggcgttcggttttcgcggggtgtagttttgcgcgtttttatgttgttttttttttttttttttcgcgttgttttttcgaggttttttcgtcgagtttcggcgcggggtatgaggagttttcgggtgtcgtttagagattagtaggttgcgcgtatatttagttagcggtagacggggatatgagtagcgcgtacggggtttcgcgttcggcggttagttttattcggcggcggttagcgggttaacgttgttcgggagaatgaggtaggagtcggcggtagtttttttttttttttttttttcgtttttttgcggtttcggcgtttcgggttcgggtcgggttgcggttttgttgcgtgtttcgcgcgttttttaatcgttttcggatgcgtttttcggtaagttaggtttttcgtttcgcgaataaagtttttttcgtagggttcggaggtcg

SEQ ID NO: 6678 - DNA, 1092 bp, synthetic construct
  misc_feature 1..1092: note = Description of Artificial Sequence: Synthetic polynucleotide
  source 1..1092: mol_type = other DNA
tcggattttgggaggagcgttggcgtggaaagttaggttatttcgattttggtttttaggttcgggataacgtgttagttttaagagagcgttgtttatagtttcgggtgggttgggtttaattgtacggggcggggcgttaatagtttaggatttgggttgtaggttggtttttgtattaattagcggggcggtttcgggttttagtttttttatttcgtttacgaagggaggcgattgcgagcgtttggggtttttgacggatttcgtttcgggggtggggcggggagtggttacgtggaggggcgtttcgttcgtcgagtttcgttttatttcgtttcgttcgttttcgtgttcggggtttttcgtttagtagagatttggagttagaagtttagagatagtcgagtgcgtcgtgcggttttcggacgttcgttgtttagttcgattttcgttaattgtgtaggcggttgattcgtagcggtagcggtagtagcgaggattcgagcgttggttgtagcgatattatggattttttttttatggtcgcgtaggtaacggggcgttttttttacgcgtttcgggtcgttaagtttggggaggttcggggttacggtttcgttttttacgttggggttgggtagtggcgttcgttcgcgattcgcgtttcggttttttgtttcgagtcggatatttttatttggtgtacgcgtcgggggcggcgatcgcggttttttcggggtggggcgggttgcgcgtttcgtattttcgcggttcgagttgttttcgttcgggtttttttcgttggtaggaaggttgcgaggagtttgggtagttcgagtcgtttttttttgtttattttttattgttgttttttttttggggtttcggagttttttaaggtcgggttagtttagattcgcgcgaacgtggatgggtatatagtttcgtttttttttattttgttttttcgaggcgttagtaatttgttttttgtcggtgatttcgggcgttttttttgtcgtcgtttgaggaaggttttgagattcgttttgtgatcgtgattcgttaagcgtcgacgcgtcgcggtcg

SEQ ID NO: 6679 - DNA, 1092 bp, synthetic construct; identical to SEQ ID NO: 6678
  misc_feature 1..1092: note = Description of Artificial Sequence: Synthetic polynucleotide
  source 1..1092: mol_type = other DNA

SEQ ID NO: 6680 - DNA, 1092 bp, synthetic construct; identical to SEQ ID NO: 6678
  misc_feature 1..1092: note = Description of Artificial Sequence: Synthetic polynucleotide
  source 1..1092: mol_type = other DNA

SEQ ID NO: 6681 - DNA, 580 bp, synthetic construct
  misc_feature 1..580: note = Description of Artificial Sequence: Synthetic polynucleotide
  source 1..580: mol_type = other DNA
tcgttcgggttcgcggattgtcgggtcggtttttagttatcgtataggtgttttggagagtgcgattattttttgtttttcgtttcgcgtcggttttcggtttagtgtttcgttttttttggagtacggtttgcgtatgcgcgcgttttagggtttagttttgtttttgtttcggtttttgcggggatggatgttttacgtagtaagcgagtaagcgagttttggagatcggggttttgggtgtgcggtcggtttagtgttacgcggtgagataggtatggttattaatttacgttaaggcggttgtgtatttggtatagaaaatattgttgttgaatgttgtttttatagttattcgttagcgtttattgatgagaggtgttattacggatattcggttttgtttcgtcgaagttttggtttattaggattaaagttaggttttagcgggtttttttgttatttttggacggtttcgcgtttttttagagtttgatttttttttatttttgtagtttaagtcgcggaagcgtagatattcggtttttttcgcgtgttttatcgggtttttttggatacg

SEQ ID NO: 6682 - DNA, 888 bp, synthetic construct
  misc_feature 1..888: note = Description of Artificial Sequence: Synthetic polynucleotide
  source 1..888: mol_type = other DNA
tcgtgggaggttagagcgggcgttgttcggcgttatttttgtagcgttcggatcgtttcgtataggtaggggtggtgtttttttttcggggtatagaaacgttatatttcgggggcgtcgtttagaggttgtttttgtttttgtgtttttttatgaggttttgttttataaaggtagtttgagttaggattttaaagaggtttggttatcgggatcggagggagtttcgttttttaggtcggttttgtaaacgcgagtttgcgttaaggcgttttgcgggtttgttggtggtatcgaggggtagcgcggggttagcgttgggagtttcgaatttatacgtttcggttagttgttcgggaagcgtttaagtatacgtttcgagttttagattggattaagttgtttaattatttattttttttttttttaaggagaagtttaattggagaagattcggtttttttcgttatggtaggttttttttttttgattcgtagttgtaggggttgagggtaggcgtaggttcgttttggggtcgaagttattatcgggtttcgaggttgtttttttaatattcggtttgtacgtttggcgggggcgtaatagtgttttacggttcgggagttcgtttttggtttttgagtaaggtattttttttatttgtcgtgtgtttagttgaatttagtatatttttttcgtatttttcgtttttttttttttttttttgaatttgtttttttgttttgcgggtttttaatttttttcgaatttcgggcgttcggttcggtttaggcgagcgttcgcggttggggacgcgggtggggacgcggcggtttgggcgttgtaggatgcgtttggtcgcggaggagacgattagggagcgggtcg

SEQ ID NO: 6683 - DNA, 1483 bp, synthetic construct
  misc_feature 1..1483: note = Description of Artificial Sequence: Synthetic polynucleotide
  source 1..1483: mol_type = other DNA
tcgaatattgatatcgttttaaagttgtaatttttcggtttcgttacggttttttatgtataaagagagggaattagtcgtcggtgatttcgacggttttcggattagggatgtttcgagttcgagcgggtagggtgtttagtagggttaggtgatgggaattatggggttatcgagtacggattttggttttttcggtggtttttgtgagttttggggttaggcggggattggaggagcgttcgcgtcgggagggagcgtatcgcgttacgtgttcgttcggcgtttcgtttttatttcggttacgtttttcgcgttttttttaaagtttcgttttttagtttcgttattttcgttcgtttcgtttttcgtagttttaagtttagcgttttcggaggcgcggacggtggggtttcgcgttttttgtgtcgggttttgatcgtcgcgcgcgtttatttattttagcggtcgcgggcggaggggcgtacgcgcgcgtagttttttcggagggcggtggggcgaatagtaacgcgcgtattttagtttttggttgttgtgttgagattagttcgcgcgttcgcgcgtttttttttcgaggattcggagtcgttcgcgtattcgttaggggtcgtcgtttcgagttttaggcggacgcgtacgcgttttcgtcgttcggattttagtcggttcgtttttcgtttttttatttttcggcggcggtttttaggtacgcgttcgcgtatacgtcggttcgggtacgcgttcgttaagatggtaggggtcggggtttagttgttagtcgtcgtcgtcgcggttttttttcgtagttagcggtttcgacgtttattcggagaagatgagttttcgttgtttttcgtagtttagttagacgcggagtcgtcgcgttcggggtcggttttttcgttagcgttcgcgtttcgcgtttcgtcgtcgtcgtcgtcgtcgtcgggtcgtttttggttcggcgcgttcgttttcggtagcgataatgaggtgagtcggggtcggcgtttcgtgggaggtggtagcggttagcgtcggaggggttgggttgggggttcgcggtgttttcgagggcgggaggggggttttacgggcgcgggggtttttagagaatcgcgggggttttgtagagattcgggggtatttagagcgcgggaatggtttcgcgagagtcgtgggggcgtttggagagtcgggagggtttgtagggtttgtggggggtagtgttttgtaaggggtaggcggcgttggttttggttgtttgtggggtttttttaggtttcggggggtttgcggcggtttgggaggtagattttcgcgggtaggtgtggtcgtgtttcgatcgcgcgaggatcgaagttggcggaagtttttgtgcggtgttttttagttcggaggaggttggtttgaagtttttaggcgttgtcgaagtttttttttgttagcgtttagagtcgcg

SEQ ID NO: 6684 - DNA, 3714 bp, synthetic construct
  misc_feature 1..3714: note = Description of Artificial Sequence: Synthetic polynucleotide
  source 1..3714: mol_type = other DNA
gcgcgcgaggttggggtagtttataggaggagcgcgggattcgggtttgagtttgtatttaggtagagcgtttattttcgtttttagtttcggattttgaaagtaaagtcgtcgtgttcggtagttagttcgaattttttagtttttagggagtcggggtcggggtagggaaggttacgggtggcggtataatcgggattttggagtggaggcgtagattgcgggtttcgttgcgtacgtttcgtggttcggttggggtgggttttggaggtttataggttaaggttgaacgggggttttggagcgtgggcggggtggagtgtataggttattgggttttgagcgtttttatgggttaggattttaacgcgtcgtgtttttaggatagattggagggggaaggggttgcgattatgttttagtcggaagggttttatagtagtcgcgttgttttttttttgtcggatattcggtagtagatatcgacgtttgggggttagcgaggtaggtgggcgcggatcgcgattcgattttggtttttaattttcgtttagtggcgcgcggggtcgtcgttttatatttttagttcgcgtggttggtgtttggttcgtcgtcggggcggaaggggcgttgtcggcgtaggtgggcggggtcggagcgcgggggcgcgcggcgcggagcgagcgtagggttcgggggcgcggggcgcggaggatcgggggtttgacgggcggttttgcgcggtgcggggcgcggcggcggcgggcgcgcggttagtgaacgcgcgggcggggcggcggtggcgggaggtattaggggtcgtttttcgcgttttttttttttatggcgttgttttagtcgttcgagtcgtttcgcggcgcgtttcgtaaggtttttagtttgttggagatgggggcgttttgtttggattcggagattattttgggttttattagttattttttgcggcgacgaggtaaggtgagggttgtcgggaggggggcgggcggcgtaggcgtcgtttcgttattttgtcgcgcggttcgcgcggtcgggggtgttgcgtcgggaaggagacggtaggttcggagtcgcgtttcgtagttcgggttgggattcgttgtcgtatttttttttattagcgttgtttaagtttttttttgtttttaaggttgtgttttaatcggatttattcggaggttgtggttagggcggagagcgtagcgtagggattttcgggtttattttgcgttttgttaggatgggcgaagtagggggtcggggtttttgattgatcgtgagttttcgaggtgattttagttttgtgtatttcgtgttttgcggatatgggatgtgagtttgtgtttttcgaagcgtcgcggcggtagaagcgttgaagttgcgggtgtggttggttaggggcgtaggatcggtgttttcgatcgttgcgtgtttttgtgttgcgtgtgtgggtggggggacgggatatagagagtgtgtgtttcggagtagtggagcggcgggaggcggtgttgtttgtcggtagtgcggggtggggtttgggtgttgtttttagtatttagatttagatgtgggttgacgttcgtttttattttttaggttgcgaagagacgggtaggggaagcgttttcggttttttaggttgggtggaaagcgattgtaggtttacggattttagaaagagtggagagtttttgttattttattttatatttttttgcgttttcgaatttttaaggttattaacgattcggaaagtcgggaggggattatttattttattttttggggagtgcgtgcgtgggcggggaggtttatttaagtaaaagggggtgggtaaaacggaaagggttattttgacgtattgagtttttgcgaaggttttatcgtatgtgtcggtagtcgcgtgttttggttttcgtcgggttacgattttcggagttttcgagtgcgttttaggtttgggacgcgcggcgttgtttttttagtttcggagtcgtgtgcgtagcggtcggtagggggtattcgcgttacggggagttcgttcgtcgcgttcgtttggtttgattcgggttttggggttgattcggagtttggttcggagttgtttgcggtcgcggatgtcggcgatatttggggttcggttaggtatagagtaattggtcgttagggaagggcgggggggcggttttttagtcggagataaataagtaattaatttcggagttgagtttttatttgttaggtttgttgataataggttcggcgtacgttcgtaggatttttcgtttttcgggcggtacggcgcgtatatttatttgcgggtatacgcgcggttgtaaagatacgtgtcgttcgtagacgcgtcgaggtatagatacgtcggcgcggtcgttgttcggttcgaggcgtatatcgcggcgatattaatttacgcgcgatagttagatttaaagtggttcgcgatatgtagagtacgttgggtttgttggaaaggcgtttgggagtttcggggtcggggtttcgtttttttttcggtttatttcgtcgtgggttttgggtaagagcgtttttttcgtagttttagttttttcgtttgtagagggaggggcgtcggcgttttttgggagacgcgtagttttggtgtttcgggagaggggcgggaggcgtatgcgcgcgcgtaattagattttcgtcgtcgtttttagcgttttttttcggggtagggatttatttaataggttggggtttttggagtgcgcggggtcgcgtggggaagcggggattttattttttttacgcgtcgtttagtattgggtaagggcggggtattttttgggttttcgtttttcgtcgttcgtttcgggagttcgagtttcgttttttttcggtttcgttttcgtttttcgagcgcgtttatcggagttatcgcgtttttcgcgatattcgtaggttttgcgaattttcgagcggttgggtcgggttatgggggcgtttcggggtcggattacgtagtcgcggcgttttcggagagttagcgtggtcgggagcgtttgtcgggtttttttcgcgtttcggttatggtcggtcgcggcgtttttttgtgcgttgcgtagttcgcggtacgcgcggttcggtttggagagggaggcgggcggcgggggttcgggacggcgaagatattcgcggtgtgcgttggatttttgggggtcgggttttttgttgagggtagcggattcgtaggcgggattttcggggatggagggagtgggtgagcgttagggtcgtgtttagggtttttaattttggtaagagcgttacgttggggtagggcgcgtaggggtttggattcgacggacgttttaggtttattgttcgttttcgtttttatattttgtaggtggtcgagggcggttcggttcgcgagtcgtcgtcgttgttggaggtgttttttcgaaagaggttattcgtcgggttcgattaggatttatgcggtagtcgttttgttttcgaaggcgtcggggtcggtttagagtagggttattcggtcggcggaggcggttggtgtcgttattgttatacgaagttggtggagtttaagcgataggcgtggaagttggttagcgggttcgggattatttttcgggtaagtgatatttttttaggtcgattttttcgagtagggttacgtcg

SEQ ID NO: 6685 - DNA, 1266 bp, synthetic construct
  misc_feature 1..1266: note = Description of Artificial Sequence: Synthetic polynucleotide
  source 1..1266: mol_type = other DNA
gcggcgaggagggttgtaggtgaagcgcggggagagggaggtcgttcgtttcggttttttttttaggggttttgcggttggttagcgtttcggttgtattttttggtgcgcgtcgcggcggcgttataggtttttcgattttttgattatcgttttcgggtcgcgcgttcggtagtcgggatcggtgatggcgcgggattgacggtcgtttttttttagatttttttgtttcgtttggggttcgttggggttgcggcgtcgtttcgagttgtatgtggggcgggcgcgttcgagtttagagcgagcggttttcggcgttttcgaggcggtgtttcgtcgcgttagagtacgaggaggagcggcgggtcgggttaggttttttacgcgtcgtagtttcggagtacgggtttttcggaggggatttggggcgttttagtttaggaggaaggattcggaagtagaagcggagtcgcgagtcgagtcgagttattgttttcgttgttcgcgggcgtcgggtgggggtttcggcggttggatgggtagcggcggcgcgggtcgcgggcggcgatgggcgaggagtagagtacggtgagcggcggcggcgggttttaggagtcgtagattttggttagtggtattgcgggttattttgagttttcgaggttttagggggatagcgttcgggcgttttcgttgcgcgtcgttttcgcggagtcgagcggcggtggttgcggaagcgattggggttgcgcggatattagcgttttagagttcgcgaggagtttggggttttcgggttggagtaagagtcgagtatcggcgtagtttgcgggattggtatttatcgggttttttaatttttagattttgttattgtagttggagttggaggaggaagaggaggaagttggggatcgaaaagagggaggggatgaatagtaggaggcgtttttcggcgaagagttggagtttaggattcgcgtgggggtcgtcgacggattggttttggacgtgttgggttagcggcgttcgtttttcgttaagagataagttttttgtttcgtgtattgcgtggagagcgatttgttcgaggttttcgtttcggagtagttttcgtcgttcgcgtcgttatttggggtttcgttagtgttgaatttttttagtattcgtttttttttttttagttttcgattgttttttttaacggattttttttttttcgacggcggtagtatcgagttggagttttatttggcgttcgagtcg

SEQ ID NO: 6686 - DNA, 1316 bp, synthetic construct; identical to SEQ ID NO: 6563
  misc_feature 1..1316: note = Description of Artificial Sequence: Synthetic polynucleotide
  source 1..1316: mol_type = other DNA

SEQ ID NO: 6687 - DNA, 10783 bp, synthetic construct
  misc_feature 1..10783: note = Description of Artificial Sequence: Synthetic polynucleotide
  source 1..10783: mol_type = other DNA
tcgcggagatatttcgagtttcgtaggtgtttgagttgcgttgcgcgttttagtcgggaagtttttttttatttaatcgcgtcgtttcgcggaaagtttgggtattgtagacgtttttatcggtttatcgatagttggttttgaagcgggggtttagaaaagtaaaggggatagtgtttggagttacgatgtttttgatgtgaggcggttttatttaataattaacgaattaagttggaattgtaggttttatttttgttggggggaggattttaaggaatgttatttttttgttttttattttttgttttacgtttagttttttagaaggtattaggcgtgagtagagtgcgaggcgtttatattttcgtgttttttttattttcggatatttttgtattttagtcgaggttttagtacggagtgagggttgtttggggtgttttgttgtgtgtggggcgtttttgtttttcgggttttgattttacggtttgggtcggcgaggcgtttttttttggcgtttggattgtgcgtttgtttcgtttttaggcgacgaacggtaggagtcgggggttcggcgggattcggatttagggcgggcggaaggcgagggtttttttttttcggaattttcgtttcggaaatttgtaattaaatcgggtttttttttcgtatcgttttcgcgttttcgggtcgtttttttacgcgggtatttatttttcgggttttcgtagtatcgtttttttcgcgtttattcgcgcggtcgacgtcgttaggggttttgagatcgcggagatagcgcgttttggcgtttggtggggtttttttagtggttagagcgtttttggattagtcggttgtggtttgtgtttaaatacgatggaaatcggggttgggacgggcggtggtacgtacgtggaggagaagaggtatggcgggaaaattatagtcgaatataggtcgattcgtattttttaggtattcgtcgtcgtttgattcgcggttttttttaaggtttcgattcgtcgttattttttggtattatttatcgggtttcgattcgggtcgcgagttcgttgatgcgtagttgttttcggcggttttcgggttttgttcggattcgcgcgtagagacgttcgggaacgttgggttcgggcgttttttggcggcggtagtacgcggtatacgttcggtttttcggttcgagggggcgcgtggagcgtacgcgggattcgcgcgcgggtttgggttgttggtttatattttttcgtttgttcggatggcggcgttgaggtttattcgtttttttattaataacgatgtttcgggagggaaaaaatagagtttttaaaaattagagtgcgagagaggagtgtgtgtgtgtgtgtgtgtgtgtgtgtgtgtgtgtgtttcggggcgttggtgaaagtaataaaatttagatcgtttttttggcgagatagcggcggttataatgcgtcggggggattaggggtttatttgtagattttggataaaagatgatatatcgatacggtttagagtgttattgcgtttggttttttagggagttataagtatatattttttgaaatatcgtttagtatagtatttaattcgttcgttatttaatatcgggaggggaattttagtagcgtataagcgcgttttcggttttttggttttgggtggggagagtttaaatgagaaggatttggtatgtttagacgtttttttttttggtttttgtttttagtttaagtaattatttagcgatgggttttaataaatacgtttgagaattgtttttatgttcggtaaatattggattagttttttaatgattaggtttttgaaaaggttcgagaaatatatattaggttttaattaagtttaatagttaataggtaaggaaataagttatttttttatttgaggtggggaatgttgggaagggggatttttatttttattaaattatttgattttattaaatatgatcgttgtattaaataggaaagggggcgtatttaagttttttattagtcggaatttttattagtttagttttgtttattaagggtcgagtgattttgtggggaatatatttgggttttagtttttatttttatagagtttagtataaattatttttgtttagtatatatggtttatttggggattgtttatgggagttttgatttggtaattgtaggggagaaggtatgatttaaattattttcgattgtttcgcgttaatttggatcgtttagaggaggtaaaaaatgggtaaattttttggaagttttgttgtgtttttttggtattgaattttgtaagtacgcgatataggagatattgaaaattaaagaggaagtattttttttttttaatatggggagagacgttgttggaagaagtttttgaagtggttttttatcgtattaagaggttagtgggatggattttcgcgtataatttaaaggaacgcgcgcgtttttagtttttcggggttggtaattaagtggttcggtcgggcgtaagtcgttttggaatcggttgtagtttaagtttagttgggttcgggattgagcggtatttttggttttttagaatttttttcgcggtgagtggaagggcggtttcgcgcgcgggcgtttcggggtcggtcggttgcgaaattagggggtggatttttatttatttaggagtcgttaagttcgtaggggatcgagtattatttaggttttgggtattttgagttgttttttgagttttaggacggttcgatggtgtagagtttttaggtagaagttagttttttgatatatatatagtagtgagtaaagtgcgtataagtgagttaaattttgaagacgtaggttcgcggatttttattttagcgttagagttaaggagatagaagagaggaaggagagaagtgaggaagggagagagattatgagaaaaagagattatgaaagtagagaaagagattatgagagcgagattatgagaagagagaaaaagagagattttgagagagagagatagaatgagagagatttaatttttagtgttacggggtttaggcggggtaagcgtttttcgaagttattaaagataggggtggttttttttttttttttttagttttttttttaatagatatagtacgaatttttaatgcgttttttttttatagataataatatagggtttgaaagtcggatataatttaggttttgtgcgggttttttttcgcgttttttcggtttagttggttatatggaatttagtatggagttcgtggatgataaagggatttagtgataggtttaataaaattttaaggagatttttgtttgatttcgggatttattgtcggcgataagcgcgttgaatggtgcggggtggggcggggggtggggggcgggttttttttttttttttttttttttttgttttcgcgattttttttttgtttttttttaatatgtacgtttttaatattttcggtttttagtttttttattgtgcggttttgtatcgttcgttgtagattgggcgaagatagattgttgaagcggatttcgcgtcgggtgcgtttttagggcgttggggttagggttatatagggtttcgtaggcgtttttattgattttatggggattcgaggatagagagaggcgggcgtcgggtttatttttcgggttttcggtcggttataggagcgtatatttagattgtaggttcgcggttttggttatagttttaaatttgtttttaatgagtaagtggtggaagtttgttagggtgaggattttttacgtttttttttttttttttggaaatttgagggttttttgtgattatttttattttggaagttttggggtttggaaaagttaaaatggttttaggttttttgatagtttcgttttaagagatttgaaatttttatttttttttttaagaggattttgggattaggggaagttgtaagtggatgttgagtggttagtattagggtaggttgggcgtttaattattgtataataaattatttgggagaaattcgttggtttttaaaaatagtaagatataagtttttaaatattgttaagttagtgtggagaataaagggagattttttagtatttagaaaaattgtttttttttcgaggatgagttcggagatgggaaaggatttttattggggtattagaaagattttcgagtttttaattatttaggggcggtgtggaacgcgggaataaagtgttatcgcgtttttgggttgttgcgtagagtgttatcgacgtatagatttggtcgtacggataattatgtttgttttagatattgaattaaatttgattattaattatagggagcgagaaagttagttgggatcgttttttttgttcggtttttttattgttatttaattttttagttttgatggtgtagtttcggagagaatagagatataatttttaaatgcgtcgacgtttagttttttagcgtttgtagtattcgttgggttttgagttagagttttaagtatttttagaaattcgcgagatagaggagaaaggtttattttttagttggttaggttttttaagacgttttttcgcgtggttaagtgtgcgttagtatttgttaaggagatttttttttagtaataagggtgggacggaattcgtttttcgtcggaaagatggatgcgtttttttcgggcgtgttcggggttgtgtgtttattttttattcggggagtttattttatttttaaatttttattttttagtaatttatttagttttacgtttaagggttgatttggggggatcgtatattttggttcggatcgtcgaacgttggagggaaggaggttcgggatttagttttcggagagaggtttggaagttcggaaaggatgggagcgtaagggaagggagaggtatggtttgttgggattgttaaagattttcgttttttggttttttggggttaaagattttagggagggttgtagtattttttttttttttcgagtttagaatttcgcgtattttttttaagttttttaagttaaagtttcgcgcgttttgatcgtttttatttttagttttagcggttttttaggttagtattagttcgtagattttgaaaaggagtggggagtggggagaaggtagttagttttaattttagatttttatttatttatttttttagcgtgaggtaagttaaatgtaataaagtgaaagttatcgagtgtagtggttttaatagttttttaggttgaaggagttatttatagatttgggttagcgaggggggtttgtttttttcgtttttgcggttttcgaagttattttttttttcgtagtcggacgttgtcgttcggggtttagatagcgcgcgagattaggggagatgcgggggagggtgggcggttttgggttttcggtcgatcgttcgtaggtcggaggtcgagcgttttttttttcgttttaattttaggcgcggggtgtagtttgtggtcggaggggtttgtatcgggagtttcgttcgttttagggtttcggtattttcggttttttcgttcgagaggaatcgtttgtgggagtttcgcgggcggtcgggttcggtttttaggtttaggttttcggttcggcgtagtaggataaacgggagggtagggatttttttttttttttttttttaaatataggatttttattaaaatttttatttaaaaaatcgaaagttttttgcgttcggcgttgttggggaatcgcgtcgaatagttgagttttaagttcggggttgaaggttcggaggatagggtagagggttttttgtttatagggtttttttttttatatttgagaaatgtttgtataataaaataaaaagagaaaggaagaaagtaggggaaaacgtaaaaataaaaataaaataaaaaataaatttaaataagttataaagaaaggagttggatttagacgggaaataggtcggttttgaaggttattttggtaataattattatcgatatttataacgaaaagcgaaatttgttattagttgttagaacgtttatatggttataaatatttagtatttttttatttttttttaaaaaaaggaagaaattttttgtatttttaaagtgttttttatttgttttagaagacggttgataatatcgttatttatataaatatattttataaaatgtacgaaagtaggggtggggggtcggtttttttttcgtttttaagtgacgatattaacgttgggacggtttggttttttcggggagaggtaaagaagcgaagttgcgtaaatattttgtaaatacggcgtagagtttagtttttttttaaggtttagaaggagaggtatgggtagagttgggtgggtggaatttgttattttaaggagacgtaggtaatttttcggcgtttttttagtggagtcgagagttaattcgattttataataataattataataataataataattattataaggatcgaggttttttcgtcgttatcgtcgtcggggtggggtttgggtttggggtcgcgagtttcgttggggcggcgtttattaagtttattgttgggtttggattagggggtgtgttgtcgggtattggggggtgttggtcgagttgtattgggcgttgtattgtatgtgttgtagcgattgcgcgttgtaggtagaaaagggaatgttcgtttggaaggtggcggttgttaggttttgggttttgagcgcgtgatatggtttgtcgtttttgattaagacgggtacggttattcggcgcggcgagggtaggggcgttatttttatatttttttcggttcgggcgcgttttattttgtagcggtggttttggaattagattttgatttgcgtgggcgtgaggcggatgaggttggttaggtgttcgcgttcgggcgtcgataggtatcgttgttgtcgaaagcgtcgttttagttcgtaggtttgcgttttggagaaaagtattcgtcgttttcgttttttgtcggcgtttttttcgtcgttcggggtttttttgttattgttcggtgattcgtcggtcgagggtttcggggatttggagtttgagttttgagggggcgtttcggtagttagatcgtgtattggggggagggggagagagaagcgcgttaggcgtttggaggtcgcgcgtagtttgtattagattcggagtattttggatttttcgtgcgattttggattttcgcgtttggtagtttagtttcgttgtttttgttatgatttttgtttttttttacgtttgacgaagacgtcgggattttttagggtaaagagggaaattcgtaggagtgggggttaggggttcgttttttaaggggtttatatagtgtgggtgagaatttggggggggaagtggtattgaagattatcgcgggttaagggtttcggcgtttttaagcggtttttttttcggcgagacgtgggtagatttttaaaagaaatattttataattttagtattgatcggttcggttatttaaggtaggtttttgggggttttcgtttttgttttcgggttttttagatattttttgtattgtataaagcgttttttatgatcgcgtagggggtagggtgagttatttatattcgggttattcgaagtttttttattttttattcgtattcggacgaggttcgttggttatttttagggcgttaggttagttttttttagcggtcggagttcgggggttgcggttggagttatcggttcgggttgatattatatattagtttttgggaggtatagtttttttttttttttttttttaatttttcgtattgaaaaaaattttggagattaagttttttttcggaattaaggaggtttgaagaggagggtagaggatattttatataggtgttaaaaatttttttacggattcgagtgagggggttcgggtttatatggttttttttttttttatttttagcgtttaattcgggttgcggttgtaggaatggaggggattacggtttcggtagttaagttttgttatttacgggagtattgaaggttttcggtgttggttagttagcgcgtgtacgggttgtcgttgttgtcgtagaaggggttttttaggggtaggttttgtatcgcgtttagggcgttttgttttagcggttcggtttttttggttggttcgggtttttcgtttttttttttcggattttcggttatagagttttttttatcgttggtgttcggtaggtttaagatgtttttgatcgaaaatttcgtttttgtgttggttagcgatatggttcgagattttaaaatttatgtcgtaaagttgtagttttatttggttaattcgtggcgtttttttgttttggcgggcgggggaggggggagttggggggagggattgggggaggggaggggggaattggttttaattattgggataattattatttttaaaaagagaaagaaattggggatggggaggaaaaaaatgaagtttaatttagtgtttttttttgttttttttgaaagtacgcggaaatggacgtaggaagtcgggcggtttgcgcgtcgagcgtcgcgggtttcggttttagtttttaattttaggaggggtgttaaggcggcgttagttcgggtttcggcggtcgttcggcgcgcggtggcggttggtggcgaggaaaaaatgggttattgttcgagcgattagtttatataaggttgggttttatttacgaatttggggaggcggggagagggggagaaagagagggagggagggaaagaaagagggagggagggggagcgagagagggagcgggagaagggtggaaaaaagggggaagagatattaaaaacgtaaaggttggttacgtgtgggcgggttttgggagttaagtggatgaagatagtatttgtagatgtgaaattgtgggttttggggagtttcgcgtttttagttaacggttttttagagtaagatgagaggtgtaacgtgttaattaattgtaaagacggggcgagtttttttttttttaaatttagtatttatatataaagggttatcgcgtcgttcgcgagtttatatatttgaaagggtcgttttaataaattgtattttaaaaaaggtgggggtggggaggaggaggggagaaaataaaatagaaattaggaggagggaaaaaattttttttaatatttatcggtttttattttttcgttttcgcgcgtttattttcggtaagtcggaaaattggcgatttgtggcgtttttggaaaagggggagggggcgaaggtcgagttgcggaaattttttttttttatcgttggtggttgtttaaataagattcggtttaaatggtaagagtttaatttttgtaagttttttaggttaatattttggttgaggtttaaggatgagtgttagaaatgataaggtaagtaattgattttagttaatcgcgagagagtttaaaatttaggagagagtttcgtttcgggtcggttagagttattattaagcgattcgtttttttttagtcgttttttatttgttaaagatttatttattttttttatttcgtttttttttattttttatttttaatttttcgtttttatttttttgcggttaaggaggacgcgtagtttattttttgttttgcgggcggtttcggggagggcggggtaagagtgaggagttttaatttcgtttggggtcggattttggttttgttgtttttgggttttgcgggttttttttttcgggtggaggaaagggtagacggttttgtttttttttgttttttattattttttttttttcggttttttttttttttagtttttggttagaggtggagtagcgggaaggcggcggggcgggattgcgggggtgggggtgggggttgtgtttttagtttgggtgaagatttagaaagttgcgggggaggggggtcgttgggtggttcgacgatgtttcgttttttttttagttttttttttttacgcgagttttttagtgtggtttttttttggacgttttgggtgcgttcggagtacgcgttttacgtttttaggttaagttaggttagtgtgaagtttttagttattttcggttttgggaattgaattttttcgggatttgtatttttttttcggcgttggggttggaaaagattacgtcgtatttgttatttttttttttagttaaaatttttttggggggggggtgtaggggtgtagattggttatttgatgttcgttcgttttagaggagtgttaggaaggagttttgtttgggggcggggaggggtatagaaggttatttttgcggggtttaggtttagtttttttataatttgggttttttcgcgcgggttaagttgagcgcgcgggtatcgggtttttttcgcgcgtagttgtagcggacgtcgtcgcgttttagttgttttcgggttgttagcgttgggtgagggtattttttttcgagtcgttcggcggttttttgtagttttagttgtttcgtttttagtatgtgacgtgggtgataatggtttaggttagagtaagtttttcgtcggcgcgttttgggtggtcggattcgggtaaatataaatataaatcgattgttaagttgcggataatgagcgaaatgtagataaatgtttcgttttcgttggaagtttttgtttcggttcg

SEQ ID NO: 6688 - DNA, 810 bp, synthetic construct
  misc_feature 1..810: note = Description of Artificial Sequence: Synthetic polynucleotide
  source 1..810: mol_type = other DNA
gcgtacgggtcggggagggggttatcggatttggatttcgggatatttcgggggtttggggggcgggtcgcgcgtttatttgcgttttcgtcgtcgaaggagtttatgtacgggaagtagatggcgagcgtttcgaaggaggcggatagattgaggcggttttgcgagcgttttatgttcgcgtcggcgtcgggcgtttcggtcgcggcggcggcggcggcggcgggcggtttgggtagtttggtcgttttatttttgacgcggagtacggcgcgcggcgtggtggcggcggttcggggtcgggtcgaggtttcgttgcggggttggcgggcgcggcggggtcggcgggcgggttaggagttggcggcgcgcggagttcgaggcgcgttgtgttgttggcggcggcggcggcggcggcggtggcggcggcggtggcggcgtagcgcgttttggttcgcggcgtttttcgtcggtagcgcgaggcgggtttggagcggcgtcgtagttaattcgtgtcgtcgggggagggggcgtcgttgcggggcgtgggagttcggagggcgcgggttgcggttttttttagtagttttcgggttcggtaggtgcgcgcggggaggtaggcgtcgggcgaggttgtttgggttttggttcgagggttgttttcgatttcgtttcggtttttatttttagtcggtcgatttgcggagaggtcggcgtttagttttttatttagataggttttttttagagatattggcgcgttcggaggggatgcgtttaaagggtttcgtttaggcgggtcggtattcg

SEQ ID NO: 6689 - DNA, 1142 bp, synthetic construct
  misc_feature 1..1142: note = Description of Artificial Sequence: Synthetic polynucleotide
  source 1..1142: mol_type = other DNA
tcgggggagaaatttcggtttatagtcgggatgcgttttcgtcggggttatcgcggcggcgaacgtttcggatttcgtatttcggtgattttttgggatgaatcgaagtcggattcgtattttggtcgtaataagcgcgttttacgtcgttacgtattagcggtgattttcgagttttttgtcgttttggttttttcgtaggcgggtttcgaggttttcgtagggagtttagggttacggttacgtgtagtcgttttcgagttcgagtttgtaggttcggggttcggttcgcgttttggtggcgttcggcgaggttgtagcgcgtaaagtttttattttaagttttcgtcgcggcgttttcgtttcggagttggttcggtcgcggttttcgtttttttcggttgtttacgggttcggggcgaggacgcgagaggggtttggaagtcgttcggggagttcgttttgtttttcggagtcgtcgttaaatttcggtttcggggttcggtttagttttcgttttcggagttacggtcgtttcgtttttgtttttcggttttcgtcgggtttcgagtgcgtcgggagcgcggcgtagtagtcgtcgagggagggagcgaggtaggaggcgggacggagggaggggattgagcgcggggcggggagaaggggcgggtagtcgaaagcgtagcgtttggtttcgtttcgtttcgggatagtggtagcggcgttatcgttacggggcgtttaggcgtttaatcgggatttcgtattttggattcgggggttttggcgcgtttgttggattgcgtttttcgcggttagtttttgagttcgcgttcgggattgttcgcgttacgttttttttttcgttgttttttttttcgtttgtttttttaggagcgattattttgcggttttttcgtttgtacgcgatagtttttaaggttttcgcgtttcgttgttttggagttttacgtattaggcggcgcggtagttttttagggtcgcgcgttttgttagtttttttcgcggtgtaagtgtttcggtggtttcgggttcgcgtttttagtagtatcgttttagggtttatatgtgttagatattaaaattttatttttcgttgtttcggggtcgcgttttacgcg

SEQ ID NO: 6690 - DNA, 2885 bp, synthetic construct
  misc_feature 1..2885: note = Description of Artificial Sequence: Synthetic polynucleotide
  source 1..2885: mol_type = other DNA
acgttgtagataggcgcgttgtagggcggcggttttttttttttggtattatcgatagtcgaggaaattgggttaataaagtcggatattgcggcggggtcgcggggcgtaaatcggcgcggatagatgggttttcgggggtattttgttcggttttttggatttcggatggtggtagagttgggagttgcgtaggacgggtattgcgtagcgtattttcgtttatattcggcggggtacggggttcgtagtagtttatttattcgtagttcggttttttttttcggaagggagaggggatcggtggggagggggtttgttggatattagggttagacggggtttttttttgatcgttagggttaagtagggcgcgggttgtgaggatttttttttacgtagtttttcgaggtagagggttcgtaaagcggtttttatttaattttatttcgcggacgttttaggtagcggatggcggcgggggggggaggttaggggatatttaggggataaattttttagatttcgaggtagtcggcgacggcgtttaatttttaaataaatagaataaatttttatttggaaaaggtttttttcggggtttttttgcgttcgcggtttagtttttttgtagacggttatcgtgggtttttcgtagggttgcggagtttcggagttatcgaggtgggaggtgtcggttacgcgcgtttttaggaatagagtattgttttgtagtttagtacgaagggtcggttggagcgggagcgcgaggtttattgtaagaggattaggagttagtaagttcggttttttttcgtttttatttttcgtgcgttcggggttaggatcgtttgttcggaatttgattagtgttcgttttcgtcgtggttttgggatttcgcggtggtttttttttggggacgaacggtagtgttcgaaggatgttttatttattttcgtttttagatttgttgggtttcgataatatttagtgggtgtcgcgagttttcgggcgtagagtttagcgttcggttttcgagtttaatttcgcgtttcgacggttttggcgtttttcgttgcgttaaattgtttatcgcgtataggttggaagcgaagtcgggttttttttttttggtttgtagggtttttttaggttttttttgttcgggtagagagatagttataggggcgatcggaggacgcgtgcgggagggtcgggggttcgcgcggttacggtttttcgtgatagtgtttgtaaagcgcggagggcgtttcggagaaggcggcgtatttgttagggtagggttttagggcggcgtttgcggagaaggggtatatagtggtttggtcgaagggcgttaagggcgcggcgtttacgggcgcggttaggttttggttttggttgaggaaggttattaggcgtcgtatttcgtttagggtttgcgtttgtatgaggatatagtttttggcgagtagtagcgtggcgattttggagagtttgcgtatcgacgggttgtgcgcgtaggggatgacggttcgtagttcgtttagcgcgtcgtttaggtcgtgtatgcgtcgtcgttcgcgcgcgttgatgttgagtcgtagagatcgttgttttcgcggtcgtcgtcgttcgttcgtcgcgttttttggttcgcgtcgtcgtcgtcgttgttcgaaggcgtcgttttcgttttcgttttgttcgtcgttgtttttcgtcgtttgagttggggcgcgaggtgtaggcgtcgcggggaggtcgtcgttcgggttcggagtgtcgtagtcgcgggtcgtttcgggttttcgcgtcgtttcgtaggcgagattcgtagtcgtcgtcgcgtagtcgtggtttagtgttaggtacgcgtttttcgatagcgatttgagttcggttatggtcgcgtcgtttgggttcgggggttcgtcgggtgggcggatgtttatgtgggtgagtagttttcgaggtcggttcgagttcgtcgttgtcgttgtcgttgcgatgaggttttcggttttgcgcgtcggtttggtttgtttgcgggttttagagtttcggcgttcgttgtttttttcgtttttttttttttttttatttttttttttttttagtcgcgacgcgtagggggcgggttttatttttttttcgttttcgtttcggttttaagtcgcggaggcgttcggtgggatttcgttgttgtttaattaggggggatcgggtgagtttttttttttggagtcgggttttattagcgtcgtaggtttataggtcgggggtgggggttttggatcgaggggcggcgcggggcggcgcggggcggcgcgcgcggttttggagcgttagtatttgtttttcgatttttcggtcgtcgttttcggtcgtttcggggatttcgttattaaacgtacgcgttttaggtgggtattcgtttcggttcgtttttgagtttgattttagcgtaagagtttttggcgatacgtaggggttagagcgggggggcgcgtcgtaatagtagtagcgttagcgttaatattttgtttcgttgaggggtcgtttcgggtcggggttagggtcgtgggcgttttggtgtagtcgcggcgtagcgtgtattcggagttcgtatattttttgttcggggcgttttgtggttaggtttgaggggtagagtgagagggagtttttagaatttgttgaaaaacgttacgagcgttgtaggtcggggagggcgggaaggtggagggtagcgcggtttggggtttttcgggggtgggaggggagttttgtgagttgtaggatcgttttttttttgttagtcgttttttgggtatttattagcgaaacgcgtgaggtttggtgggttttttcggagttttcg

SEQ ID NO: 6691 - DNA, 1460 bp, synthetic construct
  misc_feature 1..1460: note = Description of Artificial Sequence: Synthetic polynucleotide
  source 1..1460: mol_type = other DNA
acgcgtatgagagagtagagcggtagcgacgcggtcggatcggtcgcgggggttgcgggaggaagcgttgtagggattcgggcggcgtcggcggtttagtcggagatgtacgcgttgtaatagatcgcgttgttggcgttcgatagcgcggagattaggttgtttttttttgggtaggatatggcgcgcgggtttagtttggttagtgttacgtggtacgggagttcgggggcgtcgggtcgagttcggttgtagttgaggtattggtcgaattcggtgaggtttacgtcggtttatagatcggcggcgggttttagcggttcggcgttttttagcggcggggtttcgggcggcggcgatagcgggtcggggtacgggtcgggcgtgtttagggtgtcgtagtataggttagcgagcggcgtcgcggggggcgcggttttgagcgttttcgttaggggagtttcgtagtaatcgtcggggtttcgcgataattcggtgggcgcgtagggcgcgcggaagggtcgtagcgcgtagttttcgggcgtcgcgggcggtgggaagaaggtagtttcgtcgggttttaggtcgtttagaggcgagcgttcgggcgtgggtagttttaggtcgtcgaattcggcgtttagcgggggtagttcgcggaaggcgcgagtcgagttagacgtcgcggggaaaggttcgggcggtggttgcgggggcgttaatttcgggagtaggaggtcgggttttagtcgtcgggttttgcgcgtttgttttttgcggcgcggtcggtatttgtagttggggtggtcgcgtaagtgttgtacgcgtagtcgttcggttttttttacgaagggtcgttttttcgtcgcgtttagttttttttacgttttgtttgcgggtcgtgggcgttagtgagtggaacgtcgtcgggcgggtgggcgtcgagtttttcgtgcgttcgggacgtttcgcgagggtttggcgtagttttcgtatttcgcggttcgggatttttgtttttttcgttttatttcggttcgagtttttttcgtttttttttttttttttgtcgttttttcgtcgtttatttagtattttgttgagtatcgcgttgtgtaggttcgggttttgttgagttagtcgtttgcgttcgttttttgtttatattatgaaggcgtttatgggtcgtcggatgcgcgattcgtttgtcgtttggcgtttttcgcggtcggtcgggttgaggttatagcgtttcggttcggggttgcgcgggggattgcgttgcgggttgggcggcgaggcgggcgcggcgggcgcggcgagggcggcggggtcggcggcgaggtcgcgcgtgttagcggcggtttcgtgtttcggggtttatgtatagtcgcggcgggcgggcgggtcgttttgtgcgtcgtagtcgggcggcgatttttgtattttagttgggcgcg

SEQ ID NO: 6692 - DNA, 1560 bp, synthetic construct
  misc_feature 1..1560: note = Description of Artificial Sequence: Synthetic polynucleotide
  source 1..1560: mol_type = other DNA
acgttttgtagtgtcgggttttgcggcgattattgagttttttcgttttcgtttttagttttttcgttttcgttttcggttttcgtttttttagtcggtcggggttcgtcgtttacgatttcgtacgtgtcgtcgacgtcgttttgtcgatttcgtcgtaggaggtggaattgtagtggtgtcggcggttttttttttggggcggcggtggcgaggcgttcgttggcggcgggtagcggttggatgaaatacgttttttttagtaggtagaaggcgtcgcgtacgttttcgtagaggttgagggcggtagtcgagttgggatcgttatttacggtgtcggagtagaagtagtgcgttaggtcggttttcggaagcggcgtttcggattcggatttgcgttttacgttttggagcgtgaagtcgggcgttaaaaagttgttgtcgggtcgtagttttagatttagttgttggttaaaggcgtgtaggcggaggcgcgtggtttcgtgtttcggggcgcgttttagtttcggtattattagtttttcgtttttttcggaggggcgttcgagtgcgttcgatacggttagtagcgtcgcggcgagtagtagtagcgtgggtattggtttaaagtttcgagatttcggagttcgtttcgcgttttttatgtcgttgtttagtttgcgtttttcgaatttttcgggtatagttcgttgtattggagttttaggagatatcgttcgtagtagcgtacggagcgagggatttttagttcgggtcgggagagtaaagtttcgttggtttgttttggattgttaaaattaataatttttattattcgttggaagggcgcgtagagtcggttatagtcgaagttttcggagttattaaaaggaggcgttgtagttttgtcggcgcgcgggaagttttttttttagcgtaaagttggagatattgagaggtaggcgtaggtagagtggttttgttgggataagaagcgttttggggcgttttcggggttgaggtaacgcggagattggtgtttggcgttttttttcggttttcgttttggttgcgatgttgtttattttgtttagggttttttttttttcgttcggtagcgtattttggttttgtaatagtttttggttcggagtcgttttttagcgagtgtaagaatcgggtagtcgagcggtttttttatagtggattagtgaaatttttatttttattttattttttttttttggtttttttttattttaaagacgtcgttttcggtttcgttggtgttaaatcgcgtttcgcgttgcgggttcgggagggggagggggtagttttcgcgttggttttacgttattgttcgttaatttaggggcggaaggggcgttgtgattagtattttgtattgttggggtcgttttagggagaagatttttttttttatcgtttttttttttcgtcggttttttggattattttttttttttatcgttcggttgcggtaatttagttatcgcgttgggttgcggtttttaggagggagggttcggttggagaacg

SEQ ID NO: 6693 - DNA, 5118 bp, synthetic construct
  misc_feature 1..5118: note = Description of Artificial Sequence: Synthetic polynucleotide
  source 1..5118: mol_type = other DNA
tcggtgtcgggagttttgtttttcgtcgttatttttggttagttttgcgtaagaacgtcgttttgtttggtagttaggtcgagacgtagtttgaatgtgagtaggaattcggagaagggaagggagagaattagaaagaaggttcgggagggattcgggaagtagtgggaggtttgcgttttggagtttcgcgagagttcgtcggtttggtacgggtttttttcgggtcgttcggcggtttaataaaggtcggtttcgatacgtattcggttttttgtgggagagaaatataaagaagagggaaaaatacggaggaggttaatagtattaggacgcgggggttaattaggaattttcggagtcggggtttattagtttttgtaaatgagtattttattttttaggaaggggttttagttgcgcgcgttggtgggaatcgtagtgtttgggattcgtttaggtcgtttatttcgggcgtcgggcgtaggattcggataagttttggggacgtttttaggacgtattagggtaagtttgggtatcgggatttaatttttagttatttttgggacggggtggggaggtataggagatatatcgagaggtatttagtattcgattggtattagggttaagggagtttaggggcgatatagattttttcgattttttaagttatttcggcgacgggaggatgttgagggaagtttgttaggtgaagaaggggttagtagtagtatagagttttcgattttgttttttaggttttagattcgcgttatgttaagacgggtttttcgatttttatttttgatttttaattttagttattggatcgagcgcgtaaagaatttgagatcgtttgtttttatcgtcgtaagtcggtcgtaggatagatattagtgggtagtaataaaaaaagaaatcgggtttcgggatacgtgtcggcggttggattaattttagcggttgtaattaaggagcgcgtacgttgcgtttgttggtgtttattagttatattggtaggcgtataatttcgcgtttcgattggtggttttatagcgcgtattatatatggtttcgttgttgttggcggggtaggttcgaaggaggtatttataaatgttcgagttttttttgatttttattttttcgttttttgcgtcgttcgagtgatagattttattaattgaacggttatgggttatttttgtaatcgttggacgatataatattacgttttagttttttatgttttaaatatatatttaacggatggttgtagagttagttgggaaatacgcggattgaaaaataatgttttagaaggtacgagattggggcgaaggcgagagcgggttgggtttttagcggagatcgtagagggagatatattttagaattaggggtaataacgtgggtttttttttgtatttgtttattttgtaattttgttatttgaagattaattatttattatgttaatttgtttgtttgtttttaaaatcgtatttgtatagtaaaagttttttaataacggaagtaattcgacgttttttatattttttaggagattgtgtgcgtgtgtgttcgcgcgtgcgtttatagtgttaagtgttagtattcgagatttgtagaaataaatgtttgaattcgaaatgtatgggtgtgagaaatttagttcggggaagagattagggattgggggagataggtggttgtttgtattataaggaatcgttaacgttagtatttgtagtttaagtagggttgttttgtaaaggtttagtaattttttttgtaggtttgttgtatacggtttttggttttttttatttgtaaaatgggtgaatgtattcgtattttagttattttcgtgaggtgtttttttagttcgggtttaattttttatcgttaagagtttttaggttttagagttagtttgtaatcggtaaaatatgttttaacgcggtcgcgagtggttttatttcgttgtttggtttatagcgtggagaagttttgtttaggtttgaaatttttttttgtagttttagaaagtaggcgattgggacggaaggttttttgttaattttttatagcggagttttgtttggattatagatgttagcgttgtttttgttttaaggcgtgtggtgattataaagacgatattgaaaatatttattattattcggtttttttgttaataaatggaggggtgtttaattataggtacgattttgtttttgtgttagcgcggttatcgtgcggaaataattcgtttttgtatttatattatttttaatttaaaggagagttgtgaatttttttaaaatatttttttggagttcgttttttttttttttgttcgttttttattttttaagtttttgtttttagttgggggcgttatcggttgtcgtcggagttgtagttacggttattttttagacgcgcgagtagagtattaagatagtggggattttgtgtttgggtatcgtttatatttggggcgttaaatgtttacgtgttgatgaaattagtgagatgggaataggcggcgggaaattagatagaggaagagttagggaggagattttagtttcggattttgggtcgttagggtttttcgcgcgtattttaaaaggtgcggttgcgtggggtattaggttagtttgttagattttgtagagtttttaaattattttattttttaatttgattttgtggtggtcgtattttttatagaaatttgattacgtttttttttttttttggttttaagcgcgtttagttttttttttattttttttgagtcgttttttttttttttttcgttttttcgggttttttttttagtttttttttaagaatttttcggttacgggcgtttattggttgtgcgtagggaggaggcgtgtgttcggtttggcgagttttattgagcggaattagttcggatgatattagttttttagtttttcggcgggtttagtttattggcgaggtagtttttttaggatacgtatattgtttttcgttttcgttttcgttatcgttgtcgtcgtcgtcgttgttatcgggttataaaaatcggtcgagtttttaaaggtgcggatgtttattatagatcgacgcgatattagcgttcggtgttaggtttttttttgaggtttttcggagcgagttttttaaatcgtatttagagtaagtgttttcgttttatagtagtcgtagtttagattttagggatagattttttttaattcggttgtgatttagaatgtttcgatatagggggtttggatttttattttgcgggttatttttttagagcgattttgtttttttgttttttttatatttatcgttgtattttttttattaaaagcgagaagtcggagcgataatagttttttttgtttaagttttagttagttggtgagtttttcgtggtttttagatgtagtatatggattttgggtttcgcgtcggttttgggtgtatgtgcgtgtgcgtgtgtttgttgcgtggtgtcgatggagataaggtggattcgtttgaggaattaaattattagttttttatttagatttttattttttttaaagaaaggtttttattttttattcgtttattttagttcgggggtttagtttttttatatttaattgaaagttcgaagtttttagaatgttattcgtatttcgagggttattaacgttttttgaaataatttgttgtatgagagtagaggggagatagagagagtttaattataggtattcgcgtgtagttaaaaggagggttagagatagtagcgagggggacgaggagttacgggttatttgtgtcgggatttcgcgttgtggtattgcggtgtaggcgggagtagtttttttgttttttattgatttatttttttttttttttttttttttttttttttattttttttttttttttttttttttttggaagttttcgggttcgagggaaggaggattttgcgaaagttgcgacgattatttttttttggggttatggattcggacgttagtttggtgtttagtcgttcgtcgtcgttagagttcgatgatttttttttgtcggttcggagtaagggtagtagcggtagcgtttttattgggggtatcgtgttttcgtttatttcgagtgattgttcgtcggagttgagcgtcgagttgcgcggcgttatgggttttgcgggcgcgtattttggggataagttaggaggtagtggttttaagttattttcgtttagtatttcgtcgtttacgtcgtcggcggttgcgtcgtttattaagaaggataagaagtaaatgatagagtcggagttgtagtagttgcgttttaagattaatagtcgcgagcgtaagcgtatgtacgattttaatatcgttatggatggttttcgcgaggttatgtcgtacgtatacggtttttcggtgcgtaagttttttaagatcgttacgttgttgttggcgcgtaattatatttttatgtttattaattcgttggaggagatgaagcgattggtgagcgagatttacgggggttattacgttggtttttattcgtcggtttgcggcggtttggcgtatttcgcgtttttgttcgtcgttatcgcgtattcggtagtagtagcgtacgtcgtatattatttcgcggtgtattattttattttgtcgttcgtcgtcgtagcggttgttgtcgtcgttgtagtcgcggttgtgtttagcgtttttttgttcggattcgggttgtcgtcggtcggttttattcgtttatcgtacggtttatttaagttttcgtttgttgtcgcggtcgtttcgttggggggcgggggcggcggtagtggggcgagcgggggtttttagtattggggcggtatgttttgtttttgtagtatgtgttaggtgtcgtcgtcgtattattacgtgtcggttatgggcgtcggtagtttgtcgcgttttattttcgacgttaagtgagtcgattggcgtcggcgcgttttggcgataggggagttaggggtcgcggggaagcgaggattggtttgcgttgggttcgggagttttgtcgcgaggaggggcg

SEQ ID NO: 6694 - DNA, 1423 bp, synthetic construct
  misc_feature 1..1423: note = Description of Artificial Sequence: Synthetic polynucleotide
  source 1..1423: mol_type = other DNA
tcgtattcgattgtacgcgtttttttgggatttcgtattggcgagtcgtttttttcggcgttggacgttttatttgtttcggcgtcgtcggaagagttttgtagagtgagtttttagggttatttcgttgttttttttttcgttttcgtagtcgttgtagttagcgtgggagtcgggtaggtcgcgtggggcgttggatttatcgagaggttagcgtcgtcgtcgggggagggcgtgtttcgtacgtgtgtgttcgcgcgtgttcgcgttcgcgtgtgttagcgcgcgtgttttggtcgtgcgcgtcgagtcgggtcgtattaattttttcggcgtcgacgggtttagtttatggtgtgggcgtcgggtttagggaggtttcggttttcgttaatcgcggagtagggcggtcgtttcgacgcgcgatttgcgaattcggagtgcgcgtcgggggcggggtagggacgcgtgggcgggaatgtacgcgcgtggttaggtgcgcgtgggtgcgagcgcgcgggagttttcgagtgcgcgcgtgttcgtgtgcgcgtgggtgtgggtgtgttcgcgtgttcgtgcgcgcgttttcggggttaagagcgcgggtcgcgcgggtaggtttggatattacgcgttttgttcgggtttaggacgcggttggcggtttcgggaggaagaggaggaggaagaggaggaggcggaggaggaggaagaggaggagggaggcggaggagtagaggttgggacggtcggaggagagagttcggttttagtaggaaaggaatttagtacgcgattattggaggggcgaggagtaagggaaggattagaggggaggagagggggttaggggagggaaagtgtgggagggggagtcgcgggggtgcgcgttttttttaattcggggtcgtttttagcgagaagtgatatttttttagttttattgaaaatcgttgtaaatattgaaaatagtaaaagtgaaaacggttgcgatattaagacgtttataaaatgatcgcggattgttttcgatgttgatgagaattgggacgacgtcgcgtagagcgttcggagggagaggcgcggtgttcgggatttcggtcgtggggaggagtcggatatagtcgtcgggacgcggggatgtcgagggtatcgcggtttggtttgatcgacgtacgcggtgatagtcgtttttgggagacgacggcgtttgtaattagtagtttttaaagggtgtagttaggaggtttagtttgttcgttttcggggttcggggttaagttttttttagaagttttcgtttttacgcgaatttcgatcgtaaaatttagtttatttgagcgtcgtttttttttttttatgtttttcgggggtcgttacgatcgtttcggagcgatttttaggaatttgtttcgtagcg

SEQ ID NO: 6695 - DNA, 1384 bp, synthetic construct
  misc_feature 1..1384: note = Description of Artificial Sequence: Synthetic polynucleotide
  source 1..1384: mol_type = other DNA
gcgtcgcgtatagaaaaggaaattttatttcgtttgttaagggtagggtcgggttagtggtaggagaaggttagttgcgggcgtaggtaggagcggatttaggagtcgcgtcggggcgtagagtcggacgtttcgaggagtttgcgcgtcgcgttattcggcggaagtcgcggtttatgcggggttttttaggtttatttaacgtttcgtaggcgtggttggtaggaggggttcggtcgtgtttagcgtttttagacgtagttttttttgtcgtagtcgtcggtggtcgtgggtcgtcgcggcgttgagtattttacggggaagttgaggtcgggacggtcggtgtagatttaggcgtcgtagtataagaggtagtcgtttattatgagtagcgcggtggtcgtttagtcgatgtatagcgttgcgtttagttcgtatttttgcgatacgggtatagacgggtcgtaaaattcgcggacgataatgttggcgaattagtagagtggtacgagcgttagtagttcgtaaaataggtagagtacgtttttcgtgagggttatacgcgttttggtcgggttcggggttacgtaggtggtgtattgcgcgttcgttagggttacgaagagcgtaacgaacgttagtagtacggcgtttacggtgagcgttcgcgtcgtttgtatttcggtgtttagagttagtatcgagtcgtatattttgtattgtatgtgttcggtgttttgtattacgtacgatatttatagttttttttaggtggtttgcgtcgttacgatgttgtggtttaggaaggcggttatttgttatatgggtagttcgtacgttaggattagatttttttagtttattaggtatagtattaggtttaggatttttaacgttgcggattttatggttagaggcgagacgcgtattcgaaggttcgtagaatttttaaggtcgtgttgcgcggcgttttgggcgggttttggtgtttttgcgttcgcgttttcggtttttggttttagttcgtttgtttcgcgggtttgtcgtattttttgggtttgttagtttttgtcggggggtattttttttgaaggttcgggggcggattttgtttttcgggttcggtttttcggttcgaagtagttaattcgtgcgcgggttatcgtgtcgtagttaattatagagtttttggtagttgaagttagggaaataacggtttttgaggggtagttgagggcgcgggatcgtttttcgttcggtagtcgtttttagttttattcgtcgttgttttagtcgcggtcgagcgtattttgggttggtttagggcgcgttttttgggtcgtttttttgcgcgtttcggtttcgttattttagaaggcgttcg

SEQ ID NO: 6696 - DNA, 1361 bp, synthetic construct
  misc_feature 1..1361: note = Description of Artificial Sequence: Synthetic polynucleotide
  source 1..1361: mol_type = other DNA
gcgttttcgattttcgtcgttgggatttttcgtcgtagtttttgttttagtttgtgttgcgggtggggtcgggttgagtagttcggcgttttttatcgcgttttttatcgtatcgttttcgatttaatttcgttttcgggcgtttattggtttgtagtattttttttttagtttgtgaagtgagtagggggaggcggtggtcggtcgtttttttttagcgtttagtttggtttcgcggcggaggcggcgtttttttcgtaggacggagttaagttggattgtcgcgtcgcgcggggcgggtaaagggggcgttgcgttcggtttcgggtagggagtgacggcggcggcggcggtttcgggcgagcgtggttttcgcgtgcgtatacgtatacgtcgtcgcgtagggatatacggatttcggtcgttagtcggttatataggcgcggagattcggttcggcgcgcgtttttcggcgtatacgttttttattttcgcgtcgcgcgggtcgcggatttgtaggttgcgcgttttttgcggagtttgtttcggttttacggataggtttcgtagtgagtaggtaagggtcgtttcgtcgcggttgtttttttacgtttcggtcgttttttttttttttagaattttcgtttagtcgggatttcggatttttttttttggtttggcggttttcgttagtcgcgatttttatcgacggagagcgggcgagggtcggcgttaggtaagttttttagatttgaaatgaagttttttttcgtcgttgcgttttttttgcgcgttaggttgatattttttaatttaagtgtttggcgttgcgttcggggcggtcgatcgtcgtagattgtcggggtgggggtcgatttagttattttacgttttttttgatgcggagaagggagattaggggggtaggtaagttatgcggtcggagggattcggagggatatgtttttttatttttaggtggacggacgtatttacgcggatcgggaaggtagggttggagggtttttcggggttaggtatcgtaattcgtacggggtttgaggggtgggtaagtaatgtgttaggtgggggttggggtaggggttagtgtagaatgtttttttgtggtgatatattcgggattgtttaaaagagtgtcgttttcgtttttcgtggcgcggaggggttggggttggggatgttagggttttagtggtttttagaagaaacgttttgcggggtttgtggggaaacgtatcggtttttttaggttgaagtgggttcgttgagatttttgtttgtcgttttagaggtagaagtttttgcggcggttgcggggggcggaggttatattttcggcg

SEQ ID NO: 6697 - DNA, 1175 bp, synthetic construct
  misc_feature 1..1175: note = Description of Artificial Sequence: Synthetic polynucleotide
  source 1..1175: mol_type = other DNA
acgttgtttggtcggagcgttttataattcggttaatggggagggagtcgttcgttaagcgtttgttaggtttcgattaacgggatgggtttttttcgttagagtatattgttttaatttaggagcggttgtaggatttgagttaatgagacgtaattttcgttagtcgcgcggtgttcggttaataggaggtcgttcgtgttcggtagcgtgggaggtgtggggtggcgggcggcgttgcgaagttgagggagttgcgcgcggacgagttatagtttgttatagggtgggtgcgttcgttttgtttagttcgttcgtcgtttttcggttttttttgcgcggcggtttttggatgggggttttttttcggggggttttaggcgcgggtaagtcggtcgtcgtttttttaggtttcggggtttcggtcgttgggggcgcgcgggcgggcgaggttggcggtacggagcgtttggttttttgtgggggcgtcggtttttttttggggttttgcgcgtttagggttatttcggcgcggtttaggttgcgagttttgtcgcgtacgttagcggttaatatggaggtagtttcggcgcgtttcgcgggggatcgtcggcgttcgtgggttttaagaggtcggggcgcggcgcgcgttcgggttttgggcggcgagggcgtagcgagggttgtcgttttttcgggtagtttcggggggcgcggcgttgggtcgcgggttcgggggttgtcgtgttcgatcgtatgcgtcgatttgtcgttgggcgttcgtttttttttgttggggttgggcgcggtttcggagtttggcggcggtggtgagggcgtacggttagttgtagcggcgttgtgtttgtcgtggatttaggatattttaggtttggtggcggggttaggtggcggcggttttttgcgttcgggcgatggcgatagcgataggtttttaatttcgtttcgggttcgggtcggtcgggtttcgcgtcgggttacgcgcgcgtatagagttttttcgggtttttttacgttggacgtcgatcgttcgttgtcggaggacgcggggaggggtatcgttttttcggcggaggttggcgtggttaagggtataggggacggcgtcggcgtttcggtagggatagtggggatttcggggtttcggtttttcg

SEQ ID NO: 6698 - DNA, 1087 bp, synthetic construct
  misc_feature 1..1087: note = Description of Artificial Sequence: Synthetic polynucleotide
  source 1..1087: mol_type = other DNA
tcggtattcgcgtttttgtgtttttggtggtttcggcgttttttcggagcgcgcggtatgtttgtttttatacgtttagtatttttgtttttagagtaaatttattttttagggtatacgtagaggggtagttaggtatcgtttttattttgttttatttaggtcgcgcgtatttcggaaatttggatttcgcgattagtttttttttgttttttttcgaggattttagcggtagtgtgttttggatttatttgtagtttttaagtttttttatttttgcgttttttttaggcgtttttgagtttgtagagtttacgatttttaataggttgtttcgaagtgtttttttttatatcgttttaggaatgatttttttatattcgtttttcgtaaaaaaaagttggtttaagatttaggcgttttaaggattagtttaggtttttattcgacgcgggttagggggtgttgttttggtagtttcggagtttcggtaaagagtaatttgtagggaggcgttacgcgcggtttttattattcgttagagattcggtttatggggttaaacggaggggtttgtgtcggtcgatattttaagttttgtcgcgtttttttcgtcgtttatcgtatgggatcggcggaggagaaggcgcggtcgcgggttttttgaggtagcgtgtttcgtttcgggaggaaagtttgtgttatatagaggaggcggcgcggggaggatttgggcgtcggtgggtggaggcgtgggcggtggcgtcgcgtggtcgtgtgtttgttttttcggcgatcggtgcgtttgtttttcgtcggagttcgcggtcgtcgcgttttcgttcgttgcgtttagcgttcggcgcgtttcggttttagtttcgacgcgttttcgtcgtcgtcgtcgcgcgttcgtcggttatattttttttttttttgaatttatgtgtaaaatatgttacgttgtatttttagggaaagtttcgcggtttttgatagtagtcgttggagcggtgggttcgtttagtttttttcgcgttttttcggagtttcgttcggttatttttacgcggtcgagttgtaagcg

SEQ ID NO: 6699 - DNA, 693 bp, synthetic construct
  misc_feature 1..693: note = Description of Artificial Sequence: Synthetic polynucleotide
  source 1..693: mol_type = other DNA
tcggtagttaacgtttagttttcgttttttttttttatttcggatttcgtaatcgcgaggcgagagagtagcgtcggcgaggtattggttgggttttgattgttacgttaattttttgttgttttttttagtttttagtcgtttcgtttttttttttttatttttagtttgggtttggaggcgatttttttttattgattgagtcgattgtatttttgggtaagcggcgttttgttttttttttgtttttgtttgttttttttgtaaggttacggcgtttggagtagggtttgtagcggtcgtcgtagtaacgcgagttaagtcgtgtttcgtacggtcgttcggggtcgtattttcgttcggtggcggcgttcgaagacgttagtcgcgttacgtattgtttgcgtttcgcgttttagtcgtcgcgtattaacgtcgtcgttttcgtcgggagttaagttcgtcgggtcggttcggttttaggtgggtagttcggtttgtagttggttggaggtggcggtcgttgtagttttggtagcgggtatatttttaagtatacgtatttaacgttttttttttgagttacgaggatggagtagttatttcggttcgggattggcgtaaggtaaggtgtagtcgtttgttgtttttcgtagagcgcgggattatttttttgttcgggtatttaggtcg

SEQ ID NO: 6700 - DNA, 5065 bp, synthetic construct; identical to SEQ ID NO: 6668
  misc_feature 1..5065: note = Description of Artificial Sequence: Synthetic polynucleotide
  source 1..5065: mol_type = other DNA

SEQ ID NO: 6701 - DNA, 307 bp, synthetic construct
  misc_feature 1..307: note = Description of Artificial Sequence: Synthetic polynucleotide
  source 1..307: mol_type = other DNA
gcgcgggggtcggattatgagtcgttgagtcgggtaaattttaggttatcgagttagcggattttcggagcgtagttttgcgtcgcggagtaggttttaattaggcggcgaggcggttatacgtatcgagttagcgattttcgggcgacgcgcggggttagggagcgttacgatggaggcgttaatggttcggggcgcgtttacgggttttttgagggcgttttgttttttgggttgtttgttgagttacgtcgtcgtcgcgtcgtcgtttattattaagtttttcggcgatgtcgtttttaaaacg

SEQ ID NO: 6702 - DNA, 1563 bp, synthetic construct
  misc_feature 1..1563: note = Description of Artificial Sequence: Synthetic polynucleotide
  source 1..1563: mol_type = other DNA
tcgggtttcgaaaacggggggagggggacgacgttttagaggtttttgagtttttggtttttttcgattttaagggtttttttttttcggtttttaggcggcgacggcgggtagcgcgaagtagtaggcgtaggggcgttgggatggggatgtttttgtaggtttaaggttttttttgggagtttaaataaagattacggtagcgtcgttttttttttcgggaattcgacgtcgcgcggttatagggggtttggaggggcgggtagggtttcgtagcgtatttagtatagttcgcgcggcggagcgggtgagaagtcggcgggggcgcggatcgatcggggtgttttttaggtttcgcgtcgcggttttcgttcgttttttcgttcgtttatcgggtattttagtcgcgtagaaggcggaagttacgcgcgagggatcgcggttcgttcgggattagttttaggttcggtatcgtttcgcgggtcgagcgtttatattcgttaaatttacgcgggtacgttttcgcggcgtatcgtttttagttcggttttcgtttttgtagtcgcgggtacgcggaggggtttttggttgttcgtatttgtattcgcgcgtcggcggcgtcgaagtttcgtttttcgtttgcgcgtttgtttcgttcgtattttcgcggtgagtcggcggcgttttcgtttttgagtttagggttagtttttttcgtcgtcgcggttgttgcgcgcgttttcgtttagtttagtttagtttcgagtacgattttagttttacgtacgattttagtttcgcgagtttcgtatcgattcgttttcgttttatttcgttttcgcgggggcggcgttttttttttttcgcggttttcgtttttttttttcgttttttcggtcgcgttggggatttttagtcgtcgttcgcgattttttatcgcgacgttcggaggcggcggggtttttttgttcgggcggcgggtacgggggattattttttacggtgttatcgtatttatttcgcgtttttttttcgttttttggagtttatcgggattaggtggcggcgggtgtttttttgggggtgcgcggttatgtaattggtggatttttttaaatcgttttggaggggggagcgcggcgttgggggcgggagagcgtttttggttgtgagttgtttttgtcgtttcgtttcgcgtttttttgtcgtttcgtttcgggtttttcgcgttttttttttcggttcggtcgagcgcgttgtttcgacgtcgttatttagagtcgggtcgcgtcgggcgtcgagatgaaggtgttgggatatcggttggagttgtttataggtatcgttcgtttgtttcgtagtcggtcgttatttttcgagttggagcggatttcgggcgcggcggtcggggattggggcggttcgggtttgagtaggaaggggtgcggattttaattaagttttagttttgtgttatttgtttgtgtgcggagtttagtttcgggagaggatttgaggttgtggcgagtttttggcgttggcgttcgggttgcgggagtatcg

SEQ ID NO: 6703 - DNA, 512 bp, synthetic construct
  misc_feature 1..512: note = Description of Artificial Sequence: Synthetic polynucleotide
  source 1..512: mol_type = other DNA
tcggtttaagttagcgtatttcgtcgattttttgtttagtttaaatttcgaggttgggtaaggtattggatttacggttggatcgattcggggtagtttttgggtgaatagtagcgtgttcgtcggtagagaatcgagattagcgagtcgattatgcggttgtatagattttacgcgcggtcgagcgcggtggtttgtgggtttttgttgttttttttttagggttattatgaggttttcgcggaggggtgatagggatcgggtttagatttgttaaatgttgcggaggtagaatttgatagtgcgggagggtaggcgtttgggaggtaggagttggtggagatgatagcgtggaattcgtgagttttacgtaacgtttttttgtcgtttagggtgggtttttagaagtatagaaatggtcgggttgcgggatattatagcgaggaattagcggagtataggggttttaggagcgtcgggatatgttaggtcgggtagatagtttcgggtcg

SEQ ID NO: 6704 - DNA, 1070 bp, synthetic construct
  misc_feature 1..1070: note = Description of Artificial Sequence: Synthetic polynucleotide
  source 1..1070: mol_type = other DNA
tcgcgagaagtataaaaggggaggggcgggtcgtgtagttaagaggacggttaaacggggaggttttttttttgttttcgtagatgttggagtagcgattggttcgggagattcgtgttttggagagaagtaaggagtagttgttttcggagagtgagtttttcgcgttaggtgggcggggggagggggatgtgttcgggtttcggttttgtttttgacgttcgtttatcgatagggaggttggtgcgcgttaagttgcgggaggtggagcggcggttgtattcgtcgtttgaggtcgagggcgttatggcggtgaatgacgggtgagaggggaagggaggagtgggcgaggagggtaggggtagggcggaggggaattcgtttaggtttttcgtttcgttttcgattgtcgttttttcggtttgtgtttttttcggcgtcgtcgggttttcgcgtttcggtggtttttttttcgttttttggattttcgtttttttttttttgttttttcggtttttttttcgtaggttgaaggcggagttggagatattcggggagtaggttcggagcgttttcgaggtcggggtcggcgagggagaggtagggagttcgaggaagggaggcggggcgggtagggatcgagttaggagagagcgggcgggggttttgggagcggttttcgagagtggggtttgtggggagtagggcggtttcggggatagaggaagtcgcggtggaggtttagggtagacgcgggcggacgcgaggagcgtaggaatttggttcgtagttttatttagttttcggtaggtcggatttgagttttttcgcgttcgcgacgaggaggatttcgagtcgtcggtggttgtttttgacgttttttaggttagtaggattcgttcgttttcgattttttttcgagattcgttaagaaataaaggcgatgattttcgattatgttcgcgtttttcgcggagtttgtgttatatcgtggagcggggcggggcgtgttgggatttcgaggcggggtttttgtcggattttttttattagtcgagtttcgggcgtcg

SEQ ID NO: 6705 - DNA, 766 bp, synthetic construct
  misc_feature 1..766: note = Description of Artificial Sequence: Synthetic polynucleotide
  source 1..766: mol_type = other DNA
acgaattattatttaattcgttggcgtcgttgttgttgttattggttaaggtcgcggcgatcgacgtatagtagaggtagtatagttggagcgtttgtaagagaaaaggtgatatcgcgcgtgaggggcgcggcggggttggcgtcgggcgttttttgttattcgttttcggagtttcgttcggcggtatttgttttggttacgcgttttagtttcgttaggtttttcggcgggttcgaattcgtagtcgggaaggtatacgcgagtaggagggcgtattttatggttaggtgcggacgcggcggttgcgggtggttagacgcggtaggcggagcgtacgggcggcgcgtatttttttcgcggtttcggagttcggcgttttaggtgcggttttaggtgagagtcgtcgtcgtttatatcgtagcgggggcgcgttgggattttttttttttcggtcgtttgcgcgtttttttttttttcggcgcgggtttgtcgagttgtagtttgcggtattttagagggtacggggggttttttgggtcgggattggagcgtaaacggttgggagattgtcggtgtttgttcgttcgtttgtgcgtttgtttgtgtcggtgtgagcgtttgaggcgatggggaagatagcgttagttggtttttttagcgcgtcggagtcgagcgttcgtttttttatcgcgcggtgattggcgattagcggttttcgggttcgttcgagttttcgggttggtgtaagggcgtgggattttcg

SEQ ID NO: 6706 - DNA, 363 bp, synthetic construct; identical to SEQ ID NO: 6479
  misc_feature 1..363: note = Description of Artificial Sequence: Synthetic polynucleotide
  source 1..363: mol_type = other DNA

SEQ ID NO: 6707 - DNA, 2919 bp, synthetic construct
  misc_feature 1..2919: note = Description of Artificial Sequence: Synthetic polynucleotide
  source 1..2919: mol_type = other DNA
tcgagtcggattttcgcggagtatttattagggtggttagttggaatcgcgtgttagatttatatgaaaaattcgggagaggacgggttgtcgttgttcgagtcgttttttcggaagtcgttgtttattaatttttcgtatttttttttgtacgcgtttttttcgcgtattagtttggagattttttgtttgaggtggtcgatttgttgtagtagttggttttttttcgattttaggacgtgtttttgttgtatttttttgaagcggtaggattgggtatagtcgcggttttttagggttcgttttttttgttttagtcggattattttttttttgttgatttcgcgtagttgtcggtttagttcgcgtatagatatggttattagttgttcgtcggagaagcggtcgtcgaagtgtaggtcgtcggcggcgtggtgcgggtgtagggcgtttttcgttttcgtcgcgttttcgtcgttttcgtcgtcgtcgtcgtcgtcgtcgtttttagcgttggtcgggttatcgtcgttcgcgtttttagcgttatcggtcgaggcggtcgcgttgttcgcggcgtcgggcgcgtcggtcgtcgggtggtggtggtggtcggcggcgtggtggtggtggtggtggtagtgcgggttcgcgtcgttttgcgcggcggtcgcggcgattacggcggatattacggcggcggcggggtttattttttcgtcgttgtcgtttaaggaggcgtcggtatcggtttcggtcgtcgcggttagttgttgcgtttcgcgcgcgtagttatcgaagtcgttttggagttggtggttgttgttgatgagcgtttcgatcgcgttttcggggttgaagtttagcgtttcggggtttagttgttgcgggtagtcggttatttagtagtagttttttaggtgcgttttttgttcgttgttcgagttcgggttgggcgtcgagaagttgggggaagggggtatcgagttgtacggcgtgtttatgggggtggaggatagcgagttttcggcgatgagacggtcgtattggttgatgatgcggtcggtttttatcggttttttttttattttaaattttattagatcgaagttattaatatattttatggttaggggattggtgggtaggtcggagttgtttattgttagttttgatgttatttttttgtcgtcgtcgtcgtcgtcgtcgtcgtttcgttagatgggttgtaggagaggggttagcgggttgtgttgggtggttagcgggtgagttagtttgtcgggttggggcgtttttagtttgcgcggcggtggttggttcgaaattttcgagcgcgtttatatatatattttttcgttttgttcgcgtttttcgcgttcgtttttttttttttttgtttacgttaatgtgttttttcgttcgtttcggtttttttttgttcgttcgtttttttgcgcgttgagtcggcggttttaggttcgggaagatttttcgcgagttgcggtggcggcggtggtggttgcggcggcgaagttggaggagttcggttcggtgcgcggcgtttttcgttcgtcgtttcgttgcgcgttttgtataaggaagggttcgtttcgtcggttcgggttgtaggtagggcgcgcgcggcgttcgttcggggttggaggcgcggcgggcgtttgttcgggcggcgcgggttttggtacgggggagttaatattttatgtttttcgtttttttttttgtttggttttttttattatttttttttttttttttttttttttcgcgcgttttttatttttgtgtaaagtgtaaggtagaggtgtagttcgattggaggagagggaggggggagtttagtttttttttgtttttttttaaaaaagtaaaatagcgaagttttggggaaagacgaggtagagagtaaaggggggagggggaggttaagtcgataagtagttcgagttatagttagaagatgaaaaaagattttaaagtttttgatttagtaagaagagtttaaagtaattgttgagttttatagtattcgtgacgttaggtttaaatgagaaattgattggtatttcgggttaatgggaggcggcgagagcggtcgcgattagtataatagtatagaaataaggaaatttttcggagttgttaattagggtttaattagttgattgttagttgggacgggttggtttaattttttttgcgtcgttgtttattcgggagggaacgaggttcggcgtaaagtttggtgtaagaggggaaggagtttttttagaggggtttcggtaattcgggcggatttgggagggcggtttgtttttttttggagcgcgagataggttttttattcggagttttagttcgttgggggtttattcggttgggattggtttgattttttttttttgtttgttttttatttttaggattgtgaattcgttttttagtttttttttttcgtattaattttggtatttaggtgtttgtcggggattttttttttttgagtttggtcgtgttcggcgtttaaatttggttttaattttttgttcgtttttcgggcgttcgtgcggggaagggatcgggaagggagggatgtagtggggtgttcggatcggggttgcgggttgggcgtcgttcggttatgcgtttgtttagaaggttgggtattcgtggagagggaaagtttattttatttttttttttataacgaggtaaaataagttgtttagaggttattttttacggagatcggttgttcgttggcgtcgcgtgtttttggatagagcgagcgtttatgcgagataatttcggggaagtttaaagttaggttagtcgggtttagtttttcggtttttgattggtcggagtttggtttttgagatttatattgcgcgttcg

SEQ ID NO: 6708 - DNA, 2267 bp, synthetic construct
  misc_feature 1..2267: note = Description of Artificial Sequence: Synthetic polynucleotide
  source 1..2267: mol_type = other DNA
tcgaaaaatcggttttcgttttttattttcggtcgattcgttcgtcgaggtggttgttttgggaattttttgtttttcgtttaggagaggaaacgtatattcgggtcggacgtatagaagtcgtattttggttggggttataagtttgatagttatcgataagtttttatttataggagtacgcgacgtgttttttttttaagggaaaggtttttttttttgggttttggaatgggtttgaagttagtcggttttagtttatagggtgaatgaggggtgggtatagttcggtcgcggttttagtatatacgggcggacgtaggggcgggggagcgttagtttcgtagtgtgttcggagtttagcggttttgagtcgtcgttattagtttggtcgttttttgttttacgtaagtgaagttagtcgtttagggttgcgtttttagttatttgtttttttatagaggtttatattttttttttcgttgtttttatagtttggttcggggtttgtttaatatagatggacgttttttaaaggttgtgcgcgttatcgttgttattcggttgtgtcgaggttcgcggtcgttaggattttagggatcgtatgttaggtagggtttaggatttttagcgcggattatttttagtttgcggggtagcgtcggggattcgggtaggagggagaggagtaggagggagttttggatttttttttttagatcggtcgtcgttatttttgttttttttagggtcgttttcggtttttttattttcgggttttcgttacgcgggtcgcggggtttttgttaggaaaatcgggcggttttaggggagttcgcgagatttttagcgttcgggcgcgtcgtttttttcgaagtttcgtcgtagttttcgtaggttaggttttgtttacggggggttgcgtttagttcggatgggtgggcgttgggcgggttggttttattttgtcgtgggtattaattttgaaaacggttcgtgcgttcggcgcggttgcggcgtagattcgggaacggtagtcgcgggcggagtcggggtagagcggcggcggcgcgcggggcggatacggtatttacggtcggggggttcgggggattcggcgggcggcggacggcgtatattcgcgattcggttcgggagtcgttgttttttttagtttggttttcgtttttacgatttaggggcggttgcgcgttgttttttggcgtcgtatcgggtttaggcgcgcggcggggttggggcgcgcggggcggtcgtttgggttatgtcggggattcggtttcggttatttcgcgcgggaataaagcgcgtatttcgttcggggcggttttcggttttcgcggttcgcgtcgggtttagtcgtcgcgtttgtggttttaacgtcgcgcgttcgttcgagagttttacggggtttcgcggttttcgtttcgcgcgtttcgttttcgttttttgtttttcgtcgtcgtcgttgcgttatttgtttttcgttcggcgtttatggcgtttagtttcgtttcggggcgtcggtttggagaggggtttttcgtcgtcgagagtcgtttttaacgttttcgttatcggggcggcgttttaagaattggttgtgggggtcggggttgtgcggagcgtcgggagtagggagaggggagaggggcgcggggagggggcgacgggcgcgtcgttttttgcggggggcggcgcggggaggcgtaggcgggggcgagcgaagaggttgaggggtgcgggcgtcgtggagggggcgcggttttggggggcggttttcgtttgcgtttatttttttttttttcgtaggtcgcgtatatttatttcgtagtagtcggcggtcgcgggtttcgtagttttagaatcgcggtttttggcggtcgcgcgggaggttgaacgggagttggggggtgtggggggggtggggaggtggggagttgggggggaggtcgttttttcggtcgtcgttttcgttttttgtttcgcgttcgtttttagcgcggcgtttggttcggtttggggttattttcgtgcgtggtcggtaggggtcgcgtttttttcgtttagtttttcgggcgggttcgatgcgaagttttcgtttttcgcgggtttcggggttaggttatttgtatatattttgtatttatttgtatatcgtgcgttttatgtttatttgtagaaacgtttcgagtcgttgttttgtttttttcgtattttttttgtcggtaggttttttttttcgttcg

SEQ ID NO: 6709 - DNA, 265 bp, synthetic construct
  misc_feature 1..265: note = Description of Artificial Sequence: Synthetic polynucleotide
  source 1..265: mol_type = other DNA
tcgcggttcgcgtgggttttaggcgcgggatggcggcgtttagtagcgcgggttcgcgtagggcgcgtagcgttgggggtaatagcgtggggttcggtcggtagtggggcgcgggttgcgcggtaagtagtttttcggagtttagtattagttttagtattatgtagggtatttacgaggcggaggttagtaggcgtcgggttcggttaaagtcgttcgtagtttttagtattcgcgttttttgttttatcggtcgtaggttgcg

SEQ ID NO: 6710 - DNA, 374 bp, synthetic construct
  misc_feature 1..374: note = Description of Artificial Sequence: Synthetic polynucleotide
  source 1..374: mol_type = other DNA
tcggggagggtagtcgttcgtttttttcggcgttgggagttttcggttggtattgcgggaggagttttcgggtgattcgcgggttttgaaatcgtcgttcgggagttcggggtttgcgttgcgtttacggggcgagcgagggagaattgacgtttttcgttcggattttttttttttttcgagaattaggtaggtcgcgtttatttttaagttcgattgttttcgcggtaatatttgtgggaaatattacggtggattttgtgggtcgttgagttttttgattttcggtttgttttattttgttttgttagtgggttttgcgttcgcgttaataattcgaatgggtacgtttttgcgttttagaacgttgttcg

SEQ ID NO: 6711 - DNA, 1133 bp, synthetic construct
  misc_feature 1..1133: note = Description of Artificial Sequence: Synthetic polynucleotide
  source 1..1133: mol_type = other DNA
tcggcgcgggtcgttttcgtttttagttttaatgttgttgcgttttaggtcgtttcgtttttggtaggttttagtttttgatttagtttttcgtttagtttttgagagtagttttttcgcgggattggtttgtgcgcgcgcgtttgcggtatcgtcggattaggggtcgttttcgagcggggagtttaggaggacggttaggtggtttgaggtagaggcgttagggaggatggagaagggatatttagggtttaggcggggtgggggtagggagggcggcgggatagtaaggaagtgggtgtatttgggtgatttagttgcgtatgagcgggtaggggttcggggcgcgcggattttaggcgttggattgcggcgtggagtagcgttggggaaatcgcgtcgggtttagcgaggattgttgggcggggcgcgcgaggagcgaagttggtcgggggcggggtttgagtcgtgtcggggcggggtttagattcgggttggtcgtggtgggcggggtttgagtcgtgaaggggcgggttttgtaggggcggggtttcgaggggcggagtttgcggtgattagcgagggggcggggtttagagttattaagaagcgggatttagtgagggttaaacgtggggcgtcgggggcgtggcgcggggcgtaggtgtacgtaggttggtcgcgggcgcgcggggttcggcgggagtttcggggtggttttcgcgtggggtcgggggcgttcgcgcgggcggggcgaggtcggggagggtagttgttcgtttttttcggtattgggagttttcggttggtattgcgggaggagttttcgggtgattcgcgggttttgaaatcgtcgttcgggagttcggggtttgcgcggcgtttacggggcgagcgagggagaattgacgtttttcgttcggattttttttttttttcgagaattaggtaggtcgcgtttatttttaagttcgattgttttcgcggtaatatttgtgagaaatattacggtggattttgtgggtcgttgagttttttgattttcggtttgttttattttgttttgttagtgggttttgcgttcgcgttaataattcgaatgggtacgtttttgagtttaagaacgttgttcg

SEQ ID NO: 6712 - DNA, 2358 bp, synthetic construct
  misc_feature 1..2358: note = Description of Artificial Sequence: Synthetic polynucleotide
  source 1..2358: mol_type = other DNA
acgatatttcggtttgttgttatggaaataggggcggattaaggttggagcgtggagcgtagggattaggtttttcggttatttgagttttcgttttagtcgttttcgtagggtcggggtagttagtcgtaggcgtcgcggttttttagttttttggtcgggttaggcgcgggggggatttcggcggggcgttatagtttgttcgggtttgggaggggagaggtagacgtagaggttggaatagttggtggcggggttcgtgggttttcggcgtgattatttgtttttttagggttcgggggacggcgtttcgcgtggtaattacgtgggggcgcggcgggattttttcggtgttcgtattaattttgtcgcgtttcgtatcgggtcgggttgttggggcgtttagttacggtggtcgcgaagttagttgtttttaagttgagttgtgtatcggtcgcgtatattggcggtacggttttcgcgttttttcgtttttagtataatgaaagtttgaggaattggatattaggcgttggtcgttttttatttttagtcgttgggtgtttagagtttatttttagcgattagagtagaattgtagagaagacgttcgcgttcgggtttcgtttggggagttagggcgcgcggggagcgttcgggtcgcgcggttattgatcgttggttgtacgggggcgtcgtgcggattcggtttttataaagcggtagaagtaagggcgtgtgttcgcgtagggaatggaggttgtaagtgtaaaattttattttagtaaagtaaaggttttaggaggtcggttttttttttattatcggtcgtttattttggttttcgattgattttttcgggtcggatttttaggtttggttattcgatttatggagaaaatttcgtgttttataattggtcgttgacgggagttgagttttagtagtagtttttcggcgggtgcgttcggtaaaatttattagttcgtcgggggttattttttagatcgggagtttcggcgtcgggcggcgttcgggttcgcggtttttttcggagcgtatttaattttaatttgtttttgcggttttaatttatttttgcgaagtatgttggttacggggtcgtcgtttcgaggtcggtttaggcgtattttttttcggggtttagatttaaatttttgggcgttagttgtagttaattcgagcgcgtcgaggcgggggtaagtcggggattcgttcgtgttcggtggttcggtttcgtaggggtatggtgagttttagtttcgcgtcgagggtatcggcgttcgtaagtaatcgtggtgttgttcggtagtttcgcgcgtttgtttagtttcggggcgagcggtttgtttcgcggagtcggcggtttgtttttgttattcggagtatttcgtaggcggttttgaggggggacgtcgttttttggtcggtcggtcgtagttttttttttttcgttttttcggattatcgtcgtcgcggttgtagtaaaagggcgttcgtacgtatcgtcgagtttcggggaaagcgttcggcgcgcgtttgtaggatcgagcgatcggcggagcggggcgttttttttttttttttcggtttttttttttttttttttttttttttttttttgttttttagttttttttttttcgtttcgtttttcgttttcgtttacggagcgttttttatataaaatttatgaaagtgtttttagttcgtagtgtcgagcgtcgttttatttttaaggtagtagcgtttagtcgcgcggcgtcgttttttaaggtgtttttattgcgttcgttttcggggaagatgttcggttcgcgttcgtttaggtatttgtttttagtttttaagtcggttttcggattattttacgttttttttcggtttcgtaggttttttggagttcgaattcgtagtttagttttcgttcgttcgtttttcgcggttggaggttatcgggagacgcggttgggacgcgaggatcgtcgtttagagtacggatcgcgagttcgttttttgtttcgttttttttttggttagcgtttttttttttagtttcgacggttttttttcgtattgaatagttttagcgaattcggttgtttcgtatttcgagttttaggatattgttttttcgtggggagaggaggggagtaagtattcggaaagggttagttgtaaattttagggagaaggaaggattcgtgcgggttcgggtgggtcgttttcgtttgggtggggtggcggcggggggtttttgattttttttggtttatatagatttcgtcggggggttcgcggaaaatggaggaggcgtcgtttggaaagcgggtttcg

SEQ ID NO: 6713 - DNA, 1050 bp, synthetic construct
  misc_feature 1..1050: note = Description of Artificial Sequence: Synthetic polynucleotide
  source 1..1050: mol_type = other DNA
gcgcgcgtttcgggagagttgtgtttttcgcgaaattcgtgcgttttagtttagggttttcgggatcggtgttcgttagtgggtataggacgtcgggtgttcgaagggttgtttggagatgtaattgattttggcgggtattagaatgacgagtggtagtagtaggagcggggtgacgaataagattacgaaggatttgaatttggagatatagtttagcgtcgaggttatcgcgcgggagggagattggcgggcgagacgagtgaggggtagttagaggcgtcgcgggtttaagaaggggttatagttttcggggattggggagggggcggtgataatttcgtttcgtacgggggcgttttttcgcggttttggggcggggttatttttcggggtttgtgggacgcgtttgtttttaattttgttattcggcggcggtgggaggcgtttttggattttaacgtttcgggttagttttttaggggtagtttgggttttagtatttcgcgttgtttaagttttttttgcgttgtcgaggtagaggtgcgtttcggggttgttaagcggggcgtgttttggttattggtgttgttcgttttggcgtaaggcgttttttcgcgttcgtatttgtttttttttgggttttgaagggtttcggatgaaattttttgtaggtttttgggttttttaggtttattttttcgattttttttttttttttatttttttattttcgttttttcggtgttttttcgagaggtgtttttttacgtttcgcgtttttcgtatcgcgggtttcgtttttcggttttttttggttttttcgttacgttcgttttattttaggtgtaggatttttttttttcgttcgtatttttcggttcggagtttttgggcgatcgtatagggaagcgaggttattgtttttttttgttttaggggttgtcgcgttttagtggacgttgtatttcgtagacgttcggcgggtagatgcggatacgcgttttggaggggttttatcgagttttagtagtcgtagttgttcgttcg

SEQ ID NO: 6714 - DNA, 1731 bp, synthetic construct
  misc_feature 1..1731: note = Description of Artificial Sequence: Synthetic polynucleotide
  source 1..1731: mol_type = other DNA
tcgggttcgtttcgtttatcggtattaggcgaggtttttgtcgtagttgcggtcgaagaagtggggttcggcgtttacggcgcgtacgtcggggtgtacgcgtaggaattttagtagcgttcgcgtgtcgtttttttttatttcgatgatgatggtttgcggtagttgtttgttgttttcgtttaggagtagcgttagggttttcggcggggtttcggttacggtgttttcggtttcggagtcgttcggattttttgataggttaggggatttttttttttaggtcgttttttcgtcgtcgtcgcggggcgcgggcggtcggcgttttcgttattgcggtagttgtaggaggcgttttttttgtgtcgtcgtcggttatatcgttagttttttcgggttttcggttaggacgtcgttattaggggttttcgttttttcgtcgtcgtcggatagttttacgacggggtcggatagggtttggtagcgttcggttaggtagtagaagacgtaaagggacgtgagtagggagtagagtattagtaagaattttcggaagatgttgcgggatagcggttcggtcgaggtggagagggtattggtcgggttcggaggggttattttagtcggaggcgacgtcgggtaacgcgtcggttatgttaggtttggatttcgataggtgttagagtattttttcggcgggttagcgcgttggacggaggttatatcgtcgtgcgtttttgtggtcgtgcgaattgtttcgggaggtagcggtcggggtttcgcggggaaacggaatttcgggggtttcgcgtaggatttttgtttttagtcgagggagcgggaaggggaacgcgggttcgtgtttaagaaattatcgttttagattcgtttaagttttgagtttggggtagttttggtttttcggtttttcgtaagagtcgtcggaatcggggttttggtagcggtgtcgaaggcgtgcgttttagtttcggtttcgagagatttttcggcgcggattttcgtttagcgattttgtattattggttcggttttcgtgagggtacgcgcggttgtcgggtttttgcgtttcgtgcgttttagatagtggcgagcgatagtgatttttagtttcggttttttttggtttttttgttcgtttgggcgcgtttttttcgttcgagtttaggtttttttagttaaggagcgaggttttttcgagtttttttgttcgagcgggagataggaggttcgtgtagagtcgtttattttttttcgtagcgtcgggttgttttaaattgtttttggattttatttgtgagtcgcgtggttgggttgggttgggttgcgcgggatttgttagcggttttcgttattttgttcgtaggcgtttatcggttgttttttgggtcgtcgttggtcgtcgttatacgtgggacgtcgagggtagtaaatttgttggtgacgttaaaggttcgggtcggattagttttcggacgagcgtagcggggcgcggattagcggttaggcggggttagacgggcggggtgggatggagaaaaggtggcgcgggtttcgtagtagtcgtttaatggtattggagagggcgggggcggtaggggcgacgttttttttttagtgttttttattttttttcgcggtttcgtttttttttagtggattcggtgtttgcggcggtttcggggttgtttgagtgatagttaaggtcggtcg

SEQ ID NO: 6715 - DNA, 3535 bp, synthetic construct
  misc_feature 1..3535: note = Description of Artificial Sequence: Synthetic polynucleotide
  source 1..3535: mol_type = other DNA
tcgtttttttgggttcgttttttgtttcgaagttaatagtaatttttgatcgttttatatcgtttagaagtttttttatattttttcgttttgggagcgggttggttgttgagttttcggagaagcgtttgtatttgtatggcgttcggggtttttggtaggtagagtagttcgttattttggaaggtcgggatcgtttattttatttcggtttatagttttttttttgcgtagttcgtttttgtagtttttgcggggaagtgtcggggttgttcgaggtttagtttttaggattgtaaggaggtagtttcggcgtgcggcggtgcgtatagtttagagtggttagggcgcgagagtgtaacgtttttttggtttcgagcgcgtcgtcgcgtttcgggagtagattttcgtttagtagttatcgtcgtttcgatttttcgttttagttgtagtttttgtcgggtaatatgttaagagtcgtcgtcgttatagttgtcgtcgttatttggggaagagtagtagtagtagcggcggtcgcgggtatacgggggtaataaatcgagttattcgggcgtttagcgtgtcggggaattttttttgcgtttattgttcggcgggatttacgttatgtgttgagttatgtttttggtcgcgttcgcgggtagcgtatggggtagcgtttgagtggcggtagattttgtttcgatgttttcggtcggtttttatcgtagtcgtcgtcgttttcgtcgtcggtgaggaggaagttcgcgttgtttttcgttatgttttgcgtttggttttatatgtttttgtattcgtgcgtcggtttttgcgtcgtcgcgtcggggttgttgtttttgggttttgggtttcgcgtcgtatacgattcgttagttttggttatagtttcggacgggacgttttttaggttgtcgtttcgggcgtcgttagttattttattggttttaggtaaggagatggtcgagggcgttgcgagttcggaggagtagagtttcgaggtgtcggattttttaagttttatttttagtttttttagtgggtttgggagtaagtagttgtcgtaggttattattatcggcgtgaagaagggcggtacgcgggcgttgttggagtttttgcgcgtgtatttcgacgtgcgcgtcgtgggcgtcgagttttattttttcgatcgtagttacgataagggtttcgtttggtatcggtgagtttttttgttaggggtagggtttttatcgtcgatttagattttgagttaagggagatatggcgtatgatagggaattggtagggttatagtttcggattattcggggtagggtagggaaattacggtagattgcgtagcgtattttgttcgggtgcggtgagggttgcgtttcgtttggttttcgttataatttatagaaagttttcgcggagtattggtgtttttgaatttattaggcgatttcgtcgtaaagaagaagggtagcgattgagatcgtttttagtaaagcgagttattttttaattatgggggtattcgattcgaatcgtattttatgattcgttttaaatttttttttttcggagttcgagacgttgggaatgttttgagtttttttggtcggttttcgtttttaaggaatttttagagtagtttttgttttttagatggggagagggggtgggggtcgcggcgtttcggcgaggtcgtagagtttgttaattttttgttatagttcgtttggttatcggaattttaagggtgttagattcgtttcgttcgcgagtcgtttgggttcgggagggtgagtcgggcgggtggttcggcgttttcgtttggcgggcgggcggcgcgcggagcgtggagttgtgttggtttttgtcgggtaaaggcgcgtattgtaatcggttggagcggcgcgaggttttgaaggcgttcgggttttcgggtatcgtcgttcgttttcgtttttttgttttcggtgttgggatagggaaagtaaggacgcgtgttttcgcggggtttttatacgttcggagtaaagaatattcggggtttattgattgagaaatgagggttgtttcgaggtcgcggttttcggaaattttgttttcgagtcgggttgcgggttaggttttaaagggatagtggtttcggggttataattattatttttgtttattgtttttcgtagttgttggtttttggggtgagttgttgggttgttcgagtttcgggtaaggcgcgagtgggtaggaggtttagatttcggttttcgataattgttttcgattaggggtttaggtaacgatttttatattttcgttggggtttttattcgtaattttagttagtacgatatttagatatttttttaggtttaattagttttatagacgtttaagatttgggaaaataaaagaggagaagataattgaatttttttttttgtgtttattttattgtcgggatttgggtgggttggagaataaaagagggttgatttcgcggattaaaacggttttttttttagtttcgttttatttttttttttttgtttttaatggttttttattattgttaggagttgtttaagtttcgaggtttagttaatcgtgatagttattttttttatcgttttcgggttgtgatttattttcgggatattggtggataagaatggggtttttggagttcgacgtttggatttacgttttggttagtcgcgtgaattttggtgtttttatttgtgtagtgggaataatgtaggttttgggtagggatgggaagagtgaatgcgttggtacggtaaggtgtttcgtaggtacgtgagggtttttttaatcgttagttattgttatcgattgtattgttatgatttttattattattattttttttttttttgggatggtgattttagggttaggcggtaggttataattagcgtttttttaggtggaattcgttagagtttcgaggtagtttaggattttttgagattagatatatttgggtcgggttgggaggaattggtaggaaaaggattgaatttttaatgttaggcggttttgaagtatttggggtaagttatggaaatttttataggaaggtttacgtagttttttaggcggttgttttttatttgttacgttttttttgattgattaaaaaacgttgaatgaagaacgaagtcgcgtggaaattttcgtcgcgcgtttgtagcggatagcgtagttcgggaggttcggttgtcgatttgcgttcgggggttgcgttgcgagcggttacgtatggcggttggattcgggcggtcgtaagggtttggttgggtcgcgggaggcgggaggtttttcgttttttcgagttatttttttgaattgataagtaggattttcgggtttagggggtatagggttcggggcggtgattcggcggatcgggttgtcggaggagtttattgtaaatgtcgtaattggttttaaatattgcgtttttggattgtattagtagtttttggcgcggtcg

SEQ ID NO: 6716 - DNA, 2896 bp, synthetic construct
  misc_feature 1..2896: note = Description of Artificial Sequence: Synthetic polynucleotide
  source 1..2896: mol_type = other DNA
gcgtgggcggtgagcggtcgggagaggggcgggttagttgagcgtttaattatagtttcggggttcggcgttcgttagttgtatttagaattttttttatcgtggttttgttttgtggcgtttaattacgtgtttttagggttttggagcggttgttgggattgtagcgaagaggggttcgcgttattttcgttaggttttacgcgtcggttttgagtgcgtttttttcggtcgtcgggaaatttagaggcgcggtttggttttaaggttttcggtttcgtttttttttgtttcggtttagttttcggttgttttcgggtcgcgatttattttttttggcggtttttgtcgtatgtttttgtgttgcgttagaattatcgagttttagttttcgttgttttttcggttagtaggcgttttttttagttggggagggttttttaaattttgtgtttttaggatcgcggggtcggtaagcggtaggatttttaagttgcgtttttgatgcggttaggggaggcgcgcgatgaaggtttttttttttttcgttttttttttacgttttatcgttattatacgtcgcgttgcgtcgcgatttcggcgttgtttgttggcgttttaagcggtttttttgtcgcggtgcgattttcgacgttaggaggattaatttttattcgttaggttttagattttacgtagatttagttatatacgtaatcgtttgtagatatttattatagttttttaagttaatttaaagtttcgtataggcgtattgtttttatatgcgtagttttacggttttatatatttattagtttattcgtaaataggtttatatggttatataattgttttttggatatttagttttacgtaggtataattttatatatatataatcgtatataggcgtaattttatttacgtagtattttacggagttatataatttttttataaataatcgtatagatatagttttacgtagcgttatattatttagttaaattgagatttagaaatatatttattagtttgtatttagatttttttttttaagtttcgtgatatttattcgtaggatagattagaaatatatagttatattgatatatatacggatttaaacgtatagttaagattttattcgtaggttcgtaagttattggaaaaatattaaagcgttttttttttttttttttttatttttgatatatatacgtttgcgcgcgcgcgtatttttatatttatatttttcgtttttaagcgcgtcggagtttcgtagcgggtgatttcgaggtttcgcggtgagagttaagggagcgttttttcggcgtttttttttttcgtttttttttcgagtttatttttcgttttttcgttcgttttttttttttttgtttttttttttttttttttttttttgagtttggggcgcgggttgcgcgtagttaagtttttttatcgcgcgttttttttcgcgcgcgtttcgcgttagtatcgcgtttatcgagtggatgcggttacggggtcgtttttaattattttttgattttcggcggtttgtgaataatggttattgagggcgttcgtaggggttgttaagaaggaaacgcggggcgcgagaggcgcggcgcgcgcgggagcgcgagggaaaggagcgagtttggggtcgttgtaagcggttggcgagagaaaggattcgtgcgagcgtttatatttgttttttttaaggattttatttggttatcgcgttttggaagaggcgagagggagagcgtgcgcgagaggagagagacggcgggggaaagggagacggcgagacgcgtagcgtcggcgttcgggagatttaggaggagttcgtaggtattgttggcggcggagttttgtgttttcggcgggttgttgtgggcgttagggtttttcgagttttcggttcgtcgtcgcgcgtagatttgttcggagttcggggttgtaggttggggtcgtcgttcgtcgcggatatttttttcgcggcgttaggattttggttggagttgcggatttgtatgtttgggggttttttacgttggttgagggaatcggttttagaagaaggaattttttttttttttttttttttttttttttttggtcgtttttggttatagtttggttgtgttggggatttttttttttttttttttttataaagtattggtgagcggttttgacgaatgtggtattggcggaaggtatggggttgagatggcggggttggtggttacggatggggaggcgagagatgttagagaaggaaggagttttgtttaagttcgtaatttgcgtttcgaagttggtcggatcggggagggcgattcgcgcgttcgattttgtttcgggtaatcgatgggaaatttttcgagagcgcggtttttttggggattcggcgtttttgacgtttttaggcgttttttcgggtcgttgcggttttttttcgtcgttcgttagcgtttaaggtcgcgttttttttattttcgtttttttttttttttcggcggttttcggatttggatagagttgtaggagtggttttaaatattttttttggagatttttttttatttttcgtacgagagtttgtttagtggtttttttgttttgcgttttagttttacgcgcggtcgagtggttaggttgataatgaaatttcgtatttttgtcggggggagtggggtggggaggaggttttttttggggttgttgattttgggtttcgggtagggggagggggtttttgggggaggggtttgttttggttagagacgtcgatttgggatggcgtcggggtagggagggggttggggggtgggcgcggcgaaggcggtaggtttgggttcgcggtcgggggtcg

SEQ ID NO: 6717 - DNA, 2567 bp, synthetic construct
  misc_feature 1..2567: note = Description of Artificial Sequence: Synthetic polynucleotide
  source 1..2567: mol_type = other DNA
ygtttttaaygygggagygtagtgtattttagtggataaattygagaatygtaygttgtttttygtttttatttttgtttttttygttygyggttttaattygggatttaaatgtaygagttyggtgaatgtttyggtaggagggygagggtttagaggtagtttgtttagtaaaaaygatagttgtgttttggtgggttttgggttattttaggtagaagttagagaagttygagaatttyggygggttggtaaagtttgtygagaagggtttttttggatatttttattaygggttttaggttygaatttttttttttatttggttttggagttttagatatagataagtttygggygygtyggygggygtatgtgygtgtgtgtttatagyggggtggtygtyggagttttttaagaattttagttttttygttttagttgttygttagttgtgagygttygtygggttyggaggttattygtaaatagttgggtyggtagttgggagtttgggaggtttttgtttagtttyggggtttygagaaaggagaagggggagyggagtggttgtttggttgtggttttttttaatttygtttgygaagttttygttgggagttyggagttttagtttttttyggtagtttyggttttygygttygtygygtttagyggtyggygtttygtttygggtttyggggaggaggygygtyggggtagtyggttaggatattgygttgttggtttttagagttgygggygygtttggtyggttttatttttygggttgttggggygggygtygttgtttygatttyggaygygyggaattttggagattyggtygtttttygttagggtygyggtgttgttttaggtttygggygggygttttttttyggttatyggtgtatttygttgttygtttgygggaagygaagaggggttttttgatttgtaatatagaggaaagygtygttttygtttagtttggtatttaygygtttataygtattyggygtyggtygggtygtttatttgagttttaaaagttgttgaatttatatggttaygtttyggggagyggggttttagatttggttygtttaggttatttgygyggygttygygttygttygttttygtttygyggygtyggttttyggttttyggttygtygtttttygtygttygtyggtygyggggygtatagygagttagagygyggtygygyggggttttatgtyggtyggygygtygtygtygttggggygtatggtttaggttgggyggttygygggggygtatatttttyggtyggggygyggggttygyggtttttttygtyggyggtatagygaaggyggtagygaggyggggygtgtttyggygttgtygyggygtagtaaagggttggggagtygyggtttygtttttyggggyggygaggagggaggtyggyggygttgtygtttayggtgygtgtttttyggygygyggtttttgtttttagtyggagtttygygtygatggggyggygttgtttagggtttggggtgaygygaygyggayggaygygagtttttttygygttgtygggtyggggggttttgttagaggtttygtygtygatyggygttatttaagttgttygggggtttygtttgagygttygttttgtagayggtygyggttyggagattggtaggaggygggtaygagaggygygyggggygagggygtygtggagygyggggygtggggaygygyggyggyggygtygygyggaggaggygygyggggatttyggggtttygtygttygygtttatygygttygtygtagagtygttygygttgtttagtygttttttttttygygtttgttttttygygygttygttttygtttttyggagtyggttttaatttygttygttyggttyggtttaygttattygtttttttygtttttygaaygggagttygagtttttggtttggtttyggtttttgttygtygttttattttgygggggtyggggtygtygygggtggtggggggygttgtgtttagtaggggygatagygtaggyggggttttttgtagtttttttttttattttyggtygygtttyggtttttattttgygaaaggttygagagaggtygtaggttaggattggatygtygggygtygtyggatggtgttgttagggtaatyggatggtaygygaagtygttygaggtttygattyggttaygggggygtttagtggattyggagagttattttggggagggggyggtttygaagaaggattgggtgggggygtatggagygggggttgygygaaaagttttttggggyggagttgagttaygygggtygygtaggagygtttgttygagggtygtttaygagggatttttttgttyggttgygygggtttttgygttgatgaagttatygygtttygggtyggagtttyggygtttttgtttygaatttagygaagttyggttttatgtttttaattatttaayggttttttatygtttagygt

SEQ ID NO: 6718 - DNA, 573 bp, synthetic construct
  misc_feature 1..573: note = Description of Artificial Sequence: Synthetic polynucleotide
  source 1..573: mol_type = other DNA
ygttgttygtygggtyggtggygtttatttygtatygygttgtttygttyggggtattatggtttggggttggattatgttttttttattttagtyggygttttttatttaygygygttgagggtgyggtgagttgagtgyggggttaagtatgttttggygtygatttygtttaggggtttaggatttggygtttaaggggttttttggygayggagattttygaygtagtagygattygyggttgtttaagttgatttygttygygtttygagyggttttgggygygyggggtttyggggattggaggatttyggggggyggygtygygtggtggtyggaaggggaygttaagttyggggtgggygtyggaygtttttygtygygtttgttygttttgtttatygygattyggygggtygtgyggaagygggggttgttgyggtttttgttgtygttttttttgttgtyggtyggygygtttygggaatyggygtttaggtagttagggtttggagagygygagygttttyggaggygygtggttagggaggatttygattttttgggygt

SEQ ID NO: 6719 - DNA, 383 bp, synthetic construct
  misc_feature 1..383: note = Description of Artificial Sequence: Synthetic polynucleotide
  source 1..383: mol_type = other DNA
ygttygtyggtttttataggggygaaattaggtatttatygtgayggygagygtgatagygttyggttygattttgtttagatgtttatagaagatggagttgaygaggttgattataaagattattaattgygtaagaaattgyggaggygyggaaagtaaggygygtttatagtygtttttttttttggaagttygygtttatttttgygyggyggtygtttyggaggygtygggttgggygtgaggaygtygtatttattattgggttygygagygtygttagtttagtygttttttttygtaggttygggggtagygtatttygtaggttttataagtygttaygttattygagggttyggagtygttatgggggtygg

SEQ ID NO: 6720 - DNA, 853 bp, synthetic construct
  misc_feature 1..853: note = Description of Artificial Sequence: Synthetic polynucleotide
  source 1..853: mol_type = other DNA
yggygyggggtgaggttygggggtygttttattgttgaggttyggtyggttggggtygtygttaggygygttggttgggtagtttttgggagatgaagygaygtaggygttttaggtattggttgtagagttygatgtygttgtgttyggygttttttatttatagyggttttatygttttggggtagygttygtagagygttagttygtgygagaagtygattatttygtttttygtgtygtggatgatgagtaygggygaygtgatttaggatattttttygatgttgygggaggggygtggagygggtgagatttagygttyggttygggtttygtttygttttygttttygtttygttttygttttygtttgggtygtttatttagggaaggygtygaagtagtaggtygttttggtgttagggaaggygaygygtatgttygaggtgagyggygagtgtagtattatygyggtatattygtagygygaggttaggtttayggtgggtatygtgtygatgttttgtyggtataggatgatgttgttygggttgatgtygtatttggtagygtyggagtagggttagtygyggttttygaygygygtatattttttttattagygggygttttygggtttagtttyggatgygattttttagtttttttatttagttaagttagtgggttaggtttaggttttatattagtttygagggttatttttagtttttaatatygyggyggtgggygaagttagyggtttygtttygttttttgygttgtygtttattggygttttttagttaggatttgtagggatttygtttayggagtgtttttggggygg

SEQ ID NO: 6721 - DNA, 1062 bp, synthetic construct
  misc_feature 1..1062: note = Description of Artificial Sequence: Synthetic polynucleotide
  source 1..1062: mol_type = other DNA
ygaggaaggaaggtgggygtagaagttattttaggygtgaygygtgaygttyggggtaygggygtyggggggyggaaagygagggttyggttgggttagggatattyggggggggtygaggttttgggtttyggyggagggaggggattgggagggaggttatygtttygggttaygygggtgattyggygggggagttgggggaggggyggyggggttgggttggggttttygggtygggattggggtygggttagtttattttttygttttggtygaagygtagttygagygtygygaygygttttaygygtaggaagtygtyggggtygyggtygtatatttygaatatttygygtaggyggygtayggagygtagtagagtygygggggygttygattagttygygtygttygttattygggtyggttygtagtttagttyggatttttygttygtygygttygtygtttgttygtygtygttatygtygygygtttttyggggtygttygtttgggtttgygtygygtagttttygttyggtggyggtygyggtygattygtgttagtagyggygtygtagttttagtygttttggaggggaagggaggggaggggagggaaggagaagagtggggaggggaaggaggaggggtaatagggggyggggaggggaggggygggggtygyggygaaaatgggagggagagggggaggyggygggggyggyggyggyggggaygttgtagataaaaggagttygygttttttygagtggggyggtttaygyggggtyggtaggygtagygagttgttaayggtygygtttttygygattttagttttttttygygtttttagttttttttygygttttygagtttatttttttttttggatattyggagttatttaaaggttttgttttgtyggaggatttygyggggtygygttttttttygttattygtgttygttgtygygtttggygtttttygagygtttaggatgttttgggggttttttgtattggygygtttygtgattgtatttatttygg

SEQ ID NO: 6722 - DNA, 918 bp, synthetic construct
  misc_feature 1..918: note = Description of Artificial Sequence: Synthetic polynucleotide
  source 1..918: mol_type = other DNA
ygygaagttttygyggyggagagygttgygyggggagataaagggaagggatagggatygtagggatagggataggagyggttgtygggttttgggttttygatygttattagatatgttttygagtagtygaggtaaagggaayggatgggaaaggaaaatagaggagyggtttagaagggyggttygttgyggtggtggggygyggattygggaattyggggygggtagggtaygggygtattttttttttttttttttttygttygaggtyggtagygtttttygtttygygttatgtatatttattgtggtgatgagagttygygtttygtgttygttayggttattgtgygtttaataaaaataaatattgtygaggagtygtygygatgyggggyggaygygyggttyggaaaggggagggggttttaggaagagttatattygygagtygggtttgggttaggggygaggggagagygttaagattgtttygtygtygagggygtygatggaggtataggggttttygtggggygtttygagagatatygtgtttggtyggygggaygtgggttggttttttattygayggagagaagyggtatttttattttygggtatygggtttgggtttygagygggggtttttggaatataaggtagtgggggtagaygggtttgggtttattttaggttgggaaggggtttgagyggggygttttgattggattyggttttggyggatygaaggttttaaaagattttgtatttttaaagatttttgtagatygttatygtttaaggygttttaggttyggttttatttatgggaagggtaggaaagaaagttgggagygttttggggygyggggtagagatagyggtgttggaggygygttgtggaggyggygg

SEQ ID NO: 6723 - DNA, 865 bp, synthetic construct
  misc_feature 1..865: note = Description of Artificial Sequence: Synthetic polynucleotide
  source 1..865: mol_type = other DNA
ygagttgtgtyggttttygygttttttttattttttttttttttyggattttygttttttygyggagaggttttgtygttttaagagtygggttagygattgataagtaataaaygttgagygttyggttgygttggagtygttyggagttaggggtttttyggggygtaggtaggygtttttyggttttygggttagtttttattttaagattttygtttttttttygttttgatayggtatttaggattttatttattgggtttaaattttataggttttttttatttaggttygttttttttttgtttattygttttygtttttgggttttttttttggggtgttggttgggagaattaagtttygttgtttattgatattggttttygtttttgyggtaggggttttaaagtggttttaggtattaaggtggtgagttgtgaggggtttyggtatttgygyggttttttygggggttgtgygggttgggggtatttagaagttyggtattaygtaagaatygtgttgttagygttttygggggttggggagygagatagaggttgygttgggtttyggtggttttttggtttttttaggtagttaatattataattttttttgggagggggttygtagaagggygygygttgtttttttygttttttaagttgtagyggggygggtygggagttagggttagggtttggagatttgggaggggatyggtgttagaagygaagagttagggttagaaagttaggttaattaaggggggggyggtgyggataaagayggggtgggggttggtyggggtagttatttagtgattttatttttggttttyggygggygygtaygt

SEQ ID NO: 6724 - DNA, 408 bp, synthetic construct
  misc_feature 1..408: note = Description of Artificial Sequence: Synthetic polynucleotide
  source 1..408: mol_type = other DNA
ygaagyggggagaattyggttgggttgayggagaygttatatygygttaggggagtaggagttttttyggagygggaggyggggygtygtgtggttgygagygygttttttggatgtttyggtyggygygggggtgggtgggygttttygttttatttttggtttygggyggttagtygyggtgtgttyggagggttttgygagggttgtgggtggygggygagttttagyggygtagtagaggaggggttttygagygagygtattagggagaagggggttygtgtaaattttaggttgaygatygygtaygygtttttygggttattagttttgtygtttttggtggggtatatygaggagatygtygtggggaatyggggatyggattgtttgatagtygagygt

SEQ ID NO: 6725 - DNA, 2245 bp, synthetic construct
  misc_feature 1..2245: note = Description of Artificial Sequence: Synthetic polynucleotide
  source 1..2245: mol_type = other DNA
yggattttgyggagtttygagtttygggtgaggygatgtttagattggygygaagyggggtgtttyggtagtagygtagaggtttattygttttttyggtyggttgtagygggygygtttatattttgtaaaattaaaaygttttggaaagygtttggggttgtaagtgaygtttgataygagyggygggtyggattgtyggtttttyggtttttttttggtttatataattygygggtygtttttatygtttaygaattttagygggtagaygttggaygtgyggtttggttatttttttaaattttagygttygattygygtygtagggtyggtygygtagygyggggatygygggtgtttaggttyggagaaygagygtygygtttttagtygyggtyggggaataggaattgtygttagaggtatygttttttttttygagattgygatattgattaagggttygtaggygygggyggtatttattttttyggattygtagttygtygyggaggggaaggggtaggaygygtttttaagattagggygggggygtgyggagtyggggagttgtttgggggygttggggygaggtgggaatttygttttagagtttttagtttyggggtygaggtttgtaggaagggygtgggaggtggaatttttttttttttaggygtttgttygagagtttagagygatttttggygyggagtyggttattygggtgggyggattttttttttygttaatatttyggyggtttygttaygatttttttttttatttgagtttttttttgtttatttaattttggttttaaaggtttagagagttaggttgtttyggagtttagtttttttygatttaagtayggtttttttagygttttygtttttattatatttatagtttagtttygtttygygttygttaggggtygggggygttagygttygagggatggtyggygggttgttattttgaygagayggagttgygggtgtttttttattttygggttygttyggttatygttttgaatgttygggttttayggatattttagagggatyggygggyggttgygggttygggyggtayggggtgggyggtygggtttttyggtygttgtttggtgaggagatgttyggttyggygtttttyggtttygyggttyggttyggttyggttyggttttygttygttttttttyggggaagtttggtygtygtttttygaygtagttyggttygyggtygttttttgtyggtttygttttygttattttttttayggttygygtygtttttygtttyggtttttygttttttygtttagttygtttttttttttttttttttttttttttttttttygttttttttyggtttttttttygygtttygtttttyggtttttttttagttttttttygtttttttygttttttttttttttttyggttygttttttgtgtttygtygttaggattttttttttttgygttyggggtttgyggtagttttyggggygygttggtagtagtggyggtygtygtagttyggggagaagtygggaatgggggaagggggtygyggtaaaggattagtttttygttyggtygaggtyggggtttgggaagttttagggatttggggtgatttgggttagggtgtttaggtgaatttatgagggygaggttattgggggttagggaatagggyggtttttattgagyggagtygtygyggaatttagtgaggttgygatttgygtttgggtagttttygttttgyggttggttaggaggagtttttygtygtttttattttagtygygtygggygttgggttygatttttagtatttttggtattgatgtgtttggtgygygttgagaygygaaygttttgtaagatgagtttttatttattygtttttttttttttttatttgtttattttataaattgagtgtttggttattttggtttaggtaagaggttggatttgggaattttttggatttgggagttttaggatgaaagggagayggyggtgttttgtaggataagygggtattgaaygttgtttaggggaaagtygggygygtattgygttgtagygyggygaaygttgttaggagttygygggtagggygtggggaggatatagygttttttttyggtyggtygagttttttgggtagyggtgggttttttygttagatttyggggtygt

SEQ ID NO: 6726 - DNA, 2972 bp, synthetic construct
  misc_feature 1..2972: note = Description of Artificial Sequence: Synthetic polynucleotide
  source 1..2972: mol_type = other DNA
ygattattttygtttttttaygyggttttttagggaagaagygaggygtttgagttagattgggttggaatagtgyggtaggggttygtttttygyggagttgtttttttatttattatttatttagtttagttyggtygtttaygtaygtttatttgttgttttygttttatttttattaggygtattagttagttyggyggttttggttatagaygtttgaatgataaagtgtttttattatyggygyggttygttagtygattygtygggaygygttttggttttagtttttttttttttatygyggtttaggaagaaattyggatygygtatagttattttagatygagtagtygygygtygaggyggaggygggagtygtaggggttgtagayggtaggtttttgtyggggtatatttttttaagygtttaggttttttaygtttagtttttttttttttttgggttttygygyggggattttygtttttgtttagattyggagtttaagtygttgtttttttgggattyggtttttttttttygtttttttggtttaygttygtttattygygtttgagtagygtttttaattagyggygttagttagtagaygtgttygyggtygtttttaaattttyggaygtagttataggttttgatagttttagggaattggggttgagttttygggttggggttygtattyggatagaatttttgtttattttattygtaggttttatygtygayggattttggggatagtgttaatttttttygttttgttgggaaaygtagtygtgatttygagttgggatagyggttgttttttgaaaaggtgggggagtatygagttgggaattaggtyggggagtttagttaygattttggtttaatttgttgtgagattttggttaagtygtttaaatttttagagttttagttttygtatttgtaaagtyggaatttggggygtagtgttttgatgaaagatgttggyggggagagtgaagaygtttttttygttgttagattttttagggtattyggtttatggttataaagtaggttatatttgataatttygtyggattattyggaggattygtygatttttgtygagtyggtggttygggatatygygttatagaattygaggygttygggygttttygtttygttaggtgtttagyggtttgtatygagagttaggagaggtttagatyggatttygatttttygaggygygggagtttayggagygyggtgggygyggygttygggtygygtagttaggtggggagyggygygtagttttagattygtaggtaggtagyggyggattgtatttgtttygtttygtagygttttttgtttgtygtttttygtttgygtagttagagttgygygyggttaggaagggttttygtttagtgygtttyggygttttgtatttygagaygtagttatygttagttygggtaggggtatattygtttygtttttygygattygttgygttgttttaagtygtgagaataygygygtyggaggagttygtyggtygtgggggaatttygggagygggttygtttyggygaagtgggtattttttttttagttttagattygtagttttaatttygggattgggagaggtygygagtaggagygyggggataggygttggaaatgtttaagtttttgtttttttttttygttttattgttttttagygggtaggygggatttygattattttagggttygygtttygttttgttttttttttttttgtttttatttttttgtygttttygtygtygttttttttttgttttttttaatttattttttaatttttttttygttttttaattttttttttygaygttttttttttttattgtttggtyggtttttattgtttttgtygggttttttttgtttttagttttttygattttttttattgttttatttygtygtttygggtttttygttttagtttagttygttttttttatttttagttttygtttagttttttttttttttttygttttggttttgttttaygattttttagagatygagatgttgaggggaaagttttttygggatttyggtattygagtgttttttttygaagaatttgggtatyggagagttttatgtttttttttgaaagattttttttagtttttttatygttttttgyggtatttgaggatyggtattygtgtttyggttttgtttttatttttattttggagagtygtttttgygtttygggaattttagattttttttygtggtttyggtattagaggtttttttttattatttatttttagtatttgggattttaatgttttgttttgtttttttggtggyggygttyggtttttttyggagttttgatttygggaaagggagygggtttttttyggttaatatttatttttagaagtagtaatagtagtaggygyggttygtttatggygyggtyggtggtatttgtttttatygttygtttttygyggtagygttygatttttagttyggttygttttgyggattgatggggttgygttgygttgygttttagygttttttttgttygtyggagttggtygyggttyggttygttttggttgygggygggagaggttgggtgaagttagtgttgyggtttygttttygtttygtttagttygtttattttyggaatygygttygttygttttgtygtttyggggtgggaagtagaggtaaagggagggygtgyggtttttygtatttygttgygtttttttttgttttgttttttagagttttttatttatttygttttggtatttagttttyggttygygttattgygygttygtttyggatgttgtgggttyggggattagggygtttttattgyggtttttgttttttttyggttgyggttygt

SEQ ID NO: 6727 - DNA, 1026 bp, synthetic construct
  misc_feature 1..1026: note = Description of Artificial Sequence: Synthetic polynucleotide
  source 1..1026: mol_type = other DNA
ygatygttygggttygagtagygggggygtttttagyggyggtaggygygggtgygggggagaggagtagaaaagagagtagtttgaggggtygagggagtygygttygaggtyggygyggtggggatygygggtttattattagttaagtttagttatttaattatttgtagagttgttgtaggtataggtttaggttttygttttttattttttygygggtgatgygttttgatagyggtygygggagygggggtaaaggyggtagttggggyggyggyggyggtayggtygagtgtttyggggttgtygtygtygtygtygygtttttttttttttttttatttttaatygtygtttttttttygggtttygggttttgtttttggttttttttttttgtygyggttatygtggtygtttttttttygggtttttttatygaagtttyggtygttttagtttttattagtttaggttygggttygggttyggattygggttygggttygggttygggttygggtttyggtttyggttygtygtygtygtayggttygygaaattygtttaggaatagttttaggaagygtyggtaagttttttttttagggatgtagtyggttatygttgtttatgttttagggtagatygggaaaggggttgggggaagtttaggaagggtaaggggttgtttttgagtttagggtttyggtaagggyggttaayggtygtatyggtaygagygattagtattaggttgtttggagagggttttygtaggygtgygygtygtygagtatygaygtgygyggttygggggyggagygygtygtttttttyggatttggagggaaagttggtggygggygygygtagggtttagyggyggtttattttttatttttayggagagtttagtttaygttgtttagagattgtygttatggtaatyggttttaattaagtattgtagggtttttttygtygagttygyggagtttaaaggatattttattygttygt

SEQ ID NO: 6728 - DNA, 10207 bp, synthetic construct
  misc_feature 1..10207: note = Description of Artificial Sequence: Synthetic polynucleotide
  source 1..10207: mol_type = other DNA
ygttggtttygtygttagttttttgggttttttttttygttggygttgtygyggggttataggttttatttgagatgttagtatgtgttgggagaggtggaaygggaagggygyggyggtgtttgttgygttggtygygggatttagttygtttgygtttagtttygyggyggttttaggttygttattttygtygttgtygtygtttgttatygaggttagtaggtgatttatgtttatggyggagaaggygttagggtttatggtgaattgtttagggtgtaggaagagyggttggtyggtttttagyggtttaaagaattgttgttygtgtaagtggttggaaaaggttaggtygggtaggtgttyggygtttaggggggaygtattgtttgtttgtattattagyggygttaggttttgttttttgttttyggtygtttttttgygtttttygtttttttttygagtttyggygygttttttttttaggttttttaggtygaaygggtygttttygtygttttyggtyggttttttgtttttttygggattaygtygttttygggygygttygggttyggttaagygagtggggttggygttgtttggagtygggttgyggtttagyggygttttygtaygtttttygtttaatygtttaggtttygggtygttgttygyggygtaygatttttttttagttgyggggagagggygygyggattataggggtttgggyggaggtygaygagtaggattagggatattygggaagggttgttttyggggaggttgagtyggaggagttgttggagtygggtaaagggtagttgtaggttatttaatttaagattttagatttatagtggaaggaatttagttttggagaggaaattttatagttatagaattatayggygtttaaggggttaggttyggagttyggtyggattttttggttatyggggatygttttygtaggggagtttygggayggaaattttattttagatattygtygaygttttttttttggttttttaggttagygggtggtttagtaaaagattagtttagygatttgaggatttttygtygttatttttttgtttttttttyggttygatttttatttygggttyggtgtaggygtagyggattgggygttgygttyggggaggtgggtggttttygygyggggggagggtygtaygaygaggygtttgatttygygttatygygttygggtttgtagtgtttttygtataagygtagagayggtagygttagttgttttttggggatgagyggatgaattaggttagyggggagtttatttttttattttttttgttygttgttttygygggtattygttatagggttgttgttttyggttttttattttttttttygtyggtygttttyggtgtttyggaagtttttggtaaaygggttgttgtygatttttagttgtgtgatttgyggggattaagggggyggygttaagttaggtygtggtttttttagygtggtyggtggtatttygaggttagygggtgttggtygtagagggaagattyggggagygtttatttggtatttattygtttgggatgggaygtttygagttgaggtyggtgggagggtttygyggaaagygayggggtttgttttttaaaagttttattygaggaattatttttagataggtttagatagttttatataggtttaaagtagtgttatagtgtyggaattagtttaagtatgtatattygttygygggtttgygtaagttaaaygatttygtattygagtaggygygaatagagattgtagtttataygtaaggttgtaggtatatataaagttaaattatatttaygggttygtatataygtaagtgtgtatagatataataaaygtttayggaattaaaygaatttatatgtttttataggtatttaatatattttaaayggggtaygtatagtttagygtatattttggtttataaagttataaygatyggtayggatattygtatttttttttttattygatagtggygtataagggtataggtttagaggggtgatgttttgttttattagaataagggtggagaagtygtaagtagaaaaagttttttgattggaaggtaattttttaagygttttttaaggggtttggggtttagattgatttagagtagtagttaggagtgttttggggggttgtgttatttgttttattttttggtttttttygagagagtgaaaattgggtttygggttttgagtatyggtagagtttgggtagattgtttygggygttttttttttatttatatttttatttttgagttaagaaataaaygaataaaatgtaaaaatgttagygygggttyggagttttagttaattgttaagtaaatatttttattagaaygayggtttagttgttygttygttttaggggagtttgtgtgtgygygyggtgggattgagagggygttttgaggattttygtgagtgttgygygtatggatgygaggttyggtgttygggggygggtygtaagagygyggatttygtgtagggggtttygaggggygatgaayggayggttgggtttgtaygtgttgaggggygttagtgtaggggtttagtttatygttygtygygygtattttgttattttggtaggtagtgayggygatgaagtyggttttygggaataygtaggtgyggaaggtgttgtaaggtagttttaggatgtygttggttygtattatgtggaagygyggttggtatttgtgtatggagtttaggatggtttgyggggagggtgggggttagtyggtagttattagtttyggttygagtttttttattttttgggtatttgatttttttttttttattttttttttttttttttttttttttttttttttttttttttttatyggtttttttttttttttatttttttttgtttttgttttttttttatttttattttttttttttttattttttttttygtttttttttttttatagttttttttttttttgttattaaaaaaaattttttagttggaaatagaaatgagatagagtaaaaataaaataaaataaaaaataaaataaaaaaattaattaaaaaataatttttttttataaaagaaatttaaataaaataaaataaaatagagttttataattttatttttaatattttttttttttttggtattggtaaattttttaattttataaagaggagattttaattttygggggtttattaattgttttattttagaatgggtagttttttttattttatgaaatattattttygttygttggggttttgtttaggtataaatggagagaatttttaaattttttttttttagttgggtatttgtttgtgggaggagggaaaggttttagggaggttgggggggtgggtggggagggtggtttaatttttaaattttttagttttgggggagggttagggaygygggttttggtagaagggtgatggataagttgaggttatgggtaggttttttaagttyggtatttataggttaagagtagggtgattttygtggtttagtattgtagatttagttttggtagtatttgtttttttattgayggtataagggattttttayggtttgaggaattgagattgtgagttgttagttattgattttattattttttaggtttgtaaaggagagygttggggtttaggtttaggtttagtttaygtagattatagggtagtgattygggtaggggtattttgggggtttgtttagygtttttttttgggagattttgtygttttgtttttttgtttagttgtagtgttgggttaataagtttttgtatygtttttattttgttttaatatttaygaagtygtgtttgttagagatgttgttggttagttttagtttgtggaaggttataggtttagttatttattgttttttygtggttgggttgtttgggtggatgtatatgygtttgggtattttagggtyggttttgttygttattatttagygygagttgtggaatttatagyggtaatygttagyggttataatgtttattagtaggatatatttggtttttttgtttaggtygttgattygtattttgaagggggggaatattygtttgggagggagggaagggaggagattttattggaatyggttgttttaggttttaggattttattttttttttatttattttttttygttgygtatatygttgtygtttggttgttttttttgtggtyggttgttttgtttttttattattgttyggaygattttatttgtggttgttgtttttaggagattttatttttgtttgttagatttttttttaaatagttttttttaggttttgtgtttagatttggggattttttttttttttgatttgagatgaaagttgatgtttaggagagaagtttaggttttttagaaatattttygtttttttttaattttttygaaattygtttaggggaaatatttatttgggayggaagtttttagaaataaatttggagggtgtttgtattgggaattgggttatagagtttgataagatattttggtygtgtagttygggggaagagggtgaattygaggtttggattttyggtggttgagtygaagggtggaggggtyggggttgtggttttttttaggttttaaggtttggggyggyggatgygtttagggttyggatgttygyggtggagaaagggtttttagttyggtgaggyggagggttyggttgattyggggttygttgttaggaatygagtaattagygtggggttagttgggtttaggttttattaggggtttyggggtyggagtagagtttgagagaggttgaatttttttygagttyggagayggattyggaygtagaagagygagagygyggggyggaggagatygttagggttaagtygyggggttttttttgygttgggatttagaayggttggggttattttttagtagtatgttttygttttattttattyggaggattttagygtttttgttttaaaaaaaaatygtttyggtgttaaaygagaaaagttaatttggttgttygtgggagygaagygtggygttagggttagaatttggagtygggagtygggagtygggagtttttagttttgttttgattygtgtagtttygtgttttagttygttygttygttygygygttttttagtyggtyggtagttttatttttyggatttggtgatgattattttygtgtttagtttgtggaattggttttatagttttttggtttttagygttattttggggtygttttttatttygttttygggttttaggtttttgagggagygtagatgygyggygggygggtgygggtttagtgtygagaygtgtagtttygtttyggtygttgttgtygtygtygtygtygyggtygtygttttygttaggttygggtygggtagyggtttggttagygygtygggyggtagygygagtgtygggaagaaggagggttgygtygtygttagaaaggyggatatggggaagtyggygggtygtggygygtggaaygggtggtaagttatggygttggtygttagygtyggtttttttatygggatattyggtttaggygttygggggtyggggtyggggtygggggygygyggttyggattttyggttygggyggyggygygygyggtggayggaygattygggtggygggygtagtagttgtttttyggggtttttygttyggygtatygtaaggggtattyggttttgtgygygggggyggygggggttttgygyggggtygggttgggtygggttgagttggttygtttyggygtyggggattaygygygattggttagattttgtygtgatttttggaaaattgtgattattttatatgttttgtttagttyggattttttgygttaaygagttaggttttttttgattgttgattttaygttttttggattaattgtgggttttygggggyggggttttgatagtttaggttaagtttyggtygggagggggggtttgggagaaggtgtyggaagttttagtagtaagaaaatatgttaatagaataaaatattaattaatgaygggtygtygggtttygagatttttttttttgtttyggtttttatygttygttygygtttgyggttgtttgygtyggattggagagygyggagggtygatttgattygtygaaagggtttgaggygaggggagttygggtttyggggttttggggaaggattygtagtygtaygtyggttttaagtgtaaagtattgataygatttygagyggagagggggygttttttttttttygygtttagaggttyggtygttttggttygagttttagtttggttttygatttagtttygggtygtggygtygtttgggggtttttgygtttyggaaagagatagtaggtattggaaagygaggtyggtgggygggygagtygggaggttygggyggtygaggttygggagyggattttaggtggygggagttggtgagtggagttatggtygagttttgttggggtyggygygggygggagygggaygyggttttgygttggggaaaygyggggattttttattygygttygtttttatyggaagattyggaaggaatttggagtttttygtaggttygggtttygttttgagttttttagyggtygggaggagyggattttyggggttaggaaggtgagygtatttttygttgagtatagggyggtatygygygggyggatttyggattttttattygygatttaaygaattttygttttattyggtatyggagaygaaagtttttttttttygaaatatyggtttttttttttygttttgttaattatttttttagtttttttttatttttyggaagygtaygttttttaagttaaggagtgttgagtaaygygtgagggagttggggtgtttgygagtatttgtgattgaagtttttttttttgtgattagttttygttttttgtttttyggtagttttagttttttttttatgaagtgatggtgtgtgtgtgtgtgtgtgtgtgtgtgtgtgtgtgtgtgtgtgtgtygggtttygtgtggtgttttttgtgygtagygagagttataatttaaggtgtgtayggggagagtgaagygattaygtatttgtttttaatygggttygggygygaatatttaggttgatttttgaaggtygttttttgaaggaaaagatagagtatgtattagttaygggtgatatttttattygtataatygygtggtgggygygtatatttaatattgatttatgtaggygttygtttattgygtatatyggtygtagggtatttygttgttgaaygttgggagtagygtttgaaggtyggattttttttggtagtgyggattygggatyggyggaagtagtatggtttttgygatygttatttttatttttyggggtygattttagggtttttataattttttattatygtatatgtgagygtygtttttatagggttttttttaygatttygtttttggttaggtygtattttttttagtattttttttttggttagaaygaatttttgatttygagttgygtagtttaygtagayggggtaggatttattgtagttttttataggtaaatatttgttggttttattttaggygagatgtggtttttyggggagggattygttgtggataygtttgygtagtyggtgaggtgattagataataattagggtagttttttttagtygggaatttaggtatyggtttaggaattygtgaatatattygtaaagtygygygygygygygygygygtgtgtgtgtgtgtgtgtgtgtgtgtgtgtgtagatatatatttttgtttttgtaagagtatgtgtatatttaaatgtgtgygttttagatattagtttattttattagtttatttatagttggtttaggggttygaggtttgaagagtttgaaatatttaggtttgggttatttgatygagaaatttggyggygatagtgtagyggttgtatttggggayggygattttatttatagtggtatygattttttttttggtttttyggggttttgttygggttaggattttattattygtttygtttygyggtttygygattattttgaggttttgttgtagtygttttgaagagtttgtagygatttttagttaaattttttagttaggaatgttygaggtttatygaaagttggygttggggaggtttgggaggttttggagyggygtygtgaggttttygttgggttttttttttatttaggtyggttttttttttttttttaggaatttttttttttggyggagtttygggggtygagtgtgygtgtttttttaagaggtttyggggggygtttygygggtygttyggggttggagggggagggygygggygggggyggttggygttaggyggtygaggttttataataaagtttyggtttttgttatttygtatyggttaggtttygtagataggygggggaygygygttyggtygtttttttttttygtaggyggttttyggttagggygtygggygggtttgggttggtggygygyggtttgtgygtttygygtttttygtaatagtgaaatggggygggagyggggayggtttgggtygggtggggtygyggttttgagtttggygtggttgttttttygtttttyggtttygttatttttygtagggttaaggggtattgttgggatttttttygggttgagtttttaggtggtagggggttttygtygtttttttttttgtgtgtagggtyggggttgygtgatttygygggtagtgggtagtaggaagttygggttgtgyggtygygtggtagagyggaygayggatttgygttygagtgayggggygygggttgtagattggtttaagttttyggtggtagaygaatgtgtttaggttaagtttaggggaygtgtgtggtttygtgttatgggttygttgtgagggtgtygttaggtygtygattattgtttggaygtgaggagtgtggtggtgaaggatattttttggatagagtygttttttattayggttttttygtyggatygtatttttyggagttttggygttagttagttyggtttagyggtyggatygggttttttygyggttttaggtttggttggggtgggggtygyggtttyggtgattttagttygtagyggttyggttygtttygtttatttaaataaattgtygttgataggygygtagtttttttggagtygtygttttttygtygtttttttttygttttaattatttygygtagggtggggttaattggttgggatggggygggggaygyggggagagygggyggttygatttttttttggtygyggggtggttyggggaagygttttygtagttayggtttgtgtggtttygtttttggttttttygggggatgygagggtaaggtttagtttggtagttgtgggttttggaagggygtygttttgtatttaagggygagattaygyggtygagaattaaggtygtatttyggatggatttygggtgattttttyggagttttggggaattttttaattyggggagttgtagaygatttattggtttygggtygyggtttygygggtggtygttgtaygtttgagatatttggttygtagaagttaggtgtaygtttgtgtatygtygtgygttggatgtgtatggaggygagatygtggttatggatgtttgggattaygggagygtgaayggggygatygattgagtgatttgagagayggggtagagygtaggaaggatttttaggaygggtttatttgygaygggyggyggtgggggagtggggggtttgtyggygygtttataggttttgggttygygttyggaaaygttttygtagggagygggtygggatttttyggagtagtayggtgayggygtgttataattygggttttagttgtgtygttttygt

SEQ ID NO: 6729 - DNA, 2392 bp, synthetic construct
  misc_feature 1..2392: note = Description of Artificial Sequence: Synthetic polynucleotide
  source 1..2392: mol_type = other DNA
ygaggygtatttgtttygagtgttaggtttggggaygyggtttyggagaggggagaggggttygggaatgyggygggaggggtttygaggggtagygggtygggtygggtyggggyggaggtggygggtttyggyggggygggttttygygggyggyggtgagagttttygtatagtyggttgygagttttgggagtaggaggygyggtgygtagtttagttygggayggagtygggygtygtgygagtttygggagggtygyggggygtaggggygggtyggggttagyggattaggtygygttattygttttygttttygttttgtygygttygggtttyggygttygyggagttgagattgagygygttagtttttyggggtygaggttttgggatagatatygygagggaggyggtyggygygggttttygtygygggygtagygtttttttttttyggtaagtggygagyggygggygaggggtattaatttygtygttaatttggggttgggttttygyggygygygagtaaggayggyggagatagaggygggatattyggggggttggatttaygtaggattttyggggtttaaggagggggyggttggaggattyggatttttaagaatttggttttgggttttgattygggyggtyggagagaaggygaagaagaggtygagtagataggygygyggyggaygygagagaaggaygygggygaagygtttaagaygttygtttttagggtygtygagttttttttttttttygtttggygyggtagtatygygggattaggggagtttgggttgtygyggatttaaattgttgttgttggaagtygtyggggyggagagyggggaatagggtygggagtgggggtyggggttgggatttattagagygaggggttggaaaggagtygagaaggtgaaagggggttgtgyggttttttagtttagtgttttagtttttttaggtttgttgggtatttgttgygtattygtttyggygtttagattttttttttygtygygagtttygttttttttttttttagttttgttttattttttttgttttagtttagtttttttttttttgygatttgggagaatyggagtgggtttttagagtagtggtattttgtagatgttggttygtgttyggttttygggtttttagagygtaaagggaagggtaggtagagagggtattgggygagtaagatttggygttgggttttggttgygtattagtygtttgygtyggtttttgggggtttygtttaggattttygayggyggggaggggaagtttygagttttttgttttttgtttaygygggtagggyggggataygyggagtaaaggtattyggtaatttgaatttttaggtgygtttygygattttgtaaggagttgttgggtgagtaagaygggaattttygttaggttttgatgtttattttattygtttattyggttttttagttttggtygtttaaggggatttttggttyggttttttagttttyggatggtggygttattttagtttagtttttgatttygggttataggaaaatygaggaaagatatttatttggggagggtattatttygttggttgtattttagagttygtttaggttttggyggtgttagtgattttgagtttgtttttaaattttygaagaataagagygtgttaggggtaggtaggtaggttygggatatttgggttygtttagggttttygggygggtttgggatggtattggggtygtttgttaggttggtttggtttttttattgygggattyggggttaygatttagtttgggggagtgggggtgggggtttyggagtygyggaygtyggyggggggtagygtggggyggggggygtygggtgygtggtgtttagtttggtygttaggaggygtggygygggttttygttyggagtygtygtygtygtygtygtygtygtatygygagtgtttttgagtygygggtgayggtggttttygttgttygygtttttttttttygyggggggagtttgatgttaygttttttatgaattatttatygtyggtttaaaaatatttygaattttatagttygagtgtaagagattgttgyggaggggagggggyggggygtttyggtggttagggggagttygggyggggttygyggagaygggggtygtagttttggaggagtaagaatttygtgtttttagtagtggggtaagttagaayggyggtttttttttttggygtttgggttygggttttggttgggtaaaagggagggagggaaattygayggtaaaggaggggyggtttatyggaagggtagggggttygg

SEQ ID NO: 6730 - DNA, 564 bp, synthetic construct
  misc_feature 1..564: note = Description of Artificial Sequence: Synthetic polynucleotide
  source 1..564: mol_type = other DNA
ygtttttaaatygtttatttgygayggtttygygagygtgygtagtttagtttttttyggaygttttygttttygttygggtatatygtgtttygtatygaggtagagaggggtaygyggattttagtttttgygagtttttttgttygtygttattttatatttygtattgttttagttgtygttttagaagatgtatygtttggygygtaaagyggtgtayggtttttagttygygygtagtagtttggaggggygttagagttttygttttattttttggyggtattgttttygggtagttttttttttttttttttttttttatgtttttattttattttgggaygtttttaggatygaagaggtaggagggggatygygaggggaaggygyggagttggggaaggaggagtagygtygggygtagtagtttagggyggttygggaggttgygyggygttygyggatttaygttttaggatagaggaygtagtttygagtatygtaygtggtttttagattttttttatttttattttggygattaygagagggggtygg

SEQ ID NO: 6731 - DNA, 3277 bp, synthetic construct
  misc_feature 1..3277: note = Description of Artificial Sequence: Synthetic polynucleotide
  source 1..3277: mol_type = other DNA
ygyggtatggtggttttygygtgtgtgtgtagygtttgtaggtgtttygtttagygttttttgtataatagttgtaggttggattygagggtttttttttttggggttttatagtgtttagaggtttygttagttttagatatygttttaggtttttttttttttttgaygtygtttattttttttttttgyggaagggggataygtttttttgtgtygaggtgttaggtygttgagatttgttgttttggaggaaaagttaggtagggtttttggttttgggyggttaggaaggttttayggttgttggggatagagaygyggggttaggttaagggttttygtttygtttaaatagtttgttttgggtagggtagggtttttttttygygttygygygttttyggttgggtayggttyggttttaggtttgaygggygyggtttttttattggaygygtgygggagggyggygaggttaaagygttggggttaggagggtattygtttagyggttttttaygggagttggggtagaagaygtygygatttygygygggtaatttttttygaggygygttttagttygtggygttgtyggygtagatttygygtggggatyggygaggttaattttttttgyggttyggggtyggtagagtaygtaaggggtygygggtygygtgggtttgggygygtygtggtgggtaagyggggttagyggagygggaattygtatatttttygagyggagtygaggataggttygtgygggtygyggggtttttttggygttaggaagyggyggtygaaggagataaygagaaygtagtttyggtttagggaggtttaaaagttgagatgttgaaygtagayggygggygttygggggttggggggygggtagaggtygttattttttaaaaaggtttttatygagtyggtttttgttttygttygaggggyggaygttygatttyggtattygggattgttygtgggtttttgttggttggggatttttagttttyggttgygygtagggaaaggttgtagaaygtagagattagagaagtygggggyggyggggaggggtyggggggttayggttgtagttyggtttygtagtttyggagttttagtttttttttttgtattaygggagygtggayggagggattttygaggttttgatygttttgatagtttyggggyggggyggggyggggyggttgygttagttttggttttgagtttttagttyggygtyggaattyggatygygatttygggagtygagtttygyggtttagatgaaggygygagtgygygggtgtygggtggggtgtttgagygagagyggagttttttaggtggaygtttttagttattttygggattttttttgttggtttttgggtttgagaagtgggygyggttggatagaygggaaatagttttttaygtataggtggatattyggggatatygggygygygyggygtttggtaaggggaagttgttggagaygygggyggttgttttygyggggttttttttygaagygtygttgygaaygtttagtttyggygaygtygtttgttygygatygggtyggygtygyggataggaaaggttygattagttaggtttgttttygagaagtttttagygtttygttygtayggggtggggattgatagtttttyggggayggggtygggtttatagagttygggagttgggggaggggaggygtygggggtttygattygtgggaagtttttgtatttaggttgttyggyggttttttaatagtatayggatatttaagaaaygyggggyggttyggtgattttygttttggatttagtggygtygygaggttttatttygagtygttgattatygggtattygggtgttgaygatttgggtttttgggtatttagttyggttttaaaygatttyggtttaagggtgtttagtgtagttaggagggtygaatygaattttatttttyggaygyggtggtttttygttygtttggagtttygtyggaggttyggggatattaygtaggtggtttattttygagttyggggtyggagttygatttttttttttttgagttttyggagttttyggggtagtagygtyggtttaggygggggygggggaggagggggtygyggtagtttttagaagggygggggggaygygagyggaggtagtttyggtggygygttygtgagattttygtygygtygygggttygggtygyggataattaaagygggatttttttttygttgaygtyggyggttygaggtttttttygyggyggtataaaaggygygggtttygtagygtaggyggtagtgggggtttgatagygyggyggtgtggatygygyggtygaagagygyggygtttagagygygggtygttygyggagttatagttygagtygggttttagtyggagtygagttttagtygagtygagtygggttyggagygttyggtgttygtagttatgtyggtyggtygygtygygygtatttgtgygttgttygttttttgttttttgggygtyggggtttaggatttygggtygaygygttttatttgtatttyggtgttygtggaygtygatatgtgygtygygttygtggtygtyggyggygtygaggagtttyggagtagygtgttgtagtttygygagayggtgttgtagtagaaggagattattttgagttagaaggagattattygygagttgatygttaagttgggtygttgygagagttagagtaygttggatttyggagtyggygaggttygggygggyggyggtygtaagtagttyggttygggtaagaatattatgggygatttgtttyggatatyggtygtygagaygtttagttaattygggtaaattttgtaatygtttaaaattygtttggagaatttygaggttygygygygttttyggtttyggtttttttttyggttygttygtttttttgtttttttttatttygttttttattyggttaggtatttttygttttygttttagtygygygggtgttyggtyggtgttttttygygtttgygaggtttygyggyggttattygttttagttttttgttaggtygttttygtagtygtttagaggggatygygtygygggttttttagtayggttttygygtttygtttaayggtgtggtttttttygtttttgtatttygtagtagtatagtygt

SEQ ID NO: 6732 - DNA, 5692 bp, synthetic construct
  misc_feature 1..5692: note = Description of Artificial Sequence: Synthetic polynucleotide
  source 1..5692: mol_type = other DNA
yggaygttaattttaygaattttgttygggttgggggtttgggaygttttttttggattttaggattygtttgtayggagttatagaatatagygttatygttygttygagtttaggtattttttttttttttyggggtttgygtygtttgtaygttttttygtagattttygyggaaaygtgtatagtagggttttgaatagaatttaggttgttttgagtygaatttttttyggttyggggttgatygtgtttatttaagtygtygtttygtttttygtattttygaygyggggttatttttttttatttttttttttatttaggygtttttttygatagyggagggagagttaaaaatttataattyggyggygggattttgtyggttttagttgggygatttgggygtattygtyggygaygtagtttygggttttagygtatagaattyggtygttygtagtttttttygttagttaygttttttgggttttttattggttaagtygttygygttttygygtgattttattggtttgygtygggggtttagataaagggagtagtygyggagggyggtgattgggyggggttgggggygggtygggygggygygygggtygggygggagtygygygttggagaggyggggagtayggygttgggggaggggygyggtgtttygggttygggatygggaggygygggtgtgyggygaggttygggtgttttttttygtgggggyggggyggygggggyggggyggttttaygtgggtggggttgggygtttyggagggyggyggtygyggggygyggggygttgggatttygttygttttttygttttgtatttttttygtttyggggtttttgttyggayggyggtygtygtygtttygtttttttygagggtttygygttygttttygtagttyggtygggaatttgggaattyggaygtagaaggaygygttygagttaggattygtygyggggtttttttggtgggtygtggtyggggagaggaygygggttttggyggtygaagayggaygtagygttyggaaaggygagttaggttttyggtttttggygttttttgtgagttggttyggyggggtgygtygtyggggagggagggattggtygtggggygagtagtygggyggggagtggtttttgggggttttygttagyggagggttygygaggtygttttyggagygtygttaggtaygtgygttttttttgtttttygygtttttagagygtattttyggtagggaaygaataaaatttyggttggtgtgtaagagtttttygttgtaaaygtgtttttttgygggattyggggagtygtygaaygyggggtagatttyggtttaaagtgtttttgtagtttttattagggatttttttttatttttattttgggttyggagygggtgttagtttggaaatgtttgttttttttgtagtttygattgaattygtttaggaggaggtgygttttgtttyggttttagagttgggaggatygggttttgtttttygaagtttttttatttygtttttttggaaaatgyggattttttttagtagggatgtttagttttgagggggttgttttyggaggaagtttgggttgggaaagttygatattggttttaatttggygggtagttttttttgttttggagtagttttttttagttttyggagtttyggatttatayggttaggagaygtttatgggttttgggggtattttgyggggttygaggaggtygggtggtttgggyggggttygaggaggtygggtggtttgagyggggttygaggaggtygggtggtttgagyggggttygaggaggtygggtggtttgagygggttttttttttttttttatgtgtaygttaaataaaagaattttygaatagttttggggatagaatttttyggaatgtgagtttgtttttttygtttttttttttaggaaggataggggttttttaataaaggtaaggttgyggttggagygggttgaagggaaggagygttgttattttggggtatttgatgaaagagaaatttattttttttttttttttttaaaattagaggtagttgagttagagttttttttatttttttatttgattaatggggttttataygatgtttgtatttggggtgattgggtttgaagatttttagaagtgggaaaggattttgtttgtgtgggagattggaaagttggtttttattyggtgggggatagaatttttatggagtgaaatggattttaggttattttgyggaagattggaaatttaaggatttgaygggggggyggtgattttgtgtttttttttttttttttttttttttttttagtttagaataaagggyggaggygaaggaggtaagatgggtggtgggttyggaagtyggagtygaaagaagaatgttataaaagttttttattttttagttttygygtatttttaaatagtttattagagtttgggtggggataaagtgaatgatygtttagagtygggtttggtatttatggttyggttttyggygygggygttyggagttygggggaagtttttttagttygttttaagtygyggttggttagggygagagaggtyggggtatagygygyggttttttttgtygttttygaggatygagattyggggttygyggttttttgattgygtaagttttttygttttttttgtttttttttttttttygtygaaagaygttyggagygtatattygtttgtattaaagttagggattttattttttttaaaataaaataataagttataaaggtttttgattttagtggaaaaggygtygtagatttatggtttttttaaatttttatattttaattatttttgtttttagtttatttatgggtggtgattaataaaatgattttttattttgaattttttttttaatataaaaaatgtaagtttygttttttttttattygtttggatggatttttttygtgygggaagtaaagaaatttygtttttttyggttttatyggtttagggttgagttgttgttttyggttgagygaattyggtttgtygtagtattttttaagtattttygtttygtatatttttaattgtaatttaagggagaatatttttttygtttttttttygtttaagggtatttgtagggatttttttttagaagttttgtygtgggtttagyggttagaagggttatttygtagagygggttttygatagttttagttyggttattttttaaattgygtttttttgggtttygtattgggygygagtttggggygtttaagggtttttattgaggaggaaggttgtyggatygagttttygttatygtttggygtttttattttttatttttttttttttgttygttttttyggaygtygatttggagatggtaggaaaaaaaaaataattagatggaaattaaagattagtttgggtgygygggyggttttygtygggtygggttatgttyggttygygttttataaatttttttygygaygtgataatagtygyggtttygtttttttgggaatttaggaaygtatygatttttttygtygttygygtaagtttttttttygggagygagaayggagagtttttggtgattttgatttttggttagygtaggaygttttaggttttagttagggtattatgtataggagtggaggaaggtggaagggaaggggtttaatttttatttaagaaagygtagtaaatatttatatttygtaggttaaattaaatatattattaggggtygtattttttttttttygygtygtttgagaagggggyggaaggaaggayggagaagggtgaggggyggattaatttttttttggygatttttttgtttggttyggatattgttgagtygagtggggygtttaggagttagygaggggttttygaggyggtttyggttyggtttaggtgtgygggtygyggtggggygtaggttygtagyggagttaygagattttygygttttyggttgaygttygggygtttagggtttgyggttttaygtgygatttattygggagttgygttttagaygtttygtggagygggggagaatttgaaggaagtygtggygygtttagatattttaaaaattygaattaattgggaaaataggaagggygtttttaaaygyggagaagatatttyggggtggggaaggatgttttttaaaaattatatttttttgttgtggyggttgtttttgattttttttattattaaaagaaatgttgttaygtttaatttttgttgttatgagatatggagggggtagtttagtattttgaagtaatttgataagtttttaagtagtaaattygaaagggaggtyggyggtttaggtatagtttttttgtaatttgaatttataatgaaagtatttttttttatggatataatagattagattttataatttaatttatyggaatggtttygtttaagggagtttyggttgattttattaygttaagttaaattggatgtttgtggttttaaygaaaagygatygtgatataaaatatataatttttaaagtaaaaaattagygggttggattttgtttttttttttatttttgttttttatttttaattttttagtgtgggaaatayggataattatttgtgtgtgttggtttttatyggggagataggygttttgggtttttttttyggygggttagaggtttygtyggttagtgygtaygyggygtyggttttygattaaggtttyggttygttttgttggttygtttgaaaygtygatatttttagygtaygattyggggtttygggggtatttatggggttygaagtttttgtttgtyggyggygatyggatagttttttygggygygtagggtagaggaagygttttygaaagttttygtaygtatttaygagtyggttttgygygggtatagyggtagtygyggygggatattyggtagggttttyggygttattttgtgttaaaaattgygttttyggagattygggtatygtyggygtyggtagttagagygggatttagtttttatygygttttttattggagtttttttyggtttttyggygagtgyggttygtggggagtgggygtyggygygaggaagtttttyggttygggygatttyggtttttgagyggtttttttttaygtygtygttygttaggtygayggaggatyggggyggggaygggggttttagyggtttattttgttgttatttttgatttattttttagtaayggygygtttttttttyggttttttygygaggtttgttgaagayggatttagttttygtagagttggggaaggayggatggayggaaggtttagygyggtttatttttttttttygtygtttttyggttggtaggagtygtagygatagtttyggggagyggggtttgttttaagatttttttygyggtatygggagttaggygtggtyggaggtatygyggttgttttaygtggttttygtyggtygttatttygygyggggaggaygygtgygtgyggtgygtggtyggygggttgyggggaygygt

SEQ ID NO: 6733 - DNA, 7937 bp, synthetic construct
  misc_feature 1..7937: note = Description of Artificial Sequence: Synthetic polynucleotide
  source 1..7937: mol_type = other DNA
yggygggtttttagygtagttttgygygtttttttygaatttattygygtygtttggtgatttttagggttttaggygtggtagttgtttttattttgatttttttygatatttatattaaagttatygggaagagggttgttttggaggtttgggttygttttgttaaggattgattttttygggtagggagttagaggggatygttygagaggattygtttttgygaggtttagtayggygttttaygttttttttttggagtaaattygtttygttttttttttggagtaaattygtygtattttygtttgtatygaaattttgagygtygtttygygttatttttagttygygttygygttgttttttttttygggtygtaggttgagaggttgggtygtattttggttaygttttgttyggttttagygggatattagaggtattygttaaggtaaatgtatttttgtaaatttattttygttttgatattttaaggttttatatagaaataggatttgttygttttatattagtagtttttattaaygttygttyggygtatatattattttaattygygaggtygyggygtattttggtttttttttttygttataatagtygttttgttttygtagaaagygtttygttgttttagtttyggaaygttttagggaggtgaatgtagaatgtagaaaagaggttttygtggaatttagatttgtaggagggggygggggagggtggygaggygyggaaaggttttaattttagtyggtttyggggttgttttttygagattttygggggagggtggttagggaagggtttttttaagtygyggygaygtagtttggggggttggygggaygygyggtttygtttagygtttaggtagttatygyggtyggggtygggaaatgaaattaaagtttttttgttttygggagyggaggggtgggygttttgtttygttttygaaygttttygtttygygttygtttyggtygagtattgatttgtgtgygaagttatgggtaayggygaygggaagtattttttyggttggaagtgtgyggggggttgygyggygggtttagtyggggygagaygygyggyggtagyggygttgyggtggtttaggttttygygtttygatagtagatgyggyggyggygtaaagtygyggttatttatgtygggtttyggtttyggttygtygtygttttttyggagtagygyggtyggggttygggggyggttyggygygygggyggygtagaggyggyggygttyggggttataggyggtggtggyggyggggtyggttagtaygygggaggattgggtttttyggygggyggtygygtatygagttagyggtygttgtgygggtttatggtttgtggaggtaaaagtagaggagataygggtgattggggggttyggttygttygggggttttygtttygttygtttatttattttttttattttttattttygtyggttygagygagyggyggttaggtygggtggyggggtyggggygttyggtgttttttygtygtaygygygygtagtttagtattyggggtttygygygygtaygtatygtttyggttaygtttggttyggggtagtygggggaatttagtygtattgttygtygtttttygttttygttttygygggtttttgtagttagggygtygyggygaagaggttgttggttttgttgggtgataaaaatttaaatttgygaagttattaygtatattygtatatatatatatatatatatatatttataygtatatttttttttttttttygttgtttaaaggtgtttyggaggaaaaggtttggggtttatattagttttttttttttttttattttatgtygaggtttagtttttattgtatttygtttaatygaataattatgttaattaagygagtaattttattgattgtaatttaagagttttttttttttttaataattttttttttttttttatttttattttttttatgtatttttyggtttatttttttgaatttatygtggttttttttttttagttttagygggattagtttttgtttttagtatygygttaggattttaggtyggttttttagagtttyggaggttygtaatygttatyggtattatttgggtygttaygtygtagtgttyggtttgttgtttyggagtygggagttttttgttgaggttgtaataattatttygttttttaattaaattygtttaggatttttttttgyggattgggggtttgggggtgtgtgtggggggggtgtttttagagttagaatgtttttttttaayggtttaaatyggttttgggatttttttttttagygtttgtyggggatygygagtagaggtyggttttygtttygggtagtatygggyggtttgggtaygyggggtttgyggygtttagttyggttttttagtyggggaaggtgggttyggtttagtataattttttgttagtagattttgttyggatttyggttatttaaaataatttttatttttatttttttttatttttatttaaygyggagtatttatttaggygaaattggggataattttagattttgggtgyggagggtyggagttagtgatagaagttgygtgtattatygtgtttttaggygttttttygaaggygttttttggaygtattttatatattattttttattttttaaataygtattgttttaatgtttattatttttaataaaagggagatggataggtttgatatttttaattaggaattttgyggaaaattttgtgtttttgtagttattttattatgataataaagygattaagatgttttttatttattgaatatttttttaaattgygatattttatggttygggttttaaaaygttttatttgtagattattttgtgtttgatttaatttataatygaaaatataatgtattaagtgaatatatatttgtttagttgataagtttttttaatatttattyggagagtttttgtattgtaaataaatgggtttatataaagagttttttttgtttggtaattatatataaaggygtttggggtttttttttttttggggatygttagtttttttttygggtttaataaatagttyggtttttaagtttygatttyggtttgtaaagygagygttyggtygttagggttyggagagtgttttggygagggggttgygagygtaggggttaggggaggggttgttygggttggattagggaygtgggggtttttagtttyggtyggygtttttygagtttyggagggygtygggygggataaagggaaagaaggaaagggagggaggttagaaatttgtagttttaaaggygtygaaggtyggagaggggtygggggttgygtaygygggggtgttaggttttttggyggtttttagggagtygtgtgtgttgtgtttttgttttgtggttgtttttttttttttttttttttttaataagaaattttaaagttgagaaagygygagttgtyggygattttygggaygygggttyggttaygaagtaataattttaattttttattttttgygggyggatygtaggttygattgttttttttttattagtttgttygattttttaagtaaataggaggtggattattgtygtttgtttgygtygttayggttttgatyggattggagagagtttttttttgtgtttttttttttyggggagaggtygygtygygttttygygtttgttygygtygggtttygggggtttggggagtttgaggyggttaggaagtggggygaggaagggyggttatayggttygagttgggagttttatagtttygtagyggygaygtygttattygtygagtgtygaggttyggggtttatttttagtttagttttaggagaggtygygtyggaggatygygaggayggygtygtagygttaggtygggttgaggtaagggaggaaatggagygaaaagtggyggygggtagagggtttygggygggyggagaatygttgaygagggtatttyggaaggaattgaatttaggagtatagggttttttttygggaaggtagggygtgattttggagtygtyggttttttttgtygyggttttaggygtggttggygygttttaggatttggagtttttataagtttgttttgttttttgtttttgtatttaaaaattygtttttttttygttygtttgtyggagattaggattttggttygtttgttttttttyggygtygttttygggagygygggygyggtggggtttgtaggtygggttgggattaggygygttttggggygygagtggttyggtygtygtygtagaattygttttttgygaaatagtygtattygttttttgggagagttatgagaattggggtygygtttgattttygygttygaagaaaattagttygyggatttygttataygggtygtgattygagtttygygygtygtttygaaygygygyggtgaaaaygtttygttgygtyggttttgttyggttttttttttttatttttattttttyggaaaaaaaaaattttgaattgggaaygaagattygaaaaattygttatgattattttttttttyggtttttagtttyggttyggaaggttttttagggtagyggtygtgggtattaygattyggttagtttttttygtygyggatygatygggtagggttaatttaggattgtttyggggaggggagtagggtaggggagygaatgttggggttygttygtgggttatttagaattgggygtaygttggyggygttyggatttygtttattgttygttyggtgttattygygyggttygygttagaygtagtttggyggtttttgttttgttttygagtatttgtttttaatgttgggtgtygatygagataataagygtttagagtaaagtaaggatgtattaygggggtaattttaaatygatygataagattttttagagaaaaaaaaatygtttatagtttatattttttaagaaaaaaaaaagttttaatattttaayggattttgttaaaagggaagatatatattttttaatattataattttgaattttttttgttaaaaaaaatgtaaaattttaaagttagaataaaaaataaaataataataaaaatataaaaataaaaaaaaaatgaaagtaattttagttatttattggaggttgttttttggatataattgaatgtaatataattaaattagtaaatgtgattttgttttgtatttttattggtatttttaatgtgttgattgttgtattgtaaatgtatygtttttataataaygattttagygagtttatttagagyggtttttaaatttgtagtttggygyggygagttaygggttttgtatattaataagttygtgttatttagttyggaatagttagygygttgattggtygygtagttttttayggtygggagttygtgttatttattyggygtaaataggttttttaataggttggygtygggttagggaattgttaattaggaagtagyggggttattattaagttygatggygtttaatttaagttyggygattgygtagtttttttgygtagattattgttgttgaatgggaatgtggtggygtagggygggagagggagttggagygagygagtgygygtgtttyggyggagggggaggygtagatatagatatagatatatatatatatatatatgtttaatttagtaggtttaaygtttggtttttgtygtatagaaggttaagggaagaaatattattattttttaaaagtagttgttttttttttttggaatttgtttggtaggtggtaggtaggttagatttttaagtttagaggtttttttaggttgtttggtttatttatygttttgaagttgttgtttgttyggattygagttygyggatgtaygtaygtaygttygttgtttgggtagtaaaagttttgaatagttygttyggtttttttttttttatgatttggggattagattttgggaagtgagttttgagtttttagtygtttatattattggtttttaattttatttttttttgttatattttgtaatagagtagttattaaaatgaaaattagggatttattgagaagataaggattgttttttttttatttatatttagatttagaaaatatttttagtttggtaatgggggaagygggtatggtgtggtaaattatgtatagtattttttaatgttgttttttgtttgtttatttgttaaatttttattttaattaaagtaagttattgaataatttttatygtaattagatgtaaattatttttaaaatatttygtaaataaatatttttgttagaatttggttttttatttaaatgttatttatttttagggagtygaggtgatgttttagtggygatggatatatttatttttgtttttttttttttatgtgaatttttgtttttttttttgggggaaaaaaggatatttaaattaggagttaattgatagatttataygtattygaaattttttatygttttatttyggtagggataygaaagagttaaatttaaagtttgttgtttttttgttttttygtttttattttygttttygygggatygttgggattggttggtatttygttagtggattgtttattatygagtgtaaataaggygttgattggttgttgtttagttygtattgggttttttgaaaaaagtaattattggtttygyggttttaaggyggtttaaggtygtttgatgaaaggagataagttggggatygtttttaggattttygygggtygatyggggtagttygggagtygaggtgyggyggagagttygyggattaaaggaatttggagagaaaggggaagygggyggtyggtttyggtyggttttttttttygtaggttaygtygatttggggtggggggttgygggtygygggyggggatttygggatttttygtttgtttgagtyggggtttaygtyggygttygtttygggyggttyggttyggaggggagtttyggagagttyggggttygtaggtaagtatyggygtttygygggtygggtyggggaygtaggataaggygyggggtttatttyggttggttygggagtggyggtygygygggttyggttttygttttyggygtttttyggtttyggyggtygggatttttygyggtygagtttttggttaggttttaggtyggygttttyggaagygaygtttggygggtygyggggtaygagggggagagtygggaagygtaaattttygaagygygyggagattygattagygygyggttatttattaggttgggggygattgaattaggtttttgggygyggtygtyggttgggggtgtgtggygtygattttygggtttttgtygtggtttygggaggttggagtagygagtagyggttttagygagtgtgtyggggaagygggtgttttygggtttyggtttygygggtgtaggyggaggttgttygtttttygygtatatygaggayggtyggttyggtttyggagaaatggygtttgagaaaggaggggaggggaaggttttyggattttgggtagggattygtygtyggggattygyggagtttttyggggatggaggaggygygagttggaagyggygygygagttygagygyggggttaatatygtggggtttagttttttttggttygggtaagtggaygygtttygaggtttygggtttaygtagggygtttttygtagayggygt

SEQ ID NO: 6734 - DNA, 1408 bp, synthetic construct
  misc_feature 1..1408: note = Description of Artificial Sequence: Synthetic polynucleotide
  source 1..1408: mol_type = other DNA
ygygygyggtagtttygaggtagtagagygyggagtygggagygyggggagygygggtyggyggyggygagggaggaygggggygtagayggtyggygygyggygyggttattatgggygtgyggtgagtagtygttygggaygattttttyggttgygyggygttygygyggagtttttyggtyggyggtgygtttttayggttattatgaaaggtagggyggyggtagtttygyggggttttgggyggggggaaygggtttyggggygygygggaggttayggaggtgtttttygygygaatttttttttgggttgygggttyggggagtyggggttgttagggygtygggttygtgygyggatattgggggygtattyggttttygggttaggygyggttggagatttygaggttggggttttgaagygygtaagtatttttttttttatygygtttttgtaagtagtttgaagttttaagtygttgtttayggattttygtttttaattttttaattgaaaaaatttgtygaggagagtggaggtatygttatttttttyggtygtttttttaygtygtagygttttttaygttygtttagtttttttttttttygtttttagtygtttttyggttygagyggttttygygttggyggtygggtgtttttttygggattggggatgtttttygtgygttttygttatatttggtaatgattaggtgttygaggagtttagttggttygggaagtgtatttggtatttttttttattagatttatygattggaaaatagttgttttyggtttygygttttttttaygtgttygttttggggtgtgtttattggtgttttggggtgatatattttagttggttagtygttttttgygyggtgttttttgtaggtyggtttatggaagtgttagatgttatygtattttagaaagaagtaygagaaggattgtagggtagttttttgtttagtggaaatayggagatttgttagyggaattttgatttatgtatgagataagtaatygtagyggaggtattaaagagtygtttaggaatgggttygygtggtgtttatataaggtttygtgtgagagttgttggttttgtgttaggataatatagttttgygtgggtgygaaatgttatttgatygyggttatttygtttttagtygttatagatttggygatgtaatygttttgatttttagggttgtygttygagggaggygttygggaagttttaaggygtttggaaagtaatttttggttttggaaagttttttttttgaagggtagttttygyggaattaatyggagygatgatattttattaatttattttttttttaagggygttaggtgtttaygtygggagatttygg

SEQ ID NO: 6735 - DNA, 208 bp, synthetic construct
  misc_feature 1..208: note = Description of Artificial Sequence: Synthetic polynucleotide
  source 1..208: mol_type = other DNA
ygttttyggggtygygatttttttygggaggtgtttgygaaggyggttttgtygyggtgggggtggggaggttagggtttyggatygttggagttggggtygtagttagtttttggygagtgttttttggttgttgtygtaggggtttgttttttyggattttttttttaatttygtyggatttttttttttttttttttaygttygt

SEQ ID NO: 6736 - DNA, 805 bp, synthetic construct
  misc_feature 1..805: note = Description of Artificial Sequence: Synthetic polynucleotide
  source 1..805: mol_type = other DNA
ygtygttygyggagtttgattttgygttaggayggaggaggttgtgtttatgtaattgttttgaagtattgyggtggttttttttttygyggttgggagggtaggtaggaygaggttggtttttttygtayggtttttgggygtgggttttygtygtagtttygyggagtttyggtgttttttgtaatagggggyggggggaatagyggygagtagttttgggttgyggttttttttttaygttygagttttttgygtatygtygtygaggaygygygttygagtttagtttttaygtygyggygygttygggttttttgttgattttaggtaattttttygtttttyggagtgggggattgygagggggtttyggttttaygaggtgyggaggaagagttygaggtttggggygaggygygygggatagtggggttgaygygtggtttyggygtygygyggtttttygaatttygagtttygygttyggygyggtyggggtttttaatygttttttygttygtygggatttttatygggtygagtttgygygtygygtttttygttygtttygttygttgyggygtagtagtggttgggtyggygygtagagtttgagtttyggttttyggtttgggggtttttttgggatttttggtygaaggggygattyggttttygygtttttttttygttaatttgtataaatttttygttyggggygttatgttttaagttgtttttygggttgggggygagygygggtyggtttttttttyggggaggtgygggggatagggggyga

SEQ ID NO: 6737 - DNA, 2462 bp, synthetic construct
  misc_feature 1..2462: note = Description of Artificial Sequence: Synthetic polynucleotide
  source 1..2462: mol_type = other DNA
ygagygygyggttgggaggygggtttagggyggggtagagygyggggatygttygggtatygggygtagttaaygagyggayggggagggygggttygygagggttgagyggygygggttgttataggygttygaagygygttgtaggtggtaatttggaggtgtygttatygtagttgygggaggagttygggtttggyggttttttttagtttttaggagttttttttygtygtygagttygagattggatttyggagaattygaaggaaagagtttttgyggagggatttgtgagtagttttatttttttttgtttttgygttattttttttttttaaggaaggttgtgtttgygggttgygaataagtttygggaggggttttaaaggaaggtttyggtgatttaggtgagygtttttttttttttggtagtygggygtaggtygggagygtygtttagtttygtgggtaggggygygggtgygggtygtttgtttttggttygaggtygatgggggagaaagygaggaaggggygaggttggttygatygggggttgtttggtygggttygttyggaggygatagggatttttagaygggtatttggagattagggaygagtagagaggtgttttgagggggatagagggtttgygttyggtttaagttgatygggatygatygtttgygygttgtgttggagttgtygyggaagtygggygyggygtttttgygaattttagagttagtgygyggggttyggygagygtattagttttyggtttttyggagtttaaggttttggaggaygttattttttttygttygggtaatttttttttygtttttttttgtttttattttttygygtyggtygtttagtttatttygagattttgtgtttttgttagygygygttagttgttgttgttattttttttttygttttygtyggagttggagygatttggggtttggtttttyggtttyggtagtttagttgtgggttggaygygagtggggttggttagttttttgygaggagggtaggagtgagygygggttttttttttagtgtttttttygaattygttttygtttttttgtagttygaatygttagtttagagagyggagttttagaagttagattttgttygttttggggaaaygygggggaggggggggtttttygggaaggtgygaatttygtagatgaggttagagttttygtttttattttagygttttagtttttgtttttttgtttttaagtggatagtggttttgattttygtatttyggtttgtggygtggggggygttagyggtagtgtgtgtgtgtgtgtgtgtgtgtgtgtgtgtgtggtgtgtaaggatgagygagtgygatttttygggaggtagaggygtaggagttagtttttttagttyggyggagtygtagggatygttttttttygtygttagttgygygtagttgtatttyggtaatttygygttgtyggttttttttttttagttttagttttyggtatttttaygattaaygyggaattttaggattaaaattatttggttaaagggtgygggtgggggatygaggygttttygaggygaatgaggttgttttttaaaattygggaggygtttttygttyggygttgtattttttygtggttyggttgtaaggatttgyggtggaggtttggyggaggygggttygygttttagagagagygttaygttattygagaaggygaygttgggggttgttgagttttttaattttttttggygygttttgtttagaagtyggggagtttttggtyggyggttggyggggaagygyggygygggaggtggggtggtttggttggtgttgygggagggygtttygggygygttaggggttgygtgtygyggttggagggygygtygggagttgyggygggttyggggtattygagtggygttggaagttgagtyggggttygtagggttyggtgatygttttggygtygtygttgyggattygggagtagtaattaygyggygygttyggtygttttttyggttygtyggtygygtttttygttttttttttgtagaagtgaagtygtygtttgggttygttygggttggygatttttgygttagaaaagtttgaggtgttggaggygaaattttttygggagygaagggyggygtttataagataaggaaagggaagaygtygggttttggygggtagygtagtagygggagggyggygttgagygttaaggatttyggaggygaggygaggttaggyggatttaatttagttaggaggtgttgttttygtttttggggtttttttataggtatttggtgttagttatagattttygttttygttagttygtaattttttygtaattttttttgaagtgygatggattaagattgggtygyga

SEQ ID NO: 6738 - DNA, 990 bp, synthetic construct
  misc_feature 1..990: note = Description of Artificial Sequence: Synthetic polynucleotide
  source 1..990: mol_type = other DNA
ygtatattttgtgyggttygagtggttyggatggtatagtttaggtgttygggttaaagttggtatttttaaagtttagaaygtaatttgggygygttagtataaattyggttttyggtttttttgaagttagttaagttygtatagggtttttagygtttggaaatttgagaggygtggaagggtggggagtttygygaagtttttagtttttgggtgtttttyggtttygygggggagygggtttggagttaaatyggtyggtygtaggttggagtagygggygtyggagygygyggtggggatgttygaaaaggagttagaggtttagtyggagagttygagaataygagggatgtttattttgtaatatggttttaagtttttttttgtttaygyggaagygtttttygttttatttygggttgtgtagggtygtttyggygattaagtygttttyggagtygggtattggggagtyggtgttgygttygttgttggagtyggggttygattgygtygttaggtagtygggttttttttgggyggttatggtgggygygtagygttygggttttygttgtygtygtygttttgtttgygttgtygttttygttygtyggtygggtttaattggtttttagygtygyggygttagttygtttttttgtagtygtygaygttatygttaaygtygtygtygttattgagttttyggygtattttagtttygggygtygtttaygttattygttatttygggtygyggtttyggttygggtttagtggttgygtygtttttygttagtaaygttygygyggaatgagygygtygygttgttygygtttttattygtagggttyggygtttttttttygttygtygtttttatagtygygygtttattggttyggttagtttayggggagtygyggygggygggyggtttttggygtttatatattygygygygtatatatatattaygt

SEQ ID NO: 6739 - DNA, 2274 bp, synthetic construct
  misc_feature 1..2274: note = Description of Artificial Sequence: Synthetic polynucleotide
  source 1..2274: mol_type = other DNA
ygtgtygggttygtttttaygtyggattttygatttygatttatagatttttttygtgaggggtttttttgggtttagaaygttttygygygygygtgtaggtatataygygtatatatttataygtttgttygtatatygttagtgttttttttttttatttgggattttygggtagtygggttggatgaataagttgtagttggtygyggygtttygttagggggaygagggtggggagggggagtttagyggggygtagggtygtggttagggtttggggatttgttygttttttttygyggtygttaagttttatygttgggatyggygaggaattttttttagttttttygtagaygttgtaygatygyggggatttttyggggtygttagtygygtygggtagggggygatagggagggtagggtatygggagatygtygtygtyggagyggtygttagttttyggygatygttgygggygtagtygaatattagyggtttgggttyggtygttgttyggggtyggyggggatygygtagygtttaygttaggyggttyggyggttgtaattgggaattttaagtaaagttttttgttgttttttttgtagtyggttagggatttaagagtgtaagtygtttaattttgagtattagtttaggtygyggaaggayggyggtygagttggtagtttyggttggggagttygttttyggggttygttygtttygttygttygaggattgggtgtttgttagttttayggtttttygtttagygttyggtttataggtagaagyggtgttyggttygtygygtttttygttyggtttygaygttagttttagggttttattattagggagttgtyggygtttygggygtttygygtyggttygygygtttygggggyggtagaggyggtttygtttatttgagaaygtttygttygtygtagttagtaaaagttyggttaaagtygttaggtaagttttaagtttttttatggtgttgagtgygggtygggtygtttttyggyggyggtgggtgggygygygagggyggagggggtygggagttttggtttygaggtagygaggagagaygggtaaatagtagagygttaagttaagtttttaaagtgttaatagttgtagaagttygaattttagyggttttaggggygygggtatagggttttgggttttttttttttgtttttggttttattyggygtttggygtygttggtagagggagyggagggygagttygyggagttaaaattttttttyggtttyggttgttgagttygtygttttttttttttttttgttygggattygggattygagttgttggtygtggtygtggyggtggtygtggtygtggtygygygygtttygttygtygtttttttataggtagttttaagtttagtttygggyggyggygygtygatgatygagttygygtyggttgygygyggggtttttgtttttygattgattggyggtgtttygtaggtyggttgaagggagygtttaygttayggtygttyggygtygtygyggttygttagagggygtgagygttygtgtttygtyggttygygttygagygttttygggagttyggttgggggyggtttygyggttatagttattatygtygtygaagygggygttagtygygyggggaggagyggttatygggtttttttygtttattttttygtttyggtygygttttttattttggtagttggttttggggagggtgattgtggaagaggttgygtygtygttagaagtttgtttygggttaygagtygygagtagtttgtgagygyggtygggygggattagyggtttgygatttygygggygyggttaggyggtttygagtttggygtyggayggygatgttatygtatagggttagttgtattyggagtygtygggtttgygttgttyggyggttgygggaaaagygagttaggagatygttgaggtttyggagggttgygagtttttttaygtygygggyggagygaagttggygggygtygggagatggygygggagtygggagygtygagtttygygatygttagttygttttyggtygggttygtygggtataygtygttggtttygagtattggygttygggaagtagggygygtttttgttgttttgygtttttattatgtttyggtgtttygtgtgggttygaagygagtygtaggtagtatayggaaggygg

SEQ ID NO: 6740 - DNA, 882 bp, synthetic construct
  misc_feature 1..882: note = Description of Artificial Sequence: Synthetic polynucleotide
  source 1..882: mol_type = other DNA
ygaaggttgtggtygygttttygtyggttagtttttagtagtagtttatygtttttgtttygygttttygttttaggttygtayggttttagtttygyggggattagtattgagtyggtttygtygtygttttagtgaygggttgttgttgygggaagttaatygtttagygtttggaggagggygaygaggtttttygygygagygagtattagaaagtagtygggttttttygttttatgttggttyggttggygtagttygatygyggtyggtgtttgaggttgggggaygttttgattygygtyggtygtttttyggtggttttgggygygtttygtgtagtygggaggttggaggygttgyggtyggaggagttgggggagttggygggyggtttggtgtgtttyggtttgygygaayggttattgttggygaggaagtygggyggygagtttaaggttagggagggtyggttttggygttyggygygtttygygatttgtttggttgttyggggttgttgtataagtyggtgatattgttttgygggtttayggtttgtgagygttgygtggagttggggttygygyggttaygggygygggygygggygygggygygtgaaygtagtgttgagtygtttgttggagaggtttttttyggtygagtgttygttgygtaggttggagggttaggygyggagtttgtagygttagtagtagttygaggtygygttgtttaggtgygattaggttttggagttgtgatttggttgtggggtyggttygtttttttgatttttgttaagtttagyggttggagttaattygygggtttgggttttygagygttttgtttaggygtagggggttatttygt

SEQ ID NO: 6741 - DNA, 4359 bp, synthetic construct
  misc_feature 1..4359: note = Description of Artificial Sequence: Synthetic polynucleotide
  source 1..4359: mol_type = other DNA
yggagygtttaatttagtatatygttttyggtaaattgygagtaatttaaagtagttygtttagtagggaggggagttggtgggaggggggtggatttygtygttygtagaggtggggagatttggggggyggtttygtttttaggttgtagygtgggtttggttttttgttaagttaggagygtagttyggagttagygyggttttygggtttttgygtttatggygagggtygygggggaatagtttttggtaggtaatttgtygggtatttatttgagtttttygtatygyggttygaaaatttgggagygttttaggataaagggttagttttttggaattagtygtgtgtgattagtgtgtgttagttygtatgtgggggttttagtgtgtaattaatttagttgtttatygtagtttyggagaaaygagtaygtttttttgtaygtgtttagggygggtgyggygggtagtgtattgtgaataaagtyggttatttttygygtygtatttyggggaygattttyggayggtttttygyggagagtygggyggatgagagygtggtgtgtgtgtgtgtgtgtgtgtgtgtgtgtgtgtgtgtgtttgtgtgttttgtgtttttttaaggagtyggaggyggttygygaggtagggatttgttttaatttgttttatatttggygyggttttttygaagttygggtggygtttagggtygggtaggtaygyggaggattagtagygttygttgtagaaaaagatatygttaatttttatttagaagtttatattgttttgagatttggttttttatttttttttaaaaaaaaaaaatgtaaattgatggatgggttttaattgatgygtaaaatgttttttttgagagtaagataggagggttagggaagggggaaataggtagttgatataatttttatagtttaattgtygagaattyggatttggaggtaaattygaggaygtattygaggagtaggygaggttgttttttagtaggayggtttggtatyggggygtattgttggggatttgattttttygtgtttttttattttagggattygtagttggttygygygttagggtatataygggttgygggagaaggtgaaagttaggatgtagtaygagtttygagagtggtttgggttgtgttttttaagagaatagtygaggttttyggyggttttgggaagttgtttttgggtygggagagygggaggyggygaygtaaggaygygttyggagtttgggygygtygggggygggygtttggttggaagtggggtagtgttttttatgggaaagygagattyggygagttttttggttgtttttttagttttygaggtgttygttttygygygtttgaggtagygtagttyggagggygaaygaatggyggttggtaaattttgagtgagagtgygtttyggattygaattgtygaattgtggttgyggtagggtyggtygagatataagttygtttttttygtttgttygatgggttttagggagattttagttttagtttggtggagygtttygttygagggagttgtgttattttgtttaggggtagggagggyggygttttgggygggtggggaagggtttttgtggtttttggggttttaagygttttttttttygtttttttttttatyggttttttttagttttttttgtttygttttttttyggggttggttggatyggygyggatttgttttagatttayggggagygttttaggtttttaatgatagtttaaatgtggttgttggaaaagtygaaagggatgtggttgaygtggggygtgtttygtttttttgtaagagtyggaaagggagttgggagtygygyggttggttttaggttttygygtttygtygttagtaagtaggtgggggagtygtygtygtygttagttttatttygtttttaagtttygttygttgygttttggtygygggygtygagagggtgyggggtttygtygtgttttttttattttgtttattaatttgtttgtttygtttygtttygggyggttttagataygggtttttygyggtagtattygyggttygttyggygtagtygtygtttygatttttyggtttyggggggtaatgagggggtagtggaaggggtattgtttttygggtattatttagagaaaygagatygtttygttttttygtyggttttttttttttttygttygggttygygtaatttttygttagagggtaagttgggagtgtttygtttttatygatagtttttttttttttttttttttttttttttttaaagtttttttagaagtgggagtygggtgggggaggaagaaggtttggttagttttygttttttattttattttttyggtttaatttgtttttttttttttttttttttttattttttgygygtygttgttttttyggagttgygttygggaatgataattggagygyggtttttttaagagttyggttttgtttttyggtagttgaaggttattaaatataaaagtttttagygttgyggtttaatatagygtatgygttttgttygaggattggtagagagayggtaatatggygagaatgtttggtagyggggattgtaatattagygygggyggtagygttagygttgtygtygtygtygtygagaataatggggagyggggygagggygagygyggygyggggggtygyggtygtygttatagtygttygtattattgtagygygggtgaggaggaggaggaagaggaggaggaggaygagatttaggaggtgtagataaygggggaygaggaggaggaggaggayggaggtggggggttggaggaggaygaggaggaggaggaagaggaggagatggggttggattgggaygagtttttggagttygaggattyggtyggggaggagttggagttygagtyggtttatatgattaatatggattagagygtygygttggagttygaggygtygtygygattgttggygtttygggttygyggtgggtygttyggggayggtttygagttggatttygaygtgttgtagygtttygagygggttyggttgagygagaatattyggttggttattygttaygtygtgygtatttttygggagtatttgagygagaaggygtagagttyggatttygagattatggataagggggygttgtgtygygtgttgygttttttttatgtygaggttygttttaaaagyggttagttttatagtaagtygtygtttattagtattygtagtttttttaatygttattttaatgagttttygtattgtygtaygttygattttattaaggatttygagttgygtagygttaatttgaygttggtygyggttattygtaagttygaggagtagggygtygggtyggtggtgtagaagtaagttattaygygygtygatttgygtaagttgtatatttttagygtttttagtattaataygtttttygggttgtttaataaggtttggttygagaygtgtatgtatttttgtattygyggtygygagaattagygtgagttggaggaggatttttttgggttggttatggaygaggayggtygtaagttygtttattttaagtttttygggttttattataagtygygttygtygtygtggagtaagaagygygtygagagtagygaygaggagaatttgtttygtatgtatgagaygggtatygagttttgtttttaygttagtttygttaagtatttgtygaaaygtaattttttttgtaaggygtttttttagyggtttygggattattgtagygagggygatgtgatttggtaygagaataaagttatyggtaagaatttgttaggtattyggatgtagatgttttttaaggyggttaagttttttaagatttatattaattattgtatyggygtygtttttatygttaygtttaatagtatygygggtattggtattaagttgggttygttygtttygtagggttgttaygtygaggttttgaayggggyggtayggtattatttttattatttttttatttattttttttattattatygtttttagtygttttygttggggaatatttatattttttttaaagatagttaggtygggttygaygtgaaattygaggttgygtttaagygygttttgtaygagtttgtgttygggtygggggaaatttgyggttttattttttttaaaagattttgtattygtttttyggagtttgtggatgyggtggtggtggttttygtgaaatayga

SEQ ID NO: 6742 - DNA, 2762 bp, synthetic construct
  misc_feature 1..2762: note = Description of Artificial Sequence: Synthetic polynucleotide
  source 1..2762: mol_type = other DNA
yggggyggtgttyggygtattttaggttttttttyggygatttttygygggttgtagtaaaatayggggygtttyggyggggygggggygggyggttgtygyggattyggtyggttatagtygtagtttggtggttttygattggttaygaygygggyggggaggtttggyggaggagggaggygggggygagggyggyggyggyggygggaggaataggagaggggagygggtygygtagttaggtagygygtggggygagygyggggagagyggyggyggttygtttaggtygygtagyggaggtygagyggggtgygyggtyggygayggagggyggygygygygagtgagyggygtagggygaggatyggygggygggtgtyggtgygygggtagtaggggyggttgyggtagtagttgygygggayggagtygyggygggagagatygygtyggtttttygttttatttttttgyggtygaggtyggagaatagtttttaattygtygggggatyggaaagaggagtygagaagygtttttyggtttttaygtagyggaggygyggagtggygggattgttgttttttgtgggtgtagtaygtaygattyggagygtttttttygyggygttgttttyggygttttygtygygtygagyggttttggagyggggattyggaggaagtaaaattaygagttygaaatttygygtggyggagtttttggggagygttattygttttatttttatttttatattttttatyggttaaggttttygtygttgtatttttygyggttttygttgygtttygggtyggagtygagtygtttgygttgttatagtagtygtttttatatattygtagaygtttataygttttttttttttgttttttygttttttttttagttttttgatttttgggtttgttttattatttttggtgygagtttygyggatttygyggttygttatttgttattagttygttttttattggyggggagyggagagtagygaagaagggggtggggaggggaggggaagggaagggggtggaaattgtttggagtygttttttygygtygttgttggtgttgtygttgtttttttttttttygtygtygtygtygtygtygtygtttttttyggtttttygttyggttttttttygtttttatgtgtyggatagygggagygttgyggattttgttgtygttgttggyggttttgttttaggtaygyggyggttttygygggtygggttaygggyggggtggggygggyggygtygggtttttttgtttttygygtygttgyggggtygggttgygtattygggaagggaggtgttaygtygygtygygtygygtygygtggtyggtagttgygtaggtatygggtttygttygggygtyggggtagggttgtyggggttagtaggtttttygygttttttttggyggggttttaggggttggattgygggttttttttgtttttttttyggggtygagtaagttygyggggggtgtttttaggtagtaggagggtgaggtaggataatttttaggttttgtagttttttgtgtttttygtttttygtatagtattttgttttaatttttttgtttatttttgtagggatgggtygygagtttatagtaggaatttttattttggtgttttagttaygggatttgtttttattttattttattttgtattygtgygtttttyggtgtttaagggttttattgttttattgtttttattttagtttggagttgttttttttttttttttttttgtttttataatattttgtgttygttttatttggaaagaaaatttggtttttttgttyggaggagtttttgtyggttagygtttgtttgtagaaygagtttggttttttaygtttagtatttttttygggygagaagtttygttaygyggttgtttttttttttgttyggttgtttgtgttttatatgygtttygggggygtttttgtttggagtttttygtattttttatattttygggagagagttagygagtttttttatttaatttttattaagaggttttttygyggtaggaagtatttgttttagttygggygtaggttttttygttattgtaygttgygggtttttagttygggggtagtttaatttttygtygtttttaattygaggatgtttttaggtttttttygattagttagtttaggtttggaggttattttatatagtttyggtygggattttttagttgggygggtgtagtgttttggttttaagtyggttttygtttgtygtggggtttttygaaggttgygggaaaggggygtgtttattttygtygyggggtaggaaaatttayggagggtttttttgtttgtygttttyggggtaaggggagaggtgttttattgttagttggtagtttygaaaagtgyggaygtagttyggaagtgtttgtttygggggtggagataggtggtgtggattatttygtttygtggtttttaygggttagggtttggygygtttyggttygtyggggggtgagtgttgttggggygggggtaggggttggayggggttggttttygtagtttttygygttttttttygtaatttttagayggtygtgggtygtygtygygyggagttttgtttatggtgygttatggtgyggtaygtttgtttttgttyggttttaygtttttttttygggtygt

SEQ ID NO: 6743 - DNA, 338 bp, synthetic construct
  misc_feature 1..338: note = Description of Artificial Sequence: Synthetic polynucleotide
  source 1..338: mol_type = other DNA
yggagygggggyggtttggagygttgatygggygtygaaaygtygggagtygggggttaagggttygagttaggaggtttyggagtagtagtygttygttttttaygtygtygtygtygttttygyggttgtttggataygggataatygatttggggtttygatygtagtagagtyggaggggtgggtaggygygggttygggagaygygyggggaaaygygyggagtyggtgagtygggggygtttgtgtttyggygygggygtttgtgtttyggygyggggygttgtygggyggygtttattttttttggtygttygtttgygygattttygygg

SEQ ID NO: 6744 - DNA, 1435 bp, synthetic construct
  misc_feature 1..1435: note = Description of Artificial Sequence: Synthetic polynucleotide
  source 1..1435: mol_type = other DNA
ygggattygtgtgtttttyggggtttaaaggygttgggygggyggttgttttygggagaggygtagtttttatttttggattayggggttagtggttggggaagtttttggggygygygyggggaggyggygttgygttttatttgtttagtttyggaygtagttygggggygaggygtttagggattattttaatttaatattgggatttttaataaattaaggaatgggattttaattattgaaaatttagtttttttgggttagaatggtgttgggatggttttggttataaaatattaaagagatygatygttaagggaataggaaaaaygttygagatagtygttgtaattaygaatggattagatttggtagtayggggtattgattgttggtgtttaatyggattttttttttttttttttatttttttttttatttaaagtaggttttygttgyggtygggatttygtatttttgtaaygtggtyggggttgtattttttatgagtttagggtgaataggtgygaagtgygttgggagtattyggttagyggtygagygyggggaatatggagagygagygygatatgtatygttagttttaggattggtgttttaggatttayggggatttaggtaagattaagayggtgattygtaaaaaataygaayggatygtttagttttttaatggtttygagtygagttttayggataaygttaaatttaaattttgggttaaatygaagggtttttagttgggttagtyggaygaggttygygggggaggyggyggygttaagtaagtgttttaygtgtttgttaagattayggtgagtgattygtttttttttgttatttgtttgtyggagtagttyggyggggagggaggaaggagagaggygggagagagggggagtygtgagtygtygttggttygtgtgttttttattttttttaattttttttttaagtygtttttattygtattagttaggygygttttttttattgtatagtttttgtggttttttattttaaagyggtagygtatttttagagttggttttttttttygtttygggttttyggatyggttgtaggagttttttttttygggtygggyggyggygtttggygttttygggttgggttattgttttatgtttttttttgggygtttggygygtgttttatygtygttatygygtttaaaggttaggttggaagttyggtygtaygttttgagagtagaygagtttgatygatagtttatagtgtttttttattggtataaagttygaatgtagygttagyggtggatgtggggttttttttaggatattgttaggttttatygttagatygttgttygggaggtayggggtagttygaatgtttygattatttttagagatygttgtygyga

SEQ ID NO: 6745 - DNA, 510 bp, synthetic construct
  misc_feature 1..510: note = Description of Artificial Sequence: Synthetic polynucleotide
  source 1..510: mol_type = other DNA
ygagygtgagttagygttgaaggtttagagygygttgtaygagtagaagattttgttyggggtaagtggygttygtygtggygtaagyggtygaygygtygatagggggygatttygggaggtygggyggyggygyggygygyggggagaggayggtagggygttygtygtttygtttgagttygggagttygygygtttttttaaatttttgggttttyggtygttygggtttaaygggattygggataggggttttatttggtygtggtygtgaagtttttgygygggtagtttggggygggggagyggygygtttygggttttyggagygggagttgttttygtygggttygygggtygygtgygygatygagttygtttatygagtygaygygggtygttttagtgggggaggagggggtyggygtgggagggggygtygtaagtgagattatygyggtttatttaaggagttagttttygtttttgataaattatygygtttygg

SEQ ID NO: 6746 - DNA, 2722 bp, synthetic construct
  misc_feature 1..2722: note = Description of Artificial Sequence: Synthetic polynucleotide
  source 1..2722: mol_type = other DNA
ygaaagtggttagtygagggtyggygggggttaggttagtygtttagtttygtygttttagttttttagtttygtagttygygggggagygggygygttattttaatttgttaggtttttgaagygaagaggttgttttgaaaaagtaaatatgagagaggayggggtgtaggtaaatattattaaygtgaaaatttgttattttagttaagtttattattagtatttatttttataggyggggtygttyggattttgttttyggtttygygtttgttattttttttttygygtagtygagatgttagttttagtgggtttggyggggagttyggyggggttyggatygggyggttygattttyggtttttayggtaggaaygatttagtttygtatttygggagttgtaggtgtygaaaaygaaattygygggggtagygtaygtygygygagtttyggttyggyggtaatttagatagygatttaggggttttatttttttgatggtgattaaaaaaatatattttatttgaattygtaaagtagaygagggtaaattaagttatttttygygttggtttatyggttatygygtttagygttttttttttttttyggygggygagygggtaggggygttygatttttatttttttttygttagttatygggggattagtygygtttttyggggygggggaggtygttygggayggggatttttatttttygttttyggaagygggttggggygggggtyggatttygagtttttatttttygtttttttgtttttyggygyggttygatagtttttagttttattttggtaggtggtttgggtggyggtagatgtygggygggaggaagatgtggggttgttttggtaggttgggggtgtgaggaggaaaaaaaaatagagaaagatatatatagagagatagggagagagygygygygagagagtttttgtttatagatttatttatataatatatatttatgtagttttttttttttygatattgatgaatgygygttyggattttygggyggattttttttaagtyggttygtttttttagtttaaataaataaataaagttagatggaagaaaaaagygtttattttattttygtygtygtttygttygttatttttgtttttgtttygttygtttggygttttaatagagtatagtttggtggataaagtttttttatatatttataygaaaataaaaattattatttttaaaatataaaaagttgtatttgttgttattataaaaagaatttttaaaaggtaaagagaggaggtyggttgttyggttttttayggatattygtttttygyggtygtygggttyggaattttagygtttttygaagagttatgygtttggygttatttatagtygggggtygtttyggattgtattatygttayggygyggggtygtygaygggggaggygyggtggtygtygttttaygtygttttgttttyggtygtygttygtygtggygygggtttttatagygygtttattttyggtttttygygttttttttygygygygtatattygttatttttatttttggtttggttgggaatttgaatyggtttagtttgtttaaayggaaaggatagagattttgtttgtttaatgtaaaaaaaaaaaaaaaaaaaaaaaaaagaaaaaaagaaaaaaaaaattagattagattgagagagagaggagagagggagagagagagggagagagagagggagagagagaggagagggagggagggagagagagaggggggagagtagagagagagygygagygygagygagygagagaagaggagaaagagagagagtagagagygagyggagagygaggtgtagagaaatygagggggagagaattygagtgtgtgtatgygtgtgygtgtgtgagygygagygagygagagagaggagygagagagtgtgagygagaaagaataaaaggaaagaagattttttttatgtatataaagatggttaygttagtaaayggataggttgataaygtaagttttagtattaaygggttyggtagtagttygggtagtgtygggtatatgaayggattaagttatagttyggggaattygtygattatttttatgaaggattaygatgttattaagttgtttattgggtagatttttygtaatttggatgagaaggattttaagttttttttygaggagtttggtaaaatttaygagtttayggttttgaaggataggtttataggtatgtataaaggtgagtatattttttttttttaattttgtyggggagtaggagygggttggygggtygatyggtyggtyggygattgaygagyggyggattaagygagaggaagtttygggygggygyggtggagggaggygttygggtagyggagattagagttggggtgygtggggagttgttygttggggtaagattgggttttgggygaggtgttgataggaaygatgttatggagagagtagygggygtygatgaagagaaagagagaggggatygaggagayggggtttggatttttgggtatagygatttgaaagatggggatggggaaggttgtatyggtygagtttaggaygttgagyggayggattygygggtttttggtyggtygaggatygagggtgttgtttatygtygt

SEQ ID NO: 6747 - DNA, 1133 bp, synthetic construct
  misc_feature 1..1133: note = Description of Artificial Sequence: Synthetic polynucleotide
  source 1..1133: mol_type = other DNA
ygagggyggtygtttttattttygggggtttttttaaaatggggtggggggaagttatygttygttttgygttttygygggtgtgttttgagttttyggtygttygyggygttygttttygtttyggtgtttgyggygatttaygtttygaagtagatttygaaaggaaaaagygatatttttgtttygtatagagttaaatattggaagtaygagatagtygaygtggattaggattattttggtttttygtgyggyggyggyggyggyggttgygygygggttttttgtggygyggttttggggygygggygygggyggyggyggggttgygggagtygtyggggygggaggyggagygyggggygygggyggyggtggggyggyggttggyggggagatagatggtttatggaaaggtttttttttyggtttttttygatatttaaaggygttggggtygtagttgtygttatataaaggygygygtagttaatgggagyggagygtagygyggygyggtttygtyggaatygygggggatagyggggatygygggygygygggtggyggagggagggaggggtgayggttggaagggggtyggyggttaatygttgyggttygttgyggggygygagggaggggttagttttaygggaagygtggagtttagygygggtttttggtygttygygggtyggagagggygygygtgaagygtttttgtatagatatgggyggygtgaatayggaaygtgtatatatggagagggaygtgtatttagatatgtggaggtgygttttttagtgtagagagaygggtaygagygtttttagtgtataygattttgaggtttttgtatatygygtaygggttattyggggaygtgygttyggaggttggygtaygtgtagagtttgattgygggtataagggaagttggaatgygaataagtagtygtaaataggatttaggtattgttatatagatatgtatatattaaaygttttgttaaygtaggaygygtgttaagaaygtatttttagagatatatagagggaatataygatgtagatataggtaagataygtatattttttaggttttttgtttggygtatygygtygt

SEQ ID NO: 6748 - DNA, 2401 bp, synthetic construct
  misc_feature 1..2401: note = Description of Artificial Sequence: Synthetic polynucleotide
  source 1..2401: mol_type = other DNA
yggtttgatyggggygtttygtygtttttttagtgtattttatygttttyggttgggggygtagtattttggagagaggygtttggtttygygtttgggttgggggygttttattttgygttttgggggttaggggygtttgtygggtygttgtygaggggttttgtttatttttgtttagttyggagtttaggygagttagygyggygagtttttttttttttygtttgggtygttttgagttygygttygttttagttgttgtagttgttgttgttggyggttgyggggagygyggggygygygtygaagaggtttgggyggygaggayggggaygaggaggagtyggaggyggtaaggaggaagagygagyggaggtygaggggtttagyggygtggygataggattagggggtttygagaatatgggttagtaggyggttaygggtyggyggtyggaygyggtgaatttgtygyggtygggygygtattggygyggygagtyggagtygagygtagtygggggaggagggttggygtaggggygttygggyggagggggtygattatttattattaaygagttattatttaataagyggagagyggttygttagtygygygggaggygttyggggaagggggttatyggtygagygtagygtatattygtggygtayggygggyggygyggygtygaggatattygggatygygygyggagtyggggygggttygggggyggygtagatttygggygygggyggttygyggygttttttggttttyggygttyggggttagygtagttyggggygagyggggygygggtyggggagggggagttgttygygtattttatttttttttttttygggygggyggyggyggttygttgtatatatttyggygtatttygttaggtygygtatagygtttygagtttaggygttttttygtttttttttygygttttgyggyggyggyggyggyggtagtagtagtagtaatatggttgttgatgggtgtttggggtggygttggyggygggaggagttttttygagtttttgygtyggttgttygttgttagttatggtaaatggtggyggyggyggyggyggtagtagyggyggyggyggyggyggyggaggtagtagttttagaatgagtagtaatatttaygygaattattttagtttagaygygttttttttttttttttttttttttttttttttttttttttttttttttttttttttttygtttttggtttaygagtttaagatggatgygtttattatttyggtgattatggaggtgtygtgygatagtyggggttaaygtatgtggtgggtttttttggttttttttatggtgatttttttygggggtttttttattattttgttttggyggaygtttaagtatttgtggatygtgtgttgttattgygggggtaagaygaaggtaaygygygtttygggygttygttttttgygttagttttatygtttttyggygttttttgtagtttattttttygtttygygtygygtygtgtttttttttattttygtttgtttttttttygtygtttttttttttttyggttttttyggtgttttyggatyggggtagygggyggygygtygggggtgaggagttgtttttagttagtgygtttygggaygyggaygtttaattttgtttttttgtttattgtagggttgttggyggttgyggttggggtyggggtyggggatttataggttygggtgtygtggtgyggggtggggatagttaatttagyggggayggaggaagttgggggtagttgggtgygtgttttgtatygtttatttgtyggggttyggtttttggyggtgggygagagggagtatattygtttatattttaggaatttgttggggagatgagttygtggggttagaaagaagggaaaaattttttgggtaagggagagaataattttgtataagggaatttygggggaggagtatggttygagataatagggggatttygaggggygagagaagttggggagatttattttattattgggggtagtttayggggttgttatttttggaatgtgtygaggtygtatatttgatgtaattttttatttygttttttaggtgttttagtggaatatattttaagtttttyggtttttgtttttttgtttttaggttatttattttgggttttyggaaatgttattagtagygyggagttggagygggagttygtttgaggtygyggttttaygyggagygttttttttggygttygaggtggttagatgtygtyggttttagttatttttggtgtagaygtttatyggtattgaggttggygatattttyga

SEQ ID NO: 6749 - DNA, 769 bp, synthetic construct
  misc_feature 1..769: note = Description of Artificial Sequence: Synthetic polynucleotide
  source 1..769: mol_type = other DNA
ygttgagtygtagggaagttgyggggttagttgagtagtyggyggtttgttgggtttttagtgtygygygatagtaygattygagataaggtatttggggttggtgttaggtagaggtttygygttgygtggtyggyggtaatagygtttggyggtyggtttygggyggggttgtaggygtygggttttygyggtygygaggyggggttggagggygttgygggttgygyggaggttgygggaagygyggggagtaygyggagttygattagtagggagatygygtygygtygggtataggtaygggattygygttttaggagggygtagygagaggygtattgygtatttaggggttgyggtttyggtygtygtgyggtgataagttgatttttygtygtygtttagttaagttygygyggggtgttggyggagatgtygtatgggaggtttttttaaygaggtgtaaatttaagttatttygtttgagtgaatgaagggayggygyggggygygggtggggtttatygtgataaaagtttagtatttggtttaaattttttttttttttttgttygtaggattagaatattygatattaaaatgttttagtgtagtagaattttttagygatttyggtggygggagagtagtattttttaggtatagttgtgygtatttttygggttttatygatygtattatttgatygygggaaaygaaatttgagtttaggaatttgaattgttttaygtaygttygttttygg

SEQ ID NO: 6750 - DNA, 1169 bp, synthetic construct
  misc_feature 1..1169: note = Description of Artificial Sequence: Synthetic polynucleotide
  source 1..1169: mol_type = other DNA
ygggagttaggygygygggygggggttttatyggttatttygaaatygtagaatgttttagggttttygggatttgtgggtttaggggaaygttygggaygyggagygggtttagtttatttgtyggaygtttttttygtttattygaattygggagtttygtaggagggatttttttygtttttagtgattatagttyggattygggttgygttyggygggtaaggttgggagtttttygggtyggaggayggggygtatgggtttygggtttgtagaattygyggttgygggagttgggtttttttttttttaattygggtygygtttyggttggtyggaggaggtagagtaggggtgyggtygtgtgttygagygggagtggggygtttattttyggggagaagggggatygggaaaggygtagygygtygagtattygtttatatttygttygtttttygygygagtygggtgygtttttaatygaatyggggygggygtygggagagtygggttttttygagattygygtttttttttygttttyggtttattygggttttygtaggattagygygaatagayggggygattygyggtygagatttttatttaygygygyggygyggttagatyggygagygttttyggttygaygtttttttygattttyggattttgggygttgagygggagggggaggtattagtttygttyggtttygagtygttttygtttttttggttygaatagggggattttaaggtttttttygattttttygygttygygygtatygygtattyggagaagaagttgygygyggaattattagataggagttygygtttttygttttatygtttattgyggtttyggttttttygtygyggattttttattttyggttttayggygygtttaattttatttgyggtttagatttygygagtttygggtttygtttattyggtyggyggttttttyggggyggagygyggygtttttggagtyggtatttyggatttyggygtygtttygygtatygttttygttttagtttttagtggygyggygttttttygygatattygygggtttttaggagygagtygattttyggttgggtttggagtyggggttaagtttattyggagggagtaygg

SEQ ID NO: 6751 - DNA, 6036 bp, synthetic construct
  misc_feature 1..6036: note = Description of Artificial Sequence: Synthetic polynucleotide
  source 1..6036: mol_type = other DNA
yggtgyggttttgggtattgattaygtttatatgtgatggttttygtaaygtgtaggtttygttggggagaggttagygygggttttaggttttagggtttygggtttattgtygggattttttttagttttttttttattggtttygttygtygyggttgygtygggtygatattgattttagygatttttggggtygttttagttggtagttagtattttttttgggatggggtttaaatgttagtyggttyggygtttgtattagggttttatygtaygtagttygttgttttttygtttttygttaaggggtgygataggtagggggattygttggtttttgttttttttatttttatttttttgggtttygtyggagygtttgggtttygggttttttgaatatygtttgggyggggttttttgtyggggttyggttatatttttattygtatttttatagttggggttgagaatgaaaataatttttgtaaagtttttattagygaattatyggyggttgtagtgattataggtttygtttttgygygtygtaaaggtttttagttggtaggttygtygyggygtygtttttttttagtttygttttatttgyggygggygtygttatttttttagygttgtttttgygaagtagyggatttagatttagattyggattyggaggttatygtttttttygttyggggttaagtaayggttttygataggggaagggtygygygtttagggttgggttaggaygtttttgttagygttttayggtygggatttgaggtttagyggtygtttygtttttttttggattttygyggtatagaggtaaggtttttyggtgaggygygaggtygtygtgygttgggygggggttttgagagtggtggggttygggtgggtagaggttttggggygatttatgggggaygtttatagygtaggtttatggggtagttagatygygtygtagggtygggagagaaygttttagaaggtyggtttaggttattattttaggagggtggyggaggtagtggtyggggtttttttygyggtygagtyggtggtggttgygattattatggggttgggtatatagttgaaggggggtattygggtygagyggttgggggagtygtgtyggttggyggggaagttttttayggygatttttaggttttygtgtaygaagggtgyggagatgggagttttggygaggttgggatygtttaygtygttgtygaggagggagagttggtygtyggygggggtttyggggggttttttggtttttaggttyggggaygtgttggagttggttttgggggyggygattttttyggtttggattayggygtygttggttttgygyggygggggttyggtyggggygttttygggygtggagtttygtagtggtagggtygtggygggaagygtgttgygtaggatgtggggtaygtttttatttyggatgygtygttaggtygtgttyggygyggttattttggggagyggtyggggtttttygtygttgttgyggygygyggygtyggttgaggtaggggtygyggggayggygtygtygggtttgygggttaygttgatgtgyggtagygaygygtagygtttgatagttttyggtygggyggygggygygygtataggtaggygggaygggttttyggaggtggtgtgtygggtagggygttygttagggttgggtygggtygyggggggtygttgtygggtyggggtygggttttgtyggggtgtygttyggagtttttygtagygygaggagtagaggaagayggygggtagygygggtyggtygyggyggggygaggygttttggggggtagaggtygyggattyggtygaggatagttyggagyggyggygtygtaagttyggygattttttgatgaaggttagttgtygtyggaagttygagyggtyggaggattygttgtygttggagagggttgaggttataygtattaggtttaggyggttttygygygttttygggttygtttyggttttygttyggtttttggggttyggtttygggattgttygagttagyggtggyggtttaygtygggtyggtttttgtatgaaygggattygtaygggygatttttgygttttgtgttgtttygttagaagggtgygygtyggygttttgggtatyggggaggtttyggggtygggtagggttttagtagtttgggtgatyggggggygttttttgggtaggggttgggaggygggygaggtttgggaggagttggaggagggggttttggygaggygggygggyggtgtggygtttttggggggttggtttagygtygttagtttygaggttttggtaggtyggtgtaggtttygygatygttgttgttyggggttygggattttggttggagtygygggttgtgttaggtaagggggygttatttttygyggtgtggygygggggtygggggtttttttgggttgggtayggggtgtygggttggggaygtagattattgttygttttyggagtatagttggtatttygggygtggttttttgtgtgttaygtggtttttyggggtttgtaggggaaygggggttttygttggttttgattgaggttgygttttttttttttggtygtygggtattgtttattttttttttygtttgtygtttttttttgtgtttggggggttgtagggtggattttattgatagttyggataygaaggataggatggagtyggattyggaygaggtttttygygtggtagttgttgtttggtgtagttaygtgataattgaattggygtttttttggatggygygttattttaygttatttaggtyggaggttyggttygagttygttgttttttygtygygttttygggatttttttgygggtygtttatttagtygggtggttyggggtttgyggygtygtaggttagatayggggggtyggygtttgggtagggtygagttgatgtatygttgtagaagttttttygyggttygygggttgggygagttgtygygttygttttttgggttygggtttttggtgatygygggttttyggtttygtggatggayggtyggyggtttygagggttygggttygttgagggagttggyggaggagtttagggagtagtagggyggggtttygttagtaatgaggttgggttgggttygggygggyggyggggtagttggtgtagttttggayggggtaggggttttttttyggttttgyggaygttttygygtaaaagygygagggatggtygatgtgygtyggtgggttggygtgggygyggtygtygggggtttttygttygagtygttgtygtagaagtagtatayggtttttttagtgggygtygtgaggtatagygattggagygtttygttttygygggttyggtygggttttgagtygtttttgtttgygggggygttygggggtyggtttaggggtagttttagttttgttttgtttttgttygygtttygagattgtttygygttgyggtyggygtttttygttttgtgtyggtgttttatggtttgtttggtagaggtggggyggtyggtgggtttttgtttgttygttggtttttygggttggtttttggggggtttttgtagygtttygtygttgagygaggyggygttagagaagttgatyggygtgtttttygyggagttagtgtaggagtygtttttttgggtyggggtyggggygggtattaatatgtagaygggtayggggagtgygyggygatttggtattagygyggaggttattttgygtagtygggtaggtayggyggtttttaggtattttygtagtagttttagtttttggttygyggygtygygagggygagaattygtgggygtyggttttttttttygtygtyggtgttttgtaaagtggaggtyggygttttyggygttttygtygygttyggggtaggtygagggtagtagtygtagttttaygttttgttgtaygtagtgttygtgtaaggttagygygttgaggttggaggygtaygagaagttttygtttggtttttttayggtaaagygtaygttgtttgygtttagtttagatggtagtyggtagygttttyggtagtyggygatgtttaggaagygttttaygtagtttttttattgtaggttgaattgggtggtttyggggggattttgtggygygggygttagyggtggygttttgtttyggttgggaggtatggtttgttyggggttgtygggtagttygttagggttgatggtgtygttgttttgttygttgtaaggtttattggggatggagttggygatggaygggttttygaagttgtttagygagtttatagagttgtagyggtttagtataagyggtgttttttgtaygtagtttttygaygagttggayggygtggygttttttatttttaggtttyggtttyggttaygtyggggagtyggaatggttaygggtagygaggtggtttygggygttygttaygtgttgtttagtttagtttygttggggtyggttttttttagtttttttagggaggagttattgttatttaggttattattttygttggggtttgggyggtyggtygaggatagygaggaaagggagttgtatygggatagygagagtggttttttttgygtygttagtttttgtagtgttttgttggttatagatagyggggtagtygttagtttttygggaattttgtttaggtggtttgtyggtagttaggtttgttttygggtttttggagagattttaggtttygygaggggttttgtattygtttttgaggtatttttaagtagtggtaygtgttgataggtaggygatagtttgatggtgygtaygygggygtyggyggaggtggtttygygggtygggggttyggtttggtagtygggtaggttaaggttaagtyggttgggtygaggttgtttatatttggggttttygyggygygaagttagtgyggttagygggtagggtagtatatgttygygtgggtagtattygtygttggtattgtygttgttgaggttgtygttggagaggttggygtgggtygttttgagtygtagtagygggtgygttyggttttttgtttttygtygttygtttttygggtygyggtatggygagtaggattgggygyggttttttygtggygttttttgtttygggtttttagagttgaggttgaagttatygtyggaygaggtgtgtagggyggagatgttttttattagttggtygatgygygttattgtaagygttagtttggttttggttttggtygttayggttgtttttttattggtgtttttttttgtttttttgtygtttyggygggtgggyggggtgygagttagygtttgtttttgtaggaaggggttgtttaggaagagggatagygyggtagggttggttggtttttyggtggtygyggtygtagttagggatgayggtgtatygtygtygttaaagtagttygaatyggaagtatagttttgggttaggtygtttaggtgtygtaggggyggtagyggttttttagtggyggtttyggttgtyggygggttttgtttttttaggtgttttagygtttgygygaggtgtygtgygtttagttyggtttttagygttygttgtttgygtaygtataggttgggtaygtagttgtttggggatayggyggtggyggtygtttggtgtttggygggtygatgggttagtaggttgygtagggyggyggygttgtttatggygattattttgtgtttggagtgtattagattaygtagtatgtttayggygtttaggttttatagtagtttttggttaygggygttgygggtygataggttttagagygtgtygtaygygttgtttaygatggttaggttgtgyga

SEQ ID NO: 6752 - DNA, 3400 bp, synthetic construct
  misc_feature 1..3400: note = Description of Artificial Sequence: Synthetic polynucleotide
  source 1..3400: mol_type = other DNA
ygtgtagttgyggggtattyggggttgggtttatttgygttyggggtygtataggtaggtagagagagtygggtttagggtataggtttgttttttgttttttgygttyggggaagggggyggtatagagttagtgattatagygtagygygtatttgttttygtaggttttyggagygttttygygygtaagaaggygtagatygygtygtttttgtagtygtygtygtygttttyggttttgagygaggagttgttttggggagatttgtygtttaataagtgtttggtgttygtttygttggtggygttgttgggttyggttttttagttgtgtygyggtgagygtaggttttttagaggtggggygaggttggggtttatttgtgygtttatttttttaaggaaaggygttgtgtygttagggtggggtttgggagttttttttttagggttgggttttgtaygtttttaaagttggtttgtgtatttttttttaagtgaygggttttgygygttttttttattyggtgtggattttttgyggggtttatttttttygtygygagtaggttttggttttyggatgaattttgtgtaattttttttgtttygtagygttttgtygttttttttttgygttttttttggggatygtttagttygtgagygtttttygggggtatttttgygattttttttttgttaggggttttttatagttygtggtyggggggaagaatgattaattgaaagagygaggttyggagaaggggygtygyggtagyggagtttyggagtttttttttayggttygggggtatttttagttttagtygtatygggggagttttattttaattgtttagggaggggggttttaggggtgagggagggatggatagtgtggatygtgtttyggtttagttgattygggtttygattttgtygttgtagaygtygtttttggggaggtagtattttaagtaygtgtgttygagttttgggtttygttaagtttagtttygagggagttatygtygtttttggtaagagtttttttttattgatygygggtattgggatttttatttttaaggaaagaaggagttygggtyggggggaaggtgggygtttattttaggattttattttgttttgtagtttaagttygaggtttaggygtttttattagygtygtttgygtttygggtygaggtagaggttagatttaagattttygggagtygggaggttgtagagaaygaygaagaggagttyggygaggttatyggagaggtygttygggaggatygtgtgattttygtagatyggggatttaaggagaggtttyggagagaggggaagtygyggaaggagaagtygyggaaggaggagagatttaagaaagagaggtygyggaaagaggagaggttaygggtygttagggagtttygggaagttttattttagygttgggagttaygygaagggggttatyggtygtgggtaygggattttagggaygtygagtttaggaagaagtaggtttgggtgttttygaggygtttygaygaggagtagyggtttgggagtygttagaagtttygygtaggtaaggggygggattgagtyggtttygygtyggagtttaggggttttttttggaygtttygygattttggygaaataaagygagtgttgyggtygtagagttatttgtttttttaygtttggattyggtattaagttyggggtttgaaagayggtggtggggygttttaggtaggggagagatagygagygttatagggyggattygggtygtgygygaggagagayggtaagggaggttttaygggttttttaataygtayggatattttagtyggttgtttgttggtttttattggggygatgtttggggttygaataaatatgggaaggggygygagttggggygygttyggattttyggggtaggagttygygyggygtaggggttatyggtagttatattyggtggttattatgttgggtaygtggtgygygttgatgygttttttygataggttgatgagtagtttgttygygtaggyggtgggtaygtagtagggtgggygygttagggyggttttayggatttgtatttttagtagtagtattaygtggttgtygtagygygggttgyggtyggattgaggttagtygtataygttttggtaattgttggtttggtaggtttyggggatgagtayggagygttyggygyggaggtttaygttgagttygygtagygygtayggttygtyggyggyggtggttttygygttgygttgtgttygattyggttygygyggatttygttygygttattttaygygtaggttttgtagygtttttaggagtagtagygttygtaggggatygtygaggtygtyggggttatttgggtagagygygagtaggygygttagtagyggggttgtggtyggaggtagattygggaggtttygtagttyggtagtygtygtttgtagtttagtagttaygyggygygttagggtygtggtttayggygtygaygtggggtygtgtaggggygtaggattttyggtggtggtygtagtgggttttagtagtagtagtagyggtttttygtygtygagtaggygttttagygtygyggggttygataggttgattaggttttgygggaagtyggttagygygttyggatttagggttaggygyggygyggaggttygggtyggggggattygtagygttygtattaggygygtgagygtttttaggaaggggtttgygttgggtggygatttttygagtttygyggatggtttggaattygtaattggaggagttgagagyggttaygaggttaygtygttttygttygtttttgtttygtgtttyggtgtttgygygtatttgggyggygggaagggtayggtgtttagttggtygtgygtaggtagyggygygggttyggatygyggtagtaggagtagggtyggggttattygtgtgaagtagyggtggtygtygtygaatagtagtgtttgtagtygggyggtatttagtygggagtttgyggtgggtgggtaygyggttggtttaggggttgggggttygggggtagtygattyggtttttygtttttttttaygyggatttatttttttygyggggttgtagggttaaggttagttyggagtygygttaggttttygtagggyggtttatygttaatattaggtagygggtgtttygggaggggtagaggttttgyggagattagggtttagttyggttggatggaggtttatttagtttygttttatyggtttttttttttttatygttattggttttaygt

SEQ ID NO: 6753 - DNA, 1143 bp, synthetic construct
  misc_feature 1..1143: note = Description of Artificial Sequence: Synthetic polynucleotide
  source 1..1143: mol_type = other DNA
ygggtttggygttttgtttattttttyggaygggtagtttatttttttttattttyggttttygtygygygtattggyggygttygttttaygttttaagaatttygttttttagggtgggtggggggtgtaygttygatagggttaggttagggttaggygtggagttygygtgygtttygggatttygttyggggygygygggaggygtygggggtygyggaggyggggyggggaggggtyggyggyggyggyggygygyggaggagatygtagtgyggtyggygttaggattygygggggttttttaggtygyggygtttttygtttttttttatttttygattttttttygtttttaaaatgaggaaayggagtaattygttttaagttgtgtagtygggatygtttyggggtgtgtagtyggttygyggaggtttttttgggggygggygyggggygyggttygggggygttttttgagtaggtgagtaygtyggyggggagaygtggagagatttygaggtyggggtggggggaaatttygagggttttaggygggggtgggttygggaygtgygtaggaagggtyggtgtgtgygygagtgtgygygtttygggygygtagygggtgygyggttggggyggagggtgtttagaggygatyggatttygygtggtggtggttggggttttttgggtgygggtgtgygyggttaygagtttygggygtgtgtattygygygtttaygtggagggttgtgygygtgtggtygaaaagygtgtgygyggttttgygtagygttttgygtgttygagtggttyggygttggygtttaggtgttttagtgtggggyggttgtgtgtgtgtygggggygggggataggtgygtaygtttttaggtgtggagygtttgtgygygyggatgygyggggaygtgtgygtatatttgtttttaygtggaygtggttttttgtttgtttgygygtagttgtgttygagttttgtgtgtttttgtgygtgtgtatgtattygtatgygtgtgagtataygtgggattggaggattttatgggaggygtattttggaggggtygagatttattttttagtatygtttattttttagttattagyggtygg

SEQ ID NO: 6754 - DNA, 220 bp, synthetic construct
  misc_feature 1..220: note = Description of Artificial Sequence: Synthetic polynucleotide
  source 1..220: mol_type = other DNA
ygtggtaaattygggtttygaygatagaggtagygtagaagttygtttttaaatgagataattttattaaaattataattttttgtatttttatagygtttttttagtggyggagattttaggtgttttaygttagggtttattagagaatyggggygatygtaagtttagtygygggataggygaggttygttagttttaygaagygttatyggtaygt

SEQ ID NO: 6755 - DNA, 1860 bp, synthetic construct
  misc_feature 1..1860: note = Description of Artificial Sequence: Synthetic polynucleotide
  source 1..1860: mol_type = other DNA
ygtayggaagtttttgtttagttgttagygygygtygttaggggttgtattgaagttgtggattygggatggggaggaggttggyggttttygaagtagggtttatagygggggagggttagygtygtttggyggtggttgygygtggttagtgyggatttaggttyggttyggtyggygttgtttgygtgtggttygggyggagygagggtttttggagttyggttygttttgggttttaggaagttyggygtgtagygttagaggtygygtgtgttgggggagggaggagtatagattgtgtttgggggtatttaggaygaatttatagaggggtggttttgttttatttagggggtgtygtgggtaaaggttttggggttatttgtttggtgttttggagggygtagggtaggagtygtygaggttygygggttattgtggggygyggaattttagattaggtattygyggtttaattttygggttaggggattygygggggttttaygaatttgtttggtttatttgtgtaatagaaattygttygygtttagtagygttyggggtygtttgygtyggattygtagtttagtatttttygygttttggatttygaggaggttaggtagagagyggttygygyggttttygtttgygtttttagtttygygttgggtagygggatatgtttggtttyggygtygttatttyggttttygtttgtttttgagtgyggagttyggagtttttttygyggtgygttgggttttagagggttagaggttattagggggtyggtatyggygggagtttagtygggygygttttyggtttttttttatttaygtttttygyggtygttygggtttaggggygtagyggggaggagatttyggttagggtyggggagygygagggyggggyggggttyggyggggaggggygygggygggyggggatyggggygggggtygggttygggggyggyggyggygygggygggaggaggaggagtttttygygyggggtaggggyggagygagyggtygygtygyggagttaagtgagttygtttyggagtygygtygtygtyggtttagtatttygggygttygtygttttygtygtygtygttagygyggggatgtaggatgtaggygggygttaggttttagyggyggyggyggtagttgtagtagtagtagtttyggyggyggtagttttttttttggtygatggaygtagagtygtygtygtygtygttttgggtttggatggtgtygggttyggtygggttgtttyggtttagygygggggtygtggttttttyggtgttgttygtttyggtttygtygttygyggtttygttgtttttyggttttttyggttggtyggtttygagygagtyggtgttttygttgttgtygttgttttttgygttagatttygtygtygtygtygtygygtatttttttttygygttttaygggtaggtaaygtgttttygtttygtttyggttygggtygtygttttttttgtttttgggygygttttgttyggttyggttttggttttyggttygygygttttttttttyggyggttttygtygttttaaatttttaggayggagttyggtagtygtgtttyggygagaaagttygtgtttggaygttyggtygtttattttygtagttttggtaggtgttttygggtgtttggayggagtygtggagggattygtygtttaggttygygtggggatygtagggaattygygttaygtygggggttattgtttatygygaggtgttgaagtggtttygtgatygtygygggtygtggttgatatygygg

SEQ ID NO: 6756 - DNA, 441 bp, synthetic construct
  misc_feature 1..441: note = Description of Artificial Sequence: Synthetic polynucleotide
  source 1..441: mol_type = other DNA
ygtyggggtttyggttgttagygyggtygttatygtatggttgaaggggattgaggtygagttgggtaagaattttgggygtagattgtgaagttgattgyggggaggtttgggtttygttatagtygttttttatyggttttaattagtttygttttttttttygggatgtyggatyggtatttttattatttttaggtttttagggggttttggygttttagttgtggattttttaatattygtaggtygtagggttatataggttgggtttttaygtgtagaggatataaagtagatagaygaaaattggagtttyggyggtagygagaaataaaggtygygttaaatttyggaagtygttttgtttgttttagttgygggtttgattggayggtttttygtttagtgttttygattggataaygtttaaggtttygt

SEQ ID NO: 6757 - DNA, 5587 bp, synthetic construct
  misc_feature 1..5587: note = Description of Artificial Sequence: Synthetic polynucleotide
  source 1..5587: mol_type = other DNA
ygygggaagaaggttttggggggggygttttygatttaattaggaaggagtatgtatatgtaaatgygtttagggggygggttttgggttyggagtttttyggggygtttyggygtagttttagttttgygttattttygygygtgygtttttttttygygattttttattygagtygtgtttttggygtagtaggatygtttgtttygatggyggygaygttgaygaggtagtagtagttgtygygattgtggtggtgggygtgtgggtygtygaggttgtygyggtttyggggattgygggatygatggyggygggagggttttygggyggygggtttttgtygtygyggtygggttyggaggtggtayggttygyggygttygygttgttggygttggyggygttggttgggtygtggygaygygggtygttgttttggatgtgggatayggtttyggyggtttgtatgttgggyggygygaagygygagagtaygygtagtatygtttgggttttgtgtttttgygtgtygtygtygttgtagttygataygyggtattygtataygttttygttttgtagtygtayggtagatagtygaagtyggtgtgagatgttattgttttggaygygtayggtttgtaagagagtagggttagaggtygggttgggtagtttttaaatttatttttttggttattttggtygtygygtttttttattygygtattttaatatttttyggattttggtttgtttattattaygattyggttttttttttattygygtttatttagtggtatagggtttttaattttgygtggaygttaggtagttagttttttggattgtgtttttaygtttttattaygttaattaaaygtttattttgtatttgtttygtttatataaattaatattgtttgttttttygtagttggygttttagaagggtagagtttatttttttttttttttttttgtatttttaggaaattttaggttggattttttgttttttaatttttttaygtttttttygtttygaygygttttaatygatagtttygttttagtyggttttttttatttttyggagtayggagggtttgttygaatygttttttaaggaaagttattttgttatyggatttygttttttatagttaatattgtgtttttttaagaaggtaagtaaygttgaggttgttgtttggttttttggttatttgttattaattygttttttygygggatttttagaagttttttagygaagtgttttttttttgygtttyggtggggatttygggaagtattgttttayggtttttaataaatatttagggagtttttatttttgaatygagtttaygaggaggtttygttatttttaggtttttttaygttttaggtgggaagtttgggygtatttttttttagagttagtaattttatgattygggtttttygtagtttggtataattattttttatttygttttttgtaagtttgtaatatttygtatttagattygtaatttaggyggaggataaagggttgtagyggagggygtagagtagatgtttagggyggggtagagggggygggaagttggygttayggtygyggygagggygagtagtygygygttttyggtgttaggaggaatgttygtagagyggaggttggtaggygygagaggttttaagygygtagttygattaaggggagttttataggttagygtygagtygaattaggggatttaagttttggatttttgatttatataaaagagaattygattttgtaatyggygatagatggygttyggataygtygagtagttatygatgtaaggttgygatygttgttttatttgygyggttttatatgygyggtygtygyggtttgttaagggagggagttgygggattygaggyggttagaaggggtttttygyggttygygttgggttttatatttaygttgattttagttgtatttttatttgttatttaaaatgtaaagagggagagagagaygtgaggttygyggttttttggttaggggaattyggattygtttttaggtaagggtattttttttyggtaggttaggatygaaatygttygggggatgggggttgagggtataaaggaygttyggttttttaagagttttttaggaggaagygggttttggagttagtatggtgtttgattaaygggtggttgttttggtgtatatttgtyggttgaattggggagattggatggatattagggtgggaaggaaagtttttttttttttttttgggtatttttaggttttgtygygtggtttaaaatttttttttagtttattgggagtygtgaagaattggagggagggtygttgtgtttggatagtatttagygggaggtttagtgggagtaattttgggtgggattttgggagaatgtaggtgtgtgtaggtgtaggtgtgtgtgtaggtgtgtgtgtaygygagtatattagagtgtgtaagagagtgtgggttttgaggtagataggtagygtgggtttgttttyggttatagagaagtggtttttttgtgtttttgagggttggaggttttgtyggtttttyggtattyggttttttggtggtttttggaaygtagtygtgggagttttggggtttttaaagtggtagagggyggggagagtttgatgggattaagggggttttttttattatttagtatttattagagggtygtagttagygagtaygagtaagygattaggttgaggtgtggttttttaggggttgggygtgaatggagttttgggaggtggtgggaatagygatgttgttaaaataattgataggtttgggggtaattattgttgattttgaagatgttttgggatgygaaggtggaagatgggttgygttatagggyggygttttgygygagtgaagttygttgtttttttttttgggttagttttygtygtttygggygygagtygggygygygtyggtatygygtgggyggygggttattttgtttygggygttyggtaygttgagygttagttygtgtagtagttttyggggtggttttttgaggtattattattgaatttttagygaataygaggtggtttygttggttyggaaygygtagggtatttygatgtygtttttttttygtattgttatatttttggggatttttgtgaatgtagttgggggtggggagagagagagaggygtgattagttgtaggtygggggtttggggtaatttaaagygaggtagtyggtttttggttggttggttttgtgttttttatttygtagttgttttttggygtayggtyggaggggttagtaaagttyggggaagyggttgtagggtygaggtagggatyggttatyggttgtttattgttttttttyggatggggyggggyggtaggggygattygtgtttttttttygtttttggtygtatygttagagtttggttggggygygtttattttygtttttygtaggtatttttttygtagtyggggtttyggygggattgggaaygattygggygyggygttgttgttgyggygatttttygtygttygtttttttttattttttygggtttaggttgtatagygggattgttggagatygygaagtttttyggttygtttttttttttttttttttyggtggyggttttagtaaagattttttygagtttatagyggtagtaaagttttygygtttatygtyggttaygaagagtagtagggtatgtagtagtagaggyggtaggtattygagggtatygagtyggtttygttgttttatttttygyggggggygyggtggyggygggggttygggagyggagaggyggyggtygygtgggttyggatyggtttyggttygggttaggaygttttygagtttgttatggtttygygyggygtttttttttttggtygtyggyggtygttaattagtttygttttttygtyggtttgttyggtgyggtttyggyggggggygttgygyggggtgtgtaggagaygyggttttatygggaggttgttggygatyggttagtgtttttttttgttyggtygtttataggayggtggggattygyggtttagtttttgttyggygggtygggtaggggttgggtygygtygggatttatttttggtygagggagtgygtgttayggagtygygagtttttgtttttttgtttttttttggttttgttttygattgttatttttttyggttttygtagtygttttygtyggttttttygyggtttttttygtagggygagtgggygtttagtygyggygygtagatttggygttygatttagygtagygyggggagagygggttyggygtggyggattyggagtyggagagaggyggggagagggggaggggaggggaagggagggggyggttagtggttgggygttaagtygtttttatygttgtatygttttygttttttttttttttgttatagttygtttygttttygttttagagygtttttttttttttttygggggtygttyggagggattatygtttttttggttggagtatagtttygtttygtattygtttgggttgggagtttttttatttaaattttttttggtttttttttagtttgtayggttygagayggtygtttatttttgtttttygtgtgtttttyggttttttttgtagtttttagtttttaattttttattttagtttgggtaattagttgtttygttgtttggtttaggtttgggttatgayggatgggtgggygttyggggtygygagaagggyggaaygttgtgtttagtyggagattaygttgggtggyggyggtagygtygggagtttgtagtgygygagggagaagtgagygtatagygtttagygagtaggtgtttgyggygyggagagygtataygttagttagttygtagyggtygtgagtgayggtaggggyggygggggtggggtggggtggggagygtygggtaygatttagggttygggaggttttygggagggggyggggtttttgtttttggatygygggtttttgtgtttttaygygtttttygtyggtygtggttttttttttgttyggtgtaaagygagatgtygaggyggtaggaagtyggaatttatttttygtttgttttggygtattyggtatttyggtattttttttagtttttattyggagtttgttttttttttagttatttgagggagygyggtttggttttygaaggtaaatgyggggtggatatgtggttyggaygtagygygtagttatagttataggggygagttttaaggttygttttgggttttttttatttttttttttygggagtttttagttagtgygtttyggtatttttgtttttatttyggtttttaygttttagttttgattttaggttggggtggggtagttyggtggatttaygtgtttgttttttyggttattagtttttyggaggtatygt

SEQ ID NO: 6758 - DNA, 3643 bp, synthetic construct
  misc_feature 1..3643: note = Description of Artificial Sequence: Synthetic polynucleotide
  source 1..3643: mol_type = other DNA
yggygyggygygattagtagtyggtttygttygttygtagttttgtttttagyggyggttattgggatygattgttygttttygatttaggtaagatgtttaattgygatygygygttttttaagatygtttttygagtttygttataggtataygygtggtttaaatattttatttggttygaaaagttagtagaygggggaaaaaaaaaaagttgtgygagtagttagtygggtagtttyggagttygyggaggtygttttttygtygtttagtygtttagtygtttataygygaggtyggttyggggyggygygtagttygyggtatttygttttyggttttgygygtttatttyggggygygtygaggttatygtagggtatttatttggtatttgtttttgagtgtgtagatygtygyggtttttatttgggtttttaaataagttttagggagaaagaaggaggtaaaaaaaaaaaatttaattatgtaaatggatttyggattgggaggygygggatggatttgaygtygttattgtaygagttttyggagtagtttygggtygggtagatttatgggggygygttayggttaygttaggtttygtygtyggagtatttygaagttaattaaagyggtaatgtttatttttttggygatttttygtgygtgggtttattattttattattaaattygatttyggygggggygggggttttgtttttaygttttttttttttttttttggtygtttttttttttttttttttttygttttttattttttttttttttttttygtttttttaagtygtttgttttttatttagtgaataatgaataaagatgtgagtgatgggaaaagatygtttttttttttaattttagtagagagtaaagtyggttttaaagtaaaaatttagttgttagtattaaattgggaaagaaaatagygygtttttagttttattattttttttatatatatataygtaygtatatatataygtaygtaygtatattttattttaagtttatttaagttttggttggagattggggygttaaggttagggygygyggggttgtttaattygtyggggatattagggttggggaayggygygtgttttggttaggygtgtttttygygtttattttygtyggtttttttygtyggtttttttygygtttttatatyggtygattaggttyggyggttygttygggttgttyggtygtyggatgygtttagtaaaygyggtttttgtyggatttttgttaaattgtatagyggyggyggyggyggyggyggttgtygggagaaggygtaggaggaatyggagggtygtatygygygttygtttatttygtttttttygttygtttttygtttyggtttygtyggtygtyggtttttattygygtataygatttagtttttaggaygtatygggtgttygagtttygtaggtygggatatttygtagttgtygtattttttgttaaagtgaaaaygaaggyggttgataaattaygttttyggygaggtattygttagatataataatatttggtaaataaaattyggtygtygttgttattygtaygyggggttgagatttygttttgttttttttyggtttttagtttttggttattgygtttttaattttaaygtttttygttttttaatattttaattttttatttaattygggaayggtggatatgttttttaataggtatatagtaggaattatttataatatagaagtgaaaagggggggatttaattttttatttgtttttaaagaaagttttgtyggagtttatttygtagagtgaagagtgagtaatataggtttttttttgtttagttttttttttttttttttttttaattttttygygtttygatttttttttattttatatatattygtttatatggagatatttatattttaaattatttgtaaaattgtaatagatgggygygtygagatttggatatttttttatttattaaaggaaagtttttttttaattttaatttttttttttttgtttaaaatatatttygagtttygtttaygattgttttttttaatttattttygaaaaataatgttttgaagtaaatagaaaaaggtttattagtaaagattatttttattttagttatgtatttgygttggggggaygggaggygtttttttagattgtattttttttagaygtygygtaagttttgttttttttttgttttttagagtttttaygttygtattttttygttttgattggttttatttttttagtttgggattggtyggtttttttttttttataatttgttatttatttatttatttattttttttttggttttyggttgggtttttaggtygaggttyggttggggtaggtgttgygggygtygtttgygtttgtaggygttayggttttttttggggtygygggttyggattttggtattttagttttgaaattaatttttyggttttagtttggttaggttttyggggtataggaggtygatgtaattataaaatggtagattttagyggttttyggygttygtaagtttgatatattgtaagtattagttaattttaattgaaaaaaaaaaaaggttgtaaattattttttttttaygggyggaggggtyggaatttygtagtgagygyggattagagaaagagygtaaggygaattttygttttaggtagaggagaaaatggggaaagttatttgagtagaagttttygyggttttagtttatttttttttttttttattttttttattttttagatttttttgaaagtttttyggggtttgagagtggttygygggtygttygygggtggggggygtyggtygggttttyggagttggaygyggggtttygatygygygtygggygttaggtttygggatttttttttaaagtaayggtttygggatygygggyggggaggyggyggtttaggygtaggtttygttygtygtygaagttttttagygttataygatgttyggtygtagtygtyggttyggttttttttttttttttttttattttttattygttgatagtttttttygttaaygttatagttayggatatttaattagatygtattttttaatygygatggggygagaaggaatygggyggtaggtttygtygagatggggagggggaggggaygggggggtygygttaagagtttaaatttattttgttatttttyggaygtygaagttgtttttttattygtygtygttttttygygtygygtttttygtatygygtygygtttygtgattttttttttatttttgttttttttattttaaatattgaaaygygggygttaggagtaaattygggtaygtaaayggagygttgtaaaagattgtgtttaatgaataatgaaatatgtttataygattgatttgattatttttyggggttgaggggggaygggygttttgttygygygttttattygtttattyggtagagttttgygaattgtttttagtttagtyggggtagggygggttygatttttattagtttttttttagaatygtttygt

SEQ ID NO: 6759 - DNA, 808 bp, synthetic construct
  misc_feature 1..808: note = Description of Artificial Sequence: Synthetic polynucleotide
  source 1..808: mol_type = other DNA
ygggattttttatatttygggtygtagygtattgtgygagtggagggggtgagttttttagtagaggygtaaggagggtgtagggtgygyggtgtggttgtgggttgyggataggggtygggggygygttygggtyggtgtygygtggtgggagtagtaggygygtaggtagyggggagttttygygtatttagttygygggtgattattatgyggyggtagttgttttyggygyggtgayggygtttttaattgattttattatttttttttygtaaggtgaagtgyggtygttygyggggttygggygygggtagggtyggttggtagtygygggtyggygggggtagygttyggtttyggggtggtattatygtygggygtygygttaaygaaygtaggyggygggaggttyggyggyggggttygygtttttgtatygygatygygttagaaaatatttyggggttgggyggygtttyggagaygtatttttttgttatttttatygtttttggtaaygattattaatgttattatgttttatttttttttattttttttygtttttagagtygygttygygygttygatttttaggygtttygttttttttggaattaataataatgatttttaattaattttttgttagggttgtttgttygtgaatggggygttttttyggttygygggyggtaggygttttagttygggyggggggttagttttygttttttyggtyggattygygggggttygtaattygttygggygtyggttgggggtggtttygtagttttttygg

SEQ ID NO: 6760 - DNA, 3415 bp, synthetic construct
  misc_feature 1..3415: note = Description of Artificial Sequence: Synthetic polynucleotide
  source 1..3415: mol_type = other DNA
ygggggtttttttgygtgtttygatatggtagtatggttgttgygtgtatttygtatagttygtgttgtgygtggygggttgtygttgtaatgtgtagtttattgatattgatggatgygttaatggttggayggatagatgttagggyggatygtatagygttyggygtttgagygggggagggttaggtagygatttagyggyggyggtyggttaygyggagattygagtttaggtygyggttygtagtgggagggggtygaaggaatagaggtttgtaagaatagygaggggatggaaaggaggagaaaagygygattagggagaattataygttttygtgtgyggygtttygygttgtgtataygtygtatygggygygtttaagtgggagtttygaaggtgagttgggagtyggygggagttgatttygtgyggygtaattygtttttaggygataggagtttagygyggttattagaatggtgaggtygtyggyggtgtyggttaatttatygttttttygtttgtaagaagygttttaygttttayggtygygttttttyggtttggaggagtagyggttttggtttttgyggtygygggtatttaaygygtayggygttttagttttygagttygttagttygagagtttygtygtagttygtttyggattttttgtttygtttggggttygtattttataatttygagygtttttgygygyggaaaggygttggaggyggttttatagtyggggaggttagyggyggygtatttgtattttgggagaygtttggatttagtttaagttygtaggttgggygagyggagatttttgattttatygtgtgggtgagattattgtttttyggtttaaaagaaaagaaagtatgttgtgaatttttgaaataaatttgtaaaaatagtygtagagaaaaaataaaaaggatatagggtagaaaaagagggagaaagagattaaaaaaagaaaaagataaggggagggggaaggaaggaaggagagaaggaggaagaagtttggggtttgttgttttaggagygtttaggtagtyggtgttggagygyggggygttygttttygtygggattgtyggtttyggggtttgygagagygttagagttttagtyggygygttygggygtagggtygtttyggggatagtgggttyggaggtygttttygygttttagtagtygtygttyggtagygttyggagtyggtttyggygyggtygttttattttyggtttgagagttggtttagggagaygtaatygagttygtagygtatygatgygtygtygttygygtygttygggtttyggttttygtttagtygtygtygttygggggtygttygtatgagtttyggtttattygygtttttatygtygttygtaagtgagttygygtygtttygtygtttaygtygtttagttagtttttttttgtygyggttagtyggtygggtyggttyggagttttagygatttygattattaattaataattaatttttttagtttagtagtttyggtaggtygggygygggatayggygyggyggttttttaggttttyggggggagtttttggygggggatgggtaggggagttyggtttttttttttygttttygtttygttttaggatyggttygygtygtggatggggggygyggttyggttttygggggygaggggyggggtggagggattttgattattttaaagttaggagaggaaatttgaaggaatttttttttatatygattttygggaygggtttaggaaagtttgttyggggaaaaaaaattgggggaagtggttayggygggttttgggggaggagttgggtggygyggggtttgagggttgtttttattygtttyggttygygttygttttttttttggagggggtttgttygtgggttttggttttttygggggaygttagtttyggttyggggattaygttgggggtttyggagtyggygggtggagaggagtgygagtygggtggggtagttggggggtggttggggaygaaygttgggtgggaataggggtggggggtaaygagygtttygggaygggttyggyggggttggygtygygttttygygtgtgygtayggggyggaggyggaggggyggtatttttttygttggyggggygggggttttaygygggtttggggtygggggygggggygyggygttttygygggygggygattgataygattattttttttttttttaagtttgtttgttgtygaygtygtygttttagtygygttaygggtagaagattggatygtygagtttygggtygyggyggyggttgygygttttttyggatgtygtgattttyggtttaggggygggggtyggggtagtatyggttygggtygttttygygtttttttttttatygttttgttygtttttttttygttttttagtttygaatttygygtatttygtttggggayggggygggggggggtagggtygtygttttttttygttttttttttttttggtttttggagygatttgttaaattttttatttygtyggtagygyggttttttttttttttttttattttttttttttttgtttttttttttttttygtgttttttttttttygagtttttttygttygttttttttttttttttygtaygttyggggttygyggyggagygyggygygggggggaygyggagagtttgggygtagtagtattttgygggyggtygtttttygggggggaggttgagagtaggttygtttygttttttygygggttygtygttttttttttttttgtttttagttyggtagyggyggyggyggyggtagtggtagtygtyggagaagtattatgtygaggaggaagtagtaggygtttyggygygtagtaggtaygagtygtttttttttttttttgtttttttttttttttttttttgttygtttygygtttttagygggygygatttygtttttygtttygtttttttgttygtattgagtaatttygggygtygtttttttgtttgggtgygtgygttygtttygggtatygggygtttttyggaygtttygtygygttttgtttttttttttttygtatttatttggggagtygttygyggagygygttgagtygygttaggtttttatttttttagtttttyggttgtagagggaatgggaagtaatttyggtttggttttttttgtgggtggygggyggggttatttgagtttttygggatatttttygygtttttygagyggtygatygtygggggattgtttggtgttygtygagttagggagygygaaygagtgagygagtyggttttttygg

SEQ ID NO: 6761 - DNA, 3415 bp, synthetic construct; identical to SEQ ID NO: 6760
  misc_feature 1..3415: note = Description of Artificial Sequence: Synthetic polynucleotide
  source 1..3415: mol_type = other DNA

SEQ ID NO: 6762 - DNA, 1592 bp, synthetic construct
  misc_feature 1..1592: note = Description of Artificial Sequence: Synthetic polynucleotide
  source 1..1592: mol_type = other DNA
ygtgttttttttygttgattyggtygtttattygaggtagtttyggaatttyggattttagttatgygygtagggaattgtygggtygagygagtttatygaagtagtttygygtygtgygygtttygagygttygttttagttttygggtgagygtttttagtygtygttyggtygygtttgggtygttttttyggttagggggtagygggagtgtaggtagygggaagggagtyggtttygtaggtttyggggagygagygggygyggggtaggygtygggygggaggaagttagygtaggygtyggtygagtttygggagtygaggttggaaaygttggagygggygttgtttatygaaggyggttygggatygggaygygggttygagygatyggagygygggttgtygtggygttggtygtagtttaggttgatgtygttggatygggygttgtygttatygtygtygtygtyggatttygttaggttggttygtgggttgttygtaggttgygygttgagtttyggaatygtygygygtyggggatttygtttttygyggtttagttygttygtttyggtttyggggtygtygttgtttttttttttgyggtttagygygggygtygtttygtttttaggtttaggtygyggttttygtygttttygatygggagagtygtattygggttttagttttygtagggttagttyggttaggagtagggtygtttygttygygttygttttggagygttgtatggttyggttygtyggttttggygygttattttygttttygtttttygtygtygtttyggtygggtygtygtatygttygttygaagttyggagttygtttygggatttttgggygyggggyggggyggggtyggygtygggtyggggtygtttyggyggttaygygygggtygggggaygyggygttttgttyggyggygygygyggyggaggaatgtaagtttttaggygtygggtygygtttttttttygtygyggtttygygyggggyggagggatttttttgygggggtaggaatgygaggaaggagayggygttgyggtttttggaatgtggggggagtggyggyggtygygttgygtygggatttyggaggggygtggaggtygggttaggaygtaggggygggyggyggaggtatygyggggagagtttagggtttgyggggygttygggtygtygggtygttgggaagagttyggattttygtaggttgagttggaggtagttggygttattygggtyggagagatttaagtagtygatagttttttttatatttygttttattttttttttttgygtygttttgtttttyggygttgtagggtygatttagtttagtttggaatttayggygtttygttygtttygygtttaggaatattgtgygtttagygtagatgygtttttaygattttttgtttggttyggggttatgtggtygygtatyggtttttgaagtttttatttgattgttggggaaggygtttagaattaggagygggttggttggggattggttttygygttgggtygtttygt

SEQ ID NO: 6763 - DNA, 903 bp, synthetic construct
  misc_feature 1..903: note = Description of Artificial Sequence: Synthetic polynucleotide
  source 1..903: mol_type = other DNA
ygggttyggttggtttttagtaggtttgtyggggtttttgtattttgtgttygggatttttaatttgygaatagtttggggaggttgagygygagttaggagyggattygggggtgggggtaagygttaygtgygygttaggtttttggtgtgttyggtaggyggygttgygtggttgyggttggtttygagggtgyggggggyggygattygggagggaaaatttttgttttttttyggggtttgttttgttygttttttaaattygttttatatttttttygattttygtttttgtaagygttatttgtagttttatyggttttygtaayggtggtggtggttggtggggggtttygaagtttgtttttggttagtyggatttyggtgggagatggaggtagaaatttyggttttttaggagaagggygtttgtttatttttttatttttyggggtttggggagggggttgggtaggggyggaagygagttggagtygtgtttgtygyggygttgyggagtggaatagatggttggggaggggagagggtgygtggyggggaggaggaggggtgygggggtyggaggatagggaaygaggaatttygaagtttggagttttttaggagaagttttttttttygtttttttttagaaaggggggtatatatgygtttgtttttttttyggagagttttggtttttgttttgtggtagattttgtygygtaattttttgttttagggygygttttttatttttaaattttygtygygggayggggtggyggggttaggatygttaggagyggttygggtygygagggttaatggggtygtttttttaggggygaggaggyggygggaaaygggttyggggtggggaaygagttttgggatygt

SEQ ID NO: 6764 - DNA, 1592 bp, synthetic construct; identical to SEQ ID NO: 6762
  misc_feature 1..1592: note = Description of Artificial Sequence: Synthetic polynucleotide
  source 1..1592: mol_type = other DNA

SEQ ID NO: 6765 - DNA, 382 bp, synthetic construct
  misc_feature 1..382: note = Description of Artificial Sequence: Synthetic polynucleotide
  source 1..382: mol_type = other DNA
ygttttttatttttaatygygagataataygggttagaggttaggaaattatgttagtattaatgygggygtttaygagtgyggtggatygatgtggaagggtygggaygtagttygagttttagttttygtygtagygatggtygattttttagtygyggaygttgaaagygaggattttaygtygatgatttttyggygtattatgttyggygggygtttggttaaatagtttaagattgyggaattatattygttattgtgtatttggaygttatttgtagatttagygtttgyggggatttyggaaaygggagagygggttttyggaaayggtgattaatgggaaaygtgattagatgttattaggygaatagttygt

SEQ ID NO: 6766 - DNA, 665 bp, synthetic construct
  misc_feature 1..665: note = Description of Artificial Sequence: Synthetic polynucleotide
  source 1..665: mol_type = other DNA
yggggaagtagggtygygaaggtttttgggaaatgtagttyggygtaggaagtagyggaaygattygattttttttagtattaagttgygtttttaattttttagagttgggttygygggaggtygttygtgtaaaatttaggttgagtttttttgygyggagttgtgagttttggaatatygtggtttgttttttaggaygygtaaatagtgaagttagtttygttygggtgagtygygggggtttttgggaagygtygtttttggtgtaayggatygagatttgtggygtttttagttatygatagygtyggttttagtgtygtttttgttttagttygygtyggttttgttattttggtagygttaagtgtggaatyggggtttgtgttygygggtttggtggtgagttttygggaaatygttagttttgagygtyggattttttgtgttgggtgggagtgggggttygyggttttggtgttttaatttttggaggaggaygtygggyggggygatgtttgtgtttgtggttttttgaggtagtgggagtggygtgtgaaggattgtgagagtttggygtgaagtgattgttatttgttagatattygtttggttgagtgtggtttygggatygtgttygtaagyggatttygtggaggygt

SEQ ID NO: 6767 - DNA, 764 bp, synthetic construct
  misc_feature 1..764: note = Description of Artificial Sequence: Synthetic polynucleotide
  source 1..764: mol_type = other DNA
ygygggtatyggtttaataaggtgtagygaatagtygttygttttygttttaatttatagttttatattttayggtgttattgattttttygtatttagttatataggaygtggataggtatayggggtgatagtttygtattgaayggtattaatttttattygtatyggagttatatagatggtttgygaygagttttyggagatttataygttattttttagtttattttygatttgtagaatagaattggtggaagattttttttttgtttygaaggttyggggaatttgtattygggttttatygttatttttagttggatggaatttagtttttaygggttyggaaagaagygttttagttgttttygttttyggaggatataaaggggtygtyggtttaattttygyggggttygttgggaaaygtagttyggagtagaaaaggtygyggygtygtagtgtttggtagtagyggtgtagtttygygtagggtttgtaatayggttttttttttattaggtttttttatattggttttttttyggttttttagagagttygaaagttyggattttttgtagtttygagtttggttyggttatagggayggggtttagygttatattataygggttggtgtggaagtgygtaggtataagygttttgygygttttttttagtaattagggyggggagttgagaatygtaggttggtygtagggaaaaggtttgtgygtgggaaygygttagtggygygt

SEQ ID NO: 6768 - DNA, 1394 bp, synthetic construct
  misc_feature 1..1394: note = Description of Artificial Sequence: Synthetic polynucleotide
  source 1..1394: mol_type = other DNA
ygatgttaggtaygttataaaygtagatataaatygtaaagattttagagattygttatagttagygttagagttaggtattatygygtagttttttttgyggtattattttaatttttygttagagaayggtataygygtaygtagtagtttygtgtayggaaatattatttygttagyggttaggtattyggtttaggtaygygggggygyggyggtygttatttagtaaatattataggtagtaygygtygygttttggtttaggttygygatattggggttttttttatttaatttaygttagggttayggttataggtttagatttgaatattttatttttatygggattttgtagttaatttttatttttttttaaatttttygatttttyggtaggtgyggttttatattttttttttgttttttgaagggttttagygttygtttttygygygtttgygtattygaggtagaagtygatttttaaaggtttyggtgaggygtygttgggggyggggyggggttygtagttttygtttgttttygagtygagaattaaatgaaaaataaaaaggyggaatattgtttttttaaattttggatygtagtgtttataggggagtaggtttggattatttttaatggtattggttagttayggggyggttattataggtagaggtttgaggygagggatattgyggtttttttggtttygttttttyggttygattattttygtygagattyggttttaygygtttttttyggttyggagtagttgygggatttgttttygttttttygygygttagygtattygygayggagataggygttttttygtattttggygtygttgatttttagggttgggttattttttgagtygggtgaggttggggttgggagtygggygttattgtggtygttgtttttttgagggaaaagagygyggagtgggttaggttttgtaggtygggttaaggtggagaaaaggtttttgtggagttttaggtyggtgtgttttttttttygggattgagtttttgtagttttgaggtttggaggttygggyggtagtaattgtgtyggattaggttygtgggtgyggtttgtggtgtagttggagatygaggtttygygtattttygttygygttttagttatttaggttyggtygtagygaaaaggtttaagagggaagttagaggtgaaygttttaggatgaaggttttttgtaaaaygttgggatttagatttggggtgggtgtttggggtttaggaggataygttggatagtttygaaaagatatagtgggtggtttygggygtgggtaatygggtgyggaattatagygtattyggagttgygaatttagaygygg

SEQ ID NO: 6769 - DNA, 949 bp, synthetic construct
  misc_feature 1..949: note = Description of Artificial Sequence: Synthetic polynucleotide
  source 1..949: mol_type = other DNA
ygttttagygttttygagttatatttgtgyggtttatttaaygygatgtttggaygtagtttttagagaggaggtygggattggaataygtagtyggggaatggttgtaggtggtttagttttygttttygtttygttttygtttgggtttygtgyggtttygggtgygtaggtgaaagttyggttttagyggtttyggttttgttatggatttygygttyggygttttagattttygygtygygtygttygygtttttgggtatttygtaagtygaggtgttggaggaygtgttgygggagtagttygggtygttgttttagttggtygttgtttgtyggtttaagyggttgttttygggyggttattygtttattgaaaatttttagttggtgttggagyggyggygtgtggttaaygttaaggagygtgagygggtgagggatttttagggtygaygttygttttttttttttttgttttattattaaatatttggttaatattygggggttygtttatygtttattttygttygaggygatttygagttttygaggttttttaygtttttagtttgttaggagaatggtagtggttttttttttttgtattttygtgtagttgttygttggyggtygttgyggtggtygtttygttygttaattttttaggatttgtgtaggattygggtttgggaggggatagaggaggggttttgataattttaaaaatgtttttttgggtaggtgttttaaaagtttygygtttagggggtgygtttttattttatatygtaggygttggtgggtgtttgggaygygtagggatttttttygttttttttttttgttttttgtatttyggtttygaagtatataygagggtgaggagaaaggggggtttgayggaagtgattttttttttttaaagtaaygaaataygaygt

SEQ ID NO: 6770 - DNA, 1365 bp, synthetic construct
  misc_feature 1..1365: note = Description of Artificial Sequence: Synthetic polynucleotide
  source 1..1365: mol_type = other DNA
ygtttaatagtatygttyggagygtttatttttttttatttygtaaaaaaaaaaaatagggttattggttygggtygagagtygttttgggaagygtttttgttattaagygttatttyggggtgtgygagggagttaagggaygyggagatygggagtagggttgggtttttttgtagttttagygttggttttttgtttatygtatttaggygttgygtygtttttatatttatttttttttattttagtagygtgygggggaagtttygygtyggggttttttttagtaagattgtygyggttttyggttttaattgtaaggtaaayggtggtagagtttttttttattttagtygtgtgtgatttttatatttagtgtttttttttgtattggggygtyggtagtggygatttaggttttttagttttygtttagtttttygygtgygggygtygggatygtagtatttgtgaygtygaagtttagtaggtygtagaygggagttaygygyggttttggtatagggtaaaaatttaygtttaggtaggygggtagttaygatgtygggtaagtttagggtagattttyggtggygtatagggaagtagyggtttagaaggtygggtggaygtaggyggagttygayggttgggaggtygtyggygygtaggggtygggtttygttaggatggtttygatygagaaaggggattygaagygttygggagygyggggygtgttygggttagtaggggatttgggygtyggagagyggttagagygyggaggtyggattygagagttygagggagygggtggygggttgtttygyggtttggggttaggtatgaygyggtygttgttyggayggaygtaaggaagggagttygggagaagtgagaagattttgtaaaaggtagygagtaagatyggttgtttgggaattttttggygttyggygaaggtttttaaatttggyggggyggggtatggggyggtttttttttattgyggttygggyggggtttttaaagtttgtgagygttygttttgtgygaggtaaggtgggtatagtattaaagagtgtgtttttttttttttttygtttttaaaaatgtttattttggggyggtygtggggaggattttgagttygttggtgattttgggygaaatatttagttatygggtttygttttttttttttgtttattgaagaagggatgttygttttttyggggttttgtagaggyggagttgtgatttggagagyggtagggtagtgtttgyggttttggttttagttgattygygtygtttttgaygtagaagtttyggttagatttatttaggatygygygg

SEQ ID NO: 6771 - DNA, 2638 bp, synthetic construct
  misc_feature 1..2638: note = Description of Artificial Sequence: Synthetic polynucleotide
  source 1..2638: mol_type = other DNA
ygtygatagygaagtggtaggtaatgggaatttgggygggaagtaaagaattattaygatttatatygygtttaagtagtagtaygygggaatttggtatatagtaggtaggygtttatttaatatttgttatyggatttagtatttgggtagggagtttaggggtggagtggyggtttgggggatataaaggtttygttagtttttagttgygtttttygtaaygyggggggygggagtttagagttagagagagggggygaaggaattygtttttatttgtaygtygtttggggttyggttaatttgtttaattatygttttaaatgttagygggtagtatataataygygtttattaataggtttaaagtgtygtagygttygttttaaatgagaaaagtaggygataaaagggggaaaaagttaagttttttaatttgaagaatgttttgggtygtttygaaattatttaygygagtttaaaattyggagttagtttygtagaaaagttgaggtttyggtgygagggttgggggtgggaaygggggttgtgaataattygttaygaaaattgggttttttaggaattagtttgtagtygtttagtgaattyggagtyggaggataaygtygttaatttagttttttaggttttttgttttattgttagagaaagttgatygatttttaagaaggaaagygagatttttttaaagygggtataaatttaagtttttttyggtgtaggygaagaattttggaggttaaggaagattttagaggtggattttaaaattttaattygtaagaggggaaaagttaaagtaattttatttttatttaggtattggttagygtagtttygygttyggtygttagagagtagtttaatttygtaaataagttttgtttgggatyggygtagaaggttttattttttattttatggttaagttygggggygtattttgygggtygyggttttttatttttttyggygygttygaygggtatttayggtgygygttttttygggagataggggttygttggagaggtaygggttgtttaggttygggattattaggaaggggtatttagggtaygggggttttttaaagaaygygttgttttgaggtttttttattgygaataagattaaggygaggtgaggtttaggttttygggattgatagygtygyggtagggggttygaggygggagttggggattttagygttttttaygygygttttaygggggttgtygttaataaaggyggagggtaagggtgygtttatttaagtaagggggayggtgggtygttygggttgagtagyggagygtagygggaatygagagtggggggttgttttagygggtatatattttyggygaaatagtttygyggtttttggaaagtgtttyggaygggttgygggygttttttygtttgyggaggagatataaaggtaagagygggtgagyggaygtagggtygggatttttygggggtggtygyggtgtttttttattttygagttygagttgttgttttggtttttygattygttgattagggaygatttgatttygtttaggtttygttgygtygaggygttatygttgttyggtttttgtttttygtttttttygttttggaaggggattagttygtygttygtttygaggtygtttttttygtyggtygtttyggygttggagtygtygtttttttygttgtygtygtygtygtygtygttttygtygtygagttggggtatggtggggtygygggtyggggtygtygttttyggagtttttagtygttygygttttgttyggttyggttyggygtttttttygttygtttgygggttygttgygttagtygtygtaataaagtttgatagggygtggtttygygggaagygggttyggygttgttyggtyggggygtaggyggttyggttygggttttttyggtagygtygagtttagggttttttaattygttatygtygtygtttgtttygtyggggygttttagtttttggttygtyggggaggggygagyggggagggagggaggagggatygtygggttgggtaggggggtyggagggaggagtttyggttgtaagttgatattygygygtttygyggaattyggagagttgyggtgygygygtatatatatatatatataygtatttatatttatatgtttatattygtattttttaggggttgygtttttttgtaaygtgtatygtttttaatttttttttgygttttatattgtattttyggyggttttttttayggtttttttggagttttggaagttttgygtttattttttygtattttttaatttttttttaaagaatttttagaatttygygtaggtttttatttttttttatygtatyggygygygggygggyggtattgttttttgygggaaagtttyggaygtatatattggtygyggggttttttttttgtttagagttttttygagtgygygagttgatgtayggattaggatattggggatatttatggaatttyggaaaatgttyggyggtttttygygttttttttttgtggggttttaaygygattttygg

SEQ ID NO: 6772 - DNA, 1531 bp, synthetic construct
  misc_feature 1..1531: note = Description of Artificial Sequence: Synthetic polynucleotide
  source 1..1531: mol_type = other DNA
ygaaagttygtataaatygtatagaaaaygaataaatgtttttygaatgtgagygaatttatagtttggttagaaaaatttaatattgattttygtttttttaattatagaattttygaggagaaggggataygttaagygggtttgttaataatttttatygtatattttaaagygttgtaaattatatygattattttygattggaagtygatyggttgagattggaygtgaatttygygattygattataaaaggttaggaggaaagaggtagaaaagttaaaaggatgattaggtaggtggttygagyggttattttaagttaattttttagaaattattygtattgttygggttattttttttttaatattygtggttttatttattatgatgttaagaaaygtgggttaggaatggggtgttgttttttgttygaaatttggaggygtyggttttttagaygttttygggttygggtagaggggyggtaggggyggggygggygggtttygggtttgggygygygggtaggtggggygtggygggggygtggagagtttaggttygyggttatygtttygtttygggtyggtttaggaggagtygygtygggttyggttataagaggtyggttagtaggygtttygttagtattygttygatttyggttyggagtatygggygtttagygygggtgaaggyggagtygtagggttggtttttaaagggatgttttygttygagyggygagattagtttygttygtttttygtygyggtygygtygtagtygtttayggtygtygatatggttttttattgyggygataatttyggagtgtattygtagttyggtttgttttygttygtygttatygtygtygtttygggygttttttyggtagttagggygttttaygggttggtygattaygtygygtygtyggtygtygtygttaatttttatttgtggtttaaygggttyggygtgggaggttygtttttygtygtygtygtagtygtygtygygtatttgggygtttygtygtygtygtygtttttyggggtygyggtygggttttttttgtagttatygtttgtygtyggtatttyggttgtttttagyggtttttygygtagttygygttygtygygttygtttygttygtygygttygyggggttyggggagttgggttggttgtttatggttagtygygaggatttgatgaagatggtgyggtygttttattygtattyggygtttatygttatggttatttagagygygttygagygtaaatttatttttagttatatttattagttygtygtygatagtttttttttttattagygtagtaaggtyggttggtagaattttattygttataatttgtygtttaaygattgttttaagaaggtgtttygygaygaggaygatttaggtgagggtygttggtaggtgttttttagtyggggagggyggaygygggtygtaagggtyggygtaggggtyggtgtgygg

SEQ ID NO: 6773 - DNA, 2045 bp, synthetic construct
  misc_feature 1..2045: note = Description of Artificial Sequence: Synthetic polynucleotide
  source 1..2045: mol_type = other DNA
yggygttttygttttgtttgtatttttttttattgtttttttaygtttggaatgttttygtttttgtagtttgtagatagyggaaatygygggtgtaaatgtgtaggggtygttgatatgatyggttgtagaagtttatttagggttattygaataggttagygttygggattgtataagaggttaggygatgttgtgggtttttaaatttgtatagttgygatattttgygaygtgttattttatttttagtggggtggggtgggggatttttttygtagttygttgaaagygaggtaggaattattgtaatttttttgtttaggttgaggtygttatygtttygyggatgtaygygttgtaggggygtttttygtygygggtayggygygggaagggatggggtttggtgggagtgggtaggtggygggagaggygygtgttygtgtattagaggttttygtgygtgatataggtygatgagtttttgygggttgtatttaygyggagttatagatygaaaaggttagtyggtggtyggtgtgttaatatatatagagagaygttygttaggygygttgtaggttgggaygaggttaggagggtttaggttggaggagggttgaggagggttgygggggygggtttyggygtagggygttyggagyggagggggygggttygaggyggggygggtygyggygttgaygggttgtygtygttgtattygtttttagttygyggtgtygagygtaggyggaggtatatggtttygaygggaggygygyggygagtattyggagttyggttttttgtttgagtayggtagtygygttttygttygygygttttygttttttyggtyggtagttygyggatatgatygtgtagtttttttttgggttgggatttgtttgaagattttttttatggaagygatgtttttttagtaggagattttagggggatagtyggggygttttttttttttgataggagtgtttyggttygygggaggtagttgtattaagaaggtgaggaygttgagygggggttygtgtttttygtygtygtagtttttattgtyggygygygtttttygygttygttatagtagygygttaggyggaygtygygggaatttgaygttygaggttygyggtttttaatgagagttttagaatatttttygtttttgayggttagyggtagygtygtygtttttygtagagygttygttttttygtttttagagttttagttttttttygagygatttygtagtttttttttygtttttattygtygtyggttttgtagttyggttttttttttagtttaggygygygggttgtagtgggygatygttttttttygatttttygtygtgtttttgggtttttygaagtggtttgggygagtattgattgttttttggyggtgttagttttaaagttagggtyggygatgtttgttygggagyggtagtyggygttgaagaaggtaggtagyggggttgyggygttggtgggttyggtttttttatttgttygtygaggygyggttgttttatagtagttttyggggggtagatatggggagtattgttttttatattagggttttggatgatttygggttttttaggtgggggttatagtttgaggggygattgtggatgataaygttygatattayggggatatgtaggttyggttgggtttagaatygagtagggtgggggygggtgggttgtggttgggggttttgagggttgaggtgggggattttttttttgtattggtttttggtttttgggattttggtygggttggatagggattygggtgtyggtgtgggygtgggggtagygygtgttttttgttaaagttgggagagggatgtaggtgataatttgtagygttttatttygataaatayggtygttgtgttgygggaggatttygattygggttaggtttygttggaayggttttttgagtaagtgtaygtgggtygygggttgtyggtttttgtygtttygt

SEQ ID NO: 6774 - DNA, 476 bp, synthetic construct
  misc_feature 1..476: note = Description of Artificial Sequence: Synthetic polynucleotide
  source 1..476: mol_type = other DNA
ygggygataygttttgggagggygggttggyggtttttttagttyggagygygtggaggttgygygtaggggttygggaygygggatagggatttygygtagtttaggygtyggggaatyggggttggagtyggggatttgagtttagyggaygtttttttygtttggaggttyggtayggatygggatattagggygttygtggtygtggttyggtttttggttgttgygggtygyggtttttagtgggtttttaggatttttttttayggygggtatttatygaggttgagaggttaygtygtgttgttggggtttttygtygattatatttttgggygttagttygggtagagatygyggggattggttaggtygggttaggtygggtygggggagggtygygttttygggtttttgattttyggyggygagaggaagyggtatttgggttatatttttttygygygggtyga

SEQ ID NO: 6775 - DNA, 455 bp, synthetic construct
  misc_feature 1..455: note = Description of Artificial Sequence: Synthetic polynucleotide
  source 1..455: mol_type = other DNA
ygtttttgtttagygaggatygtgtagaagygggaatygggtattggagggygygygyggtaygygtatttyggttggtattttttggtttygyggggtyggaaagaatttygaatattyggttttaaaaggtttttagttatttygttttttttattttttatagtatagatggggaaattgaggtttggagaataagygtggtatatttagggttatyggaagagtaatgagttgaattagagaggaggaaygggaagygagatttttaagtaatgyggggtggttttygggttatyggaggaggtatggtygggtaygtttttaagtttyggtattygtggtggttgtgttagtygatatgagtttttttttttttaggaaggygtaggattyggggaagttttygyggttaggtygtttgtttattygtagatttygggygtygttygygt

SEQ ID NO: 6776 - DNA, 749 bp, synthetic construct
  misc_feature 1..749: note = Description of Artificial Sequence: Synthetic polynucleotide
  source 1..749: mol_type = other DNA
yggggattygagttttygggttgaggatygygggggattttaggtygggayggagttttttttggttygttgtgygygtaygtttggaaaggygggatttaaggtagygatgttgygggaggttttgtagtgttaaygagttttygaayggtttygttttattttttttttgtgtgtttygtaagtttttgtttagtaaatygttatagtttyggygygygagagtggygttggtaygtttaaatttyggggtttttggttaggttaggggggygggygtgyggyggggtygggtygggtygggtgygtttagygggtttygggtataygttttttatttgggygaggttyggtgygtaggygtttagygygggggtagyggtygggygtttaagttyggygygggtaagagttggatagtttaggggtygygtygggtygagttgtygttygygttatttttatygtygtygttgttatygttatygttatygtttgggttgtagtagatygygggagaaygtttgygygaagtttyggtgtagttttggygggatygtagtaattatyggagygtgagtaatagtttttyggttggaggagttattgttttaygygttygyggttygygygtygaggtaagttttgggygtttagtttagatyggygttttyggattgggygttttttgtttgttyggttttygttttttttygtagagygagtttgtatttgggygygtygttyga

SEQ ID NO: 6777 - DNA, 1134 bp, synthetic construct
  misc_feature 1..1134: note = Description of Artificial Sequence: Synthetic polynucleotide
  source 1..1134: mol_type = other DNA
ygaggagggyggggygttyggtttttagtygygyggttatygtttgtttagtttggttggatttgagttyggttygtygatygttggtygaggygtagttgaagtagttttttagtygyggygtttttattttttaattttayggtttttgyggygygggygygatgtagttggttyggggtgaaggtaaggygyggggygyggggygyggggtattgggagygaggtattggygygggatgttyggygtaaggtgtagggygygggtygtttttttttygygtttttttatttygttaaagtttttttaygatggtttttatttyggttgggttagtttygtaattttygtttgttttttgttttttttttttttttygagtygyggggttttyggggygygyggattttygttaggggtygtgtaggygyggagttttagtyggtttgttttgggttygaagaaagttgtggtttggagttagttttttttttaygatttttgggggygtttttttttttttttgagttygygatgggaaggygtttttattttattttyggggtttttgagattttttggygaggtggggyggygyggtaggtgtagggttggggagggtttgatagttttggagagtgttygattttagttygtygtygttttttaggyggattttttagaggtaggttttagttttyggygyggggaggyggygygttttagaggggygtagggtgygygggggtygttggtttttygggtattttttttttgyggttttttygttttttttyggagttggtgtttgaggtygttgggattttagtttggygttttttttygtttygagygaggtaggtgtygtgggyggtttyggttatttttgtatttygagygtttattttgtatttagttttaagtyggagagttttggggatagtygagagtgttagtggttttatagggagattgagggttttgttttatttygggygtygtgtgggtttgggttgtttatagtatttttgygttttagtgataggagaagttaagygygaggttttttaatagttgygtgtattttattttttaggtatttggaatttyggygtttagaaygtgtttttygg

SEQ ID NO: 6778 - DNA, 1645 bp, synthetic construct
  misc_feature 1..1645: note = Description of Artificial Sequence: Synthetic polynucleotide
  source 1..1645: mol_type = other DNA
yggygtttttttttyggaaaggaygttggatttagggygygttagtaygygtagtagyggttygygagtyggtaggtgggtagtttyggygygggaggaaggggaagttatttttttttyggaagagggygttggtttttttattttgtttttataataaggttatyggaggagaggaagtagttagttgtygtttgygttttgtaaagtatgtagttaggggagtagtttttggtgagtttagtgaatttgtttggygygtatttttattygttggagagtgygygaggyggtagyggygggagygttggttatttttttagygyggttttttttttttagaagttggatttagataaagygtttaagaagtttttyggtagttttttttgygaggyggtgagyggggagttygtagtygttagygtaggggttttygyggttatgtttagtgatatygaygtyggggaygtatttgttagygttgyggtagtggttaagtyggggttttyggayggtygtaagggttttttttgyggggaggaggagttgtttttygtygttgtagtygtygtygtygtygtygtygyggttgyggttattgtgygttattttatggatagtttgagtttygagyggtattatttttagtttttyggtttttaggggtyggagttggttgygttttgtttatttttttygtattaggyggyggttggggygttttayggatttgtgtattyggtttttaayggggygygttatttttayggttttatgttgtttttyggyggttttttygyggttgtgtgtttattygggagggygtagttyggtttaggagtyggtgygggtagtggygygggyggtagtagyggygggggyggyggttygggtatttattagtatagttagggggtttygttttaygggtygtattttggagtygtagyggygggattttgyggaggattggggggtttgggggttttaggttttggttttygtgtttaygtttatttgtgtaatyggtttttgtggtttaaattttatygttattaaattgagatgattattaygaaatagggtaggtgagygtagygtggaggggtttttgggttyggggataaagggtgaygtgtggttttggggaaggttygggatgagggagttgaatttagttgtttygygyggtgtttagagtgttttatygygygtaataaattttygtagatatygtatttttaatgyggtgtttttttgtgttagtgtttyggyggtttttgtagggtgttaatgttayggttgtatatygttttttttttttattatttttatttgaatagatttggaggaggyggaaatggaaattagggtatgtttataagttggattygttagatttttttgttyggyggtatgtttgtgtatgtttgtatgtyggtaaggagttayggatagggaaggtttaagagttggttatttgagygtagtagatgggttttygtagttttaggygttagggtttttayggggygttttygggaggtgggtatgaaggttagagygtyggtttyggaagttyggtyggagtaggtggttagatttgttttggagttagatttggttygggttyggtgygyga

SEQ ID NO: 6779 - DNA, 4698 bp, synthetic construct
  misc_feature 1..4698: note = Description of Artificial Sequence: Synthetic polynucleotide
  source 1..4698: mol_type = other DNA
ygtayggattygygttygtattygaagattttataygtttttygtattgtttttatagtattttaygttygyggtgtaygtttatttgtyggtagaygagttataygtttyggyggtttagattttygtgtygattttygtgggygagtttaygygttgggtgttyggygygtttttaggagtggttgggatygygggttggygtygggtagggyggtgggaygtttggagtyggygggaggagtaygtttaggygggttygygtygagttygagygagygggygagtygggygggaggggttatttgtaatygagtagaygttattatygttttttattygyggggggygggggygggyggttaggtgayggyggtttatttttygtygtygagtygggtggtttttgttygggaggagttttttggygygttttgattggaattttygtygtagtggygggggaggggggataygtgatygttyggttaggyggttyggygygttttattygygatgggtattttattttttttttggaaaagtygggggatatagagaaggyggaggagtaygyggggtgtaggagagtttattagtttttttagtygtagtgttggtgatttyggtygttgaattyggagaggaaaggtttttaygyggttagtyggttttgattgttttttygttttgtttttggtygtagtatttttttttyggttgtagtaatygttttttatatttttaggtaagggtaygtttagtgtagattattgttattttatagatgttagtgttatttaagagtggtgttgggtttttttttttttttttttttttttttgtatattagtatattgtattygagagaaatttayggyggtgtattgtagatatygtttagttttagggttygaagatttttygattaggtttygggatgtttgaggttttttaggttattaygtggaggaatttaggtttgttttttgygtaggaggaggaggygtygygggagttgtagttttygattttttttaggaagtyggtygggtggaaggggagagggtygttatygtggtgygaatttaattygtagtttttgggagtaygttgttaataaaggttaaattaaaataattaagtggtgtyggtagggaygygtygtatggttaggagaagttyggttattaattatttataaggagtattgtttttttggtgtgggagaatggggttgtgygatagtttttyggagttgygttttgttttgaattttaagtttttttagagtaagtggattgygtagtttattattttatttttttayggtttttttttggggyggtattattttagatggtaggaattyggagaaaatgyggtgttaygttygtygttatgttygtataygygtttgygttaattttagtaataygtggggatygtgaatttgggygtttgttttttatttaggtggttatgtgggtatatttatatgattattgattaaaattaaattggayggagaagtttgtttttatattggatttttttaaatttttgtttaagggagttttgygttygatttgggyggggaygtagtttttagttaagatygtygtagygtttagtagagttyggggatyggtggtggtggtggygggatggggaggaatagaggtttttgattttttggtattttattttttttttttatttagattagtygggtaataygtttttygtttaagatggtttttttaattggaaygtgatttagataatgtggaagttaggggtttttgatttatygtatttgggtttygttgggtataggataagggttgggtaggtttatttggaaagggagtttattygtaaagtttygggtataaaygttagatagygaaattttgaggaagtttaaagtttatttattgtaaattggtggggggtgggggagtattttatgtaaaaaggaayggttttattaaattagtaagtattttattttygtagtggaygttttgttgtttttggttttttttttttttattttatttttttaaattattaaggttggagaaattttataaataaagtataagttygtggggggggggggggggggttatttggtgttttaaaaaaataataataataaaygatttttgtaataagaaaggtgggtaygtttttatttttaggttttaattttaaygttayggttaygttaaaattgaagttgattgagataagagaattttagagtatagtaygtagatagataattttataattaaaaaatatgtattttttttttttygttttygttattttttttttttttygttattatttattttygtttggattaggggttgggagaggaggaggatgtagttttttygagtgtataagggaggyggyggggttatttgttgttgtatygttagaagagttaatttygagyggatttggtagggagttaaaattttttttttggatgygaygttttagagatygaggtagayggygagaatagatttagygtttygagatgtgttttttaatttgaattttggattatttttgtttgaaatgttttgttttgtaygtttgggaattattttgtgygattaaaygygtgatatatataygtataygyggggtygtttygtaggggggagggtgygtggtataggagtttyggatttttaggggttttgtatttggggagtggtgygagggggatygtttyggtgtggttgttgaygtgagataggtaattyggaaaggttttttttyggttgttttggtaatgggaagttgtgggtaaaggtgtaggggyggtttyggagygtatayggygtagttygtagtgaagggtagtggtgtggtggggtagagagattagataagggtaggygggttttgtygatttygagtttattygtttayggggttaygttttgttgagaaaatgygygatattyggtagggagagagtgatattgattaagtgtttttggagggtygagtygtttgttttygggagggggtygygaggttygttagtattyggttttygyggaagttgtgttagygyggtagtttygtyggygtttggttttattagtttttgtttttagygtttttyggtggtatygttygagatttgyggagtagaagtygaggataygagtaattygttgtgggtttgaagtgattaygttttagggttgtgaaaagttgtttygtggtgatttgggtaygaggaggttaataaagtgtagaattagttttgatttttatttaaaatgaagttggtagtattgagygtttaaatgatttygttaggattttggaggttgtgggagyggggtgggagagggtaaatgttaggtttaggataatataggatatgtttaatttaaggaagttttttttttygggttaygttttttgtagttttatttaattggaatygtttttgtattyggggttattttyggtattatgatatttagygttgttttttaaattttaagttttygyggttatattttttygtgtttgttggtattagtaagagtttttgtttgtttttttttttttatatggatttttttttttttatttttagatygtagtgygattggtaggtattttttygtttttttygygtttygygtygayggtgggaatagtagygatagygygatygtagttttttagtgttttygttttttttttygyggttatattttatttattttattygttaaatttygtatttygtygtygttttttttttgygygttttyggygttaatttagttagaagygggtggaagttygggtttatgtgtaggtgtttttgtgygggagtaggggagtttataggttagygattygygattttattttgtttttagttyggggtttatttaygtggaattygtyggttttygygggtatttaatattagtttttygggttyggttgtygttttttygaagttttagggygtttttaygggttaatgattattttagtttttttttaagttagggtttggttagttgggaaattttttygttttttgtttatattttttggtattttyggataaagttattyggtttttygtttyggtatygggaaagatgygygtggagagygtttttaggygttgggttayggtttyggtttttggtygtgtttgttgtgtgyggagttggggyggygggtatygtttgygyggggtaggtattttattygtygtttttttagtaygggtattygatygtygyggygttgtaggaaggaggtttygtygygtyggtttttttatatttaygtgtttttygtgtgygygttttyggtttgtagatgttataaggttggygtygtttggattttygggyggttttatttttygyggtygttaygtttygttttttgtatttagtttttttggygttttygttgtagtatttaagattaggygtygtttttgttagtygtgttgtttagtaygtttgagggtygttgtyggtaggttttatttttygttygggttttttatttatttttttttttggayggtggggtttaagttttgtattggggttgttaagttatygtttaygattttttgtagggtgtagygggagggygttttygaggygt

SEQ ID NO: 6780 - DNA, 462 bp, synthetic construct
  misc_feature 1..462: note = Description of Artificial Sequence: Synthetic polynucleotide
  source 1..462: mol_type = other DNA
yggttygtaaattgattatgaaatataygatgttaattyggagttgtattttttagttgggtattttygygygttggttttyggggtttygttttttattttttgtttttttttttygygttttgtttttattttttatttttygygttggttatttygtttttttggtagtttttggyggtagygygttttattygttttygtgtttttttygtttatggaattaattttggttttatttgttgttyggtttaggttggggagaggayggagggtggtygtagygggtttttgagtgaattatttaggagggattgagtatagtattaattagaggggggttagggggtgygggattygagygagtaggaaggaggtagygtttggtattagggttttgatttaatagaattgagataygtttgtaatygttggygtgtttygygtataggattttagyga

SEQ ID NO: 6781 - DNA, 300 bp, synthetic construct
  misc_feature 1..300: note = Description of Artificial Sequence: Synthetic polynucleotide
  source 1..300: mol_type = other DNA
ygttgtaaaatagtygtygggtgtagtgggtygggygttyggttattttggttgygattatygtagttttttaaaggatgygggtagatgtagayggttttggtttatttgtttttaaaggtttgggattgtgtttgygtgtttygggagggtattygaaatttgggagtttttyggygtttttagtttygggtatttggggttttttgttttttaatagtattaattttgagaataaygygtatygaaggyggaggtttttgtgttttggataagttygttaygggtaagttagttyga

SEQ ID NO: 6782 - DNA, 554 bp, synthetic construct
  misc_feature 1..554: note = Description of Artificial Sequence: Synthetic polynucleotide
  source 1..554: mol_type = other DNA
ygtyggggyggggattattttgtagtaggagttygtagatattgtagaagyggagaayggygttgygtttttaaattatggttttttttttaaagggttggggaaggaaygagggggtaagtagatgttggtgagyggggtaygagagtgtagggtttygttggtgtttttttttyggygttygtyggatttatygtttttatygttgyggtgttygaattygyggattyggatyggyggtagtagaagyggtagyggtaaagtattygtagaatggggtatygygaaatagttttttttttttttttttttgttggtggtgtagtygygatagttygttttttaggtaggggtttggagtttgtttttttttyggygygtatagtaagttttagagttygtyggggttgttygagtaggtggtgtagggatgtyggggtgttggagaaggtgygggygagggttgtaaggagtgggtaggttayggaggggaagggttgggggagaggaggagtaagtaagtagtattgtygttygygttyggggtgtttygg

SEQ ID NO: 6783 - DNA, 1153 bp, synthetic construct
  misc_feature 1..1153: note = Description of Artificial Sequence: Synthetic polynucleotide
  source 1..1153: mol_type = other DNA
yggygtatataagttgaggattgtygaggygttttttgygaggtaaataygaagtygtttggttagtgagaagaaattygaggtggtttttggggtagatagagtaggatttgtttttgttttttgtttttttygtttttttttttttagyggyggygatygtagtaatagyggtagtggyggttgttgttattgttttgtygttgtygagtyggttatttgggtattygyggagtygygtygttgttatygtttyggyggtttttyggagtgygyggagggggyggyggaggagygagatatttatagtaatygaggatgygaggggygtttagtagtagygagtgtttgggagttaggaggaggttttygygygtyggtaatttttagtgttaggygttttgtagttttygygygtygygtttgggttygtatygttttygtagtgagggttygttygagyggtaagtttttttyggyggttaagtygatatttttttttygtttygtygtttatttygggtagtagtygyggaataatggagagygtagttagtagttttggagayggygttygggggaggaygygtygtygtygtygtygttgtygttagggtaggygygygtygygtggagtygggygggtgygagggygygyggyggggggtggggggtaygygtygygyggggggygggggtagtggggggygygygygygggttyggggagttygyggggagagttyggygttyggygtagygyggygyggttaagtttygygtttttttygttttttttyggygygttygttttygtttygtygttygtattygttgggggygtttagaaagatgtatagaggtaayggttaggggagyggaggtttaagttatatgtttgygttttygggggttagagttygttagttttygyggatttyggttygyggttagttygagyggttygggtgagtagyggtatagyggttttttygtttygyggttttygttygtygagaygtggttttaagaagtggtgtygtagtyggggtagaggyggaggaagtygagtygggtaagtygggaaggttgyggagaygttttgtyggggtaggtgttgtagttttagttagyggtttttayggagggggygg

SEQ ID NO: 6784 - DNA, 1603 bp, synthetic construct
  misc_feature 1..1603: note = Description of Artificial Sequence: Synthetic polynucleotide
  source 1..1603: mol_type = other DNA
yggttygtagggggtgtttyggggygttttttgygygaggtttygggaatagggtaygagggtttaggttgtttagttgtaggtgtagttgtttyggaggaggaygttgtttgyggygtyggggagtttttygyggttggaggygaggggaattgtatttattatagtgtttygtttgygygaggattatttatttgggtyggagagagygygygygygtaagagygagttygggttgtggtttgggggaggggagygagggggyggggagygttttatygygaggaygggggyggggayggattgttaggtggggygggtagttggggyggttygaggatttttttygatttaagtgggtatttgyggagttaaaagtaggggaggygttgtagttgtgaagaggygtgggggtygygggaatttttttttggtyggtgygatgaaagtygggyggaygaggtggtttaayggggttgagagtggttyggtygaggygygggttgagtttttagtatttggtttgagyggygtgggtagtagtttgtatygyggatatttttaattttgtygygtttgygtygtattttggtygtggtagygatttttygggtatttttgaggtygtttttagttttataagtatttagtygtttattttagagtagyggygtygatygttttaagaggagttagttttygatatygttttttatttatttttttatatttttatygttggagggggtgagtgtygtggataggygttttygttyggggatagtttagyggyggtagttagttygattttttttygygygggtygtttaaatttgattagtagagygagyggtttagygtagtagtygttttygyggtttttagttgtagaaaagtaaagygtygggaggaagtagtagagggggggttatatgaggttggaaagtggygggtgtayggygttygggatygtygaggtttttgygtygttttgyggaggtgatttygyggtggaggttaygagtatygtygtagttttgaygttgggatttaggggttttygagygtttayggygtggtggygtygggtygygtttttttagtagtttaagggtygagtggygygtggttatatttatagtagygtaggggygtygtgggttgayggtttttttygygygagtygttttttygyggtatttatttttttttygygttygggtttttyggaagtygaggygygggttatttggtgggatttygyggttttygttttagggtyggggtaaygyggygtgttgattgggaggattttyggygttygyggtttttattatttygtttygyggyggaggygggygtttagggtagggayggagttyggagygttgtagagttyggttaagtttagttttttttyggtttggtagtygyggttyggatgtygttagttyggygttagagggggttagtygataataaaaatgtttgtatygttygtaggtggaggyggtttattaggttaggaatygaaaggagggagggatgttgttaggttaaatttaaygttttggttaagggygygttaaggaaatygtatygt

SEQ ID NO: 6785 - DNA, 1411 bp, synthetic construct
  misc_feature 1..1411: note = Description of Artificial Sequence: Synthetic polynucleotide
  source 1..1411: mol_type = other DNA
yggttttygttattygggtggattttgtttatygygagyggggaggyggttgtttttygtgtaggattttygttgagggtttataataagyggttttaagygggggtatatttttygttattttygyggttttttaaataaataaagaagttaaagtyggttgttttaagattaatgtaagygtttaggaagttttgaggygtttgagggygaggtaggttgtygtgggtaggtgtgaatattttagttttygyggygggtttggagtygtttagygtaggaagagggtagaagtgggttygygtttatgygggtattygaaatgaaaaagagttgtaaayggtataaaagttygggggttaggygtaggaaaatagagtaagggagttgttttagtttttaaatattgtatatggatgggtgtttygyggaagattattttagattttgtgaaagaagtttttattgggygtyggttayggtattggggtgygygtttgttttgygagaagggttttttaggtygygygggggaaygtaggagaygtttgttttygggggaattagyggaggattgttttattttaaagtgaaaatttgtaggttttgggaaaygatatttaaaaaagtatataatttttatatgtygtttaatggaggatttttataatttatagyggtagataaggttagagggtgtaataaaaaatttgaagttttttttttttttttygtygttttttyggaattgtattttgggtagyggagtagaattyggaatgtgaatttttttygatatatgtttttygtagataagtaaataatttggaygtgaaatggaaatggtaattaatgtagtaatgttgttatatttygagtgtgtaaattttattgattygtygygttayggggggtgtygggygtayggggatyggtggygtgygtttaggttgtttattttttttttttttttttttttttttttaggttttygggyggggygtttagaaatttygtagggatgtggaygggttgygggaagtaaggagttgtttaagyggygttygggattttyggttttyggtttttggaggattgggygggtgttttgygtttgtttygatagtygtattttttatttatttttttyggttattatygtygygttagygttagtagggttttttyggggttygagtgtagttyggttttgaagtatttaggagagtttgagttygggygatagaggtttggaggtagagggaatttttaaatttagtgyggygggtggttttgagtgyggyggttaggttttttttttttttttgtttyggggttaagtgttgtygggttgtttggygagagtttttttgaagtttttttttattttygtatygaaagygttgatygt

SEQ ID NO: 6786 - DNA, 2629 bp, synthetic construct
  misc_feature 1..2629: note = Description of Artificial Sequence: Synthetic polynucleotide
  source 1..2629: mol_type = other DNA
yggtagtaaayggtagagtaaaggagtygtttttttttatttgaaagtygygaggaggtttggagygttttttttygttggggttygagttttttgggttttggtygggtgygggtagattttatyggggttttygttattttttagtttagttygtagagygagtatyggtagattttaagggygygtgagtttggttgtyggttgggtttttgaggttygttgggygggggtaggtyggtttaggttgtgyggggygtttataaaaagtgatttggagatgaattygttygtgygyggttggtygtttygttataggggygaaggygtttgaygtaagyggaattyggtggagtttataygaattagaatagagygaggtttttggygtattagggattttaggaggtagtttygttagagaygygggtygtgtttygggaaatyggggggyggggggaggggaagagygtagaaaagaaaatttattaaggyggggattggtttgagyggggaggggyggygaggtyggagtttttttttgttgggyggattttttatggttagaggttgagttttattttygtyggtygttttttaggggaaggggaaggagaggggagagtagygataggtttttagtaagtaagygygggyggtattygtagtttttagaagtttgagatttggtygtaagyggattygtgygttttaattttttgtygygttagygtttggagyggagagtagaggyggttyggtygyggygygtyggttttgttatgatggttagttatttygagttygaggaygyggygggggttttgttggttttagagatyggtygtatagttaaggagttagaagggtygtygtygagtttaggtaagggyggtgggggtggyggygggatagtttyggagaagtyggattyggygtagaagttttygtattygtaygtggygtttatygttatggygattygygagagygyggagaagaggtttaygttgttyggtatttattagtatattatygygaagttttygttttaygagaagaataagaagggttggtaaaatagtattygttataattttagttttaaygagtgttttattaaggtgtygygygagggyggyggygagygtaagggtaattattggaygttggattyggtttgygaagatatgttygagaagggtaattatyggygtygtygtygtatgaagaggttttttyggtygtygttygygtatttttagttyggtaaggggtttttyggggtyggaggygtygtaggygggtgyggygtggygggygtyggggtygayggttayggttatttggygttttttaagtatttgtagtttggtttttttaataattygtggtygttatygtagttttttttatttatgttttatgttttttgttagatggyggtagtygtagyggttgtagtagttgyggttgtagtygygggtttyggtagttttggygyggtygttgtggttaaggggttggygggttyggtygtttygtaygggtygtatataygygtgtagagtatggygttgtttttyggygtagtgaattygtataatggtttgggaggttygtyggtygtattttygttttygtygtatttttattygtattygtaygtatattatttgtaygyggtygtygtatygtygtttgttttatygtattayggggtygtygygtygtygtygggttagtttagttttgttagtttagttatygtygygttttyggygttygygtttattagtgygtygggtttgtagttygtttgtgttyggtagttygagttygttatgatgtattgtttttattgggattaygatagtaagatyggygygttgtattygygtttygatttttgagagtttatygtatgtyggtgtagayggatgygaggatgtagggaygygygaygtyggtttyggtygtagtygaygaygtygtygttagtttgattttatattttttgggttygtttttggagttagygtttagggtttttttgtgttttttygtttttttaagtttttgtygtttttttttgtttttttagtttatgtttttttgtgtttatttttttgatttttgtgattttgtatttttttggtttgaagttgtttttttgygygttttttattgggttygttttttttyggagttttagygttttttgtttaaatttatygyggaaagggttyggggyggaggtgygatygggygtyggtagygtagattttttggtttttttttataggtyggtgygttygtttttygygtttttygttygattgtygtgtagtttatggttagaygygtyggataggattgatggygggatygygttgttygagaaagggayggattaataygtgtgtttgtttygygaatttttttgaagttgtttagaagtygtttgtygyggggtttattaggyggggygggggttgggatttagygggagtyggggtagtttggttttayggtttgtattyggtttatatygygggygggygyggagggaggttgygtttttttygttattagtttygtygtttygggtattttygggtttyggygg

SEQ ID NO: 6787 - DNA, 1686 bp, synthetic construct
  misc_feature 1..1686: note = Description of Artificial Sequence: Synthetic polynucleotide
  source 1..1686: mol_type = other DNA
ygaygtttttaggtagttgttaaagttyggggttygtyggtttttaggttygtttgatagagttaggygttygtttggatttagttttttttygggygggaggygyggggaggttaagttttttaaaggaatagggtgggtaggggagtggtgttaggttaggtttttyggttttyggtagttagagyggagtaggaaaggtagyggggagttttatatttygygtttttttyggatttygtygtttattyggagggtataygtttttyggggagttagagaygttttgggggagtttgaggagtgttagyggggttttttttggagtttataagtttttattttattttygagttgggagataagttatagttyggttttttttttgaaagtatygtygttgattttttttttaggtaggagtagatatttgtttgtttttayggygygttagygttttgttttagtygtttttgggttagagttygaaatttatttattgygtttttatttyggtatagatagtttttaaagttgttygtattttttagatttygttttttgtttagttttyggatttygtttaggggttgagttgaygttygygggtggatttttttggttygttgygtagggaattgatttygggaatttagggygtatagaggttaaagaagttgyggtaagggagggtgggtaaatttagtttgagtttaggtttttgtygtttttatttttaagtttgttttgttttttttttgggagaagagtaaatttttttagtatttatttttagtygygaggaggyggygttgtyggttgttttygttatygtygttgtygttttttaygtttagygttagtaggagyggtatttagtatagtygtttaggtagtattttygtagtagtygttaaygagttgtagtygtygtttattgttygygtyggttttygtttttyggtgtttgtygtatygtgggtygtttygtygtgttygatgggtgygtttttagygttgtygtygyggygttyggtttygggttttygtygttgygtygttagttygtyggtagtagtygygtttattggygyggattyggagyggtttaggygtttatttygggayggttygtgaygttayggagggagggaggtggttygtgtatatttatgaaygygggtatyggygtygggtttygygtttttygttttaaggtttygatttttaattttttttagtygtttttaygtttyggggttttgtttaggtttttttgtttagtygggatygggtttttagaggattttggtgggyggtttyggagagttttttagtttygygtttttatttygattttyggaaaagttgtygtaagggatggagggtttttttagaaagtggttattygaggtttgagggttatttggggtggygygagggattttgatttgttatgttttttgaattgatatttgggyggagaggattgaygggygtygttaagggttttgtttttggttgggtttttgggygttttgygtygattggtttggggagggygttaggygtatattagagtagygtttagtggtgttaggggttgtygggtagagtagatagttttggatttggatggtaatggtagggtttygygttattttygagaagtaggggtagtygygg

SEQ ID NO: 6788 - DNA, 1686 bp, synthetic construct; identical to SEQ ID NO: 6787
  misc_feature 1..1686: note = Description of Artificial Sequence: Synthetic polynucleotide
  source 1..1686: mol_type = other DNA

SEQ ID NO: 6789 - DNA, 2132 bp, synthetic construct
  misc_feature 1..2132: note = Description of Artificial Sequence: Synthetic polynucleotide
  source 1..2132: mol_type = other DNA
yggttygaagagttggtgagygygattatagggtagtttgyggayggttttttyggataggataagggygagggaaayggtagaatggtgaygtatttgagtgygtttattagaygaaagaagattaattaagttttygtgtagtgygtagataggtygatatatatatatatatatatatatatatattaatatataygtaaagatagtgagggagygagaggygtatttttaggtagttgataatgatayggtttygattyggaygygggtttaaagtttttygattttyggagtgttttttttttyggygattttyggagattatygttggygtattttttygttttgttyggtttyggygttttttttttttttygtagtygtagtttttygtttttygygaaygyggttttttagtgttttttagaaygttygygtggttgtygggtttygaattttagggtygattttagtattyggygygygygtygtygygtygtygattagtttgyggttttygtattaattattaayggggyggttygggttgyggyggttygaggagggggatggtayggaattygagataggggataattttatttttygaagyggtygygaaattttagtttgggaggttttygttttttttyggtgygttygttttttttttygygtttyggttygtatatttttatttttygtttygggggyggyggyggyggaggtattygtatygygygatgtttagttatygttgtygygttgtygtygtagttagtygygtygtygtygttgtygtagygygggyggtygygygtyggtagtaggggtttggygaggaagtygttgagtttygygygtttygygtttttggyggtygtagygttgtttattaattgatttttttattgatttatttaatttttaggagyggttgttyggaggtaygggtttttttttaaatttgtagygaygttttyggygtgggtataaaggtttygayggyggtyggygggggttgtttagygttygggagtyggygttagaggtygtttgygygygttttagtygagtttygggtattatgtygyggygtttgtagtttyggggygygggtataaaaggtttttyggtttyggtttyggtagtttygggggtygttyggaatttttattttgtygtttttygggattttttagygtttgttaagtygttgttgygttgggaygaggtgttygaygatttygtggagtgttttattttgtygggttatyggygtttgtygtgtayggtttaggagtgtttagtttyggtgttgaagtttattaaygagaygtttaatttttggaygtattttatttygttgttgttgtttttgagtaagttttgtygtttgttttttttgagyggyggygaygtgtttttttattattygtggttgttatygttgtggtgttaygygtygggagtgttgttgattttygttatgagttgtayggygtaygtgtttagttgtttgtygttgygtttgygygtygtttttttttatttggattaygygtttattagttattayggtttyggtagtayggtggtttattattattatttgttgttaggttttagtttgttggatgttagagttatgattttatatttgtagtagygtttgggttggtaygtggattgtaygygttttatygtygtttatygygttttggtgttgtttgtggttttygtgttggyggtggtttgtattgtggtttgttgtaagagtygtatygattggtgtatttattygttygygttgygtattttygttttygttatgtygtttagtatggtttgttttattatgttygagagttggtttttygatttgygtggggagaattttatatttttygtgtatttttatygtygttatttttggttggtggtggtygttttttttaaygtgagtaagattttygagygtatttagtygggttttttygatattatyggttatagttattagtttttttatatttttattttttttagtatttaygattaggtgtattaygtagaagagggtttgygttagtttttttaggygtygtttgtygtatttattttttygg

SEQ ID NO: 6790 - DNA, 2954 bp, synthetic construct
  misc_feature 1..2954: note = Description of Artificial Sequence: Synthetic polynucleotide
  source 1..2954: mol_type = other DNA
ygtttagagygtggtagtttgyggggtygtttaygtttttttttttggygttaagtttgtggttygyggtttttaagaagggtatgyggtgagttygygggtttyggttgygtattatttgtaggtttttayggatgaggtygtggygygagyggattygtgaattygttatygygyggggattaygtattaagtggatgattttgaggtttagggtygggtttygtagtagtggygttaagatygttaygtygaagaygygtatattttttatgattagtgtgyggtatttgyggtattttttttygaaaygygttaggygttgtggygggtattttttgtataygyggtygtttattaattttaygatttttttgyggtaggyggggtagagtggtgaygagtatattattttgttggtggttgygtygaagatgtttagygtggtgaggttgygtttttygttgttygyggggttatataattggaagatagagaggtygtagyggtaaagagygtttagtatgtttygygttgttttttgtagggaaayggygtttttyggatatagtttttgttatatatgttatattggttygtagagaaagaatatttygggattttggttgaatagttygtygaagaaygaygagttagagygttaygtggtgaataygtatattagttgtygtttgttttygaygttttyggtgtttygagtgttattgtttggaggggtygtaattttygttatttttgtygyggttgtaggagtygtttygayggyggtagygggagggyggtaaggagtgyggaggtttaaaygggtatgagtayggggyggttyggtyggaggyggttttgggygtttttagttgttttyggttgttttygttgyggtatttagyggtttatyggggttgtattgttgtagyggttttttgtgttatttgtagtttaggaggttgagtatagtgagtattagtagtagtgtatagttygygtataatattagygtttttttayggaatatttttatttygagaggggaygygggttagyggygttttgggygtyggggttattgygggagtagggtaygyggygyggttgtaggygtagtttggagtagtygagggagygygttygggggtagagttygttgygggttgyggtttattataggtataattygggtyggyggygyggyggaggtagttttgtagttygggaaggggaygtagygggttggttgttggygtygggattygggtygygatttygaggygggygyggyggttggtttttagygtttaaggttggtttttttatggtagyggtttygggtaggatttgygaggggaagyggagtgagyggatgygttttaattttttttttagttttttttttttaagtaaygtttattttyggttttgttyggttttttygtttatttggagtygagggygygttygggagyggtttyggattatygttyggyggattgttyggttgttattygtttttygatttygttttttttygttttygttgggggttttygtattttygaggggtttggggagtyggtygatttatttttgggtagttttygggtagygggygttttgyggttygggaagaaaaatttttaygyggtttagagtttygtttygygtttygtygaattyggygtttttyggttttagygaygtttttttygttttttygggatygtagttttttgtttygtttaggggaaygaagtyggttgggggygatggttgggggyggtttatatgggatttagttttyggtatagyggygtagtttttttygttttyggttttygtgyggygaatttttttatttttttggtagyggtggatggggtatagygygatttygtagyggyggyggyggttgtttttattatygggaggatgttygggyggatagygtaggtaattttygtygtttygtagttttygattggattaaaggatttygaatatatagttttaggtaaggaaatttaggtgtgtagtattgttygattygatttaattygttttyggtattagygtttttggttaaygaggtatttaagtaaagaaagatttygtygtagtygtygtygtygygygaaagyggygtttaggaggatgttgttattygattttttttaygtygggygttygtaaygygttyggattagtttttgygyggtttttgttagtyggygttyggttggtgygygtygtygtttgtygtygyggtttttttttttygtygygtagtttttttttttygtyggtttygttttygtttttaaygtygagtyggtttttatygtygttgygtttygggggttggagaygygattygttttatygygaygygygggggttgtagtttaygggttygaaggtttagttttgygygtaaagygtygggatgygaaygygggatttggagttygtyggtgtygagagttgttagagagttggattttgygtgtagttgtyggattyggttttatgtttttgtttttagaaagagttggtgatgaagtttgggtagaaattttttgtyggtygttygttttaygtttttttyggggtygatattgttaattttttygggtattgaggatatttttgygttttggagyggtgggaggaygyggagygtygttttttggttttygatattttgttygttttttttagtgggtttgtggttgygttttttygaaggaagtaataaatttttttgattttgggggttagaggagaygttttagtttttyggaggggtgtgygggygggatygttttttygttttattggatttttggtyggggttgtttttgttttattgtgttttatatgyggagtttygatgtttttygtattttygttygyggtgttgygtttattgtgattgaygt

SEQ ID NO: 6791 - DNA, 2954 bp, synthetic construct; identical to SEQ ID NO: 6790
  misc_feature 1..2954: note = Description of Artificial Sequence: Synthetic polynucleotide
  source 1..2954: mol_type = other DNA

SEQ ID NO: 6792 - DNA, 885 bp, synthetic construct
  misc_feature 1..885: note = Description of Artificial Sequence: Synthetic polynucleotide
  source 1..885: mol_type = other DNA
ygttygtygtttttttgaggttayggygtaggagagaaggagggygyggaaaygtyggtatyggttgggaagtttyggtgtttygggttttttttggygagggyggagaagtyggyggtttttgtttagaattttgtgattgtagggatygagatattaagggygggggtgtagaggattataagttttttagygygttttatttgtatataaatgtgttttgttttttaattttgtttttgttatttgtgtatttgttttttattaaattaattaattattygtggtttaggaagaaattagaattggggggattgtttttttaagggggatatagttgaaygtggtyggtagtttttggtttttygggtttgggtttagayggatttyggygttgtttttaagatygatatygggtatttggtygtyggygtatttaggagtaygattttatgygtgtgtaygttttttgttygggttaggagttttgttttagttttatttygggttataaatttttggtttygtttagygtagtttyggttyggagggtagtttgttagttaggttttgggttagggatggtttayggtgygygyggggatygttatattttttagygttaygttggggtygygygggtyggagtagggggagggggttygatgaygttatggaatagttggaggatttagttygggaattygtyggggagygggtttyggggtyggygttttatttaggtygatagygtttygggttyggttttatttttttagayggtayggttgttttttaygtttagagygggtttggggttttgaaggaaattagtgtaygatygygaggttaggaattttggagaatgggtaygtaggygtgygt

SEQ ID NO: 6793 - DNA, 2174 bp, synthetic construct
  misc_feature 1..2174: note = Description of Artificial Sequence: Synthetic polynucleotide
  source 1..2174: mol_type = other DNA
ygygttgtgttttttagygttttaggggttyggtttttagttyggttttatttgggygttttttygttttttygtgggtyggygggtygtgygggaggaattttggttgtygygggttttgygttttatttgttatttyggtggttttygttygggtttygagttttttgyggagttagtattttagttgagttagtyggaggggyggyggyggtttygygygtttagagttttagtttatgaatgggattttattttgagygttttttttygggtttggggaggyggyggygyggyggyggggggygtttygtaagttygyggttttgagyggttattygygtagtaagttgggygagttggtagtygtttgtatttgttttttggtttyggtttttgatttygttttyggttttaagygttygggttgygttttyggttgtttygygaggtagttttaggaggtttaggggtttygtttgygtttttggygttagattatggtgggtagtttyggttaggagttttagtygtygygagttaatatygtttgtagttagttttygttttattygagyggaygygygggtattygtagygygygggttattttttttttyggtygggatgggyggygygggattgagtgatyggttttgygttyggygggtaatttttatttgatttgttgtttgtgagttgttgattgtyggggygygygagtttagggggtaygggtagtagygyggygatgatttgatttygagttygttagggygtttttttttttttttttttttttygttttttttgagtttgtgyggagattagttyggtgyggyggtttygggtggattatggyggggagttttagttaaaggygtgtgggygtygagttggagaggatattttyggtatygttgttttttgagggggtttatttaaattattgagttattttagatttaggattttttaaataattattaattgtgttygtttygtgtyggaaagtaagyggaaagagaaagagygtttatttttgggatttygtagatygtttttygttggttttttttygaggggtgtttggttttygaggatttttttttttttttygygtttttttttttttttygttttttgttttttttgtagtgttgttggtygggagttgtttttatygtagttggaaatagttgttttygtttygygtttttatttagatttygggtaatygtttttatttygygtttttyggaattttagaattygggtggtyggtttttggaaagtygtagtyggygygatgtattttgtagattttattttgttgggayggattttttaatttttagaatygygggtygtagggagttaaattgttgtttttttttttttttttygtgyggttggtggtttgttttttaaaggaaygttttatttattttttagtattttttatygggggygygttattygtttgggtttagattttgttttgtaaaygggttttttatgtatgtatgtgtaggtatattttggatattttataaygtttgygtttttttaatagaggtaygttttgttattttgggtatygtttttttttttttatttggtatttygaaygtagtgtgattaaattttttattgttttttggaygtygatygttttggggtgtaagtttggggtgtaaaygtttatttygtaagagggtttgggatygtttygtttygtttttyggtygttagaggttggggaagtttatatttggatttttatatattttgtygttattgtttagattttgattaattttgtgagygtygggttttygatattgtagtttttttaaattttagtattgttttttygygattgttttttttttggtygtttaggttttgttttygtttyggyggagygtaagtyggagggygtagtagaggttggggtttgaggttttygttgagtagttatggttgyggygatagttagttttttgattyggtagaagyggtaggygagggagtttaatagygatygagtgtyggtttttaagygtygttttagttttagtaaagaygggygttttttgtgygagaggtaygttttyggggtgtttagtaaagtgygtttttgtagyggtygtaagaggtyggtgaggygg

SEQ ID NO: 6794 - DNA, 873 bp, synthetic construct
  misc_feature 1..873: note = Description of Artificial Sequence: Synthetic polynucleotide
  source 1..873: mol_type = other DNA
yggtygggtttagygatgyggttgagttgtttattygygtttgttgaatyggttaattagyggygttttyggatttagygggagygtttttatgtygatygyggtaggygtgygtttttyggggtygtatygttatggygatttgtttatttgattygtttygggtggattygtygygatttttgggygtttaggtttttgagggtttaaygggygayggttttttagttttagttgtgygttttygttygggygaggtggggttgatygyggtygtttgtataygttttttttggttygygttttyggtttgggagggyggattygtttattttaygatggtttyggttttggaagggattgttttygtgattygtttttttaatagtygttaataattttttttaaygttttttgygyggttygtttttgagaattttggttygggagagygaygyggggttttyggggttgygtaggttgyggygttttgtttaygttggttygagggygyggttygtttygggtyggtttatatatttaygttttttgtygggaggyggttgggaygyggyggggttgttttaagtgtagtygyggtagtgttgygtttttatygygggggtttttgygggtygygtttgtttygttyggttttyggtgtatgtggtttgygaggyggtagaggagatgtggggatttagggtygtaygtygtgttygaggtttttaygagaggttttttttygygggtttttgygtaattgygtgaagtyggttygggaaagttaagattgtggtttaggaagaggaaggaaygygggygatagagttggggtttgggaygttgagggggtyggtggtagtttttygg

SEQ ID NO: 6795 - DNA, 2174 bp, synthetic construct; identical to SEQ ID NO: 6793
  misc_feature 1..2174: note = Description of Artificial Sequence: Synthetic polynucleotide
  source 1..2174: mol_type = other DNA

SEQ ID NO: 6796 - DNA, 510 bp, synthetic construct
  misc_feature 1..510: note = Description of Artificial Sequence: Synthetic polynucleotide
  source 1..510: mol_type = other DNA
ygygtagtyggagaggagggggyggtattygggatttggygyggtttttgttttttgygttagygtgagttyggttagggtttttayggtygtgtttttattttttagggaggygtyggtgattyggttatagttttagttttygtygttttgtgatttgygggtattggatgattygtagttgagatttygttatatttttgaagtggggaaatggtgagtgtgggggtagggygttttaaggttggggaggttttattygaatyggygggaaatggyggyggygggayggagtttgygaayggagttttygttgtygtygtttagtttttagtttttggtttttttyggtgagggattygggtttatgtyggttttygtaaggyggttttggtttagtttgtagttttatttgtgtagttttgygttygtagtttygtattttttttgggttgtggggtgaggaggagtttatygggaaaaygtttgygtggygtgygaggtgttygt

SEQ ID NO: 6797 - DNA, 511 bp, synthetic construct
  misc_feature 1..511: note = Description of Artificial Sequence: Synthetic polynucleotide
  source 1..511: mol_type = other DNA
ygttttgattyggtttgggygtaagtaaatttaggtttggtygtygggygtttgggtygygttaattygtttttttttttttaygttygttyggtattttttggttygttaagttttagatgygggtgtttgttttagaaaattttyggyggyggttygtattgagtatgttyggyggyggggygggtttggggttyggaagttttagygattyggyggtattygtygttttgaggtagygggtttygataggygatggatttttygggttttygggggygttttaygtgggtgttggtygggggttttttggtagtggttttggygttggggggtygaggttgtttyggygttagtttaygttttygttggygttttttyggygygtagttatttygggatttttaggtggtttttaggtttgggttyggtttgaggattttttyggggyggagyggggyggggttygagagtagtaygtaggtaaggagggttygattttaggtttygg

SEQ ID NO: 6798 - DNA, 417 bp, synthetic construct
  misc_feature 1..417: note = Description of Artificial Sequence: Synthetic polynucleotide
  source 1..417: mol_type = other DNA
ygtygttattttttttttggagtagaaggggaattygaygtttaagyggttgygtgygaagtttttaattaggtttaaggagtygtagagtyggggtttygggttygtaggatttagaagttaygygtttygygtttttygtttygtygttgtttgttyggtygatttatttggtgtygygtgygttggyggttygygyggtagttaagttaaaggtygaggtygaggtygagygyggygtttagtagtayggygggggttagtagggygggygtyggtygtagygygtttygttttagtagtagtygygygtygtttttgtaggtygtttygtygygggttattyggggygtttaggttgtygtttygtygtatttygtygtttgttgtatygttttygttagggyggygaygygg

SEQ ID NO: 6799 - DNA, 1748 bp, synthetic construct
  misc_feature 1..1748: note = Description of Artificial Sequence: Synthetic polynucleotide
  source 1..1748: mol_type = other DNA
ygygggtyggggagttgtattttttgtaggttyggttttyggtttygttttttagygtyggagttygggagtygyggttgtagtttatttttttaaatgatagttgaggttygggttttagttyggggtttgaygttagtgttttttttygtgttgttaggagtagttagygttatygtyggygtttyggtttygyggtaygtttgtaagttgtyggggyggygagttttttttgtttyggttttttttttygttttttttayggagagtygagtagtagttttagagtttttygtaagttttttttatattttttygttttygttttaaaggagtagtagtttttttttgtttttttattgtygtygtygtatyggyggagtttttttttygygygtttttttttygatggagttygggygtygtygaygtygtygttgtttygaattttgagyggggtygtttyggtyggaggaaygygtygtttagttygagggygtagagygttaggagtaygyggagggttggggygygggtttygggaaygagaaagtgtagttttttygggttattgggtyggyggyggggggattatggttttgaaggataygggtagyggyggtagtattattttgtttattagygagatggttttttygtttagttygttyggygygtyggtygtygtygtttyggggttttgygtattttygtttttttttgaagtagtggagttgaaygtaggyggttaggtttatgtgattaagtattygaygttgtttagygtttyggatagtattttggttagtatgttttygttttttagttttygtggyggygttyggygtyggggygagttgtttagggatagtygggygygtttttttatygatygggayggttttttttttaggtaygtgttggattatttgygggataagtaattygygttgtyggagtattttttygagaaggagyggttgttgygygaggtygagtatttttagtttatygatttggttaagttgttgtygtttaaggttattaagtagaatttttttaaygaygagggttgttagagygatttggaggataaygtttygtagggtagtagygaygygttgttgttgygyggggyggyggtygtygtgttttygggttygggagygtayggtggtggyggyggyggyggygygtaggataagygttygggtttttttaygttgggttatyggggtttttatattatygtgygygataattaggtygaygttaaatttyggygtgtggygygtattatggtgtgygggygtatygygttggttaaggaggttttyggggataygtttaaygagagtygygatttygatyggtagtyggagaagtataygtttygtttttattttaagtttatttatttggagtaggtttttgatygtttgttygaggtyggtttttatatggtggygtgtaatttttygggtatygtygttttygttaattagtatygygaygataagatttggagtagttatatygagtatattttttttygtaagttygtagtttyggygttttttagtatttttygttttttgttgagtygtygttagtttgagtttygttggaggtttygygggggtgttyggggtaggygttggttaattttttatagagagyggttttttttgtaygatttttttatgtagtagataygatttatattttatygattyggatattttygt

SEQ ID NO: 6800 - DNA, 1748 bp, synthetic construct; identical to SEQ ID NO: 6799
  misc_feature 1..1748: note = Description of Artificial Sequence: Synthetic polynucleotide
  source 1..1748: mol_type = other DNA

SEQ ID NO: 6801 - DNA, 648 bp, synthetic construct
  misc_feature 1..648: note = Description of Artificial Sequence: Synthetic polynucleotide
  source 1..648: mol_type = other DNA
yggttgtgtygggagtaaaggttygggttagtgtgygtgygggygygggtgattttatttttagggaagtyggygtttaattatttaggtagtagtttyggttgatttttttttttttttttttttttttttttttttttttttttgygtgttttttttgtatyggttttygtygyggagttaggyggtagtatygaygtygtygtagtttttgttygtatygygttaattygygttttyggtttataygtagtyggagygattgagtyggtagtttygggtttaygttgygtatygtgtgtayggyggggttggttgagttgatttgygttgggtttyggygtygtaggyggttggggagggyggygtgggagaggaygttgagaygtaggggyggtygygtygaggtgataagttgygtatttggaaagttattyggttgtttggtgaggttygtgggtygggggttttgggygtyggggtgtgagggygygyggggagggayggggtyggggtgygygygtgtgtatgttgtgaatgygttgygygatgtgygtttttattttatatttagtyggttttttgtttgtgttgttygagtgtggaygtgtgtaygygttgtattygttyggtgtggtagygtttygt

SEQ ID NO: 6802 - DNA, 863 bp, synthetic construct
  misc_feature 1..863: note = Description of Artificial Sequence: Synthetic polynucleotide
  source 1..863: mol_type = other DNA
ygatttttaaygttgtaatttgtgatygtgattaaattttagygatgygagggtaaagygttttyggyggtgyggtgtgagttatttttyggygttgtttgttttttttagtagttttttaagggataggttttgtttttggtggtygatttttaggttttyggtttttttagggygattttgaygaggggtagggggtggttttygggaggatttagaggaaaggyggggataagaagggaggggaaggggaaagaggaagaggtattatttttagtttaatygttttygatttttataagagtgttygtgattttaaatttaaygtgaggygtaaaagygtttttattttttygttttgygyggttaggtaggyggttggagttgatggtttatttygygttttttgttttatttttattygagatagggaygaggagtaygttgtagggaaagtagygagygtygggagaggggygggtagaagygttgataaattagyggtgggggyggagagttgaggagaaggagaaggaggaggattaggaggaggaggayggygaygattagaaggggtttaagagagggggygagygatygagygtygygaygyggaagtgaggtgygtgygggttgtagygtagatttyggttyggttttttygagagygttttgggygtttttttaygttttgtttttaagttttttgtttttttattttygtgagyggagaattgggagtggttattygaygataggttagygggtttgttttttatttttttagtttygygtygtyggtttatagyggttttttttggggatagtttttttygggtgtygttttygttttttttgtgygt

SEQ ID NO: 6803 - DNA, 1288 bp, synthetic construct
  misc_feature 1..1288: note = Description of Artificial Sequence: Synthetic polynucleotide
  source 1..1288: mol_type = other DNA
ygttttttgygtagtygatttygtttyggtttyggtttaggttagagaggtggttttyggagatgttgaagttatttygygtagggggaggggtygttaggtttttttttaattayggtggtygttttagttatttgtatatattatgttaataatagattttttgtttygtttttatttaagtttttygttttttttgggggtttttygggtyggttygygggttgggttaaggtgaatatattatgataataaggygggtttttgttttgttttyggaaggggggygygtagtagygggagyggtaggtyggaygtygggygtygggagggggtygggggagggaygtygtgttyggagygygygygtatttatatatttatatatatatttaygygagtatygygaagggtatttaaggatygygtaygyggggttgyggagatttttygggtagtygygatttyggtttygygagtagtattggttttttgggtttatttygttttttttttttttttttattttagtygtttttttygygttgygttgtagygtgtttttatagtttttttgttttgaattgaatgtaggtgggaaataggtyggygtgtygaaagatatygagtaggtagaaataaggtaaatttatagaggygtaataggttyggtttttygtggttagggygagtygyggtttygygtggygtttyggtygttgttttyggattttgagyggttattgttggggttttygaaagaggtgtyggttttttgggagtyggaagagttgtttgggtgggtttygttttgttttttattttatygttatttagttttyggayggagggtgttttttatttttagttgggaggagagaagaaagyggggatggtgtaygtttgygggtttggaygttgagtaaggtaggggttygtattygttygtgggtttgattttattaattagttgtgtagttatagggattgaattttggaggaatygatttttttttttttttttaggattatttgaggtgtagagggtgggaagygaagtygagayggtygatttygttaygatgttgttgaagaagtaygtagggaaaggagggggtygggagtttagattygaggattygatttttgtygaatagtattgtgttyggattatgttttygtgtgtygttttggyggtttttttgttagtggtggtygtggtgttttgtttgtatttgggtgtgaaaattaaygatttttaggygaggatygtygttttygaattygt

SEQ ID NO: 6804 - DNA, 1275 bp, synthetic construct
  misc_feature 1..1275: note = Description of Artificial Sequence: Synthetic polynucleotide
  source 1..1275: mol_type = other DNA
ygtttatttygttttgtttgttygtttttattgtttttaagttygtttygttygyggtaagtgygtgtttaggygtagttatyggygagattaggagygtagygttygtagtttgagggaatyggygtagggtagtagyggttgtagttggattygygygttttagygtttagtggyggyggtygggatattttgggtagtatttygtatygtagtattttagattaygagtaatygtgttygttttygtyggggttggagggygtagggtygttattttgtaagttygtgggttttyggttatttttatgagagaaggygaagtygggygaaggagtaggaygttyggtagtaggattttttygtaagtttygygggttttttgttttygygtttttygggygtttaagaagtaaaatgtaattatygygttatagttgagaggggaaggggttagygttattygttygttyggaattyggttttygyggyggttgygygtttyggtygyggttttttyggttygggagtgagtagtagtaggaggagaggtagyggttyggggttggtyggggttggggaggagggaygggayggagggagggygygggggyggggagggggtttyggyggataaagatggtaatgttttttatttaagygtgttgtagtttggtttttttaatatggttgttttttttttgtttygtgtatttgttttgtttggattttatygtggtygagaaggaggaatggtatatygttttygtgaatattatttaygtygagttygygtyggatttyggggtyggggyggygggyggyggyggygyggagttgtatayggagaagayggagtgygggygttayggagagtattygtttaagtaggaygttygyggggaggtggttatggttagttyggtttaygatygtttggtttgygattttaatattaagttygtygtttygattygyggtaagaattggatagtttttatttttaagggtaattgtaygtatagggataagattyggaaygygtttttgtagaaygttttagtygtggttatttttaaygtgggttttaatattaaygagattattattatgttttaygygggtgagtggtttagygggygygggggaggggagtyggyggggayggaggtgtttagagggatttagygtttgtttttaggttttttttgggaagttygtgyggygyggaagaygtgtttgggttttttggatygattaagttttgtttygygt

SEQ ID NO: 6805 - DNA, 1071 bp, synthetic construct
  misc_feature 1..1071: note = Description of Artificial Sequence: Synthetic polynucleotide
  source 1..1071: mol_type = other DNA
yggygttgagttttgtttagygygattyggatygayggaygygtagagattttgtygggattygttttttagtyggygttyggggagtygtyggtyggttttatttttygttygggagtygggtagggygagaaggtagygygagtggyggtggygattttygtyggggtttttgygaygagyggtgattagtagygttygtagtygyggtttygttttttattyggaygtggttaagyggyggyggttaygaygttyggtttttygggatygttyggttgygttttgggygtatttgygygtttggtttygygtttygyggagagggygatgggtttyggttaggattgagtttttttttttttttttttagtttygtttggtatttttttttttgtttygagggygagttayggtttgygtygtygttttttttttyggtgttttyggttygtygttttttygygtttttttttttyggattygttttyggggttattatggtygyggttatygttagyggtttgattygttagaagyggtaggygygggagtagtattgggatyggtygtttgttagtaggaggyggagtagttttagtaagaatygygggttttgtaayggtaatttggtggatattttttttaaagtgygtattttyggttttaagaagygtaggttgyggygttaaggtttgtgggggttatggtygggagatgygtttygggtygtttttttttygtttaaayggagtttttttaggttttttttttttttyggttttttyggtttatttyggtttyggttttttttttgagtattttgggtgtygtygyggggattttggagttygttgtygggtaatttgtagtygtygagaagtgtagtygttagagatggtaagttggttgtttttygtyggyggtttttgtttttygygtttttgtaggttgggttttgggaaatttgttttttttgagtttyggtttttygggaggatagggattggtattggttttggaaygyggggtatttttttttgttatattyggggtygagttatygttygt

SEQ ID NO: 6806 - DNA, 694 bp, synthetic construct
  misc_feature 1..694: note = Description of Artificial Sequence: Synthetic polynucleotide
  source 1..694: mol_type = other DNA
ygttagggttgtyggatagttygatgattaggagttttyggttttygaagttgygttttatygtgtaaattttgttgatggyggtgtattgtagttatayggataygagygtttygygtagttyggggtagyggtggtattygaaggagatgtygtttttttgttgtagtygtyggygtygttttatgttygtygygggygtttygggtttttgggtttyggygtttaggagttattygtaggtagttagtgtttygtatagagttagtagygygttgttttttygttyggttatygttgygtttygtygtygtyggtygtgtttttttaygygggyggttttttttgtttgttyggttttgggtttagttygtyggygttgttgggggyggtaagtttygtattagtttttattygttttatttttttyggttgaatgagtgttagttygygtattggggttatttagaggagaygggtaaagtygyggttttaygggttgtattattggtygyggagtttaggggagttgtaggagaaattattgygaggagggggtyggyggagagaygggtyggygtggatttgggagggttgttggygttatttgttggttyggaattaygttaatagttaaatggygttygggaygaygtaggtgaaatgatagttaaggttyggggttygggaaygt

SEQ ID NO: 6807 - DNA, 694 bp, synthetic construct; identical to SEQ ID NO: 6806
  misc_feature 1..694: note = Description of Artificial Sequence: Synthetic polynucleotide
  source 1..694: mol_type = other DNA

SEQ ID NO: 6808 - DNA, 1424 bp, synthetic construct
  misc_feature 1..1424: note = Description of Artificial Sequence: Synthetic polynucleotide
  source 1..1424: mol_type = other DNA
ygagagttygaggygtygtttttgtygtttygggattggygtgaggagtttttgaygatatatattaattygagyggttttaaagatgtagttgtatatggagattttgttgggaaaattygtttgttttttttaygtygtttagtttaggagaattatygtygttatttyggagttttttyggttatygygtagagtttttygagagttygagtygyggttttygagttttaaggtttatttagggttttagatttttgtttygaaaggagaggatttgagaaaatggatgtattgagatttttttgaaaatttttygagagagygygagaggagygaggataygttattygtagttaaaattatatttaaggattaaaataataataattaaaaattttattaaaataataagygtttaagaatttagatygggttggtggggggaggggaagaggygggaaggggagggtygtayggaggtagttttgtagtgagtagtygatttygtygtttttyggtatagttggatyggtttttttagtygyggtttagattygtttttggatttygggttagtttyggtgttaggatygyggttygggtttggattttygagatttygygtattagtttygygggagtttyggtatttttgtatgagtaygagaggattttgttttygygtagtagttygggaagtaggagtygaagygygggtygtggagtaaggygggaatyggaggyggyggyggyggyggttaggggygtayggtgttaggattagttygtygygttttatggggagtyggyggtygtagygttgttgaggygggttyggttggttaggyggggggayggggttygggttgtagtagttttttttgyggttgtygggygggttygggygttygggggttggggggtggggggtgggggaggaygtygagygttgaggtaggggttygggtygagggygyggyggggttgygygtaygttggggygygtggaggggygyggagggygaaatgagtttggtaggtggttttttttattattyggtggtgtattaygagggttattygtttgtygtygtygtygtygtagttgtygtygtygtygttagtygttgtagttatgaggagaatttttatttttatggttggtttatyggttatttygagatgtygtttttygattatagtatggttttgttttatagtttygagtatgttagyggygtygtyggtttggattatttttattaygggggggtgtygtygggygtygggttttygggtttgggggggtygygttyggtgaagygtygaggtatygttaatygtaaggagyggygtaggatttagagtattaatagygttttygtygaattgygygagtgtatttttaaygtattygtyga

SEQ ID NO: 6809 - DNA, 1215 bp, synthetic construct
  misc_feature 1..1215: note = Description of Artificial Sequence: Synthetic polynucleotide
  source 1..1215: mol_type = other DNA
ygtgygggagggaggataagaattygggagtggtygaggataaagygggggttttttttattttayggtgtttagttttttttygttgtaygtggtttagggtggtygtattatttttaaagtyggtttygttaatygttagtttygggattgaatttgttttttyggtygttygtttttygtaggggataggggyggggagggagagatttagaggggggtygggggaggtggggtygtyggggaggaggygagggaaayggggagttttagggagayggttttygagggagagtgagaggggagggtagttygggttyggtaygttttttttttyggtygtttttttttatataagygtaggtagagggygygttagttatgttttgtttttgygttygtygtygtygtygtygtygtttagttyggygygttttggaggattttgygtygyggygttttygggtttygtygtygttagtygtttygtygtttttttttygttttyggtatygtygttagygttttygtygtagygttygyggttyggttttttttatttyggggaaggggagggaggagggggaygagggttttggygggtttggaggggttgaatatygyggggtgttttggtgtttttygtttygtttttttaaaaagttatatygaygyggatygyggyggygttttttttygttttygttttatttygygggtttygaatgyggggagttyggatgttyggttttttgtgaggtttttatttgatattygtygttttttttyggtattggttgggagggygttttgtaaagttgggaaygyggagtttyggattygttttygtygttttyggttygtttagggggggtygtygggaggagttygggggagagggattaggaggggttygyggtttygtaggggygttygygtttttatttttgttttygttagyggatyggttttttattttyggtttttttattatgtatttgttgggttttttttttgtggygtgttttttgttygtygttgygttgttttygggttttygygaggygttygtygtygtygtygttttygagttyggattygatttttyggaygyggagttygaygygggygaggttayggtaggtttgygttagggtttgyggagaattygagagtttgygttagggtttgyggyggattygagaatttgygygg

SEQ ID NO: 6810 - DNA, 1184 bp, synthetic construct
  misc_feature 1..1184: note = Description of Artificial Sequence: Synthetic polynucleotide
  source 1..1184: mol_type = other DNA
ygaatgttgttttygtatygatttaaattygygtygagtttttttttatttygatattataagggagaagagyggagtygtygtygtygtygtygttattatygttatygttatygtygtggttttyggagygagygagygattttgtygygyggggagttttatygggagtygygtttygttagttygttttaggtygtygtygtygtygtygtttatttattttgtygyggygygttttygttgtggtygtgaggaatygagtttagygttgttaagttgtttgggtttggagygtatygtgttatagygtttggtttygggttygggttgygygyggyggttagatatgataggttgaggtttttttgtttatattyggtygtygagggggyggtgygtygtttaattttttygygtygggtygttatygtygtttttygttagtttygygtttagygtttyggttyggtygtygttttattttttygttttattttttygtttygttttatataygygggtyggggtttgtgagtagtygtgtttttagygaagaygggggaattgtattgagaattygttttyggtatttttygaagatttygyggggyggtatttttttttttatataygtaygttygygagtygtttygggtagyggtygtgtttttyggyggggtttygtyggyggtttttgatttygttttagagttgtttttyggtagygttattttttygtgtttataaaagtattttttttttaatttatgaayggatttygatttttgttttgttattatttatgygtttygtattygaggtgtygtttttatttataygttttayggtttygygaaattyggttttttagttygygggaygygttgtttgttaggygggttyggyggtatttygggggygggaggggtyggtygtagggtttttagtttggygttygyggggygttygtagygaaggggtgggtgtygttygtgaaygtagtagggattagtttagttygygttygtttttgggtttyggttatygttttttygttattttttyggtttttgygtggatyggttygtggygggggttgttttgygttttygttttygtagtagtygyggatttttattaaygttgaygagttagtgtygygattyggggagagaagaygg

SEQ ID NO: 6811 - DNA, 5820 bp, synthetic construct
  misc_feature 1..5820: note = Description of Artificial Sequence: Synthetic polynucleotide
  source 1..5820: mol_type = other DNA
yggagggaaatygggtygaygataagggtggttattttygggtttttygygttyggtttaagygtttttgggtggggtagtttaaayggggagaggggtttygtgggtygagggttygaggtygtagygagtttagygtttggttaaatttggttygygygtttttttattgttttgttagggttgtgtgatttttyggagttttaygttttygtttaaatagtttttagygtttttgttggtattyggggygtttttattttagtttttgtattyggygygtygygygtagatyggayggaggggaaagttggtaagagygyggygttygygggagaaagygttaatgggyggtygggtgggagtagygygttygttygtttaygttaygtyggtgygggttyggttgaygatygyggygtttggggaygtyggygygtttygttygttaggtgtttygtttggaaatgtttttattagttgtygtyggtttttygttggagygygygygtygagttttygygyggagttttygygggttgtygggagyggtttagygttatygtaggtaggtgaggtttttygttttygttttygtttyggggtttygagattttttttttttttygaggaggyggaggtttygygyggtygtygaggggagygggyggyggyggttgyggygatttttyggtgygtttygggttgygagttgtttttygyggtttyggtagttatayggygygggygggagtttttttagtttaggtagggagtgggtttygtygtataaattttgygaggattgtttttgygtttaaggggataaagtttgttattygtygttaggttttttagaggtygttgygtttgttgtaagttgygggaagtagggtgygygggtyggygyggggyggggggtggggggttyggagtggttaggtttgagttttggaygttyggayggygtttygtttagttttaggtygtatttagggagtaagyggygggggygtagygggagagaggagggagagggtygygggtttttatggagggyggttgggaatttagagatttatygtttgtttttgtggtttttttttttattattggtttygagggggtttyggggttgtgaggaaatgatttgttaatttygaggttygttagtgyggygttagygatygtgaggttttttaaatttatattttagtygggtgtttygagyggtgggygggtataggygtttttaaggtttttggttttaggttttagaaagaaaggtttttgtttggtgtttygggttttyggtttygtttttggttggagttaatttttttgggttggaaggagtttttttyggaygagtttttggtgyggggaattggtggtttttagggtaatttttgaagtattagggttaggttggtygaagaagggttagggttyggtttgttttttyggaggttttttatggtttygayggttaayggtaatttygttaaaataggygattygtttgygtttygygttaggggttgattattttttgttttttttgyggtttgtttyggttttggtttttygtttttyggagygttttaggttagygggagtattttattttttygaagttgagtyggtgttgtgtatttygggagtyggttgatttttggtttatttgtttaygggtgtatttagtatygggggtttttagagggaggaaggtttagtatttygagtttatgtagaygygtttagttgatatttgagatgttgagygttttatygttggtgaaagggatattgggtgttttygttttaggtttggttttttggtgaaggtatttggaaaatattttagtattatttatgggagaagggtggtttagtgagaattttyggtttgggtaggygggtttaggttaggttatagggttttagtgagatgtttyggtggtygttaatttataggttggattgattttgtgttttggaatgagtagtggggtttgggtgaggtygggygggttaggaggttttttgggtagttgygagtttttygaggtagggtgattgtgattgggttyggattttaggygttggggtttgttggygggtaggaagtggagygtgtgtgtgyggyggtttgggaaagtygatttagaggttaggtttttgggttayggagaaagggtygttygttggtggggattggagygtygatttatgtatataggttggaaaggtaaaagagaataggagaaggtggyggtggtggttaaaggaagttttygaaagggtttttaygtattggttgttttgggaagtggaggttgttttttttagattttgtttagaagatgaatggtygtttgttttggggtttyggttttagttaagtttygtygggtttggaaggaaggaaatgtattagttttaggtttgggtgggttgagttgttgtattagagtttagaggtgtagggtataggtggttgggtttttgggttttggtttttttttttagtyggyggagtgtttatagtygtygaggttaggttttygagtataggtgaggaaaggataagttatagttgaatgttttttttttgggggtttttattttttattttagtttttggttyggttgggtttatattttttttttagtygggttttattatttggagagagygagtagtttgtaaataataaataatgggaagtagaaggatgttygggaaaaattagaaaattgtaaggagtggggaggagggagggtgggagaggggaggaaggagggtgggggaggggaggagtaggaggagagggaaaggggttgagagatttatttttagygagaaatttyggtggttagttttttattatttataggaaggtgatattagygatttaggtgagaaagaaagaaaygyggtttgtygygaaattaatatagaatttagaaataattattaatgttatttgattygtgttttttatatatttttygyggttatygaygttaaattgtttgaataatttgtatggagyggttatttattattttygatggtttttttttgtaagtagttyggaygtggttygtttyggtttaaygygatyggagaattygtatttttatttgtaaattaaagtaattaygtagtagatattatatgatgtgtattgtggtttttagatagttattaattatttttaatygagttgttaaaagagtaggtagatttygtttttgggaggtaggtttgtagttggggagagggygaggaygttattattaattagagggtgattttggggygatttataggtttgaatttaggaatttttttgagtaagtttgtataaygttgttttgtayggttttttttttaatttattaygggaggtyggtttagggggygagggtaatyggggygagtttyggtttyggagggygatggygtagaaggyggggaaygggttygggatggttygggygtttttttgtygtttttttgtygtttgtttattggttttygttttgaatttgggtaaggttttagggagggtattggtygagggagttttggggtgggygttyggttttttttttygattgtttygtgygttttagatagaaagttgggtaaaatggataggggagggygttttygttaggtatttaaygttttttttttygtagttagttttgyggggygtygggagggaygagtttagygggaggggtyggggtttgggttgaggaatttgttttttygagygygtagggtygttyggtagttttyggtttagtygygaggggtagggggaagtyggyggagtayggtyggyggaaaggggatyggggaggaaagtyggggaggygaggtgggggyggtgggttgagygggaatttaaaagatygyggtggagaagatggggygtttttygygatattyggttgtttagaggtgtaaagtyggtgggygtaygttyggggyggttttatagttttygggtygttagttttagggtgtygggttttaattaaggtttygaagtttttaygtatttgagggtattttgattagtttttgygggttgttttgyggtygtagtgggttttgaaagtttatttyggygtagggtggaaatyggygggaggygttgttgattttygattaaataatagtgaygagaygygtgyggggygtttgygagtttttttttgttattyggagtagagygygttagygygaggtygggtyggtygtttgygtagygtygggttaattttaattgttgattatatttttagygtgtttttttataggttttatttgtaattgagaygaatgattatagtggggygggaaggagtagttgtttattaattaatttttaattaaaagtgtttttygttttygggtgattaaagagaaatatygttygttgggygatattgattyggatggaatttatttgttaaygttyggaggaatggttttttygtttatygygyggtygggattgttttggtttttttyggtttgagtygtyggygagtgatyggygagtttgyggttaggtygggttgygygaggtggggttgaygttagagtttttttygttttaagtygygtatatttgatttgaygggttygygygattygtttttttttttttttttttygtaaaatatgtatttttgtygtygttgygaggtygttyggttttagagttttttygagttttyggaatgygaagttaaaggaatygyggyggttatygttgtttattttgttattyggttagaaaagtttgyggagygyggggatggattaatyggtttttttgtttygtttttttagygtttagaagtttgtagtttyggagtagtggtygygttaygtyggttttagygygtagaattttgtaggtttygttygttygtttygggtygygttygttatgttttattygtagtttggatatttttatttttyggttttttaggtaagyggagtttygtttygtttaggttatygtaggtgtyggtagggyggatggggyggggayggggggtggggagtgttygatttaygattgtttgyggttttygagttagtaaggtttgggtygygygttttttaygtttaatttttgttttttaaattttyggggaaaggtygaggygttaagaaaattygaygggtygggttygggttttttgatgtttgaattataaggtttaggttgtgttttaggggagttttaggattttaaggaatttttggggaaggaggtttggygygtaaatggygttagaggttttggaaatttttyggggaagggtgtaggtgttyggttgggttttaygtggyggaggaggttagaygygtataagttagtggaaaggggygagtattttggtgtggayggygggaggttygggggtattyggggtaygttttygtgggyggygygygggattggtaaggtttagggttttagtttttagttyggtttttygttagttttygyggtttttttttgtagtttttgatggttattaattttttgagtaygtgttgygagttyggaggtygtaygttggyggatttygggttygtygtttyggtttaggygtyggtttattgttyggtttaygagagtyggttgttggttatygygygttaygagtttaattyggtygyggygttgggygtttatgggggtttttatggyggatygtagggttatggtaattaygtgatttayggttyggaggygttygttttttattygt

SEQ ID NO: 6812 - DNA, 1233 bp, synthetic construct
  misc_feature 1..1233: note = Description of Artificial Sequence: Synthetic polynucleotide
  source 1..1233: mol_type = other DNA
ygtyggttgygtagtttagtataggttataggtyggggggtgggttygggttttgyggagtgggygggtttgagygggttggaaygtttygtyggttttatygtaggtyggtattttagttttaggttttatagygggtttttygtttttattttygygggttttgtagggttggggttgtttttgagtttttggtaaggttttygggagttttagttttgyggagattaaagtttttatattttyggtagagttygggygagtgtttygygggtggyggyggttgtggggtygtttgggatttttygtagtattgattttgtaattttttgtgtttgygtttygtggtgaggggyggygggatgygygygatttttttttgatttagttaaayggaaaagttygygygtttyggttggaaggtggaggttaggtaggattyggtaaaggtatattttaaaygaagtagattttattttttatttgtagagggaaggyggtgtggayggatagaaayggtttttatagttatagaattatygyggttatagtagygyggygttyggtagggagyggatygtggtggaggtttttgagtygagtaggttaygtagattygggaggygttgaagygggygtagttgygttttggagtaggtagattaggttayggyggagggagaggttyggggaygyggygtagtttttgyggagaggtaygggggyggyggggaygtttttttattggttgaaatgttagggatyggtttgggygtggagtagtyggggygagttygtttttaggtatygtyggttgttttaggtagggtttgtaggagtggttyggagtygggtatygaggtatygaggyggggatttggaggggtaggggtyggggtagggtttgttaattaagtttaygggggtygtygggtggtggaggtgggatgggggaaggaggttgagtattagtttygggygatttaagattttttyggtttaattttaggagggaggtagygttggygggtgaagtygttattttttttygggaggtygtttagtagttgtttttttaygtttyggggttattgygtygggttttggttattatttgggttttggtttaygtttagaygaggggtagygygattttttygtagttttattttagyggttgtygtygtagagtatgaagaggtttggtttttgtagaaaygtagtttagygyga

SEQ ID NO: 6813 - DNA, 2865 bp, synthetic construct
  misc_feature 1..2865: note = Description of Artificial Sequence: Synthetic polynucleotide
  source 1..2865: mol_type = other DNA
ygttttttgttttattygggtggatgttygyggttttggggttttttttatgttttgattttggggagtttyggttggtattggttygygaaggtgatttgyggatagattagttagagattaygttggttggtygyggygygggttataaagtttagyggaggtggggtaggggattaagttgtttyggygagggaagaaattgttgtttttaaattattgyggttggaggagtygatttgygttttagygtgttaggataagggyggygygaggggtttaggggttaaatggggygttgggtaggaggggttgttttttgtaggggaggaggaatggttttttgttagggatttggggaaaggtaatagttaggaggggatygggtygtaagaagtttattttggattgtagtaygggtagttagygygaatttagttaggaggtttayggggatyggtaaaygagaaggggatgyggtgaggaygtyggattggygtttttgtygygttgatatttygattgtttttttttygtatygygttttttagtttgagayggggaagttatttagggtatygygtttttaaatagyggggaaaaggygttttgggyggyggttgagtgatygagggatyggttyggagttaggagttgggaggygyggggatgtggtggggaggaggggagtgggggtagtgagggggtttaaattttgyggggaygttygtttattttgtygttgyggttagttttttgygttttttygaygtttatttygygtygtattagygttygtagtagttttaygttgttggygtaggyggygygtaggagggtygtygttttygggaygtttttygggaygtttttygggaygtttttygygttttygaygtygtgttttttttygttttygaaagggtagaaagagtygttygaggygatgttgygggtgtttggtagattygagaagtttttaaatttttygtagttagyggggtttttttygatttgygygtttyggggtggggayggyggtggtggggttatgtagygygtttygtygtttttyggttyggtttyggttagtagtattatgtyggyggtyggggygygggtygggggtyggggygygggtaggaagagygggaygyggggygygygtygaggttttygtttttygtttttgygtttttagagaagtygtggttygygygttttagttyggyggaaatyggtattaggyggttgygtttaaagaaaaaagttttyggaggttgagygagtttttggggtgggygggatygygggggtttttygaggyggggyggggyggggygyggggataygttttttttyggggtttttttttygygtttttttttggttagagtttagagttaggtaggygttttttygagygyggggattgggtatttggtagygttgttttagagttggggatagttggygygggagaagtagaagtaattattaaagaagtygaattygagtygygggyggtaagyggtttygttttttttttygtyggttygygggatgggggyggaggtggyggyggggggaygtyggggyggagtyggtttttagtttygggaatttyggatttttggagtyggttttygtygagggygtygggttttyggatttgggtggggtyggtttttttygtygttttagaggagtagagygggtttttttttttygggggatttygggtttyggggttgattttattyggtygyggtygtttggaggtyggggaattttyggggygtttggygggtagaggagtygggygygggagyggagtygtttatttgggatttgtgttyggggagygttgygggtygggttattttgaattgggggyggtyggttgttgtgggggagttttagttyggaagggaggataatttttagagtttttygtttygyggaatyggggtyggtygtggtttgagggttggttagattttgggatggggggyggggtgtttyggaattttagggagtatttgagtgggaayggaygaygaggaatttttygtttttatgtttggtttgtgttaygtgyggggatttgyggatttattttyggaggttgygattgggygttgattttaygtttggttgtttaaaagagtagggtygygggygatagtygtagtttaggtttatagtttttttggttyggttttgtttttttttygttagttttggygtyggggatgggyggggaggaggagggygtgtgaggatttgttatagggagtttttgatttyggggtaggaggygtygtgagttaattttgggggaaggtttttgygtaaaggygyggaggtgygttygygttygtygtaggttaaagattgyggaggttattagttttgtgtttttttagttttttttttttttttttttttttygattttgatagygtgtttattagttgttagtyggtgggaggttttygyggttttaaggtgaatatagttaggttggygtagtygttggggattaggtttgaggtttaygtgtygttgggtaagttgaggggtaygagggtatygaattygaaatagtygtgggaggtgtaggatgaggataygtttaaattgygaagtygttygagttttygtgttatatygtattggttygattygttgttttggtygtttggttttttagtgtttttagtaggagttaaagggtttgttggyggttttygattyggtatttgtagggtttyggagggtggggygygygggagtatygatttttggtgaagaygttttygtatttgggyggttttgagygagtagygaattgagattygt

SEQ ID NO: 6814 - DNA, 1154 bp, synthetic construct
  misc_feature 1..1154: note = Description of Artificial Sequence: Synthetic polynucleotide
  source 1..1154: mol_type = other DNA
ygtgygtttttaaggatgttyggtttttttttaattygyggtttttttttttttttttygyggttgtygttgttgtygygaaaattaggagaagtggaaygygygyggygaagygtygttttygyggyggtattgggtatgtttygtattyggggtyggtttyggyggyggggyggaygtttttttattagtygggygttygggtyggtygtygaggtttaggtggaggttgaggttgtygygygtygygggaggagtttygttttyggyggttgaggyggyggyggtataggtggygygggtygygygyggggygtagttygggagygttyggygtygggygtygyggyggttttaggttygygttygyggygatagtyggttgagyggagttgygggygyggyggttgtttttttagttyggtyggttggyggyggygttyggagtttygaggagttygtaggagttygtggagttygyggagttgggtagggggygttgygttygtygagttyggaggggtygtygggtygggygttgygtattygygtygggagtygtttttygttygyggygttygtttttgtygttygttagtattttttgtttygyggtygygtttagataataaaagyggaagatgttgtagttgggtaaggttaggattttgttttgaagtygggyggygtygygtaygttttttttyggattgaggagttgtygtyggyggagggtgtatgtttgygaggaagtygtygggygtygygtttttgggtgagttgyggggttgggyggtyggggtygggygtagttttttttyggygtygtttttttttttttgtygttggtgggggtggttttgggttttyggtyggtaggyggyggyggyggttgttgyggggtttttgtttgtttyggggaggatygygatygygttaggtttttttyggaagtygttgtgtttggaagggggttyggggttagtgttttttttggagyggttattaagtggttgttttgygtgttttttttttttgttatttattttttygggaggaagygtatttagggtaatatygataatgttgtttttygttattttgagaatatattyggtgtatttatgaygtttttaatataygggaggagaygg

SEQ ID NO: 6815 - DNA, 1154 bp, synthetic construct; identical to SEQ ID NO: 6814
  misc_feature 1..1154: note = Description of Artificial Sequence: Synthetic polynucleotide
  source 1..1154: mol_type = other DNA

SEQ ID NO: 6816 - DNA, 396 bp, synthetic construct
  misc_feature 1..396: note = Description of Artificial Sequence: Synthetic polynucleotide
  source 1..396: mol_type = other DNA
yggyggtttttygttttttttttatttttttygtttttatttttattttttggtygttygaattttygatygggagtttagagttttgttagygtygtattgtgygtygygtaagtygttygatttttttagyggtatyggttttaagtagtaaatatttgtgygtttttgagttagggaygygygtggggggtgggygtgtaygygggtgggttagygtagagtgggagtttgtgggtgtttttygtygggatttttaatttagttgttttygagagtttaagttgagygtygtaygtgttygtgttatttgttgtattggaygtagtttaatagygtagagaggtttttattyggtatttagttygatgtgggtygtttttttttttttagygg

SEQ ID NO: 6817 - DNA, 438 bp, synthetic construct
  misc_feature 1..438: note = Description of Artificial Sequence: Synthetic polynucleotide
  source 1..438: mol_type = other DNA
ygaggagtaggggttgygggtygggtttttgttgttygyggttttygggggtygygtygygtygggttaygtgggggttttygtttttygagygggygtyggtgggaaatttgygyggygagagatagggggatggggygtttttgaygygattgtggggtgygggtagttttggaggaggatgttyggttaagtttattttgtttaggtgtyggatttttagtttaggttgyggtttgttttgggttygtgaggygaggtygtagygtttygaygtygggtgggygtgtgggtggagtggagatttgggtttttyggygtatgggagtttygtygtttgyggtagggaatygttttttatttttggttyggttygggtygggagtygtgtttygygttgattyggtgtaattttttagtttatttttttttaygyga

SEQ ID NO: 6818 - DNA, 438 bp, synthetic construct; identical to SEQ ID NO: 6817
  misc_feature 1..438: note = Description of Artificial Sequence: Synthetic polynucleotide
  source 1..438: mol_type = other DNA

SEQ ID NO: 6819 - DNA, 411 bp, synthetic construct
  misc_feature 1..411: note = Description of Artificial Sequence: Synthetic polynucleotide
  source 1..411: mol_type = other DNA
ygygtttyggttttyggggagtygttttttagatttgtttattygggagtttttttttygygtattttttagattttttttgagattygagagygttggtttttttttattygygatagttttgggatgatagtgygggtttttttattygtagtttttattatttggyggttaggggttygyggttygggygggyggygttagtgttttttggagttgggyggggagggyggggygggyggagygggtatggtggggtgtygggggtygtaggygtagygttttygttttggttatggagyggtyggygttyggygaggtggttatgagttaagttatttagtyggygtaygttattgygygyggygagttgagygyggggtagttgtttaagtggatygatattatygt

SEQ ID NO: 6820 - DNA, 1137 bp, synthetic construct
  misc_feature 1..1137: note = Description of Artificial Sequence: Synthetic polynucleotide
  source 1..1137: mol_type = other DNA
ygygtttgttaggtttagatttataygtaygtygtttttgtttgtatatagtgygttttyggyggttygttygtttttttttagtttaygttttattgttttttaagttagaagtttygtagtygtygygyggagaatagygatagtygagygttyggttygtttgtttgtyggtgggtttgtttgttygygtagtagattyggggyggtygygggagttygygtttygttygtygygtttttgtygggatttattygtagyggagggttgagttygtyggyggtttttyggagtttatttattttygygygtyggagygtaggtaaaaggggaggaaaggtttttttttttagttattattttygttttttttaagaatttgtttaataaagygttgaggaaagagaaygtttttttgaattttttagtaggggyggagtttgttgttgttttgygttgttatttyggttatattgtttttygygaygatttttgattagtyggggttaygttygggagaygggattatgaagygttyggtagtygtttggtttttggtygggtttagtttyggtgttttttagttyggtaaaggtaaggygtygggattyggatagttgggtgagggatgggttgggagttttttgagaaaygtygygtagggggtyggaggyggttttttyggygtgttaagggtggygagygtygttggyggygyggaggaggygtygagttttgggtgtttygagaaagtgtttgtaaagtttgagtagagtgygyggggtygagyggggagaagggtgyggggtatyggggtgagatataggaaagaggaggayggtggggagyggtagaagatagygtttttaggattagygattttgtggtttattyggttattgggtttyggygtaaattttttttaggtagtgygggygatgttgattgtagaygtygggtagggttttygtgygggygggagygggggaagttagtgygttygggygttagttagttgatgygggaagaggttggggagttgtagggtygttygttttygggtgyggtgttttggygtagggtttgggttgagtygttygtaaatttagattyggygttgggygttttggtygygg

SEQ ID NO: 6821 - DNA, 2383 bp, synthetic construct
  misc_feature 1..2383: note = Description of Artificial Sequence: Synthetic polynucleotide
  source 1..2383: mol_type = other DNA
yggattttttaggatygyggygtyggttggttgtttyggtttttygyggtygygtgagtttttttttggtggtggagggygtattttaatttggaaatttttagtttttaatttggtttygtagattgaygtygttttyggtggggyggtgggggtaggagggtaaaggggaggtttttttttttttggattgaggttgtaattaatagtttygtgagtttttatttttggttgattgygaatttttttattttaggttaggggtygggattttatagaaagattygtttttatttttaattttgyggtttttgttyggyggggaagtttagttgygggttagtttagttgygggttyggttaagtttggygygtttaggtattttagtttttggttygyggtygggygaggayggagggggaggggaaggggttgttgtttttttttttaaattyggtttttaatygttttatttttygtygtttattygttttgtataggtagttaaaatagagttagyggttaattgayggggaygggaagtaaagtygtttagygtttygttttttttagtyggtttttygggttttttttttyggygttyggattttggttttttttttttttttttatttttttttttgttttaatttygtttttatttttygtttattttttttygtattygggttygttaatttttttttttaagttttttttttagttyggtttttttttygggttygttttttttttttttaattttygttttttttttttttttygtttttttttttttttttttttttttttttatttaattttggtttttttygttttttagtttygattttttttttattttgttttygtttattttgygtyggttttttagttygggttgagttttaygtgtggayggtygygtttttattgatagtygtygttygtyggttygtttygygtttygtygggtttttaaaattttygygtygygttttttatygtygtattttttttagygtttagtttttygtttttttttttgttggtygtaygtttyggtttygygtattttygttyggtttygtagtygttattygygtttygttgttttgtgggatttygagygagttyggagggaatttttttttttttttgggggygatttttgtttgtttgtttgtttttttttggtgatttttgtagttttttaatattygttttyggagygtaygggaattygtygagttttgygtgtaggttttttttttttttgaggtttatattttttgaaattttaygttagggtttttgtaattttttttttygttygttgayggttttggagtygttyggggttttaggtyggttatgtaaygtgtatygttyggggttgtyggttgtattttygtygygtttygtygtttattgygttagattyggygtttygygtttygtttygtgggtagttagggggtyggygttttgtygaggtttttagttagagtagggagttygagttygagggagttttyggagtygaygaagggtttattagattttgatttttttttgaggygygtagattttgtttttgattatttttttttygygggtttayggtygygygttttyggygtyggygatggggagaagayggaggttgtgtttttagttttattttttgtggttgggttgtgtggtgttttgggygtagggtayggtyggttagttttagtttttttygtttaagtygtttyggttttagtygtygtygtaataggttyggttygttatagtaggttttgaaggygggtttttagygttygagtatygygaggagggtgtygtagtggttagtygygttygtyggygaggatagtaggaygtgtttygagggtaagtgggtaagyggtttygtatttagggtttyggtttgggggaggggggaatttttagtttggyggttttttggtttatttygttttagattttttagttggagtttagagttgtagttttttttgttagaatatttaaagatttttaggagygygtttttttttttttttttaatttygtagtttagygggyggaaagtttttttttygggggttgggyggygggtggttagggggtttaggggtgtygatygtagagygtgtgtagagttygygttgygggaataggttttgaatgttyggyggtaggygggtttgggttygtttgttgtaggggttagagaagtttgtttgttttttaygtyggggtygtygttygtgagttttttgtttgaggaygtgtgtagggtttatagtttatttttttatygttaattygagygttttattttgygaygygttttttttgataygtygg

SEQ ID NO: 6822 - DNA, 2367 bp, synthetic construct
  misc_feature 1..2367: note = Description of Artificial Sequence: Synthetic polynucleotide
  source 1..2367: mol_type = other DNA
ygggtyggtttttygtttyggaggttggggagggggtygtgggtttttgygtttttaggttaagyggttttggaggtayggattagtaggaygtygaggtggygygggtygyggtttttttygtagtagttgtyggygagaattaggtagggaggygtygttgttgattgtattttatgaaagatttaggttyggttgtygygttgttatttttyggtattttgygtyggaaayggtygttttggagttygtggtygtyggygggtaggtttagtygttttagtttttgagaaaggtaggttatagttygatttgttttgtggttttattttataattttaatagtaagtaggtttaggttgggtatttyggggtattaggagtaggttyggttaattggtttttattatgaggtttygygtatagggttatttggttaygaggtaaygttggggagttttgtggtttgagggtgggtaaaggataggtttttagtttttttgygtttagttygttttttagyggtagttagttaggaayggtttgyggggttataggggtggaggygttatygttygtaggttygtagtaggatggtygttgggggatgtgtaggtataggggttggataaggggttttagaagtgtttgttttgaggggttggtgtgttttttttttattagtttagtttttgaggagagggaagaaggtaatttttttaattagggtaggtygggyggttgttttattttaatattttttatttttaaatatagaaaatttggggtttgtttttaaatttttttggttgttaygttttgggtagyggattttttttgttaataygtaagattagttttttttygtaggttgagtagaaagaagaaaggtttaattttaaaattttaaattygattattagttttygtttaaayggaagtagggttagttttttaygagttaggtgggaaattgggtttagggagagaaagtgttttagggttaggttgggattygttttggtttygttygtatgyggtagggtttttttayggaggttttagggygygtttttyggtttygaggttyggtygttagtygygyggattttagtttaygtttygagggaggttaggatttttagtyggygggattgygygtygttttttttttygtaggtttyggygaatatttagttttttttttttttatttttttygtttttyggttagtgttttygtttttttygygggygaygggyggyggyggygggaggagygggtygagtygaggaagtttyggtttygygygttgggatgtagygaattagtaggggtygaagaatygtgtagtgttagagttagagttggattyggggttttagtyggagtygaaatttgagttagagttygyggygggygagttyggagtttaygagtygtagaygtagygttgtttaggtggggtaagagaygttgggttaggggygtagggttttygyggtggaggggygtagggaggtggyggtygagttttgygtagtttgtttttggygtgtgtgggtttattyggyggygygggatagygtaaggygyggaaggttaggagttttygaggtagygygaggagttygtttttgygtttagggtatagttatagtygtygttatygggtgttattttatttaatyggygggattaattttttgttttggtttygggtattttaagagggtagtagtttygggggtaygggttayggtttygygaagggtataatttgagaagttygtggtagtttttygtagygtygggtgatatagggtttttttatttttaggagaagtgggtaggagagagggtygttygttgtttttygttgygtttagggatggagggttttattatttatggaattgttggtttttttgygtggttygggattttagtygtggtttygygttaagagggtattttttttaaaygaaatygtttygttygttygttygttygttygttygggtagtaatgtygtagaaaagtagtagaygtyggttygygttttggtttttttygtttyggatttygaygtttygtygtagygttyggaggtgtttttagtttaaggtagtttgttttygtyggtataggtygggttttttttttttaggagagaaattttaatttttttygtaaygtttaataaagatattttygyggttttttttaggtttggttgttgaygtagggtttyggagtaygtagtygttttttaagaatygggtttyggatttttgaaattgattagtttygtaaattggagtttattttttygyggtaaaggtagggttttaaagtygggatygt

SEQ ID NO: 6823 - DNA, 1235 bp, synthetic construct
  misc_feature 1..1235: note = Description of Artificial Sequence: Synthetic polynucleotide
  source 1..1235: mol_type = other DNA
ygaagtttagtygatttttgattgttagtatttyggttataaggtttaaggygaatagttgtygtaygtyggygyggttgtggttgtygaaggagtaaataattttatygttggggtttttatttagattygttgtaaggatttgtattaygygygtgtyggagggtgtattttttaggaygygygttyggtataaggattggttgaagataggygtattgttattygygtttagtattttgatgtgaataggtaggttggyggagagagttggggttttttygtttaaygtygttagtattaattggagattaggttttygttttyggtttagggygygttttaatattagtttygygtatttggtgttgttttttygygtttgtaygygaagygtaaagtatttatttyggtttagtttataggtttgtaaagagttgttttttatatygggatygtgygygttttygagyggaaagygygttttyggagttayggtttygttaatttttaattttattttttgggtagggaaagtaggattgttgtygttgatgttttggattattatttttaygttgaatagttttagygggttttttattattaattttagagttatagtgtaagagggtagtgttttatatagtttttttygatttagayggtygtttataaatattttttyggtttttyggtttattttaaagaattttyggttagttttagatattattyggaatttgygggttgagaggttatygagatttaaattaaggttygygattaygttgtttatagygaaatttttttttttttttttygggattttatagtgaatgatygtggaagttttgtttaaggtattaagtagaagtaaaatttttattattttttyggtgtttattagttygtttttttaggtttttgggattattttatttaaaagtagttttttttagyggggtttagatygtttttgagatttygttgagaaatttttagygggttagygtttgggygttgggygtygagttygatatggttttttggatgtygttgatttgttygtyggttgtttagtttttgttttatttyggggygtagaaaggggaygggtaggggttygatttttagygtttttattggtygatagyggtatatagagttttagttaataattgtaygaagaatgagttagygtygggttttttgagtaggataygygttagygt

SEQ ID NO: 6824 - DNA, 3043 bp, synthetic construct
  misc_feature 1..3043: note = Description of Artificial Sequence: Synthetic polynucleotide
  source 1..3043: mol_type = other DNA
ygatttaggagagttygataygtyggatagttgyggttagtygtggttattttggtttttygttttygttttttttattttygygtgtagtygggataygggaaaggaaagttttggaagttaagygtyggttaaaagatgatttgttygygtgttttttygtttttttttttagtygtgttatatggyggttttaattaggygggtagtgygtttygtygyggagatttagggtygygtygtttgggtagtgggtgatgaaattttttaggygtattatygtagagggygygggyggggygyggggygggggtgggggatygagagttggtatyggggtttatttgttttttaggaggagggtggggayggggggaggggygagtgygygttaaygtygggtgygtgttttggggygtttgggygyggygttygtgttttygtttttttttagttttgygagtttttygagttgygtygtggggtgaygggatygagagtagtttttgttttyggtttyggygygggggagaygtgagygtgtataygtatatatatagtaggggaagaggygttttaagyggygtttaattttttttttttttttaygggtygggtgagaaagtagtygggggttatttygattyggyggtttttggggagggggtygaataagaaaagggaggagatggagataattttttyggatttagtttttttgtttttgtttttgtttttattatttttatyggatgattggagagtaaaagggaattyggagyggggtggygagtagygttttgagaaaatgtaggagtgtgtttggagaygygtaaagttgttttttaagttttggttttygggtaygygatgtttygyggygggttgatttagggttgttttgggtttttttgttatttttttggaaatgatgtaagttttgattgttatttggatttttgtagtttagtttggaatgygtttggattaggggaaagaygagaaaygatattttaggtgttgtayggtttattaaagygggaagatagggtagttgtttagattaaatattgtatttagtgtttttgtttttatttttaatygtggggttttttttaatgtaaagtgttataaggttaggaatttttatgtgtgtttagttggtttatagtattattgtgtttaggaaattgttttaatttattaagttttttgggttgggaattttattgaattttaaayggyggaaagaggaaatttttttaattygatgtgggtgtgaygygagttaggggttttagggatattgttttagagtatatygtttttttttaatagtaattggagtttggattygtttttatattgtatagttttttygattattgttttggagtattygtataygygtaygtattttyggtygygtttatatatatttatatataygtaygtaaaygygtggtygtygttaggtyggtaattttgttyggygtttttagyggygttyggtttttttttgtagtagttgagygtaggtttygtttttyggtygtgttgttaaaagggtyggggtttyggattggtttagtygtygggataatatttgttygatttttttatttaagtgatattagagtttttagggatatttgaggtattatttttgttattgtygggtattygyggygttgttaayggtttggttatatgtttttyggagagttaygggagggygttgggtaatttttattygagtygyggtygygaggaggagggaaaaggygagtaaaaaggaagagtgggaggaggaggggaagyggygaaggaggaagaggaggaggaggaagaggggagtataaaggatttaggtttttygaygggaggttaatattaagaattatgtgtgtygagyggttgggttagtttatgattttggttttggtgttggttatttttgattyggygygggggatygaygttattaatttattygagggtttttaagataggagtttttagtagaaaggtygtttgtttttgtagaatataggtaagtgtatgtgttttygtagtygggagttattgggagaggatatygtgtatttaygyggygygttttaggygtttygtygggagttaggygtttatttagggttaygtaaatttttgggatggtaygggaygtgtaaagggaagygygaggtaaggygaggttygygtygggtttygagggttyggaatttgtaygtgttagtagggtgatgaaatggttggggtaggatttgttgttgttttttttagggtygaggggaaatgaagtagygtttgaygttgttagygttagttttygttttygaatttygggttyggtgtaaagygygttttatttyggtyggtaygygggaggtttagagggttttyggagttgggttgygttttgygttyggagaatttttttttttggtttgtyggttttagtaagggtgtygygttttttttttttttaaaagatgttygatattttagaattttgtyggygagataaatggtattgygaattttttttttgggggtattgttttyggaagggagygtgagggtagygtaaagygtattttygyggtgttgtygttatttttagtttttggttaggttagtaagttaagaaatggtgataygattygaatygtgygttttttttgttttatyggtttttggtttatyggtaagttgtaaagtagagttaggygtgtagggtayggggttggttttttttttagttyggaaagagaaagaaaatttgtttatagttttttygttttaygatttttttttygattttggggggtygtgtgaaygyggtagyggyggygtgygtgygtttatygtaygagttggaatgtaygagtgtttattagggaygttttaagtgagtgaatggyggttttgtgyggttttgtttyggyggygygtggggttttayggattttgtygtttttatatgttggggtyggtatttttattatttygagattttygt

SEQ ID NO: 6825 - DNA, 864 bp, synthetic construct
  misc_feature 1..864: note = Description of Artificial Sequence: Synthetic polynucleotide
  source 1..864: mol_type = other DNA
ygygatttaatttttaattygygatttaatttttaattygtgatttaatttaaaattttygatttaaattttaattygygatattaagtttgygatttagtttagaattygygatttygtttggtttattttttagtagygatattggyggttttygattttttagatttagtgagtttygtaaagtygttyggttttyggaagtygtaggtgtaggygtygttgggttygygggtttttttggttggttygggttgttttaggattayggayggaaaatygtaggygygyggtttatttygttttaaggggagggttygtttggtygtgtagttygtttygttttttttttygaagagagatttggtgttggtatgggtatttygyggttatyggagtggtttttyggatgagtttggtttyggygttgaygttttggttttgggggttgtttggttggtgttaggtagyggaagaygtttggagagttattygtttttttttttattygtttttatygttgttygtgttaggaygygtagtttgtagttgtagtttaggtattggygygggatggyggagttttttttggatggygttagggttatygagtgtatagtttatttggtttgagggtttgttttttttggatattttttyggattttgatttttggygttgggtaatttataggatgagatttatyggttgttggygaagtygatygtttgattttgttgtttgggyggttggtttygggattygygttgttggggaygygggtttggtttgyggtgtttagttatttgttgygggygygttaygtttaggttggtggttgtagtygtagtttygygtttgygg

SEQ ID NO: 6826 - DNA, 2071 bp, synthetic construct
  misc_feature 1..2071: note = Description of Artificial Sequence: Synthetic polynucleotide
  source 1..2071: mol_type = other DNA
ygttyggtyggygtygtttttyggaggttgtgtttttggggtggttggyggyggggttttttyggttyggttygyggygtttttttgtygtygtttyggggtgtttttgtttygttgygagttyggtatygyggygayggyggygygaagagggaagygggyggyggyggyggtygygttaagatgygtygggttatygtaggttgaggygttygtygttttygttttttttttygttygtttttttttttttygtttgtttttttygttygttygtttttttttttttttygttttttttttgygttttttygttygttttttygygtttygtttttttygtttygygttttgyggtgttgtagttgygggyggttttagttgtttttagatgtgggttgggyggttygyggggaattttygygtyggttgygagtgyggggtttyggttgtagttyggttgttatggattygtyggygggagtygttygtygtttgttttgtttygtgttgttgttgttgttgttgttgttgtygtygtygtttttgtygtygtygtygtygttygygaaygttaggttygtygtygtygtygattttttaggtaggtgyggttyggtttttatttttygggattttygtyggtttggttttgtttygygtgtttygtygttttttttttaggygtygtttagtttgatttgggtaaatttygygygtttygttyggggttaagttggttaatttyggggtygggttggtygygtagggggygtttygtatygttttygagygttttgggtygggggagtttyggagtattggyggtttttgagtygyggagggtggggayggagggtygggaaaagtttygyggttaagagygtagagttagttttagygggttygaggggggagttagggygaggyggygtyggggttygygttyggggaygtttyggaggagtyggttgtygagygygtagttttgggttttaaggattggttggggygtttygtagggaattttyggagatyggagggattttgttttattttttttagttttygggygttyggggagayggggtyggtagygggttgagygggagttggataggtaggataggtygttygtgttyggggaagtygagatttygtygtttyggaggttggyggtgagggtattygggyggtaggggttygtygaggggtygtggtataygggtaagggggttaattyggaatggttttygagtagttttaygttttgttaaggayggtaggtgtaagggtygggggattttttgayggggtygttttttygggtayggggaggtttttatygagttttaattttgaayggggtagggggtagagtttttggtaggtaaggttttyggaggagggaayggttggggagtggyggagtttyggagtggtggttttgttaaygttttttttyggttgtaggaaagtyggggaggtgtaggttggtttttggggtygtttggyggaatgtttttttttttygtagtggggyggggtttgggggggygtggtttgtyggygggtttttgaggtattggggtttygtggttttygtygatttaaygttttttttygttgtaggygggtttttggggtayggagyggagygtattttggyggtgttygtgygtattgaygtttagggtygtttggtgttttaygtggtgtyggtagttaygtttagagtaggggtaygagttygtagggtygtttyggttyggatttygagttttttyggaggtaaygaggaggagtttggtagttattttttttataatgttayggtttttggtygagatttgtatttgyggttgyggtttaaygttygtttygtggygttyggggttattatggagtggtagggygagaagggtattattygygtggagtttttgttygggagttgtttttaygtyggagaygtggtyggtttagtygaagttttttttgtggygtttagtaattgygatgggttggtgagtaygtatttttttagttttttttttttygttgttttygt

SEQ ID NO: 6827 - DNA, 1170 bp, synthetic construct
  misc_feature 1..1170: note = Description of Artificial Sequence: Synthetic polynucleotide
  source 1..1170: mol_type = other DNA
ygagttygygttaagagttaygtygagaygygtygtyggtggggttaygygagatgtaatyggagagtttaaaattagtttaggattaattttttagggattygtttaatttttttygtagaagagtttaagtggggtagtggtygttataggttgaggatgattttyggaygygttttaggygygatygtattattygtttttagtttaaagtttgagtgatttggtattatttttttaattgttttttatttttttygtatttttgttgtgtttatygtttttaygtatttgagagtttaaattatgttaagaygatttggagaaaygttygatttgttttttaagttaygtaaggatttatttagaygtaygttygygyggagaygtaygttggtataygygtttatataygygagtatatataygygtatattattyggttygtgygygygggtygttgtttttgttgtattatgtaaaggtggttgggaaagygygttgatttatatttatatagtttattttttttttatagtatgtgattaataygtatttyggggaggagggagygyggttgggggtgttaatyggaagggaatagatagtgagtgttattttgttgggaggttttagaagtaaagygttaaygaygatagtagyggtggttttagttttattagtaattgtygttggtaggagtattataygttttaggagtttttygggtattaagtatgggtttagttygttttagttattttttttttttatggttttattttygttgttagtatttygattttagtttgtaattttgattttgggtttgattataaatgaygaaagatygyggtagtttttaaagtgygggagygagtttygtattggttagygyggyggagggatttttttaggaggttttaagtttttaagtttgtggagagatttggtaatagttggtaaggtttgttttagttattttygttggttttttgtttttgtatttagygtttgagggygttattygttttttttttgygttttaygtaagyggtttaaggaatttattygattyggatttygtttygtatgttttttaagttttygttattttygtaggygttttagaaaggygtgatggttttagtttagtgttygttagttyga

SEQ ID NO: 6828 - DNA, 2168 bp, synthetic construct
  misc_feature 1..2168: note = Description of Artificial Sequence: Synthetic polynucleotide
  source 1..2168: mol_type = other DNA
ygygttataaayggggatttaatttattgttygatttttgttagaggygatttatttgygtttttgttatygtattttygttygygtttttgygttttaggtttttygttgttttttygttttttgtagygygggagygttgtttygtttggtttgttggttttttttagattttggttatttttttygtggtaggaagggttatatgtattgatagatttttygttggtggtggttgggtggtggygaggygtgttttygggygygtttaaaatttagtagttttttttaagtagtagttttttttatttygtttttaggattgaggatttagttttygatgtttttttattttttttygttttatttygttattattttttaatttttttagtatatttttaagttttataygggygtttgttttttttttgtattttttagttttygggygtttygttyggttgaagtttaygtattttgggatttaattgtttttaattattygygtagtttaagtttygygtttgtttggttttygtttygggagtttgaagttatygggtagtttattgggtgttttyggggaaaaggtttaagttgtagagatgagagaagtggggttgggggaggggagaggttttagaaggaagattaygaataygtgygaagaaataaaagttattaygtgtgtaygygygygggggtttaagggygygagygyggagtaygttttagggggttagggatagtggttttttgtagygggtatagtagggggygygggtatttataygaaagygtggtagatgaaygtttagtygyggggtttttttagtaygttgtataggtagttttgtattygtyggtatttgaygttgygtyggtagttttggttattygtgtaagagagyggtttttttagtaggtttattygggttttttgtttgtttyggyggtttttttttaggttatygtygtygttatygagygtggtygygygggtgtttagtagtagtaggtygtygtttttggyggttgtygagtttagtagtattttgtttyggtyggattttatattttttatgtygttgtttaagygtttttygttygtygtygtygtygttgygtygttttttatttagagttyggyggygtygttttttttttttttygygtggtggyggggtatggtattattaygggtatygygagggggtygttagygtttgyggygggggtagyggttttatgtgygtyggygggttttaaggaggaagtyggyggtygayggggygttygttagttagagatttttgagtygggggyggggaagtaggtagttagtaaatygttygggtttyggggygggaaaggaggggttgtagaggaggtygaggagttttaatttttaatagtttttagtttygaattttaaattyggatttgtttggggygttattttgagagggttttttttgtttttttattttygygattattatttttttttttttaaattgttttyggggatagagtgggggagtgyggggygtttygaggygygtttttaygygygtatatttagttttaggtttttttttttttttttttattttttaygttttgtagygaaayggttttagaagttttttttygaggygygagttyggtttggttttggtaggggttttgtagttgttyggaaggtgaagttagttttgtgttttgaggagaaattggagatgtaggtygttgtgttttttygttgttaygtygttgygtyggattttgttattttttygtaaggggtgagagygggaatagttttgttttgttttttaggtattatttagtttggaggttggagygtaaggtaaygtttygggaagtggtattygggttttygtataygggygagtttttagtagtttagtggatagattygtaggaygyggttgttaagttygygaggtaaggattaggtattttttygygttttattttagtttgyggattgtgattttttattttagtattagataagttygygagtaattgaatattttttttagtttatgggtggggtgtggaaagggygtaaaattttaaagtggttttttygyggtgagygagttgtttyggggttttgtttgattgtagygyga

SEQ ID NO: 6829 - DNA, 2053 bp, synthetic construct
  misc_feature 1..2053: note = Description of Artificial Sequence: Synthetic polynucleotide
  source 1..2053: mol_type = other DNA
ygggaagatttggaggtyggtaaaayggagyggtgygggatgatgtttgggaatatyggtaaggtgttataaaatgaaygttaaggyggttataagaggayggtygggaatygaatttagygtttagtayggggtttttgtggtygaygtgaygtggtttygttaggtggaaatygtgygattttttttygatttaatttaygagagataaagatgtttaaataattaygatygtygtygtatattttgtagggtttygggggyggaggggaggggagygttttttyggtagaagyggyggtttaggtttgtttggaggttygtaatttattatgataaatgtaaagattaattaaggtttgattygtgtatataggaggtagayggyggttgatagtggaaataattaaygagtatgttttttaatttttgtygyggttgttgagtatatygyggttttttaggygttygtygttgtygttttygagttttagagtttttagttyggttttggagtggggygtttttttttagygaaaaggtgygaggagyggggtttygggtggtyggggagggggygygtygggtygggaggygyggagttagtygtttayggagtttaattgtttgtatyggggatyggygggyggggygygttygagtggtttygtygggaaagggyggygggygttggagaaggygtttggygygaagttgggyggygtttygagggyggaggataggtggtygygygatygtagttaggtagygaayggttygggggttgygtagygyggttttaaagtttagttyggtttygggtttagttygttgtygtttgttaygggagyggttttgygyggagggagggggygygagatygtattttygggttyggygygtttyggtttttgggttttygtttttttttttttttyggtttagttygttgttttagaygtgattttygyggaaggtgttggygatgygygttgttygggagygtgtgattaatggtttygaggtygtgggyggygtatgtattagtttttttttggtttggttagggtgtgagggtattygggagtatagygaggttatggtagygggggttttygggagygyggyggtggaggaggaggaggaagaggagaagtaggtgaygygggtygaagaggtttgttttttttggttttagggttggygtygyggygggtttttygttttaagtaaagtttggggttaygggygttgygtttaggttttttttygygtagttttttyggyggggtttgtgtygtygtygttgttagggtaggataaaggtttattaataygtgatgggatygygttttataaatgggattggagygagagggagttagagatagygygagyggagggagyggtagggattgygygagygggaygaggygaygggygttygggttggyggagaygggyggttttaygtygggttaggyggggttygygggaggatttagtgaagagtttgggaaggggygaggttygtyggyggtyggagtagyggggygttagtttyggtygttgtygygggygggygttggagatygggaygtyggygttyggayggattgatttgttgatygttygtyggaggtatattttattttattttatttygtttygttagtagttyggygtyggygtygtttttygtaygttattttttttgttattttttttttttttatttttttttygttttygtttttttttgtttttygyggygttagygtttttttttggttygggygggggtttyggttttttgtagagtttttygtagttagtgggggatatttygttttagyggataattagtttttgagttgggygagaggtgttaagggagtttttgtttygaggattaggggatgygaagggtaagatttggtagagttgygtttggaaatatttttttygtttttygttttttygggtaygattagtgtggtttttaagtgtttttygtggagtttttatttygtgtgagygaatygtgygtygg

SEQ ID NO: 6830 - DNA, 1679 bp, synthetic construct
  misc_feature 1..1679: note = Description of Artificial Sequence: Synthetic polynucleotide
  source 1..1679: mol_type = other DNA
ygttttttttygggaagattygttataagtygygtttttygtygtttttaatttyggggtygttttggtygtttgtgaagtagaygtttaygttattgtygtygtttttgggatttttaggtttygggggatagtygggttyggtattygggtygtygttygttttggygagtagattttggttagggtggygggatttgatatgtygttttaggtttyggyggygtataagtattttgtygtagaattygtagyggtagggygtattgttttyggygtgtagtyggatgtgtttgttgagattgttggggtygtygaagggtygtagatagattttgtatttgagtggtttgtagttygtgtgygttygtatgtggattttgagtttatatttgygygagtatagtttgttatagtagaggtataggtggtyggttttgggtttatttgygtygttgttttygttgtygtygttttyggtgtttttygtygtygygayggtyggtggtaaygttttygagtttaggygttygygatttttttyggtagttatttyggatagttgttgattgtgtatggygatttttyggtygatgttggttagygattttagttyggyggggtttagggyggtygttgtaggttygttgaagtaggagatggatttyggatattttagtagttygtygaagtgtaatttgagygggtaataagyggtggtggtyggtgagtygtagagtagtttttygttgtagattgtaaaggtyggtatgayggygggtaggtggttgtatttattattyggataggttttgagatygttygggtygaggggyggtagygygtagygttygaggggtaatttyggygtagggggtagttgygtataaygygtttttggtagygyggyggttgygggyggggygygttttaygtgtttgaaggyggaygtttttttyggggggayggagagtagagggaagtygygtagggttttagagtagggtaggttaggyggyggyggyggyggygggtttttagygagtaggtatttgggatggtggtggtggtgygygtggtggtgatggtggtgattygygtygttygtygtygagtttttttygttttyggggygttygtaygttyggttttygtttagtagtttgtttaaagygaggtyggttttttgtttgttgttgtttttttttyggtaggggtygtygtgagyggtygtygtygttttygttaggtyggygggtttgaaagttgagygtaygtyggggtagaaagttaggttgtygattttygtygaggagtygtttaygatgtygaggaagtgtttttgttttygggyggtttygtttatgtttagggtayggtttagttgttttttgttttttttgggttgtttttatttgtttggggtyggygaggtggtygagggygyggaagaggtttygygtttgatgttttttygygtatygtaggtttgaattggtggygggtttagggggtggggtygtaaagtttttgtttgggaaggygyggygaaatygggygtygggggttttggggagagatygaggttattagtygttgggayggygttttggygagtygygtgttygtggtgtaggaaggygtygtttttatygtygttgaataygtagtggaaaygt

SEQ ID NO: 6831 - DNA, 1474 bp, synthetic construct
  misc_feature 1..1474: note = Description of Artificial Sequence: Synthetic polynucleotide
  source 1..1474: mol_type = other DNA
ygygtgttagaagtttttttygygyggtttttttttttttttttttygtagtaggaggtttgattttygygttttgtattygtgtggattaaaygtttagtttttttygttataatyggaygggaattygygygtttttygggttattttttgtttgtgttgagttatgggygaattttttaaaaaggagatataygagtgggtygtttaattttgaggggaaaygaggatttttttttttatttttttttttgatttttttttttattyggatygtatttttygaattattttygtaaggaggaaygaygaatgtygtyggttttaygagattgtygttttttatttatgtttaaataaggatagaattttgtagygaggygataagaaaataaataagygggygttttaaatygagttttygggtgtgtagattygtagyggagtygygggagygaggtgggaaattttggtygyggygtygggtttygttygtyggggggygyggggyggygggygtatgygygtgygyggtgyggttttagttttggttgtygtygtttgtygtygtygtygygatgtttattttagttaaagyggttgygggtttggggattyggttygggtagyggagttttyggattygtygattygtygaggagygygygtygggttttygtygagtagttgagttygtgtgtttygygtttygygtttygaagttgtygtttygaattttggtyggygttgtttaggtttttygttagggattagtygggtaaggatgggaggygtagttgtagtyggtttttttttygygtygggttgtgtgyggtttygygtttttttggttaaatygggaagygaaagttggattttagtttttyggggagtaattttgtyggttttggyggtagttgtttgttttaygygttygggtagtygggggygtygttttttgttttttttygttggtygygttttygaggggttttyggtttttggaggtygttttttttttygggtttgggygttgyggttatagagatttttaayggttagyggtygtygtttaggttaggtagttttagygttttygggttttyggttttatygagtgtyggttttygygttttgyggyggtaagttttttggtgagtttygtttttgtttttttygtygagttttyggggttttttttygttttttgtagggtygtttygagtygygtagagtttgygtgtagtygggygygyggtgtygtttatttygttttygttyggagagtagggtgggttayggygtttattttttattttygygtttygagagygtttggtygaggaggatygttgttayggattttttttttttaaggagygaggttagagggtttygggagagygtygatggttggggattygaggttygygttatttattygtaattttttttttygagtttttgggaaygg

SEQ ID NO: 6832 - DNA, 675 bp, synthetic construct
  misc_feature 1..675: note = Description of Artificial Sequence: Synthetic polynucleotide
  source 1..675: mol_type = other DNA
yggtttyggtaattttygtatttyggttgygtyggtygtggtyggaygttygagaygygyggaggtatagtagattttggygtataggttatgtygtygtaaayggggggygygtatttttttttaaagtttttagaggagataygtatttggtggtagggggtgtaggyggttgygaagtagggttgyggaggattatagatttggtatataatatttagatagtttatgatttttygtagyggagayggttaagtgtttttttattaatttttttttttyggagtttaggggtgttgtatgggyggygtttggattygygttttggagttattaggyggagtaaagttagygygtttygyggttyggaatttagttggttygttatttttttatttttgygattttattttygatygygttttagggtagaagygtttgagttttygttagtgggtatttaaagtttatgttyggygggygtgttgaygttattygggggttgyggagygggagggggyggtggggggyggggatyggggggttaatggggagygagggaygtttgttggaggggtagygagtgtgtttttyggggtttatttttgataagtatgyggttaagggtgtyggagattatgyggtttttagyggattygaggtttygtatygyga

SEQ ID NO: 6833 - DNA, 1133 bp, synthetic construct
  misc_feature 1..1133: note = Description of Artificial Sequence: Synthetic polynucleotide
  source 1..1133: mol_type = other DNA
ygtyggttatygtygagtttttattttatttaattagatygyggggaaggataygtaaatttgtygagggttygggggtttygggttgttgttgttgttagygttttgggaagtgataggtattaggatttgttggtgyggyggyggyggyggyggtagttttagtygygttygttatatatatttttattygttyggtgtataygtygygtygygggtagtgtygtttgyggaggygygttyggggttygtaggggtagtagyggtagtttggtagygtygtygygttttygggtatttggttygygaagtttygtttttgtygtttttygygtygttygttttaygttttttagygyggtygtygttygaygygygttygttttgygttygtygygygtyggtttygggggyggtagaagygygygagggtygttgttygtttttttgygtagttygyggtttttaggtattttgygttgttgggttyggygggygggggtggggyggggagyggggygygggtygagygggggygtttyggtttygyggttttyggyggttgttgtagyggttgttgygygtaatgatgygggttygygtygygttttagtagyggygttgttttttttttygtttagatgtgtgaattttttttttataataaattttttattttgttttttgtygtttttttttagggggttaattttgaggatygtaggggttgtygtttaggyggtygtaggyggyggtgtttaggyggaaaggagyggygygaaagyggyggyggyggggatyggggtttyggggygaggagtttgggyggtatgatygyggtttgttgagttgaagtyggtygtgtttttagagttatttygygggagygaatygagtgtgtgtgtgygygygygttygggggagaagggattaagaggagggttagggaaggaagttggggttatggaataggggtgtaatygaggtatttagagyggtyggaaagttygagtggyggagaggttagaggtggygagaaggggygyggyggtatyggaygtatygtttagtatttggtttttttgggttttygaggatttgaagggtyggagygyggagagttayggagtyga

SEQ ID NO: 6834 - DNA, 1808 bp, synthetic construct
  misc_feature 1..1808: note = Description of Artificial Sequence: Synthetic polynucleotide
  source 1..1808: mol_type = other DNA
ygggygggggaygttyggtagttttgtaaaygygtagataygygaattttatygtttygygygttttttggtttygttggtgygtgtyggggatgyggtygygtaggygttygttttttggttttttggtygggtagygggygttyggttatyggagtttagtttaagggtttagtygaggttttttygygygaggyggttgygttaggtgagygggtatygyggtygygttttttttgttatttatttagyggttagaggtattttgygtttgggagttttaagtgttttyggttgggtgtttttgttygatttttaaaaggaaagtataaatttygggtgygagtttaatttaggatygaattttttygygaatttgaagttattatggggygggagttattttagygtygygttygttygtttttygtatyggttaggatgttgyggaaggtaggggygtygagaggtaagggtgaaagaygtygtttatatttttaaagttygaatttgtattttttttgygaggygtagggygggaggatygttgtagttgggagtyggtttyggataggtaaagygattygataggtgaaygyggygggagggagtaaaygygtaaaaaattttgtatttattttttygttggygtttttttygggaggygttttggttgtygatgtattttataaagtttaaaatgataaaaagttaagaaattagtygtaagtgtatagtaatttagtaatgtttttttttttttttttttttttttttgattgttaattatatttaatgtttttaaaatatatgtaggtgttaggygtatatagatagtgttygagtagygggatttttttttttatattygataggygtgttgtgatggtaagygaagtggggygggtggatagggaaattaattattgtatttttaaattatttaagtattgaattgyggyggtttygttggggtggttggtatygtygygaatyggggttttaggagtygtyggggyggtygtaggtagtatgttgtgyggtaattgtygtaggygggattygggygggygagyggyggyggyggyggttgtagyggyggttttttgggtttagaagttgyggyggttgyggttgtagyggygggggtttttggagygtaggggagygggygtygtyggtatagyggttatggttaaggggyggyggagagatttygagttgtttttggygtgygygagtaggagaygttttagtgttgggttgggttttygggagtattatataggggaggaggaggaggagggtagggaggggggagggagaggagggtagggagggggagaggaggggggatggttgtggggggygggggggagttygggggyggggaaggaaattgttggagtaataattttgagygattttaataatttttaattttaagagggaaagagggagttggaaaagtataggygttgygttttggtagagggaygggaagaggygtttaaggggtttygggtttatagygtagtatttttggatattgtagtgayggtyggagaattttagttagaagaatggggaaagtagtgygtgygaagagtttttttagaagggtagttttggyggggagatttgggygtattggggttggtaggtagtgttgaggtygaagattttttatttattttagttyggttttttttygyggttttaagttaggygtattyggttgtyggtggtygtgygtttttgygtttttgtgttttagygtttttattttatttttagygtyggygygt

SEQ ID NO: 6835 - DNA, 1323 bp, synthetic construct
  misc_feature 1..1323: note = Description of Artificial Sequence: Synthetic polynucleotide
  source 1..1323: mol_type = other DNA
yggtttyggttgyggtggtygtttatttatttttttattttygttagtattttttttttttttttatttgttttgagtatygggttttgggggtygggtygtttttttttgtttttagttttggttttattttaggagttgtygggaygtygggygtttttggaggyggaygaagaaggyggtagggtygggggygttagygggaatttyggtygtygygggtagtygyggtttttttttttattttagggttygggyggttatygygggyggatgagttaggygagggggygggtggtaaggggtgtaagyggayggagggtgggggygtttttatgttygygtygggggggtatyggaggtttyggggtaggggatgygtygttgtyggtgtttatagagggtygtygttattygggygtagagtttaggygygtttgttttyggagggtatygggygtagtaagtygggtaggggagagggagtygtygtttaggyggygtygttatygygtttaagaaagataaaagggatygggaaygggaggggaaaagttttttgttyggttttagatggattttagttttaaattttaygttataaagtttygaagaggygggttgggggygggggtyggggyggatttttaggggygtggttgygygtttgygatttyggatygtgttaatttygtygtygttttaaaatttgtgggaaattttagttttgttatttattttttttggaggaygtagataggatttgttttgtaggagtttaggtyggtygattygygtttyggttataaagttgtatttygagagtttaaattattygtagataaaatttatttttgggaataaagtattygtttgtaggygtttttttygggttggaaggttggygtgyggaaayggatatatttattygtggggttygtttttagttatygygggattatyggttatygagttagggattyggtttttttagtttttyggagyggttggggagttttagtygattygtagtattttyggagtaggtatygtaggattttggttttaygtttttyggaygttttttttttagatgtygttyggygggtyggggtttttttggygggttgygygggygttgygygagttaaattaaatttggtyggaaaagaygyggttaaggttygttyggtttaygtttttygtyggttyggtaaggggtttyggagaayggtttgggggggygagaattatgggygggggaaatggaagatagagggaattgaagtaygggggttttygatgagtagtgyggatgttyga

SEQ ID NO: 6836 - DNA, 1501 bp, synthetic construct
  misc_feature 1..1501: note = Description of Artificial Sequence: Synthetic polynucleotide
  source 1..1501: mol_type = other DNA
ygttattygagttaatgaaygygattgttttgataaggygtttttaattttatygattttggtaaattgtaggagatatttagtttaygttatataaaaattattaaagtgggatygtygtagttgaaaagttygattagtgtttggagattagaaygygagtttttaaagtatataygtattyggtatygggaaagtttaggygtttgtgatttttygaaggattttgggttagtattttygygtttggattatttagggggttattagaaagtaatataygttataagaaagatgtgggggagatttygatgttygygtttttgttaggtggaggyggggtgtaggtagaagtygygygttggattgttggatgaatttygttaygygtaggtttygygtygatttyggaagggataggtaggttyggaagggatttttggggtttggggaygttttttagggtagagagtatygttgyggttygagyggttygggtttttaggygtggggtattyggtttttaagygtttttyggggaygtaggygtttaygtatygtttagttgygygtttttagtatttagygttyggygttttyggyggagtttygygtattttttyggaaagtttgggggtttttttaatttaggttttttygggagttttggggygggggttggaagaaggggttatttatttygtygttyggttygtttygggttttygaagtgtttgttttagtygyggtttagtgygttygtaattaagtatttattttygttttttttagtgtygaagtttttttttygygttgtgtttttggtgaaaataggatatttttttyggttattttataataaatagygtatataagygggggagaagyggggyggagggagaagtyggtttygagggggaggaggaaaggagaggagttaaaatttyggattgygataggggggaaaggagaagaaaagaaaatgagagagygygtttagtygtygtagtygttatttttyggtttttttygtagttttttttttttttttaaggtagygataattttaygtggataggatggaagttttgygyggaagtygggaayggtyggagygtgygtygygttgtyggtagtttygtatttgygtagggaggtggggygggggygaygtygttatyggttattgygggttygtgaggtygtygggggtttygggggaggtygttagggaygyggggggyggyggygygygggggatttatttygtttttatttgatttygggtgattgtttattgttatggtttgygatttygygtggggatygtttagggtttyggggttttggatgtttygggtggygtygtygtaattttygtgtttttygygtygtttttatttygtttttattygggtygattygagyggttgtagtttttaggttgaggggagggattygygatygygtttttttttttgggtyggagagttattgtyga

SEQ ID NO: 6837 - DNA, 1744 bp, synthetic construct
  misc_feature 1..1744: note = Description of Artificial Sequence: Synthetic polynucleotide
  source 1..1744: mol_type = other DNA
ygttttygyggttgttttttttttagggtygtyggtggtttaggatttggttatyggggaggggygtggttttgtygaagtygatgagttataygtyggygygatggtagtgatygtgtataaagaggagygagttgtygattatttgygagtttygtatygttaggtygyggttttgtttagagaygtttttgtygggttttygttttagttttygyggttygggtattygggtagtygtygtttatttygtgttttttgaagaattyggatatttttagggtgtttyggatttgttgtaggyggtttagatatygtttttgtagagggtggggtgggagaggagggtaaattaattaaaygttaaatgagtttttgttaaygatgaggagtygggatttaygttgtgtttggtaaatgtygttaggaggaggatttagggtttygtttagygtggtttagaagggaaggagygtagagtagttgygagttagygyggtgagggttatggtggggatatagtygagggtattgggttagatgataggggtagttttyggttttaggttttttaatattttagggtttgggatttygtttttattagtatttttttatttttttgtataaattttttaaagaygygaagtatttgttttyggtttygygtagttttgaagtyggtgttgtaggagtygttygttttttggatgtgggataggagtgttaggggtttygggttygttagtggggaagaggatagygtagagtagyggtattttttagttgtaggggayggygaggyggtgggagagggyggaggggtaggyggggygggagygggggatygggaaagatagygygtagtggggttgyggyggtgttagygaagygygtttgttttattttgatgttttygatgyggaagtygagggtggtgttggagttgatgttttttygttattgtatgtagygyggtttggtgayggygygttgygygtgtttttttttygtgggagttttaggatttatygttagtatttttttgtatatgttttttygtagtttgggtygtttaygggttttggttagttttttttttaggtaagttttgtgggggygtaggtagyggttagggtatgagggggygtatayggagattttttygagtattygtttygggttttttttaagtagttgtttyggtttyggatttttatttgatttttttaatygatttggtagggtaygtatatttgaygtttattttgtagtygagtatataaggttygtygaagttatygagtaggttttgtagttgtaggtagttttygtygtygygttttattaygtygtggaaggtaggtaygtagtygygtagygygttagttattagtygygttaggtagtagygtttyggtttygagtagygttttaggattagttygttggtgttygtygttttaaaattttttgaggatyggtattygttagygtygtttagttttttttygtygygggtattygtttattygttttattgtttattagtgtgttttgttagttgtatttaggygtagygttttttgaaagggtttatgatyggtagattgattatggttyggattttttgttagtggtttttttgaaagygatagggttaaggtttgataatyggygtttyggtaatgtataagttttttttttattgaaatagggtttygttaygttttygatttatygg

SEQ ID NO: 6838 - DNA, 1801 bp, synthetic construct
  misc_feature 1..1801: note = Description of Artificial Sequence: Synthetic polynucleotide
  source 1..1801: mol_type = other DNA
ygygtagtttaggatagtagygygygggttaygggygagtggagttgtaggggttygggyggagagtygttgttatttagggaagttttygggatttygggtttttygygaagtttyggaygggygttatygaagtygagagtttyggtygagttttttygtayggtgggygtygygtttaggygagygygygaggtygggyggggtygggggtygttyggggagggggyggggtygggattttygyggtygygygtaggggttgggaagttgttttttyggtygygtygggygaggggttgygtyggttygygaggygtatgygygttgtygagyggttttygtttttttttygtttatygttttttttttttttttttttttttttgtattttygtygtttttttttttttttygtttgttgggtgttgaagttgggyggatggtagtaaatyggtttygttagaggatygagtygtttagtttygttttttyggatttatyggygygttgtttatatttttaggygatygggtaagaygttgtttttaaaataagyggtgttaagtaaatgatattaaaatgtttgttttgtattaatggatggattttttttaaggtaggggggaggtgaaggaaggagggggyggagagygygatygtttatgtttyggygggggyggttgygyggygttggggttttagttgtggtygyggygttttgagygggagygggggtygygtygygggttygggaagttgaatttygygtygttgtttggaygyggttygttygtygtttttagttgttgtagggaatygggygagtgttttgttygtyggggaaygttyggttaggttttagagttttygyggagagyggggygtttgttgggggyggtygggagggtygggttaggggygygggagatttygyggggaygygaggtgttgygggttttgtgyggttggttgggaaygaggagaatgtgttattaatagtgtttaatygattgattattttgggtgttgtgtttttttttttatttttttttatttttgggaaaatgtattgtttaggtggggaaggtgttygaagaagaggttgygaaaatgaattttttgattagtagtaaaatatyggaggggtgtgtgtgtgtgtgtgtgtgtgtgtatgtgtatgtatgtatagggggtggggggttttttttgtttttttttttttttttagttaaaggaaagggagttttggygtgtgyggygyggggtggattttatagttatygagggggygaggaygaggaaygtttattaatygygagtygttgttygggtgggygtatyggagttttttttgttgtaggtgatggtggttttttygtgatygatggaattatagtttaatttttgttttttygttagtttttttgttgttttttatygagtgttgyggtagaggttgggtgtagatayggtygttttttttttttttttttgtttttttgtttttttgaataaatgtyggaggattaggggatggyggagggatagagttggattyggaagtygygggtgggagttgtttttygygagttygaggttgttggtattttgtygygggtagttygygttagtttygggagtttttgggtttygggagagygagtyggggtygtttggttataaagatgttygygygttygttttgygtaygggattygttttgygttttgagttttgygtttygttyggagttygggaygtyggtttaygtgggagaatttttgtygttyggggayga

SEQ ID NO: 6839 - DNA, 1801 bp, synthetic construct; identical to SEQ ID NO: 6838
  misc_feature 1..1801: note = Description of Artificial Sequence: Synthetic polynucleotide
  source 1..1801: mol_type = other DNA

SEQ ID NO: 6840 - DNA, 1684 bp, synthetic construct
  misc_feature 1..1684: note = Description of Artificial Sequence: Synthetic polynucleotide
  source 1..1684: mol_type = other DNA
ygtttttttygggygygygggttttttgtygtttggagtygagttggtattggagygttttttttttggagygtagaggtattygaygttttgyggtagttygtagttttttttttaygattttttagaatagttttgttttgttttttttyggtttttygagtgygttygttattttgtttygygagaggtgaaygyggagaaagtaggatgattatttaygttttygagaaattttgggtaaagaaaggtattattttagttygtaygttgaaagtygtttttttttttttttttttttygttgtgtttgaatttttygggatatttagayggttggagtttttygattttaaggygggygayggtaaagttaaaygttagygygttgyggttttygggtatygaggygttttygttttygttatttatatagggygttaagtgtttygattygygagtgaygaggaygtataggttagtgataygattygtagttagtattgagygggaygayggggttygagygtaggagggtgygyggggagttgaggagygtygggggttygggygyggygygtatttgaggtygtygtygaggaggygayggggagtagygyggttaagagtagtagygtygtttaggatagtyggygyggygygygtagggtygtttyggtttygggggttatygagagttyggggtgggtyggggttgggtgtttgyggttggtaggggggygttggtyggagtttggggagtgtygaggygtygtygtygggttttygtygtygttygtttgttttgygygttttgygyggtgttygtygygtttttgtttygyggygatygttttyggtygtatatyggtagtygygtttygttattgaggtygtygatttttygtygagttttttagttgygttygggygttttttgtyggtgtgyggggtyggggttagggtyggygggggygattygggygataggggygaygggggyggyggggttygggttggaggygggyggggygygggaygaaggggtyggagygtttyggattgatttagyggttttgaatttggggyggtygttgtgtygggttaagtggttgaggaagttttttttttygtttaatttttttattttttggttggggaagtygtttatygygtygaggagtgttttttgtttttttatagaaatatttttgygttttaagtggggattygggtygggattttttattyggttygtagygttgtagtttttgtggttagtttagtttttttaygtttttattygtattyggygygtttaygttaggggtttttagygtttttagattttgtttygtttggttgttatttttagggygygtaygatgygggtygaaaaggaatttagtttttagtgtgttttgttgtttaggttaaggatttagyggatttygttttttttttttttgtaattgtaatattgttttaggtttttttatttttttttttttttatttttttttttagtttggaagtttygyggttttttagatggattyggagygtttttggaggttatagtgatttaagttttaggaaggtygggttttggaygtygygtgttgttgttygtygtygatyggtgttttygtagagataatttggttgaatttatygtttagygt

SEQ ID NO: 6841 - DNA, 6657 bp, synthetic construct
  misc_feature 1..6657: note = Description of Artificial Sequence: Synthetic polynucleotide
  source 1..6657: mol_type = other DNA
ygtgygtgattggayggttttygygyggagygaggaggttygtagygtyggggggagggyggtttagtagggagggygatgygagtttggggaggggttagygattyggttaggaggtgaggatagttttttaattttygggaagggaagggtagggggtygygtttggggggygtygggtagggtgyggayggygaagggggayggaagggagagaggygttggggaagggatttttyggaggtayggggtagygtgygggttgyggtagygatttygattygggttttygggttttgtygggttgagtttgygttygtttygtygtygttaagtttttttaattttgttygttgygttyggatygygygttaggtttgggggygtagtaggggttgggggygtaygttgygtattyggggaygttyggggttygaggtggyggggggtttggtygygtygtttttygggggtggttygggttttaagttttttaggtttagygttyggtygygttygtygtttatttgttygttyggtttyggtttyggggttgygttygtagtygtygtygttttttaagttttaatttygttttygggattgaaatttttttttagtttygtttatygatttgygygygyggtttygtttttygtygygyggtygggggggaatttaagttygttttgttttttttygttttttttttttttttttttttttttttttttttttttttygtttttttgttygtttgygygtttttttttatttttttttttttygtygygagttyggttyggagtttttggttttttttttttttttttggtttttygagttttttgtttttttyggtttttygyggtaattygttttttttttttttyggygaygygtaggggttggggaaggaggggaggttttagaaagygtagggggygttttygyggttygttttyggtttttttygtttatatttaaaaggtggagggggtgggtgggtgggtggggggagtgggggygatagttgttggttgaataagttattygygatttttattattttaagtaaagttaaggygtttttaggttttttygtyggttygttttttattygggagggtagggatttaggggyggagaaygtagggygtaggtygggttttttttgtttagttttggtttygttttttttttttatttattttaatttttgtgaggattttagggggttttggagtatttttyggtttagttttattttgataatttgtttgtgyggaagttttygttygtatgttataggaagggaaattgagttaagagaggtttagaatttggttttatatagygygtygaaggtagagttttaggggtagtttggattttyggtaggagtttygggattttaygtttgggtygggtaggtttyggyggtgtttggataagttygygttygtagaayggtyggygtttggggattttttttagttttygygtagttygygygttttygtyggygtttttttttygttttttgtttttygttygtttttggttttyggttttagtattttyggtaygtttttygttygtygttagtagttgggtaatttaaygagtatataaaagagttgatttaatttaaaggtagtaaattaagataaattttatagtgtgtggggatyggagagggaatgtgaatgaaygtttaygaygtygtttagttttgtatggatyggtttagttyggttgtagggtttgataygttygggttttagggttttttaggagttagaatyggagagtgggttttgagttgttttggtttttaggtttttagtattggttygaatttagtaatttagagtttgtggtttttttyggttggttgggtggggttttygtgataggggtgtagagttttgaaggggagtgttaggaygaaagttagtgygtttttaygattttatgtaaatattggggggtaggggttttggaaatttagtatagttttaggggtyggtaggaagggtatyggtggtttggaatatttaagttgtggtttttttttttttgtttygatttggattayggttagagttaggtygtaggttaagagtaggtttttgtttatttattagatagatattgtaagtttgggatgtgttaggtttgggtttgtggaaygaggtyggyggtgagyggggtatttttttttttttgtttgtttgtgaggtttttttagttgtagttttattagggagaagttggtyggtttttagagtttttttggttaygtttggaaggttttagtaagttattttttagtttttggtttggttagttttgtgtagaagatgattatygggtttygggttttagtttatttatttygtttgttaaatataaattttaagagaggtattggatttttatttttagtaggtttttttaggtttgtgttggttaagtgtagtygaagttttggaatgagttttttttgttttygtaggtgtttttygtgtgttttgygttgtgttgggygtttgttyggaggagtygygttaggaygttttgttattttttaggagtaggtatgatgagtttattttttyggggtgtaaattgaggtygagggtttttttagagygtttttgatyggtattgtttgattttagaggttagttttgyggttattyggggtttgagatttayggagaattttagaggttaatttgaggggygggtaggggtaygygygyggggtygtgggaggygagatttygtaatttgaggagttaggattttagtagagagygaaatttggagttgggggaggggayggtagaggattggaggtygggttgtayggtaggggtygagttttygyggtygttttttttttttatttygagyggaggttgygtygttyggttgygatygagttttyggagtttyggtygggtygtttttttttygtggtygygtygattggyggtttgttgttattyggaygtyggygtygtygtygygaggatatttgttyggggtttaaygtygygttttaygttttttgttttttttttagatttagaatyggggagaggaygyggyggtgaagttgggaggttggaatttggagggyggyggagtttyggagttaayggggyggggggyggggtyggygttggttttggggataaagatttttaygttgtttgagggttgggttttgtagatatygaggtaggaagaaggatttygtatttttygttttttagatttttaaatttatttaggtttagatttgagtgtttaggtggggtgggggagatygaatttttttgggttttygaggygygygaaggygaygttgaaggggggaygtygggaygttgttttttttttgtataygtygttygagttgtatttttaaaygttttaggagtttygygggttttttttgttttttataattttygaagttgtttttagygattttttttygtttttagatggggtygtaggggygggygaatgtgttgygttygtygtgggttgggaggaagggygyggattgtaggaagtttttgtttttttttgggtagtttggtttyggggattygygtttagttygyggyggaggattyggtygggaatggtgttgagattgygygggtayggtttagggtygtgatygggtggttatygtgtagtttgggaagagaaaaagttygggggggggtygatatttygagatygaagagggaaaatgggaggaaagtaggyggtagggagggaagagyggyggaagagggattaggagagttgggggttygttttgggtttyggggtttygttttattyggtagtttagtttagtttagtttygttgygttagtttttyggatygggagaggttagggttatygaygtttattaatagtygygagygggtttttttygggagtttygtagyggtyggtagagtttagttatyggttggggtgggggygggggtttygtaatatttttttyggaggtttaagyggygyggggyggggygttgygtttttttaygtyggttttgygaagtygaggtatttatagtttattttttttttattttygatttygagattaggttttagatgaagaggggttygtttgtggtttaatttggggygtygyggttattttagygtattygaaggygygtttagttttttttttttttttttgtttagtyggttttttgtttttagygygtttyggaaagtttyggggttttygyggygtttttttagttttaggggttyggagttttggtttttttagtygyggygtyggggagggaagtttgttyggtttaggttyggyggtygttaatttygggtgygttygttttygaatttgggtgggtggatggggaygttygggagtygygggtttygagygtygtatttagagtttygygggyggggagattyggttttggygyggaygtygaggttagggtattagggatggggtggttygggttgygagagtygttggggattttgygttgtttttygtygttttttttagagagtatttttttttttgttttttttaggggyggggatttttygatttygtagyggygatagaggggtttttyggtttyggatagttttttgttttttaggtttttttttatttgggtyggggtgygggtttygggttggaggtattgtygygggygagtagagygygygtatttyggtttttygagtgyggyggyggyggyggyggtttttttttttttttttttttttttttttttygggttygttggttttagatagtttttttttttttttygttttgtyggtttttttyggagttygttyggttggattyggtttgygattyggagtttagyggagtyggygggagttaggttgyggygtttattgygttaagygyggggygagygyggggyggyggyggyggggatygygygttyggagttyggggttggtygggtaggygggggagyggyggtttyggtttygattygggttygggygygggygtagtggtggyggtygyggtagygtygaggttgtagtatattttttttgagygtgatggaaggttttatgtgggagagygygyggggagggatggggagggggygggggtygyggygggggygatyggaggggyggggggyggggtygttgttygtaygtyggtgggttggggggtggtyggaggggggtttyggaggggaagttggagttagtygygggggyggygtgggaagtygagtggyggtttygttttttttttttggttygtttygttygttttttgttttygttttaggttatttagaggtttttaggtttyggtttggaagagaagygttygaaggtttgggggtygggattttggtggygttgggaggtgggtttttgggtggggatayggttgtgtttataggygttyggtaatttygtggaagttgattttaagttagattttttgtgagygygygygttygygagggttaaagtatagttygtaggaygygygtttgyggggyggggggagagyggggtatttgggggyggggaggtggagygagagggtygtygggtttttggyggtttygygtttttagagattygtttttttttaaggtygtygatttttttttttttttttttttygttgygygtygtttttygtttttyggtygggaggagggggaggygtgggagyggttyggygtttttygattttyggaaggttyggtttagyggatttttttttttttttatgtgttttyggaattttagyggattygaaatygygttttygggttttgagtygaggggtttttygtygttttttggtggtttygagttttygtygagyggttttayggttttttagggygtttttygtttttattygttttttttttagtttgyggttttygtgtgggttaaaaattttaaattaggtttaagagygttttygttyggttaagttttygygygtygttttataaatyggtygygtgyggagttgyggagttygggatttttagygygygttgggygygatattttggatttygttgttagygtygygttttttyggtyggggagttttatatygttaagagggtagggagaggggaggggaggggattattggaggggagggggttgtttttygggtgtttttttyggaggaggtttygggataggggtgggggtggygygggaggtygtagatagygygtttygaggatggtygggtyggggatgggygygyggggtttttgttyggaygtgggtttaayggttttttygtagtttagaaatttygtttagttygygggayggtygttygtttttygatttygagtttttattatatttgtttttgtaggayggggttggggggattgagatygtgattgaggtyggggtatggaggaagtgtygtygtttgttttygggattgttggataygaagggtggaggttaaggayggagtttttgtttgyggttgtttagtttttagtttttgygygggggygtttagatttttagggaatagggagatagagygggtygagttygg

SEQ ID NO: 6842 - DNA, 546 bp, synthetic construct
  misc_feature 1..546: note = Description of Artificial Sequence: Synthetic polynucleotide
  source 1..546: mol_type = other DNA
yggaggyggyggggtygygggagggagggggtygggtttaggygattggtagygygagttygggagttttttygtgttttygttygtttygttttygttattatttgttygggatttggygtyggyggtttygggygtttttagtttyggttygggtttyggtttyggtttygggygtygattaggtttttttggttttygtygygygttttttaatttgttgttgtygtygtygygttttttaggttttgttagttattygygttttgagttyggggttagatttttatggaagygtygygatgttygtttttyggttgttggatttttagaagaygaaataygygaggtgagyggyggtygyggaggttygyggggagggagggaggggygygyggyggygggggtygyggaggttattttggttttygggtttygtygttyggagygttagaggggatyggyggatttttgattttygttygagaaaattaggatttaggtagtttygttttttygttgggatggagtaatyggggygttygc

SEQ ID NO: 6843 - DNA, 288 bp, synthetic construct
  misc_feature 1..288: note = Description of Artificial Sequence: Synthetic polynucleotide
  source 1..288: mol_type = other DNA
ygygyggygtattgygggtygggaaygtgttgygygttgatatygggttagttttttgtgatgggattttttttttaaaaaygtaggygttttttygggtygtagtygtagtygggagattgagggttagggygyggtygyggggttttttgggtyggggygyggtttaygttttaggtttttgyggttttgattagaagtygttgygtttttggtygttttttattygtttygttttygtaattttaggtttagggttatagyggtttagttttttttttttygyga

SEQ ID NO: 6844 - DNA, 947 bp, synthetic construct
  misc_feature 1..947: note = Description of Artificial Sequence: Synthetic polynucleotide
  source 1..947: mol_type = other DNA
ygtgaggtygyggtgttagtttatattttattgtgggtggygggttyggtttygygaggaggygtygtttttaaattttayggtttygygtagygaagaggygaggyggtygyggaaggtaggygtagtttatttttttygagaggtttygatatttttygggtgagtttygaaaagygygyggggatttyggttgagygttgggtygttagtaattyggtttttagagagttataygaaggaggggaagyggttttttttggggtttttgggaggtttggttygggtttttttygtagttttyggyggttagtttygyggttttggggygttyggatygagtaaaggtttyggygggygggtttttttttygttttttttaagygttygtttttygtyggtttagygtaggttttttygatttygttagygtagggggygyggttgtyggggatttagtagygggygygygggtaagtgygyggygggygygggttgygggattygtttygggttttatttyggattttttttggtttgtttgggtgtttygggtygggggtagtygaggtygygyggygttttttttttgggttatttttttttygtttttttttaggggagaygaatygattggttgttyggtygtyggaayggtaggtttygtygtttttttygtttttygtattttyggttyggtttttttttattatygygtttygttttaattygtagttagtattttttttttatttttttttygttttygttgttatttttttttttggatgttggaagygtagttggtattttygtttttttaattttttaaattttttttttttattygtttattttttgtgtttyggttttttttttgggtgttgyggaggttttttyggttygggggygtgtgtgtagggaggyggatygyggaatagataygg

SEQ ID NO: 6845 - DNA, 1313 bp, synthetic construct
  misc_feature 1..1313: note = Description of Artificial Sequence: Synthetic polynucleotide
  source 1..1313: mol_type = other DNA
ygagaatttgtygtagggggagatttygtygttaggttttgggaattgtttgggygtygttaaagttygagtyggagttgttatttggggtagyggtygggaagaggtaaygatgttagtaagaaagtagyggaggtaggaggyggtyggaggagtggattggagyggayggagtttygtygttttttagttyggagygtttggagygaaagttaagygtttttygagggygatttttttttttygggygygygtttattygttgtagtyggtagttyggygggagaggtggtagttgtagtttygtatyggggagagygagttttttgygygygygtttattygttttttaggtgattyggygttttygtygygttygttggaagtttgtaaatttttttygggggtttygtygttaygttgggaagttggggaygyggggggaggtttttggttygtygttttygttgtygtttgatygtatttttggagggtttygtattttgttaggtttttggaggtaaatatatattttygatttataattggttttygygttaggggattygygygtttttatataygtaygtaygtygggyggattyggygtyggttttaygttagtatttttttaggygygyggygyggyggttatygagygtttyggtatttaygyggygyggggtttttagggtggttttaggatatagtygaattttatagtttattagtattyggggtyggatttttttttggttygttaaaatgtttataaatatagattattttttagaaaaaaatgtatygtattttttttattttttgttttgtgatttgtttattggattaagtaatttygyggttgttgtygagaattaatttttgtaaataagtatattttygagatggtttttgyggtaagtgtaataaaagtggttaaatgtaaaagttttagaagtggtygagtygtatttttaggaatttattaaataagtgtggagaaggtaagagyggagttygggtgaagggattaygttggattgagtaaagattataatatattttatttagagtgtattatattattttttyggtgaygttaygtgggatttttgaatttttaaattattgyggttygttggggagggayggagygaggggyggggtyggygygtygagggggtaggtttygtttyggtttygtttygatttygtttygtttgygyggattttggtgtattygttygggagyggtagyggygggggygattgygtaagtaatagtttgtagagtttagygtygtgtgataygg

SEQ ID NO: 6846 - DNA, 848 bp, synthetic construct
  misc_feature 1..848: note = Description of Artificial Sequence: Synthetic polynucleotide
  source 1..848: mol_type = other DNA
ygygaagtttygyggtttttgygtgttttggtttygggaggataaggatttttttttttttttatttgygygyggagtygagtttttgttgaggtgagggtttyggaagtttaygtagtttygtaggtyggtggtggtygyggttgttttgygggggtgagtgtgttyggtyggggtyggagtttagygtgtgttyggtagayggyggtgttygygygttttttttttygygttygyggtgatagtttagatattagttygggygttgatagaygattttttttatttgttagttttttygtttgttagtagagttgttggtaagtgagagaaaatagaggggygygaaggtaggygyggttagggagtgagyggggygttgggygyggggyggagtygggtgygyggygttygggttaggttttatygttygygtyggttttygttttgtttagtygtygtttttttttttttttttatttttttttttttttatttagtttttttttttatttttaaattttttagttgygygttgatygtttttgtggttttgtttgggggtagggggagaataygaatagattygaggtgtttttttttggagttggagtttaattttaatttttatttttatttttatttttgtgtttatttttgggtattagttygggattatggttggttttygtagttgttttyggagygtatttggggttatggtttgtygygatyggagttygttttaagtyggagtttgggggygtagaagggggagygygtygagaaagtgtygggtaaaygygygtygygtttggttgggtatygygagttgggygaggagaygg

SEQ ID NO: 6847 - DNA, 2406 bp, synthetic construct
  misc_feature 1..2406: note = Description of Artificial Sequence: Synthetic polynucleotide
  source 1..2406: mol_type = other DNA
ygggggaggggtataygtagttttygtgyggaaagatggtgttttttttttatagggttgygygggtatttattttygttgtaaagygttygggttaggygyggtttgtttygggtyggggygagttygttgttttttgyggtagatagygatgygygtttttygttttagttttyggttygttyggyggttygygygttttttyggtgtagtatgygggygttgtgaygttttyggataaatgtygtgtaattgtgtaggygaatgagagttaaaaataagaayggaaaatttattattaaggtattattgygttagygtagttatttgaaggtttttatggttttyggygtttgygtttgaagttygtttttaggttttggggggtatttgtagaaaatttttagtagyggttygttaattagattttagggtgtayggggggtggygtyggtaattatggtaatttttaaaataaaataatataaaataaagtaattaaygtttattaattattattttattttattttttgtattgtttttaggtagttggggaagtygtygggagtgtagtyggatgttggaatttaatgtgattyggttgattatgtaaagattaggattggaygtttttgtagttttatttygttatttatttttttttttttatttygtattagaaataaagtggggggggggggygagtttttggaggagaaaatgataattggtatttaattttaggtttatagtgygtygyggtggggygtaaagaygtaaattttygggatggygagttttyggggttttattgggttaaaygaaaattgatttgatttgttttttaatattygagggagagaaggggagatgaggggagggagggtagggtttgagtgtgtgygtgtgygtgtgygtgtgtgtgtgtttggggagggggaggaggtattaagttgtagtttgygygyggttttgygtttyggyggggttgygtgygtgtgtttttgttygygttgttgaaaygggtttttygagggatyggygttatatgatttygtttgtttttygttagygygtagatygttagttttttagtttgttyggtatyggaggagggtygggyggtatttttygggtattggggttttgyggagyggagaagaggttttagyggggaatggtatatttggatttaagaagtygyggttyggygttagattttggagtgtagatatttggggggaggggagagttagagggagygagygagygagygttagagagaggtagygygtagygygtayggayggggggttgttgygyggagaagatgtaagygygtggggtttygttggtttttgagtattatgtagaaggggattyggttgaatgatggttaygtygygtttttgggattgttggygygtaaggayggtaygygtaaaggttatttgagtaagyggagttyggataatataaaatggtaaattaagtggttygygttgttgtagaatttgtttttttatttygagagygattygagttygyggttttyggggttttatttgttggagggttgygtttgygatygygygtttttttttaagtyggygttgtyggttaaggagtygttggagaaataggtgaggygagygtygygttttgatttttttgygtttyggtygyggttttgggggtttagggttttyggttggttgatggygtttgaattttggtttttttatttttggygttttaggygttttttgtatttttagygagaggggaggtttgtttttagttaggygagtgattgyggygggtagagggggtagggattgagggyggggagtagatgtgggttgyggttgtttttygtyggaygagtttygtgggaggygggtatagaggggtygatatttggagatgtagaggaagatggggttttaaggattagagaygatgagtttggatataygtttagttaaaaatggtgtttttaatttttatttttatygtttagttttaatagtttygatygtttgttttatatygggaaygtgtaatttttygygtttaggtatgggaagggtaagayggaggygttygagygttgttagtttttgtttygtygtagttgagggyggagagyggtttgygttagtttttyggagttgggttggggttatggggttataygggtyggttyggtattatygagyggtggtgggtttttagttggyggtygtyggagtaataagtttaaagatttttaaggatygttttgatgygtyggggttagggttagggttgttgyggaggtagygggaygaagtgggygttttttttttttttygttttttgygtygtygtygtygtygtagtygyggttatagygttgygt

SEQ ID NO: 6848 - DNA, 1218 bp, synthetic construct
  misc_feature 1..1218: note = Description of Artificial Sequence: Synthetic polynucleotide
  source 1..1218: mol_type = other DNA
yggatttaygtyggttttgttaygtgttgttygtagttttygttygtttttttygygttggtaaygggtattgattgttygatattttagygatygtagagatttttttaatgtygggygtattatyggygggttagyggtttygttggtttttttgatatattttttatagttattttttttagttgagatttttttttttaatatttygttaattaaygtgtaattttttggttaaaatgttagagttaagattaaatttgaagaaaagaatgaaattataggaagttttttagatttagtygttagtaaggttatggttygaagyggtgtaggggyggygygtygggaagttattggtagagttgtgygtattggggggtgttgtaagygttggggagagtgtggagaggttgygtggagttgygygttyggggtgggagttgtatttttaatgaagygygtgaagggtaagyggtgatgggttttgygttagtggggttgggagygtgttgggggttgtaygtggggttgygygtaaggtgagaattgygtatgtgggtttggggattgygygtatygaaggttgtaggygttggggagggtgttgggggttgtgygtggggttgtttttatyggaagttgtaygttyggggaagygtagaggyggggtgttgygygygttggggagtaygtggggggataygtagggggataygtagggattgttygygygaatggtttygaaygtatgygttttattttatattttatagtygttatgaygatygggaggttygttygttaayggttagttaayggttgyggggataagttygttgaggttgttaggygagttaggtttttttggatttygtttgattyggatgggttgtgtttgaaattgatttagttttattagggattatgaagaaataaggagtaaatttaaagtygttgtaattttttygttttagttygtttaagyggtygtayggggtttttttygttygggagttggaggtggaaaagtyggttttaggyggygggaaattgttagggggygttaggaggtttttttyggggaggattttaaatttgaaaaagygaaaaggtttggagttaaaggtggtggttaagatttttttygattttttttagttygttygtaattttttggygtagtttygggaagaggtgtaygaattgtaggygygg

SEQ ID NO: 6849 - DNA, 1848 bp, synthetic construct
  misc_feature 1..1848: note = Description of Artificial Sequence: Synthetic polynucleotide
  source 1..1848: mol_type = other DNA
ygtagtaygagtgttagggygygtatttggggggtgttttggyggtgtggagagagaagagagagggygygggtgatattaygttygggttttttttttttygtygggtgggtggggtttyggygygtygggagggygyggggttaagtagggggaagaggaggagtaggtatgaatgtgtttgtgtgaagatyggggaggggtggaggaggaggaggaggaggagaaggaggaggaggaggaggaggyggyggyggyggyggyggyggyggyggagggyggggagggagygygygygtggttygyggygttygggtttttttttagttttygatttyggttygygaygygtygttttttagtygtygtygttygtttygtagttgggatttatttygggtttggggattyggygggygggagaagygggggttttyggygyggtttggaaggagygagaaagtaaaagtaaggygagtagtattttaagtttttttaatttygttttttgyggyggtaggygttttgttgtttagygygtttttttygagttygagagtggttgaaagaaaagggattgggygggggtyggggyggaggaagagagagtgygagggagygaggagagttyggtaatatttgttaaaatttgggggaggaggagygyggggaggaggaggaagaggaggagagaagggaaggagggagygygygggaggggagygyggagtygagggataatttttttatttygtgagtagtgtaggyggtgttaggtyggggyggggggtttttttatttagtayggggtattaggtygggatgggatttttttttagaaagtygattggatgttaggagaggygtayggttgggggttttttttttttttttttttttttttttygyggttgaattaaattagaattgttatttagggtttgtgagttagaagggatyggattataygattttygaaattgatgtyggagttgtaygagygggagggagygggtaggggtagygttatyggygygttygtatattygtattygygtatattygtygtttttatttattygygtygttttttygtttttttygygygtttygyggtygttygygtygtattatgttygyggygggygtatttygygtttagttyggtygttygtggtagtygtagtygttygyggtygygyggagyggggagtygttagtttgygtttygttygygggtttatgggaagttyggggatttgatagtygttgtygtygtaggtaygtttygttygaagttttttgtttygyggatttygtagttygtttttgyggtygygttygygttttyggggttagaggtggtttttagygtggggaygggatggagtgaaaatggttgttaaaaggygtttagatttagagagtygtyggtgaggygttygagtaaggtttgtattygttttttttttttggaaggtttttttygaagagttygattygyggatyggtyggagayggattggagaattttatttttyggaggggggaygaagtttgtygtagtggtggyggygtttttygttttygtttttatttaaagggtttagaagaatttygygagtttygtaygygtttggtttttttttttgygyggtggygttttayggttygggtttygggygygtayggygttygggatgggyggaaggaggygggaggtatggtgggtgygygyggggattttygtygygggggtygtygtygttggggtttttttagttygggttatgtttyggagggygggggtgtggtgtgagyggatggagagaggygygttttygtygt

SEQ ID NO: 6850 - DNA, 2119 bp, synthetic construct
  misc_feature 1..2119: note = Description of Artificial Sequence: Synthetic polynucleotide
  source 1..2119: mol_type = other DNA
ygygggaggtagatagygttttygtttttgtaattatttygttygttygattgggaagatagtgataaagttygggygtagaaaaggtagggttagggtaatygtygagtggtagyggtagggattagattgtgtttgattttggtaaattttattttttttgggtyggaggtatgtttatagaagggtggttagtaaggttggaagagtygaagtttttttttattatttatatattattttygggttygtagggttgggaggygagtttagtaygygttttaggtgygtaggggaagagtttagygttgygygtagagtyggttttggagtttgttttgggggtttgtttttttygtttatttttagtttttttgtggggatgggtgyggtaaaagatyggyggatttttttggtygtygtttggtygtttattagttttttgattttggttaaatttttttttttttatatttgttttttttttttatattttaygttaggggygtttygtggattgtaattttgaagagagttttggtyggagggtgttagtttygattgygtttttaattygtaggagtgattttgaatatatttttattyggagttttagtgtttttattygtygtataggaaaaagygygttygatttygggtatttttagtatygttttagtaagtgtgttygagattagatgaggggtgygyggttgtatttatygttttttagagaygtgggygtttggyggggattaaggtggttgtgattagtaagtgygaygtagttattaygagtttaaagtttatggttagtaggttgygtaygggtagtaaggtataggataygaaggtgattaaaaggagttgttaaattttttgttyggyggtygttggttttttagyggtttyggyggaatttygggyggggtygtttagygygaaaggatagtagagtagygygaaggtgaggttgaagagtagygttagttggtygatttgttgtagttggggtatttgtagggatyggaygttggttattaygagtagygttaggaagaggaygtagtgtatygggtgtgagtttttggttaggtygggygygggtttyggygygtttagtagttyggttagygttagygygttygttagtaggttgagaayggttagygtttttagygtggtygtttgttttagtygtagygtgtagtygyggaatagygtttttagttttgggtaagygaatttttygtygtaygttyggagttygygtyggyggtttgtttyggtygttygttyggygttttygggttygttygygtygttttygtygtygttttygtygygyggygttttygttattttagygttatgtagyggtygyggtygygggygygtttttygtyggttyggggygtyggggygygggyggyggygtyggggygggygggyggygggyggygaggygtyggggygyggggygyggggygggyggagttggggygtyggttgtttygygygygygttyggagygygttttttttygttygtygygtttgygtattggagttygttygygtttygatygtggttttyggyggygatygygttgygatagtygagtttygggagtygygaatttgggygygtatagttygygttttaatttygygttttgygttttygttygtyggaggagtygygtgatttygagtattttttttgtttttttygagttttagtttttttatygtgtatagtggaatttatttttttggygttatttggggagtygaaaatattgaaattttgygaaattttttgttgyggggtagttaattttggaaaatatgtgtttttttttatttaataaaattaggttattagatttgagaggggttygygtttgattgygaatttagggttttygtttttaygagayggagaatygaygtttaagaattttyggggttaggaggaaggtggaggtttggggygtaygttttttttatgygtatgagggatttttygtttttyggtaatttttttttaagttttagggtygyggagattttgtgggygggtgygggttgygggagttgtgttggggaggyggygg

SEQ ID NO: 6851 - DNA, 562 bp, synthetic construct
  misc_feature 1..562: note = Description of Artificial Sequence: Synthetic polynucleotide
  source 1..562: mol_type = other DNA
ygggtygttaggagggggagggggaygygygtygtygggttygttattttgtattyggggtygttggtyggtyggggtatttttaygttygtttygttggygagattggagggattygggatatygtaaagtattttttttagtgtttgggagygttygttgtaygtttagttttaygtttttggaattggggttttttggttttygggtttaggtttyggttttaggatgygagtgtttattygagggggtgggaaaagttgatttttygtaagggaggggaaggtgtaatttatttttttagataattaatggaatatttttygtttttttttttttttatttgtttayggtagaagttaggatggygttttttatgttggtttgggtgtatatataagtgygtgyggaagggtggttgtaggyggaggtgatagygaagtaatttygtagttygttygayggttttttgygttttagatttttttttggygtgtaagatatygtgtgttttygtaaaaygggaatgttatatttgatagygtattttttygttttaygg

SEQ ID NO: 6852 - DNA, 1404 bp, synthetic construct
  misc_feature 1..1404: note = Description of Artificial Sequence: Synthetic polynucleotide
  source 1..1404: mol_type = other DNA
ygtttgttttagygyggttttygggggaggtagtagygttttttgtttttyggtttggtttttgyggtygtagtttttyggttttgttagggttgtyggyggtttygtttgtttagttagggttgyggtttagaggaaygygygtyggtgtttygggttgtygygtygttggattttagtttgtatttygtttttttttttttgaaaaggtattaggaaaagagagagggagagaagagtttatagtaggtaagtttggtttgggttatttgttattttagtgggagggtgtgttggagatygyggtgttaagyggggatagtygggatttgggggtggttgtgggttygaagtggaggaygagtatggtttgggagataaggaatygttttgagatagagaaggttttygggagyggatagagagtgggygaaatyggtgygtagtaatygyggygttagttttagygyggtttttggggygtagttttatttygttttagtagttgyggagttttttgaygagttttygtttggtagtattgtataaagttttttttttgagaygygtttaggaattttgttttttttttggttttttggtttttttattattttttttggtttgggtagtagagagygtttatgaatgtgttttyggttttygtaggttgtaggtttatttggagaygttttagtygggaatattyggggagtatttgattaaagggtatttgygttttygttygtttttttttttgttggtttgggagaagggaaaggggtaaggaagaaggaagggaagygtggtggtttttgttgtagygttttggaagaggaatgggygaygttttttttttygtyggggaatygygaygtttygtttgatggaagtgtgtatttttttagatttagagggaaagttggagttaaatagtagttataaagttggttgtttgaaatgtggttaaggtaaaatattygggggatttttttgtagtagtgggtttggttygttttggaaaggtyggatttgattygtgttgggtatttaattaggagtgyggtttttagggtgttttttttyggtttttgtttaaygagtttggagttaatgygttaatgggttattttggtagygtaygggtygttttyggtattgtttttttttttttgatgattygagtttaattttttgggttgagttgttttgttttygttatagtgtaaggagggaagttgataggaggaggagaygtygygttgtggtagggagttttgggatttaggggattggaagagagtygygygttagtagttggggtygttggtgttygggatttygagttatggggataggagttaaatagtygaatttttagygatttygtttygagygaagygg

SEQ ID NO: 6853 - DNA, 819 bp, synthetic construct
  misc_feature 1..819: note = Description of Artificial Sequence: Synthetic polynucleotide
  source 1..819: mol_type = other DNA
ygygggggyggyggggtgatagttttygtgtatgaattagttattttttaggtttygtttyggygggggtyggtyggaygttygtttygtataaagygggtattygggtygtttggagtagaaagtygygtattttttttygttaggygttttttyggaygttttgtttagygggtygttygattttttgtattatggatttygttygttttttggggttgtygattttgttgttttttttgayggaggttgtattgggygatgttgtttaggagttaataggtatttggtygttttaggagtttttttttttaatyggyggagagggygtagygggttatggggtttygtgtaggygttttttaagtttygttttttttaggtttttgtygygygtttygttggtaggggggattygtttttaagtttgtattttttttgtagaggttttttygttyggaaggggatagaatttttygggatgttttttttttttaggagttaygtttgattatttttttttttttttgttttttttttgttttttttttaggaaataaygyggagatttgttttttgtttttagattayggattttgtygggttttattttttygttattattaygataggtataygtagagttgtygttagtttttgtaygggggttgygagggtaaygttaataatttttatatttgggaggtttgygaygatgtttgttggaggatagaaagtaagtgttttgygygtatttaggattttygygttttttgygtyggyggttggtagtagtttygttagttttttaygtttygt

SEQ ID NO: 6854 - DNA, 1128 bp, synthetic construct
  misc_feature 1..1128: note = Description of Artificial Sequence: Synthetic polynucleotide
  source 1..1128: mol_type = other DNA
ygygagggtttttagyggttygyggtttygggyggatttttagaaygagtgygggtygttyggattggtagattgygagtttygaggggygygggaygtagtyggtttagataaagaaatyggygttagyggtygtttttgtygttttttttttttttttaygtatttttttaggaaaaatagggtatattgayggttaaaggggttggtttttttttttagatagttggaygggaggtgttttttgyggggttttgaygtttttygtagaagagtygygggtttagyggttttygatagygttttygtttygtttttyggygggygtttttttttgttttttygggtgygaatygggygttggtyggggatttyggggaygygtgygtttttygtygygygaggtgtygtygagttagttygagagggyggggggygggyggggyggygygygggggygggggagyggtygggataygtgtggyggyggygggggggaygyggygttyggggttttaagaaggtgtggagyggggygggygtttttttaggtttggtygaggggygtygygtagaggyggyggyggygtayggaggyggtagaygaygygttttyggygttygtagtttyggtttygygttttygyggtttaaagtaattttgggagtygtygtttttygyggaatttttyggygggggttygtttttaggttygttttygagttygtttygttttygttygtttttttttygtttttttttygygtggttttttygtttyggygtttttaaaattgaatgagygagyggygygtagggygygyggyggyggyggyggyggyggyggtatggagygtagtggttgggttyggtagattttttttttagygttgttgttgggggygaygttgagggygygygyggyggttggttattattttygtttttygttttttttttttttgtgtatttattayggggagttggaaggggatggggagtagggygaggtgtttatttttttgtatattgygggtaattttatttattaygtttygggataagaatattatggtaggtatygtagtattttygygttygtygtygtygggtgygttygttagygt

SEQ ID NO: 6855 - DNA, 1128 bp, synthetic construct; identical to SEQ ID NO: 6854
  misc_feature 1..1128: note = Description of Artificial Sequence: Synthetic polynucleotide
  source 1..1128: mol_type = other DNA

SEQ ID NO: 6856 - DNA, 1128 bp, synthetic construct; identical to SEQ ID NO: 6854
  misc_feature 1..1128: note = Description of Artificial Sequence: Synthetic polynucleotide
  source 1..1128: mol_type = other DNA

SEQ ID NO: 6857 - DNA, 1921 bp, synthetic construct
  misc_feature 1..1921: note = Description of Artificial Sequence: Synthetic polynucleotide
  source 1..1921: mol_type = other DNA
ygggygttgttttttgyggtttttttygtygaggtttgtgygtggyggggtttttaggagyggtagttygtgyggtttgggggyggtttttttttygtatygtagyggggygtgtaaagygtttgyggttgtagtgtgggygtttattttaygtgttyggyggygtgygaggagtagtaatattttttgtgggygatgaaggtggataggttgttgaatttgatgttgtaaagayggtagtatyggtggttgtygttgggtagyggygtyggygtgtttttgttgggagtttggaygtttttgttygagtaggaggggggygtyggygggggyggtayggtttygggygyggyggtyggggaygggggygggtygggyggyggtttttggggtttygggtygaggtygtttygggggttaygggattygggttgyggggaggyggygggggygggagygggygaggggtygyggtyggtyggygttygggtttygattttygggtyggttaggggygygtygagtagtaggtygtgygttaggyggaaatgttttagtaggttttygygtatygggtygttyggggggtagtaggggtaggyggyggygggtaggtygagygygtygggyggtggygtagyggggtaygagtattttttgtgygttaggtaggtttygaggttgtggaagtttaygyggtaggtygtgtattygtggtagtyggttagygtyggtgtyggggtttyggggagygggygtygyggttttttgtttaggtygatggggtygtyggtygyggggtygggygagygygtaggggygaggtyggggtygttttygttttygttttygggtygyggygattygggygygggggygtggtygggyggyggggggggyggggygtyggtygygtgtagttygtagagtttgyggygtttgygygtgygtataggygyggygggagagggggtygggggygyggtyggtttagggggtttygggggygyggtyggtyggygyggyggygggtygtggygygaggygtagtagtatygtttgtgtayggtgtaggtttygtggyggttgaagyggatgttgtaggtttygtatagygtgyggttggggtygtttttygygtygtttayggagttattygggttttggttgttttygttgtttyggtygttygygtygttttygggygtggtygygtttttagtttttttttygygygtttyggggttyggggaygagygyggygygtygggttyggygggttggtyggggggygygygggtygggtyggggggygttttgggtttgygygyggtaggygygttttygggygtayggyggtttgaatagtagaggygtttgtgtaygtagtagttgttgaygttgttgaaggtgatttygtattygaagtaygtagygtttttgggggtttyggggaagagttyggtttgygygtygtyggygttygygttygygttttgttgtagtyggttgtgtattagttyggatattttggttaggattttygaggyggggggygtygygtygggttygaataygtattgyggaaggaatagggtttyggttaggtttagttygtygggtatygggttggagttyggygtggggttggatagttyggttttgattttggtyggggyggggttgygyggygayggygttygygayggggtttggggtttaggtttttyggggtttaggatgggggtygttttyggtttttttatygtttttattttgatgtttttgggggtygtygggggttygttgttgtttttattttgggttagaggtttygttttggttttttygttggtggtttyggttagggtttttttgtttagttttggygatggggtgggygttaggtttaggttygygg

SEQ ID NO: 6858 - DNA, 2872 bp, synthetic construct
  misc_feature 1..2872: note = Description of Artificial Sequence: Synthetic polynucleotide
  source 1..2872: mol_type = other DNA
ygggtgttagggygygttgyggtttygygggtgggtagaggygygtagaaaaygygygggtggygygygyggttatttagtgggtttygttygygtygtyggygtygtygtygtygtygtaygtgygtygtygtgagygygaagggygttyggattygygttttgttygttygtttgttygtyggggttattgtggatttttaggtaatagttaagtgagaagttttttttattatygaaaggtgtttgygttttttttaygtttttttattaagtgtygygaggtgygattttattttaaatttatttataaatagttaggygatttttttaaagyggaataaaagtaaaattaggttagatatygggggaagtyggtygtgttaaygygtggatagggaaaggaaygygattaaggtagtagttatttttgtgtayggttatttygaagygttagtagggtttaggagttttttgattttagaaataggagtgttttttttttattttttttttttttggagaagtatttttgagatgaaygttgaagtgtttaatttagaygygagaagygtgtatttgtttaattgagtaaataaaggttagtagttggattaataaagtgtgtgtttttaatygttagatgtttttattgttgttttttttttygaggttgggggtgggggtgyggggaggaaggggaaaagataataaataattaaaaagaagagagtaaataaatatatatttggtgtttygatatatatttttttttagtygaggttttttyggaygaagtaatattttgtattatttaaattaaaaattattygtgagttaatagtaaattttttttttttattttttttttttttattataaagtaaaatgaaagagaataataagtggtgatgttgggttyggaatgygattttaaygtygagtttaaatttgatatatgttatattygtttyggtaagtagggygttgtttttggggygaaattttgtygttatygygggaggagygyggagtagagtaaagtygtagttyggtttagygtggaggtggttgggatagggtggggtgyggaggtgtagygygttagagtgagggttaagaaatttatygygatyggggaygtygtgggtagygtttygggaggtggtattygyggyggygaggtagaagtttttaaataatatatttaygygygagttygggtagttgttgtygygagtggggggygygttyggggagggggggggtygaggaagtygtagttagyggaygyggtygtygtataaataatyggggygggygttygygggygggttgygggtggygyggggttagagttagggygaagyggyggtygyggagttgtaygygtyggygtgtttygygttttttyggaggttygygttgtttygygtagtygttttttttattyggatttgtgtgtgtgtgtgtgtgtgtgtgtgtgtttgtgtgtttgtgtgtgtgaatgtgygttggtaggygygygtattyggtygygygygygtgttgttggtaatgygaattgtatatatattgttygyggggttgttttttttyggaggggyggggtgggggataggaygtygtagaggattttgaagtatygtyggattatttgtttgttttgttttattttgtgttgttattgtygttgttgttgttgataggtttggaattagttggttaggatgtttttttttttygtttatttattttttttygttttttaatttttttaaggagggggaaaygyggggaagaatattgttyggatttgtagyggagttttttggttgaygttaggtttatttgttatgtaaataattygttggagaatttgtttgtgttaygttagatttttttttatttttatttttttttttattttttgtttygttttttttagttygttttagayggygagttagggaagggggtggggagggaggygagaataaaatygtatgttgtattggtaaagtygagttgtgtttgttgttttttggtagtttttaaagtaygtttttttagtagayggagttgttggtaaatgaaataggggattttatttgaagtgtagaaagtttygaagggatttaaagttttyggtggtagggagttaaaagtatatggtagtyggaaagggagattygagygtgygttaaagygttgattggtttttttttttayggtgtgygtttttgyggtttggggtggagagaggtygagtgtttttttttttattgttgttttggtttttgttttatttgggttaaggagttttygggttttttygtggtygygtagtttaggttatyggggygyggtttggaaggaaggggtygttaagttgggatttagagagtttgaggttttygggaagggttttattagtgattgaggggagtaaaagtaatyggaaagaaaggaaagaagaaayggttagagtttgtttygygygtattttaaagtygaggygttygygtgggggatgtaygggtttagtygttagttttgggtttyggtttttatttatygggtgtgattyggttgggyggtttgtttgggatttagggyggtgataggggaaaggtygagggaggagagagygggtttyggaggggaygtaygatyggaattttggygaggggtttttttyggagttttagtttagaggggggttagygtttttttttygtygttttttttyggttttttttttgttygygggtygggygatttttygtyggtygtttttttygygygtygtagattgagttygttgttttgttygtaagttagtygtaaagygtggygtttygagaggygt

SEQ ID NO: 6859 - DNA, 2906 bp, synthetic construct
  misc_feature 1..2906: note = Description of Artificial Sequence: Synthetic polynucleotide
  source 1..2906: mol_type = other DNA
ygygtttygttttttttggttygttygggtttagggygtygtttgtagttgygygyggtygtttttagatggaatttttttattaaygtaaggttyggtyggagtagttattygggagttgggyggygaggggttatttttttttatttyggygggtgtaggatyggggggtttgggtagtaattagtggggaggagygttggattgtgtaygtygagttyggtaggttttygtatgyggtatgygaagggaatttygaggtttttttgtagaattygagtayggttttttyggagttttttgtttygygtttgyggttttttgaattattttaataaaatgatygtttyggtagttatttatgtttttttttgygtagtgttygtagyggatygygttgtgtggtatttygagttttggggattttgttgtaygygttttttagattttygggggyggggagtggggagataatygttagagtygyggggygggataaatggyggaatygtygygyggygttaggtaaattttgtaagggaatygygyggtttgtyggttttattttaagtattttygaaaagaaagtatgtggygggatatttgttatttattatgtgttattttyggtgaygttttttggagttgtgtttatyggggattygggttygygggtgttgttygttgtgttygggygggygtygygttttttygygtyggtttygggttygttaggtagtyggagtygttgggtttttttataattatatttttttttttatygttttygtttttttttatttttttattttgtagttgggttttttttttttttttgggggyggggaaggggggatgatttttaaaaattagaattattgatatttttggttttttygtygttttaggttgaagagyggagggggattygygggtygagggtttttttttttgttygygttagggtygttgggtgatatygaaatttagaggttttygtttttygggggttttttttttygtttttygaggtgattggttggygygaagygattggygatttygggygygattttggtygyggtttttygygtygygtygggtgaatggtygygggyggaggatygggaggygtygggygtagattaatygyggtygtyggtgggagtatttgttatttatatggaagagatttggygtttgttaggttagtttagtttttttagtttagagattagttataagtgyggtygttgtgttygttttatgyggyggyggyggyggyggyggyggygttgatatggagttgygggttttyggygggtttttttatygygttttttgyggggagtagggtaagattygtygttyggtagtagaaagyggtttygaggaaagtaagtgtygaattaygggataaaaagtttttggtttttaaatttttttaaaaygttttgtttgttggaaaaggagaattttttygttttattttttttttygtttttttttttaaaattttttagyggatagttaggtgtattatttttttttatattattttagtgatttgttttttttgagtataagtagatggttttgtatgttygtagtttgtgagagaaatagygggyggaggtgaygggaatggggggagaaggagagtgggtattagggggygaggggttggtygggtattggagtttgattgggtgtttgttgattttaygttgtaaagaataaggtagttattttttttgtttgtttatgattatattatagtaaagaggtttagaaaagagggagattttattyggaatttttaaggtttggagatgtgattttttaaaagtttagtyggygaatgggagattgaagggtgaygggaagggggtaggygygttyggygttttgattgggygtgyggyggtaggattttaaagygttttgtttyggatygtttgttttgggtgatttttyggatttgttttggtggaattyggatttgtttygtygagatgaygaggtattttygtttygygaatttaataggagggatttttgaagttagyggttttygggatgagtyggggtaattttygttttttgagygtgggttggatggatgtttaattaggatttagggaggatgggggtygygggggaagtygggygtttyggggttttygatatttatattttygtayggygtaygttttgtttygagtttgygtttttygagttagtayggygagtttgggattttygtgttttttttttgtggttttygagaaaygtyggagtttygtgttttgttgggggttggggggatggagaaaaggtttyggggattttgtttaaaaagtaaaggtaaaygtattttaatagtttttyggtagttttygyggttggygyggttttagtttygggyggtttygygyggggygtgggygygggygttygggyggttaggtgyggygggggyggaggttgtatttttagygygtyggaatgtttyggggygygggaaaggtaaaagtagtttggygttttttttayggttttagtttttatttatttagaattyggttttaatagtttaaggaattgagaagaaaaaggaatttgygttgggaaataggggtttttggygggttgagtggtygttgttatggtagagatagaaayggagaggtagagatggatygtttagttatgttaagygygaagtttattygtttagttagaaagttyggatattttttgagtttygtatagttggtgaaaaaataatagaattattaaaaaagaaaaaaaaatttttttygtttgataygygtttttttggtgtaaatgaaatgyggagggataygygagttatttagttgygtaaaatygtattttygygg

SEQ ID NO: 6860 - DNA, 2906 bp, synthetic construct; identical to SEQ ID NO: 6859
  misc_feature 1..2906: note = Description of Artificial Sequence: Synthetic polynucleotide
  source 1..2906: mol_type = other DNA

SEQ ID NO: 6861 - DNA, 1696 bp, synthetic construct
  misc_feature 1..1696: note = Description of Artificial Sequence: Synthetic polynucleotide
  source 1..1696: mol_type = other DNA
ygaaggaggggttggyggtagtgtagtagygaagttygggttttyggttttgggagtttygtggtttyggtygtygtttttygagtttttattaygtagtttygaatttygaaygygagttygygtttygttagtagttagygggggtgaggatgaygygggtygggygagaggtaggttaaatgtagtagtttygtygygggtygtygggtttttgagtttygttttttagagttagggggtttygggtgygggtyggagggygggggtyggygygggttttttygtygtagtttygygtygttttagtttattagyggttatttaattgtttttttygatyggtttaaaatagttgygaaygtttgygatttgygygyggttttttatttgaygtttatttyggttygttygttygttygttttggtttygtttygttygtttagagggggyggggaggaagyggttyggggaggggggaggggggagggggagagaggaagagaggaggaaggaaggaggaaagaggaagaygggyggtyggaggygyggggttgygyggygtyggtyggygyggygttggaaggygtyggygttaatttygygaggtaggygayggagggggagyggygttaatatataagagtattgtattaygttaatttttttttagaatagtatgygttagtagtatatttaygttttgattgaaggataaaaggatgagagagtagtttgygtggttgtygtttgtaatatygygagttyggygygaggaggagayggtgggygtygygygtaggggtttygttgttgttgttgtygtygttagttagyggggattatgtttttgggtttyggagygtttttygtagtygygattttygttgtttaygtygttgtagtagttygttggyggygyggttattgagggygtygggagtygaagtygygaattygtttttttygtataaagtyggagtyggyggygygtygggggtygggtagyggygggyggygaygggyggttgygygtygtygggggttgyggtygtygtygtygtyggattygygttygttttyggattttttgaaggggtttgyggtgygggygygatygygggygtygygygttttttyggtyggyggatygggttygagygtagtygttaygtygttggttttygggggtyggayggagygtygtttygygtgtyggtagtyggyggattggagaattgatttttygtttttgttttttttatttttygagaagaggygaggagaaagggggtgtgtgtttggggagggygaaggygtygygaatatttttttttaattttygtygtttygygagtttaygatygtaattagttgtygtyggttyggagyggtygaygtygggagagggagygtagtatttagygagtgyggtttgggyggtttyggggygttttygtatttttttyggyggyggttygtagagygggtyggggtygtyggagygtattttggygatgaagygttttttttygyggttggagygagtyggtgttagggtttaaggataaagtygggaagygttggtggygtygttttttgggyggaggggggggtatgtatttgtatagttygtygggttttggtttttttaggygygttttaatttygyggtttygtyggtttyggtttygg

SEQ ID NO: 6862 - DNA, 2054 bp, synthetic construct
  misc_feature 1..2054: note = Description of Artificial Sequence: Synthetic polynucleotide
  source 1..2054: mol_type = other DNA
ygayggttagygtttagagttgtaaatttygaggyggttgagygtttttttttgagygygygtygtgygtttyggttatttatgtatgttttttttttygttttatatygttatygttagggtagtttygtgygggtygaggggatttaggggggtgtyggtaaaygttggtgyggaggagagtyggtaagtygggyggyggygggtgggagtatgtagggaggygttttttgttttttttgtyggtygttttttttygttttagatgttagtygygagtttygagttagygagagygagttagagagggagyggyggygggyggygggyggtagggaggagaggaggygaggygagggagggaggaagggaagtagggagggygggagggaggagaggaggatttagagagygttaggtagttggagtttttgtagygtttggtygggttttaatgtatagtagtagygagtygyggyggtagtaggtagttygggagtttyggyggyggtygagttagyggyggtttygttttttgttttttgtaaattttgygagtagttygttyggggggtygggggygygttygggaggttyggttyggttygyggtygagtttttygtygtygtagygttagtygtygtagttattatygtygtagtttygtgttttttyggggagtagtyggyggttttygyggttttttagtttyggttttagggtattgttyggygagtgtttyggtaagggtgggggttgtygyggygyggtyggtygygggttgtyggggggyggtygtygttatttagagaggygygtagaggygtygagagygtttttyggygggtttttygygtattygtygygttygggtagyggttygatygggygagtatgggyggygyggagtgaygtygttgtgttygtttggtattaaggatatttagttygygggggtggggaygaaggggggtagttyggygtygttatygtagttttygagagtygtygtygttgttygggtttyggggttgggtggaggaaaggggtgttyggaatygatttttatttttygatttttttgttggatattaygtttattttggaygtygtaagagaagttgttaagtttygtaggttttgattyggygtttttygygtttttyggttgttttyggtttttttgtgtttyggtggagtatttgygttyggggttggggttggaggaggtagttataygygygtataygtataygtttagaggagggygagaggtagyggtataggttttatttgtagtgttaatgyggygttttygttgaaggagggaaaygyggygygtttaggtaaggagtyggttygtyggggagtggggtygggygggyggygagggtagtaaggtyggatagatttgggtygattygggagtttttagtgtttyggagttagttygyggtataygtataygtatataygtaggtatatatatagatttatatyggtatatayggygttygygtatttgtttaygttttatttggaygttygyggaggtgtagyggtyggagtagggatttttygggtgtgttttttttttaygtttttggatttagatttttttttttygggattttyggggtgggattttgtgtattttyggttttgttttttattyggggaggttgagggagtaattttttagtttttagtttttttygtttttagttgggttttaaaatgggagaagttttgagaggttttyggagatttatttagtgttatygyggtttygtggtttttggatattttgggattttaaygggagatagatttatagatattyggaygtatatttggagagagtggtggtttagygttyggggaggaggttagataggyggttggggttgtagttttgtagggyggygtatatgaaatagatattgygtttttttagtaagaggtagtataaaygtttttttgaagygtggtattgttttttygggaatgygtygagattttaggtagaaagyggtttaaagtatygtygygt

SEQ ID NO: 6863 - DNA, 1258 bp, synthetic construct
  misc_feature 1..1258: note = Description of Artificial Sequence: Synthetic polynucleotide
  source 1..1258: mol_type = other DNA
ygaataaygtagyggygttaggygttagggtttttatttttgttttttggatttttttygtttttttgttttatygagggttttgtgattygattttatygaattaatygttgtttatygagggtttgttgygtttaaggaaggtatygggygaygagtaaggyggggaygtagtttggggaygtaggggttygggttttagtttagagataggaggtyggygtttygatttggtattygtygaygaatttattttaaggtttttattggyggagtttttgttatttttttttttttttaaatgtagttttygttattttttygygtttaggggttgttgtttgagtttagttttgtttattggagggyggyggtggagagggtgttggtttagygtyggtagttgggtttaggattaaggtgggygttygtyggttttggtttttttagttttayggtgtaggatttagggygyggttattygagtttttyggaygtttttttttttgatgttygttgtttttgttttggygtttttagttyggggtygtagtttgttttttttttttttttttttygtygtagttygtygttttygggtagagtttatgtttagtttgggttttygttygggatttaggaagaggttggyggggttggagggtgygggtyggygygggagggygygggaggyggggagyggyggtttttgattggtyggggygggggagtgagyggagttttttataatgtttyggtgyggtgtagtygyggatggatgttgygggaaggggttgttatttgttgtttttgttagyggygygyggatttgttygygtttttgtagtygtygtygtygtygtygttagttygttyggtttttgtagyggygtygtttgygtttttttygyggtygtyggagygggygttatgaattttagtttttyggygggagaggagaaaggggygaygggyggtagtagtagtagyggaagyggygtygggagttgttgtttgggygtygagggyggygyggattygyggggygtagggttagtygyggyggygggggtygttgttttggaygagttygyggtygtyggttagaaggagaaggaygaagygttggaggagaagttgaggaatttaatttttyggaagtaggtttygtataggtaggtgyggggagtyggtagtygagataggtgygtygyggygggagatttatttttttatttagtaaggggygttttygygg

SEQ ID NO: 6864 - DNA, 628 bp, synthetic construct
  misc_feature 1..628: note = Description of Artificial Sequence: Synthetic polynucleotide
  source 1..628: mol_type = other DNA
ygyggtggttttyggtttttttttattttattttaygaatyggygtttggtygttttgaaatgaatgatttygtygygtttyggygtygygtttttagygttttttttygggatagyggttaaggtgattttgatygttttygggtygygggtygggtttgggtaggggtttttgggttaggagagggaggtygtttygygtttattttttaaggtygttttttagttggtgttgttttygtagttygattyggatygtygtagtagtttttyggggtygygggttttagtttttgygggygaaygyggtttgggggyggygggggygggygyggggygygyggygaggggyggyggyggtygggttygygaggggggttttygggtyggttttatgyggggygtttygtygygtygygttygygtttttgtatyggggtgyggggtttagttygaygygtattyggygtttygygygttttgygggttttttaggtyggtttygggtgggttaggatygyggygttggtaggtyggggttgagttyggtttttygygttggagtttttgygtygggtgtygtygyggtgygtttagygtttgtttygtygagtygtagtttttaygt

SEQ ID NO: 6865 - DNA, 1075 bp, synthetic construct
  misc_feature 1..1075: note = Description of Artificial Sequence: Synthetic polynucleotide
  source 1..1075: mol_type = other DNA
yggaggttygttttygttaggggtttygggggtgygtgattatgaattttagagggttgggttttgatttgagtgtygattygttaatgaggaygggaggataaggttgtygaygtagyggaaggtaggggggaagygattygaggatttgaygattatttttaggtaggggttttttaagtaggtayggaaattaattttattaaatygyggagtggggattgggttygggyggtgtttagtagggtaggggtagggttagttggygygtaggtatttgtagggtggagtagaataatygtggggattygtttttttggaggggtattgtttattttttatatgagttttaggatattttygtggggyggagtttyggagaygttttaggttaygttttygtygttttatttttgtttgyggggggtygagtagggagggaggtttagygygygttgtgtgttygtagtgtttaygggtagyggggaygtttgygttygggttttygaygygtagtttggagagttgyggagggtgtttyggggttatatatttattattaattgtatttaggtaggtttttttgtttttttyggggtygtygttygtgggagggaaggtgtttygtttygatttatttaygygggtagyggtgtttttttygtttatygygttatyggtgaygttygtttttgygttygtaggtgtayggttaggtgttttatatygtttygtaygayggygttttgygtttttgggaygtgygygggtttygaggtgtttygyggtttttttygtttatgygtagtttttygyggttttttagtaataaggtgggttgygtygtygygtttttgtagtyggtttgatttygyggggtttttgtagaygttagtttagatatttagyggtttttagagygtttygttttgttattygyggtggtggygttygatggtyggygaggggygaggagygaggaagttygggygggaggagagttygtygtaggygtttggtttttttttggtggttaggaggygttgggagygggagtgttygttttggggatygt

SEQ ID NO: 6866 - DNA, 5566 bp, synthetic construct
  misc_feature 1..5566: note = Description of Artificial Sequence: Synthetic polynucleotide
  source 1..5566: mol_type = other DNA
ygaattagttttgtygttggatttttggtygttgttygggtyggygttagttttatataatgtygygtgagtttttgtgygtgtgygygggggaggttygagatgtttttttttyggtaagttttygygttagtatygttttttagtttygygggttttttygyggygagtygggaygygtggttttygygggtttatttgaagaaggtyggttygagtagygygtatagtagatttaygtyggttagagtatgggttgygygtttaggttggygtyggtttgygagttgttygagttygagtttatygataggtygtygtygtttaagtygygggttttgagygattygtttagggggtygtyggggtygtygttttttttggygttatygtgtagygagagygttttggagtygtttttttygttattyggagagtygttgtyggyggttgggagyggttygttygygtygggygtatatggygggttttgtyggggttttygggagttygagtttaagagttgtttygagtygttygygtygtygttttttttygtatygttygygtygttttygtygtyggtttygtygttttttttttttttygygttygtatagtaggttttygygttttttygtyggtygaattygggtygtaggatgttgtygatgaagaagttggtgatgyggtgygggtgttggtggttgtygggygtttgtaggatygygggtagtattagagttygtyggygttyggtgttygtttygttygggttgttatygtygtygtygttygagtygtygtyggggttggatttyggttgtygttgtttttttatygtygtygttgtttygttaggtttggggttatttttttttatgttgtttatagtaaattttatattggtttttyggggaygtttttttaaattagttttyggttttttygyggygtatayggagattttygygtttttatttygtygagtttttygagggygtgygyggyggtygyggttagggttgaggttttataagtygtyggtygygttyggygyggagttatttttgaatttaygaattgggttagaaatattaygagtygtttygttygtttagaygatgagagatttaatagagttaagttttygatttygtygygtagtyggggtttagatagtygtagtggttyggyggggaygygggtygtttttygggtttttygttttttttygygttyggtygtttygggtttyggygtygtygtttgggtygttyggggygagagttgygygtatgtaggtagygygtttttyggygtttaygttygttygggtyggtttyggtygtygtygtygttyggtygttttygttygtaygttttagtyggttttygagggtgtygggygttygyggttagygygttygttatygttygtaygtatatggaggtttttttttygyggtygtygtttygttgygggtyggggygttttatyggygtgyggtygygttttygtygagtttygtagagtttygyggttygagtygtatgggtgagagaygygaggttagggttyggtygggtygggttgggtygttygygtttttyggtygttygtygttttygtygtttyggttttygygygggttyggaaatttttaggttattyggygtaatttgagatatttttattttggatttttgtttttatttttaatagagttttttygagtgaygtygtaggtyggttttttggataygtgtttygggttaatggtygyggygtygygygtttaygtgaygtttyggtygtygttgggtgataggagtagttygtygttttttttttttttaaagyggtygygtttttygtttygggtgygggagtttaggaattyggagagattttygatygygttttttgygttygttygygttttttttgtygtttygyggtttaggggtgtgagttattyggygatagtttygttaggttatttyggggygygtaggtggataygtataggaagatygttatttttaagatttttatattgtttatygtggggygaaattttataattttttgtataaaatgtataaataatattaaatgagttgtygagatataaagggatttttgtggttygttttttttgttgatggagaggaatagtgttatttttatttgattyggtaattyggtagttttttgttttaaaygtagagttggygygtaggatattttttttgtagatatttattgtaagtgtgygtgtgtgtgygtgtgtagggaggygygtgtatayggtygtattttattyggggatagygatttttatgaaatatgtttagygattygaaagagygggggaatgtagtatgyggttttatttgygaagggagaaatttaggagtttyggaggttttaaaggaattttttttgttaaggagaggaggggtgattgtttagttaagattttaaaattaagtygttygtttttttttaatttttttattttgattgaggagtttttagatyggttatttygttttttttgttttaaaattttttaaattaattttgtyggagagtagggtttatttgaaaygagaattaggaatttaayggtaagggtgggagttttagttggtttttttttttttttttttttattttttttagattttttttttagttgttgttagaatgtttaattggaagttttgtttttttttttttttttttttttttttygggtttttttttatttgtttttgtttatttattaaatattygttgttattttaggttygtttgtttattatttaaaatgtatttttatggaaatgtgtgaatttttggaaatattygatagggtagttttgggggtgygggagtatttgtaygttatgagtatttttagtgygggggaggyggggaggtygtagtttggtayggatattttagggttgattggttttgggtagttgtatygtgtttagtaatttagattttygtagaggtagttagtaggttgttgttaggttttgagtgaatttggggagtttggtaagtattttygaggtagygtggtttgttaggttatttggggtttgaaggttgtattttggttttgygaagttttttttttagtgtttattttaygtgttgttttttttttgtaggttttagagtgttggttgggttgggatgagaaaygatagtttttatagttgtttttaggaaaattatttttttatttaggaygggaatggtgggggaggaggtgttgggttggttttttggttattggaygtggttttggttagagtgtgttttttgttyggtgtgtttagggtagggtggggaagttttttttygttggggttggatttttttattttttttttattggaggagtttttattaaatgttttggttaggtatatatttgttaggggtttttttygagttttaaaaaattaaattttatagtttatttgtttttygggaaaatagggttggtgagagtttgtgggaagttttattgaygtttatttggttttttggggggagaattttttgtaattttggaaattttgatgattattagttaggaaagggagggtttaaygattttgggttttttgaatatgatattggggggaggaggggttttgagttttttggtttttgtaaaattattttaggttaatggttttatttgttttatgaaagttaattaggyggttttttgagaagtattttttgaatttttgggattttttgtttttgattgttttagtataaatggttttaagaygttgggttttagttttgtgtttttttgygatttagattttaattygtggttgtaatagagattttgggaagtagagygttatttttagggygtttggygggtyggtgggtagagatttgttttygtagggtttgygggttgggttttggggttggttggaggaagaggaattygtgggtygtttttttggaaaggaggaaggtgagaggtggagggaggaataggagaaagagaaataaatgaagagagagataattagagggtatygggttttttagagtggatttaaataygaaataattttgggaaagyggtaagaggggttatygtttaaagggtyggggaagttgggatggggttgtagaaagttgagttgtttaggggttgggyggtgttgagttttatatatayggaatttygtaaggtgttttaggaagtttygagaagygygtatgaggatyggtttyggtygtttgttttagttgggayggygtttygygttttttggggatgyggggtagtggygtgttttttttttgygatgttagtttyggttgtygygttttygygagtttagagttttygttttttttttygaaygatygtygtttttaaggtyggtttttttgtgyggattagaygagtttttttyggatattagtttttttygggatggaaagtggggtattgattygggaatttygttttttttttagttttatttaggaatyggagagygttygygattattygtttgyggaggayggttttttatattttttaggttygttgtataaagaggggtttyggagagggygagtaggaaagtagtttttagaygtygtgygttttaggatayggaygttagttttgtaaataaaattttagtgaagygtttyggagatatygggygttyggatgtygagttaggttttygtttttatttgaaaaygaggttagagaagggtgattttttyggtttttttgygttttttttattygtttygtttttttagtttgaygtggtgatatttggaaaaatggatttaatgaaagtygttygttygyggyggtttygttattygyggggtagagaygtttaataatttttgagagygagatttttattttagttaaagtaggtttggttagttttgygttttyggttgggagtygagtttygtagttaagttttaggygtygggyggggaattggggtygataggagagtaatatttttttyggggygagtagagagttatygtyggtttttggggttgaygtttygattyggtttgtagataaaggtygaaaygaaggggygyggggagtaggggtggggygggyggggttaaygggyggatattgygtgtttgygtttttttttgggygaaggaggatyggtttataggtttatygggygagttyggggayggggtttgggaggttgggtttagggtttgagatttttttagaataattttyggaaggagggggttaaatgyggtagyggygggtttgaaaagggttaggagygtygtaggaattggggtgtataggttttygygtgtttagygtttygttttttttygttttaggtttgttaggggygygygtggygygggtagagtttggtgggtgggttggygyggatagaagttttgtyggggagyggggaggggggggtagtygtattgtaygttttggttttgtttygatygttggagaagygt

SEQ ID NO: 6867 - DNA, 5566 bp, synthetic construct; identical to SEQ ID NO: 6866
  misc_feature 1..5566: note = Description of Artificial Sequence: Synthetic polynucleotide
  source 1..5566: mol_type = other DNA

SEQ ID NO: 6868 - DNA, 1164 bp, synthetic construct
  misc_feature 1..1164: note = Description of Artificial Sequence: Synthetic polynucleotide
  source 1..1164: mol_type = other DNA
ygaaygtttggattttagygagygggyggttttttggyggyggtgattatygttgtgttygttgtttttaygyggygttygttaattttaygtgttygtagtygygyggyggggtygggygttyggagttgattttagtttttaggatagaaagggtggttaaaygtagatttggtaatttttygagtyggygattatagattgttggtggttgygttayggtttygggagggttagtttttygttgggtttttagggtattaagaaaagaggggtatgygagtttggaagttggagagagttyggggttttttagagygggtgggaygtygygtttttaggatttygygttaygygtattttttttatttygatatttattgttatttttatagyggagygaggggtttygtygagggygagygtatttygtgyggttgagatgttyggaaygttttttygygtttyggtttttttagaaggggttatagtyggttygygagttttygggygggggttgagtygtagtgttaattaaggygaggttattttggttygygygttttttattttagggttttttyggtagagaggtgattgtaggttatygttagtygggtttttatttttygttttygtygtttyggtttttatatttyggaattttttyggyggagtttgygagttygggaaygyggttttagttagagtggaagggatagygygggaattyggtagagagaaaaagygggaattgggygtygtygttttaygatygggaggagattttttttyggttttttttggattttatttyggggatygtttyggggttagagtttaggttgggagagtttttgggygtatttatygttttttttaatttttttttttttatttttagttygggtggtagtggttattygtygggtttgtaggtggaggggagtttgygygtaaaatttayggtyggyggyggttattttttygygggaggyggttagattttggagttatayggttagagttagtaygagtagggttttgttttttatttyggggygygtttttttggaggagttgtaaggygyggatygattgatgagtyggttgagtyggaggttggagagggttggagtygyggtttggygttgagtaagtygt

SEQ ID NO: 6869 - DNA, 1495 bp, synthetic construct
  misc_feature 1..1495: note = Description of Artificial Sequence: Synthetic polynucleotide
  source 1..1495: mol_type = other DNA
yggygygtattttatatygtttgttttgtgttttaaaaygtygaagttaattttttaygyggttttttgttygattatttatttttgygttgttaggtatatygaggggatyggttttttttttaggyggtttattttagygtttttygttagagggtatayggttttygtgtaaagygtttatggygyggggtaygygygtaygtagtttygatttttatagtttaggttttattttygggttgggtttagtygttaaggygttggggaggggtygtgttagggagygaagygttttygggattttgggagggtgyggtygggattgttgttttttgttttgagttttgggygtaggygttyggtaggattyggygtttaggtgagyggyggtttttaggaggggaagtatygygygatttaaygggygtttagagygtagggygaagaggatgggygagggagagggggagggagaggttayggtatttgaggaggaggaggagtaggaggagtaggaggaggatygtggggttygggtygygttgygtatttatttgggttttggttgttygtygyggatttyggttttttgtyggagtttygttttttttttttgtttttttttttgtttttgttttttttgygttyggatatttygtyggagayggagygttttaygyggayggttttyggygtaggygagtttggtttaagggttyggatygggtttgggaaaagtttgtttttygagggggagagygagyggtygygttgaggygttygygttgygygggggygtttttygttgtttgtagggagygyggygyggaygyggygggyggttyggttatttggaaygggygttygttttggttttyggggttgtttttgtygtttygggaagtygtygatgggttttatygttggyggttygygttttggtttttgttyggygttttygtaattygatyggggagaggttattatygttttgtttaygtttttatygttyggtagtygtygtygtttagtttttggttttygygygagttyggagttttaataagtttyggggaatttttygtyggtttttttttaattgtttygtagttatttatttttygttygtaggttggaggtaggygtttttttygtatttttttttggtttygtttttttttttttttttattatatttttattttgaggygyggataygttatygggaggagtttgggttyggygttttygggygtagtttttttttttttygygttggtygggyggggggtggyggygyggttgtygggaattttygataggggtygttggaygttgygyggagatygaggttagygtttyggagattygggaatttaggyggagattygaggttttygttgttygttttttttygtagttaggtagygtttgggagggttgtttygttttattttaygyggaaaaggayggygtagagaaaagtttgyga

SEQ ID NO: 6870 - DNA, 352 bp, synthetic construct
  misc_feature 1..352: note = Description of Artificial Sequence: Synthetic polynucleotide
  source 1..352: mol_type = other DNA
ygtygtygttggtgggtggyggyggttygggtgttttttggattgygtagtaaagaggtattttgggagatggggttaaggttttagggggtgttattygygaayggtttattygttagattaggggggttttttggttgtgygtttggttagaattggttttgaygatggaagtttttggaattaaagygttgtttttttttttttgtgttatagttggagttgygggagygtttgttttgttyggagttygyggttttttttyggttgtttygyggtggygttaygygtttttttyggagtaagttyggtgygtagggtygggggygtgggyggttgttgttagaggygt

SEQ ID NO: 6871 - DNA, 1141 bp, synthetic construct
  misc_feature 1..1141: note = Description of Artificial Sequence: Synthetic polynucleotide
  source 1..1141: mol_type = other DNA
yggggattaggyggtgtgtygttygggtagttagtgggtygggygagtttgyggggttggaggggaygyggggttgggaggttggggagttgggggttgatttygggygggyggggyggggtagggatttgtyggtttggggygggygtattagaygagtttttygttygtaggtttttagygtttagtygygtttyggttgygtttygtyggtttygtttygtttygtttygtagagtygtygttagtagtgggagaygtgygttgagaggygggggttgygttyggyggaatagtagttttygggyggagagyggggtyggggttygagagtaggtgatgttaagagttgagygggattygtgagygygyggtttagtatttattagggygtttygtaaaaaatttygttttygtttgtttttgggaattataggtaagttttgggttttygaggtgtagttttaggtagagtttygtgttgggaggtgggaagggggtttgattttggggatttaggtagtttggggatagttttattaggggtyggtgtttagaattggtgagggaggtattttaggggttgggggagaaggagygagygtttttygtttttttttggtatttagyggygygtttgttggtyggaaaggtagygagaagttygttttttttgttttgttttyggygatttgyggttygggtgggagttygtaggtttygggtttttagygtygttggttagggygygggtaaagtttgttttttygygtttagtyggttttttygttttygtagygtygtaggtgtygtttgttttygtttttttgttgtaatygttttattatggatttttygatttagatttttygyggggagtygggttttatttgygtttygagygtttgtttgttttttaatagtagygtttggtttttyggttgggtygagttygatagtaayggtagygtyggttyggaggaygygtagttggagttygygtatattttttyggttatttyggttattattayggyggtttatttygtagtgttygtygtgggtttggtgggtaattygttggttatgttygtgattattyggtgagygyggggatagygtagygttgggggttgggygg

SEQ ID NO: 6872 - DNA, 3297 bp, synthetic construct
  misc_feature 1..3297: note = Description of Artificial Sequence: Synthetic polynucleotide
  source 1..3297: mol_type = other DNA
ygagayggataggaatygaggagatttttttgtagygttttttatttttyggatagaaattttgtagattaygtttatttttttatttygtgtatygttygtggttygtgggtagtagttgtttttttgggatttttttygtttgttygygagttttygtayggtygygtttttgttgttggggtygttygttggttttggttgttygttaggatttttttttgatgttgttaagttygggaagtttaygatgtattttagtgttygygygtygttttttttaaagttttttttttatttatttttttataagygtggagggagatggggtaggtygyggygtttatagattttttttyggygtttatttttttttttttatttttttagtagyggtagggtygtagygtaygtaaatttttttttaaaaygtttattttatttttagttagtygttttttttagggttttttygttygagttgggtgtggggatygtygygtatatagagaygggaaagttatttyggtttyggagygtygtttttttagaggtttttggttygttygtttttttagygttggaggatagtygygtatatagatttttttttttaaygtttatygyggtttttagttgtagtttgtatttttatttttygtttttagtttttygtttttygttttttgttttttagttttygtagttygggygtttagatttgtttygattttttagggtagtttygagggtgyggaagattaagtgttygggtttgttttaggaaaatttyggyggygtttgtaygttaattgttttggygtaggygaagggtggagggtatttttttgtttattyggtttttaagagygtgaatagaggtttygagtgaaygtttatatttagtyggttttttagggtttaygygtggggygtttatttttttattttgtttttyggtgtttttgttttggttgtattttttttaaaaggaggygttaygattttaggaggttttgtttttttattttttttagyggygtttaaattattagtttygggygtttaattttttttttgttttttttttatttygtgagaaagtygaygtttttattygtttggttttttygaaataygtttygggtggttaatgygatttttagggtttaaagattagattttygygttttttattaagatatygaygygaagtygtagaggtggaatygyggaygttttggtaggttygggatatattgattttggtggygygatgttttttttygtaygyggaygtattygtagttttatttttttaaattygtattgygggaaggaattttygattygtatyggttttygtttygtagtaayggygatattttgaggttyggaygagyggygygttttttttagtttyggttattttttagtaygaagttttagggygagttygagaygaagaaagagagttygaggaattgggatatttaygagtttatygtttattttgtyggtyggggaggaagtttyggtyggttygttttygttygtygtgygtatgygtttygygggtgtttttttaatattgtagygyggagggttgttttttttaygtyggygattgtttatygygtttttygttttttttyggttttyggtttttgttttagtttttttttttyggtttttttttttttttgttttgtttttttttygtttttttattttttttattyggtygggtaattttaygtttygtttttttttagyggyggygtattttatygtygygggtgttaggggtattttygaggttttaygyggggygygatttttatttyggtygtagttttattgttttagtttygtattagtaagttttaagagtgtggatgygaagttaggygygygtagagggygttygygaagttttttgtgttatygttttttttyggygygyggggtygagygagattagagtgtgttggattgygtgttyggatttygtgaatgaagggagygggaggaaggagygggggtgggyggtaggtatggagggggygtttggtttttagagtttygygtttgtggattgygygtttttggagggtagttttttatttttttttyggttyggggygtttttttgagttttgttttygttttatttyggygtagtttaggttttyggttttttygttttggaaagyggttttygtttttttttagttagttagagygyggaggttttatttagtaatygagygggggataagggggggaattaatttttgattttagatttygttgagattttyggtagtygtttttygygtttttttttttagggatttyggagttyggggaaaggagtagattagggggtagygggagggggaatttagtygtttagtttttyggattygtagtatygygtgttttygtagttygtagygttttttygggagtgggattyggtggggtygyggggttagttttttggagttyggagggttaagttgaagttggaaattgatttgatataaaaataatattaygttatttttttttttgtttgtygagagggtaggggagtgggagagygagygttgggagtaggyggaggygygtttgggggaggttyggagtaggyggaggagagygataygttgagagtttgaaaggtagtttyggggaagagygagggttttttttygtttttttggattatggaaaggaaatggtttaggaaaaagtagtttggagtgttttttygyggggaggggyggtgtttygggagtygttaatgtttygttttaggatttgtttagttaygtttyggttttttygattttgttattttttttattgttagttttagyggagygggttagttggggttaggaagaatygggagaggttggtgttttggggaggttgggtgtggggygtagtggagattayggtatttatyggtataggygagttttgtttagyggtggygtttttttttttgggtttggttatyggatgggggggttttagyggaygatttttygagggtyggtygggtagtgttagygtygtttygagtaggagygagaggyggttyggtagtttttygtgttttttygagagtygggyggtyggtagggygggaagtaggggggagaagtttaggygttttyggggagtttygggagggggtygtyggagaaggtgagagaagaattttgygaggttggaaagygggttagaaaggaggtygaatagtttyggggyggygggyga

SEQ ID NO: 6873 - DNA, 2213 bp, synthetic construct
  misc_feature 1..2213: note = Description of Artificial Sequence: Synthetic polynucleotide
  source 1..2213: mol_type = other DNA
ygaaggygaygggtttaggatttgtagaaatygttgyggtttggggyggtyggggatttayggttttttggggyggttttgaataggttttggggygtagygttygttttttaaagaagtttgggatygggttttgtttygttgtaagttaygtttttygtgagtttataagtgtaaaattagaaaagaatgtttygtttaaataattaaagagyggtggttttygygggggtagyggaggyggttagtagggttttygttttyggggagaagtgtttaygatttaagggttgtttgttttaggaattttttaaagaattatagatattgagagtattyggggtttggtaggaagtgtagtgtattttttagttttagggtaattaggatagtatgaattttttattttgtggtagaataaayggttagygtttygatgtggygygttygatttttttttatagagtttaaaagttaygtttaattaaattgtagygttttygttttagttgggtatyggtttggaagyggtttggaattagattggattygaggaggtaagatttyggtagygygaggttaattataggttttattygyggtttttagttyggttttatygtagtyggyggtagatattttaaattttttataygtygtttttagygaggygtttyggggaaagtagygtgaggtagtgagtygaggggyggggttaggaggaygtttygttttygagttygtttygtyggagggtttgattaatgattttttaagtygttttagttttyggygtagttttttyggtgggttaggtttttygttygatttgttttagtyggtyggagtatataygtttggtygyggggygttygtataaaagttatagttagyggaggttggaaatagtygtygatttgggtatyggtyggaygaggatggagtgattagygyggttttggttatataggttttgttttaygtttttygttygtttttaygayggagyggagttttatttagtygttttaggaaaggtgaggggttygttagaygygtattgygtagttttygggttyggaayggtggygggtgtygtatttygaggtgaggttaagggtttttygtttttygggtagaaattttttttggygtgaaaggtygagggyggttggtgagtygtggtttttygyggygtyggygagaaggagtygygttatttttygtgygtgtygggttggataaagttatttaagygygaaygagtgttgattttgagttgtgttttygagattttttttttygggtagagtagattttttgtttaatttgtttttgaaaagtaaagtyggtattgygtttttttttatttttttaggaagtttaagaatttyggagtttygtaattttttttagaygttyggaagtaaatygygttttaggtaaaaygagttygtttgagagygtttttagtttygttgggttgttggtgggygtayggggagaattagggggttgygtttttygggttaagttygatygtttttyggttttatygtattttyggttttttgtagygygygyggygygggaagttgttatggatygyggtygtttagygggtagtttttttagygttagygtygagttygygtttttggtygtygttattygygattygygtttygggyggatygggtyggggtyggygggttttgggggyggttygygtttygggagygggyggtyggyggyggygaatgyggygygggagygtagtygggtgtagattttgyggtaygtttttttggagttgtagygtaygttgtygttygtgtygttygatattaagttgtttaagttggaygtgttgttgttggttattatttatatygygtattttattygtagtttgtaggaygaygtygaggygtyggyggaygtygggttgggygttttgygyggygatggttatttgtattyggttaaggtaagygggyggggygtatygyggggttggggtygagattaggatattttgatttgttttgttagttatygttttgggtagatgttttaattttttttygggtgaggygggaagtygatygggagaaygatttyggttygygagggtattggtggtaaggttttygtygygaaagtyggttttttygyggtttataggtggttggagaggygtttaaagtygg

SEQ ID NO: 6874 - DNA, 363 bp, synthetic construct
  misc_feature 1..363: note = Description of Artificial Sequence: Synthetic polynucleotide
  source 1..363: mol_type = other DNA
ygygggggttatygygttygygaaygtagagtttataygtggattttygygtttgtgatgtttygattygtttygggttttygtatagataatgtygygygtttttttygtagttatttygggattygygtttygygtygttyggaygtttttttgygtttgtyggggatatttatygatattaggaattttagygtgtttatatagtttygttyggttttttggagttygttgagtaygtataygygtaggygaagttgtttttttaggtttttggygttttyggygyggttgttttygyggttgttttygtttatggtyggyggyggtgygtagygyggygttgttygtygtgttgagygt

SEQ ID NO: 6875 - DNA, 960 bp, synthetic construct
  misc_feature 1..960: note = Description of Artificial Sequence: Synthetic polynucleotide
  source 1..960: mol_type = other DNA
ygtagaaaaygttgtaggggttaggygttygagatatttygyggggtagtgggtattaggtttaggtttyggttgtagagyggaggggygtygggtttaggaaaggggttgtgggtgggggtaygggggagattygaggggtgttgggaagagggtttttttttttagygttagttttggtgtygttgtgtattyggagtygygygaagggygtttttygattyggaggtataggagygtttagagaggaaagaaagaaaaagttatygttggttygaatttttggaagtyggagtygggttttttgttttaaatatygaggtagaattttttttagygttgtttyggtttttttgttatttattttyggtttgtttttggaagaatyggttttttagtttttygtygtygtagttgtgatataagtaagtgtagtygygttgttyggggttygttagggtttttygygttygttttttatygtggttygyggyggtygygttttygtttygtttygttyggtygtttygtyggtttttgtttttagttgggttgtygtgaygaggagaygttgttgtgaaattaaatttgattttgagtttttaggyggyggtygagagttygyggttgttgatgtttttgggttttatttyggggtaggagggyggygatyggygttygggaagyggttgaggggygtygygatttttagygagygtygttygagttttagttygttygggtagttttygaggtttagggygtygtygttaggtaygygaaagttatttggaagggagttgggtgygygtaataatggggttttgagtygtggtyggtaggggagaggtgtagtygtttaaggttygtggygtygggygttgtaygtggagggatgtgttaagggtyggtttgttttttttyggggaggtggtaattgattgggaygtygggggaygg

SEQ ID NO: 6876 - DNA, 1404 bp, synthetic construct
  misc_feature 1..1404: note = Description of Artificial Sequence: Synthetic polynucleotide
  source 1..1404: mol_type = other DNA
ygttygttttttttaggttyggtgggattagattygaagttaattttygttaggygttaggtgtagattttaggttaggttagagtagtttttgggttttyggatygggatgttygttttgtttttttttttggtttygttyggtttgttatagggggaggtttyggtttygtatttygggtagygaatttygtyggtygaggttagtttygtgygggggtttttygygggatygatygttaagyggtattgttygtttygggygttygttyggttttagaygtaggttttgyggtygtttygtgataagtatattgaygggttattgttttttgaygagtgttaaaaagttygtttgttttgaaygttaatttttaagtgatttttaygaggttttttttttyggttttttygttgttgtttygttygtattyggtttttagtaggtgtttaagaaaygtttagtaaayggtagygtaggygagtttgttttgygygttggygygttttattgtttayggatggygggygattttaygggattttyggttygtaggattttygttttygaggttgtttttgggtygggaggggttattttagaggggygtttattttygayggygggggtyggggygtygygggtaggggagggygtagtttttaagtagttttagtttggtttagatttygygtttagygagtyggtyggttaggtttatattttttatttgtygttygttttaggggaagggttttttygaygaygttygagtttttttttttttyggagggtyggaggtyggygtttattggtyggttttgggygaygtttygttttttygaygttaygggttaatgagygygygttgttagtttattagtygggttggttgggyggttygggagttygagyggtggyggagyggygagtagygagtagygtttgygggagyggtyggtyggtygggttttygygtttygtaygttygtaygtttagyggggttygtattgagtatgggygyggyggtygtgygttggtatttgtgygtgttgttggttttgggtataygygggyggttggtygggggtagygggtttttaggtaagttttygatygaggtggggggyggygggygyggggggttygggyggtygaggygyggtttyggagggtttttttttygyggatttygagttygtttygygyggtttygygttttttgtttttttgtaaagtaatttttagggtyggttyggggygtttttttttygtagttygggyggtyggggtttttgagttyggyggggtygtattaggggtgggtgggtyggggtttygggaggggaagygygagygygggagygaggaagaaaggyggyggttttyggggatttygygt

SEQ ID NO: 6877 - DNA, 1247 bp, synthetic construct
  misc_feature 1..1247: note = Description of Artificial Sequence: Synthetic polynucleotide
  source 1..1247: mol_type = other DNA
yggggggtaggtygygagagggagaggatttygggagtagaygaagaagtggagtagttaaagtttgygttagaagaggttggggattgygagaggagaggttggggtttgtaggggagygtagtagtttttagtatygatttaaattttaaagattygtggtttttgtttgatttygagggtygggaatagaygtttgtttttgtggagagygatatttaatygagaaaatggggttgtttygagttgggttttgygtttggtttagggygaggtttttttggtttygggttggtttttgaggggygtaaayggtaggtttggyggttggggtygaggagggagggtattatygtttygaggtagtaygtagtttgtagtagaggygtttgttttaagttgttttttgggggygtygtygtygtttttttttttyggggtygttygtttttaggaaagtggaggyggttggygaggatygagagtyggggtygygttgyggagggattatattttygggagttygagggggattttggygyggygggttagtttttgtttttyggttaygggtyggtagygttygttttttttyggttagygtttgyggttygygtygygygtatygttyggtaatttygygygygtttygygggggygttgygtttttttgttatatyggygtatygyggttttttttttttatattttyggttygtattattyggttttttttttattttttttattttttttttgttttttttttttatttttttttttttggygaggggygggagggggygtggyggggtyggggtttgtgtggttgggattyggtttttygtatttygagttygttygaggagtygggtttyggtygttgtttagtygtttygtgtttygygygttttgygtygtygttatygttttttggggagaygtagttatttgttygttatggatatttttagggttttgttttyggtygttttttttattagttttttgtgggatttgttyggtttttagtaggtttttattttatttttttygtygttygtygagttgggttttattaagggtatgygaagtygtaaggaaggtaagatgtagygggygtygygygatagtgaygygggtygggagggttaggaattatagtygyggttttaggaygaatttygggtttagtagtttygggygtaggagtygttaggtaggggttygygygtggtgttttayga

SEQ ID NO: 6878 - DNA, 1861 bp, synthetic construct
  misc_feature 1..1861: note = Description of Artificial Sequence: Synthetic polynucleotide
  source 1..1861: mol_type = other DNA
ygtttattgggygaygtggggaaataagttttagttttygaagygygattaaaaggagaaattaagtttttatygttagggygggggagggaagttgggtgtyggtaggygtttygtyggagaygagatttttttyggttttagaagygtttygttagggttagagagggygagygtggygggagggaagtttttgttttttagyggttaggygattygaagtygagygtygtgttataygtatttygtttygttttgtttgyggtattttygtgtaatttttatgaaaatgttttttygtttttgaygtttygyggtgtaatttttattttttaaygaggagggggtygtygtaggattgggaatttagtggtyggygttttagtattttyggaygygtttygtgttttttttagtatttttttgagggatygtttattgygattttaygtagtgtyggttatttygttttagtygtagggagtattaaataaaagaatttttgtaaatttttttttttggatattygygggttttttaaatttggtttttatttttttagaatttgtatgtagttaaataggaaagttggygygggggggatggtgtgyggaggaagggatttygaagtttttaggttatttttggtttygaggagygygyggagtggagtygttttttygygggttygatttaggttttttttttttgttattttttttttttygttttttttagattaygtagtaagattygtygagggygaagaagttgggagtgattttaggggtttttgyggttagattaaatygtaattttyggtgtttttattttygyggatygyggggtaaygttagygagtagygtttttttgaggaagggaagagggggaaagggtgatyggaygagygtatttgttttagyggattttyggtgtatatttggggattgggggttttttaggtggygtttttttattttttgygggtttttttygtagttttaaatattttaaayggygygygtatttttygtttggtttatttatygatttygtygataygtaggttattaagtttaaggtgagtaggatttaygygygtygtatattttttagggatyggttgtttttagtygttgtttgtaattagggtaaaaygaagttttttgtttagygttyggygtagttygygtataygaattyggagtagagtatygtagygattgyggtttaggttyggggattygggttyggggttygggggygttygttttttttttttgygtttgttttygtygttygtagttgygtttygggaaygyggygtttttttatttgttggtttttgtattttygatayggagttggtgtttygggaaggttgttttttgaagttttttttgttttgttgtggttttgttttttygyggatttttttttygtgtygaggtttagtttttggttttaaggaataaattygttggtttgaaagggagttayggtagaagtttaggggtagagyggygggagygygygattygygyggttggagtttygggggtatttggagagtagygygtttaagyggggttattggtttygyggttgygtttttttttttttygygtygygttttttttttygggttttttttttttttttttttttttttttttttggtttttttttttttgagtttgtttttttgggtttttttgggygattggggagaggaggyggtagtgtgatttttagataaattygggagaaatttttataggattataygtygattggtagtttygaggattagtgggygtygyggtttygygttgtggttgygtyggttttgtttatygg

SEQ ID NO: 6879 - DNA, 3044 bp, synthetic construct
  misc_feature 1..3044: note = Description of Artificial Sequence: Synthetic polynucleotide
  source 1..3044: mol_type = other DNA
ygtygagggggaggggttggaagatggyggyggaygtatatttattygatygygatagagtttaggtttttagttygygtygtygttygttgttygtagttattgtgggtagttttgttttgtttygygttgttggtagagtygtttygyggaggygtgggattagggtggygttygtattttttgttagygygttttygttygggttygtttagggagtatttgtgtayggttatattggattttgtgttttagttattgttttagygyggygggaaaggagagggtaygtatagagtttgggtttagttttagtttygttggggtttyggagttaagatgattagygaggaaattyggaaaggygttaaggaaaattatatygtttaaggttygttatttttattttagtyggttttggygtttttttttttygatatatatttttgtttttagatatttttaaaatagttygggyggtyggygttggtygtagttttygtggtttgggygtygttagygggagggagggyggygaattggggygygtaggyggtygtagggtagtgggygagggggyggagggtagggagagaggygggaatatggagttaggtttttatttgagtayggattgtttttttttttttttttttttttgtttatttatgayggttaggatgattttttttttttttttygtgaggtggttgaggttaggtatttygggttgtagaggyggttgagaggtygtygggatgggagttaggyggtttyggggttygataggagtygatatgtttggtggagtygaattattttagggaagyggggaggtaattttattggtagyggyggtatyggygyggyggttggggtagtttttagygttgggataaatatatataaattaatggtttttaatttaaggygatagttttttttttttaagaaaagtagggggaggggagggygagygygtggggaaggagggttgaggagtgygtttygggaaatgtttttttttttygggggygaagggttgtgaagtgagyggtttaagggaaaggggaattggaggtygggaygyggagtgygyggagaggygggggagggtggtggagtaaggtggyggggatagttaagggtggggtgattggagggagtaggygggagggygataggyggatyggggygygagtgtgttyggtygyggttagggtygggagygygygygtygtttyggaggggaaggggtgtttgygaataagttttyggggaattygtttygagygttyggaggyggagtattgtyggttygaggggtatttaggygggagtygagagggtygtgaggaagygaggayggtttttyggagaagtaatttattygtttygtyggttgaygtattatagggttttygygygttatagagggagaatttttttaggtatattygggagygggtygyggggtyggaaattttygyggagattttaattttatttattttattttyggttagagtggagaagygaaagyggagaagatatgaygggggttagyggyggagagtttyggggttagggtttttyggttgttaaygttyggatttaggygagtttygaygtgtagyggggtttggygtyggtttttttttattaygygttyggtttagggtygtttagtygtygttatygtygtygttttttgggtygatggagtyggygyggaaggttygygygttttgygtygtygtygtttagtgtygtygttagtatttttttygttttttygtttttygggtttatttygygggggyggygttattttttygttgtttaggttygggtatygygggygtttygygggyggtagtygtttttttygagygygatttttaggttgggttyggggtygggyggggagggaggagagattgagygtgaagggagagggygttygagttttyggggayggaagtgtggagaataggagygtgtgagggggygttygaggtgtygggggygggggaagagtatgagtaggggtgggggtaggggtgttaggtgtagtaggtagggaggtagaggyggygagtgggggygttygagggatyggggyggggyggggagygtaagggtggtaaggygttygagagttagggttggagttgaaggtgggtgatagggagggggygtttaggtgttaggatttgaggagaaagagtgygygtagygggagggtttygaagtgtyggggygggattttggaaggagggagaaygtgaggagggaggaagggtttttggggtgttagggatgggggttaggaaaggggtagagagttggaggtttataagtggggatagygggggagggaggttggagygagtggggaaygtaggtggtgtygagggyggggatagggygaggggagyggggygtgaggaagttgtgggaaatygygttggaygttgagaatgtgyggaaggattttgaggggaggaygygagatagygygaggagagaygaggagagttagggttggtygggagggtgygaagatgaagygattattggaggttgtgagggtgaaaggagtaagaatygtttagagaygggttgggtyggtgttggggttaaaggtttttgtttgttaggttttttttggygtttattttagaaagaagaggyggagaygygaagagatygggttagagttagattttygaagtayggagatgggtttaatgaaaggaygaggaaagaygagaaattagyggtyggagaayggaggtggtygtygtygttttttgttttgttyggggttgggygtygttyggagagttttttyggagggggyggggyggggtygggtgaatagagttgggygggttygttagtttttttaggygttttgggtaagtaatgtgggtgattgagttygggtgtgtgtgtttgtgtgtgtgtgtgtgtgtgtgtgtgtgtaygtatataagtgagygtgtgtgygtattttatttagttttttataygygygt

SEQ ID NO: 6880 - DNA, 1603 bp, synthetic construct
  misc_feature 1..1603: note = Description of Artificial Sequence: Synthetic polynucleotide
  source 1..1603: mol_type = other DNA
ygatttgatttttgygagygtgtttgtttyggaaggtgttttttgattygtygtgttttttaagtattatygggattttygggtattygggggtttagggttatgtatttttttgygygtttatygttttgaatttatagttttygygttgggaagtgattggyggttttttttagggaggatttygygygttattagggttagatattattygaattttygttyggttgagygttttggyggygtgagtyggattygttygaagttttaggataygatttgttagttattagttygygttygtagggtagagaygtayggtygttygtygtagaggygygaatttttatatttattttttgtttygtttygggtttggtgtggttttggtatygtttaggatygggattttgaygttttgattttttatygygtggggaagttatttttttygtttygaggtttygatygtttagtttttttgagaagtttttattttggttattaaaagtggtttttaagagtagttttaygttaatygtataaagtaatgataataataataataagygtttaaaggagygggattgttttttyggttggaygatagygtyggggattygtagygtgygygggtyggaattaaaaaagtagttygggagygygagggttgagyggggtaagtatgggttgtttttygtagttttttttttgttygaggttygggttggtygtttgtttgtttatgattgtttagttgttttttygattgtttaggtaaagtttgagatatttaggggatygggagyggattttttttagtttygttatttatttatygttttttygtttygygtatttygtttttgggtaataattttattaattttyggtttygygygtaaatttaygtttgatttgtyggggtttgttttgttttygtygggatatttyggyggyggttgttgtygttggggttttygyggtgttygyggtygyggttgtygttttttyggttttygtygtygtygtygtygtygtygtygttggttaggttyggttygtygtyggtyggattttaggtgtttygggygttgggttttttygggagtygyggatttaygttyggagatgagtaagtaaatgagagaagagagaygggggtatagagagtgtgatagtgaggaggggagggggagaggagagygayggggggagaatgggaatgtataagygaayggttagggagagagaaaaggggaaagagaagagaaaaataatayggaaagaaggaagagaaggagggagggaygggagagygagtagygaggagagggggagygygggggygtagggygygggaggaggagygygttygttygtttttygtttyggygtgygggayggatatttyggygtygtygtygtygtttygggtygygtagtttttgttttgyggygggaggyggygaggygygygagggaggggygygtyggggttgtggggaggggagattattttattagttaaaggaggattggttgtatttaaatttagttyggatgtaaattayggtttyggttttggtygggygaagtgygg

SEQ ID NO: 6881 - DNA, 1365 bp, synthetic construct
  misc_feature 1..1365: note = Description of Artificial Sequence: Synthetic polynucleotide
  source 1..1365: mol_type = other DNA
yggtttgtatttttatyggaaagtgygtttgttatattttttyggattatttygttttttygagagygttttgttttttatagttyggaaagaaagaaattttagttgtgaagtgatygtggagaaagygtaggaagygatataattggttagggaggtagagagtgtgagygggygtattttttgtttggggatygygttygygggyggggayggagtattttagtggttgtattygtygtttygygtttttgtttggygtygttaatttygyggyggtygttggaattttagagttgttaggygtttttagtyggtttyggtaaatttttttttagtttaygtgttaattaagyggttygtttttygagttygggatggagtatygygtttagggaggtygygtygttygagaygtgygtayggtaggtaatttatattaaggtagtygtagttgyggygtttgggtatatygtygtggattttaaatggtttaagagygtttttttagttttgygtttttagtgtttttagagttttttttttttttyggagygtyggtataaygtattatgtygttgggtyggagtttagggttyggtagaggttgttaatttattgattataattatttttttttttaattygttygtagttgttygttttggattaagtygtttygyggttygtgttaggtagtgggttygtttttttttttttttttttttttaaattgggaygtgygaaggygtagttgttttttyggggttttttttattttttatatattttgttttygttttttgttttttaggttygtggyggagagatgttgatygygttgaattgatyggtgyggttygggggtgagtggygagtttttttttgagttttttttagtagygyggtyggygtyggttttttgggygaattttttagtttttagattttgagaggygtttttttttygttygatygtttagatgtagtttygtttttttttttttgtttttattattttgaattgtatggattatagttattgttaaggtaatygatggagaygtagtaagygaggtgggtttttttttgttaaaggtgygtggtgggttttaggggtggygtgtggaggygtttatttaygttttggtttygggggtttagatggttagggttgtgttttttattttagtttttgygggtttttagtttttatttttaggattttggagttttataaaatattttgttttttgtattttggaggygyggggagtyggagygagaygygttgggagttyggygagtygggygttaatygggygtttagggttaagtygtgyggttygtatttatgttygtygt

SEQ ID NO: 6882 - DNA, 419 bp, synthetic construct
  misc_feature 1..419: note = Description of Artificial Sequence: Synthetic polynucleotide
  source 1..419: mol_type = other DNA
ygtggygggygttgtttattyggyggagtygagyggygtgtagaggttataagtgtygtagttggtgattgggggatttttttygggaatygtgtygggagagygygyggtgttggagtygtatygggtggtygaagtagaaggtgagtggyggggagtgggatggggtggaggttttgaatgtaagggtgagagttttggagtttagtagagttggagygtatattttygttttttttttttygttttygagtattaggyggatatattygtatttygaatgttttagtgggygtagagtttattagaaatggatagtyggatttttyggygtttgttgggggtatygttgttaggtgtttggggttygttttttyggttttgttygtatagggygtatttagaggtygttttttyga

SEQ ID NO: 6883 - DNA, 3675 bp, synthetic construct
  misc_feature 1..3675: note = Description of Artificial Sequence: Synthetic polynucleotide
  source 1..3675: mol_type = other DNA
ygtagygaggtyggttgygyggtygtygygtgggtyggagtttagtgttttttggtggygtygaggygggtaggyggttttyggatygygyggaggttygayggttgtgatttaggggtggygtygttgttagggyggygggaggtttgattggggtttygtygtgggttgagttayggygtaattaattattagttgttgggaatttttgtygttygttygyggtgatttattyggtagttaggtttatttgtygagygygggggttttggtttttaaaatgaatttggggagagtgtttgttyggggtagggtttttygttttttygttttagggygttygtagatttagygaggatttgayggtttagaygtagtttatagygygggttttttttttttggtgggtattygtgatttttgaaagtggggtgtagagygttttagttgggaggtttyggtgaattattggggttttagattttttgggttyggggtttttgaggttagggagttygagtatygttttagggggygatttatagaagggattggttttttggagttygygagttgttygagggttaggtttgattttttagttattttttggttagttgttagtttgtygttaggtaatttttttttatttttattttttttttggttggggttaggagaggaagaggagtttaggggtttttgaggtttgggtttgtttttttggagttttagggttttaggygggatttaggaagtygaaggttaaggaaaagtttttygatagtttaaagggagagggyggggagggggaggaggtaaaggaggttaaaatgggaaggagataaagtttggagagggtttatttggaagtagggaataggtgygttttagttygagtttygtgtttttattttaggtggtttygagggggttatygygtggtttagggttgtatttayggygtattttgygtttagttgtggggaattaaagagtgattatatatattaaagagtgattatatatatatatatatatatatatatgtgtgtgtgtgtgtgtgtgtgtgtgtgtgtgtgtgtgtgtgtgtatttttttttttttttttagtaaagtaatagagaggttattgggtygggggattgygatgttttttttygttgttttgattttaaaagtggyggtttatgttgtttttagygttttttagggaaaygattygggtttgtaggtgttggtttaagygggttgtgtygttgggaggygagggggtygaggtagttttygggattttattattttaygaggttatgtttttggttaatgataygttttygygtygggtggttaggtggggggtggggggtggggaagatttygtgaatygttgttgtygtttttttgtgtgtttatggttttttttttttttgttttttattttttgtttaatttgtttgaagttgttagtttgttatttttggttgaatttygttttttttttttaatttygagttttttaaattttttattygttagggttgtttgygtttttggggagyggggttagaaggatttaagaagtygygtttatttttttatttttygttaaaattygtyggyggtttygttttygttttttttttggyggtttaggtygtttttttygggtttttttygygtgygttttgygtygygttgggtttgtagygggagttgttatagtagtttygttagttggttggggattaggygggaggtggygygttttggaggttgtgggagggagggagggagggaggttyggtttyggygtagttyggttttygtttttygaggttttttygtyggagyggggttgttaagygtatatatatatatatatatataygtatatatataygygtatatatatattygggtttttaayggygygtaygtaygtagygttyggggtagattagygyggyggtygtttttygggaygttyggaygtyggagggtttygattttygygyggtttatgygttygygttygtttygttgtttygygaggttygygggatttttttygtygtygtygtygygttygtygttttyggaggagygggttggtygatygttatygygtygtttttyggtygttttygaagtygttttatygyggtttttgtygttttggggtygygtttygttttygygttttgggggttgagtygagtaaatttygygtatyggtygaygttyggyggggatttygttgygtattygygygttygggtgggygttgggygygyggatttttggggagygggttgtttttttygttgtatttgttyggtttttttttygtttgtaggggattttagagatatygttatttygtaaattttttttttttattatygagagggggygaggaggggtaaaaggggaagtaggtttygttgggygygyggatttgtaggttttttgttgggtatygttattygygagttggatttataggggtatygggtttygyggtygtttttyggtygttttttggtttyggttttygtttttgygtttttygygggagyggggggyggggtgyggagggtagtaaggttygygyggtatttagyggggtygttttgtatggttttgygtagtggggygggttgtttyggtygggtttggygtagggtgtyggggttttyggaygtttggtttyggygttygagtagttttttgtgtttgttygttttttyggttgagttygggttygygtygtttttgtttygttagtygtttygyggtggyggtggttgtggyggttttagyggagggggttttttttagttttttygtttttygtttttttgttgttgttgttgttgttgtygtygtygtttataatttggaggyggyggyggyggyggyggaggaggaggyggyggyggtygtygggygttgtagtgggaygygygyggttgtgagtttgygggatatgtttttygygtyggttttttgttggyggttatgaagaggtagaaygtgyggattttgttttttatygtttgtatttttatttatttgttggtgggygtygtygtgttygaygttttygagtyggattaygagatgygygaggaggagaaatttaaagtygaggagattyggattaaggggaagtataatattagtagygaggattatyggtagttggagttggtgattttgtagtyggaatygtatygygtyggygtttagtggaaattygtyggttttttttattttgygattayggttattattattataggtaagggttgggygygtygttgggttttygygtttygggaggagttyggggaggyggttgagygygtygygtygggttgggtgtagggygtygagggttaaaygtagttttttttgggggttttttygtagygtttttttttttttagggagtttttttttygyggygttttygagttttatttttyggggattttattyggtgttttttatygygttggtgtttgggtygggygtgygagtttygagygagtgtgtttgagtygggagggyggaggygttatttttgygaagagagtggagygttaagaataattttatagtagatatttatttatttatygtttyggygygggttgggttgygygg

SEQ ID NO: 6884 - DNA, 3675 bp, synthetic construct; identical to SEQ ID NO: 6883
  misc_feature 1..3675: note = Description of Artificial Sequence: Synthetic polynucleotide
  source 1..3675: mol_type = other DNA

SEQ ID NO: 6885 - DNA, 3378 bp, synthetic construct
  misc_feature 1..3378: note = Description of Artificial Sequence: Synthetic polynucleotide
  source 1..3378: mol_type = other DNA
ygggtygggtyggygaggggggtttyggtygagaygygaggygygttaygggattyggyggygggagyggatggygagygagygagygagygggygggygggygggygggagggaggtggyggtyggggttgtttaagatggggtyggagtygygggttaggygyggaggagayggaaggggygggtagggtygygygggygyggtgygggygttttttttyggtagttagyggtagygygtyggtttttygtttttygttattgyggtttygygtyggtygtttgggtttggagtttygyggygttttyggaggaygggtttygygttttaygatttattttyggaggyggggtygggtygatygggggyggaggaygtygtaggaggttgttyggatttygggygtttgttaggttttttttggggttttttatgttaggtttygyggttgtgttygtaagygtagatggtttygggattygggttattttgaygtygtagatttagtaygttgyggatygggtaygttggatttygggataagtgyggagggtygggggttggaagggattygagagtagagttygygtttttattttayggaygyggttatygaggttygagaggggtyggagtttgygggagagggaagggttttygagggttttataatttggttgygttttttttttagttygggattyggatgagtgttgtttgaggtygaggygaygaatygttttttattygtttttgygygggatttyggtaggaataagygttygtttttgggatyggaggyggtaaattttaggttygagttttttagygtagygtttattygyggagtygygygtttttttggygtatttttgggtttygyggttyggtttttagtygtygggtttttygggttagttttttgttttttagatygaggygtaataagtttgaaagtagygttaaggagtagttagygagtygaagggagggygtggggygtygggygtttygggattttygaaygygygtaaygttygttttyggggatygggygygggyggtaggygagygggattgattyggygggttgygtatatttttttttaaggtttygattgtgygyggaygggggygygtttaggaattttygttttttttttygtttgtttgattttgttgggtatttaaagtyggattyggyggtatttyggygtgygggygtagagtttygttgtygtttaygggagggagyggttygatttttttygttgttttttyggtagtyggggtygtagaygagtggaaggtatgagggttttaggagaygtgatagtygtttttttagattttatatatygtatattattttttttttagatagaaaagggatttagtttttttttttttygttttygttygygyggtttttgttgttttttygyggyggttttygtttygagggggygtgtgtttgtgtttgtggggagagtatygagggttttygtgggtttttaggatggagygggagagtagattttttagttttttttttaatataaaygataagyggtttttttggggygggagtgtaggttttttattygtttataygtttttttgttttttaattatttyggagttgtagtttaggaatttgygttttagattyggaggaagaayggggaggtygyggyggggaygggtgttgaaagagggttggtttagggtttttygggttttagtttaggygtttgygttttaagaaatttagaagtttaaaataaaagtggaaaggggtaaggtgtttagyggtttggggttggggtgttagattaggygttttttttaggttgtyggggagtggttaagtaggagtygtygyggttaggaggagggaygygggttyggagtygtagttttygttaagttttttyggtygtatygtttygyggtgatttttagtttygtygttttttttygaggtyggaggagttttttatttygtttagggggtygyggggatttagggagagggtttttggtygggtttagagtttttagtttttttaggagggggygggggtygtgttygtttttygaggtagtttygygyggttttaagttagygyggygayggtggagggtyggyggtttttgtttatyggygaygyggattygggagtgttyggygttygggagtgttyggygtttggagyggagayggtatagggtyggtttaaagttgagagyggtttattygygyggtttgttygatttagtggaaaggtagataaggagggaagagttaggygttygygtgggggtggggggygtaaaaatagtttttygttygaagtgggggagagtatttttagggagtttttattgttaatgttaggtttataggygagggtttttaygagygagggtttygagaaggagtttggggtttttttttgtttgtttygagttttgtgygtggggggaggaygtttygggtttttataatgtttgtagggggttttggaygtgattagtaggagggggataygttygggggtttttyggagtttgttgygtttatgtgtggttgttgggggttatggggggtttttttagattttygttagygtttgtgtgtgttgggggtatagygggaaygttttttttagtttgttttgtgtatgtgatgaagaggggtgttaggttgtggtgtgtggatggggaggaggyggyggygtygaggagttttttttgygtttagggtygttttttttttagtttgtttaatgygggttygyggggatttgttatattttatygttatygttggagaaggtagggggttgagggggtagggggtgggggtttaaatttttgagttttgagygtaaaatttyggagttgygaagttttaaayggygaagttaggaagtttgggygttygtttttttttygatttttttttattttygttgygtttttattygtygygtttttagtttttygttggagttttttttattttttttagtagtagyggtttygtyggygaggattygattyggygagttgtaaattttygygagygtttygygtygtyggyggttgagtygggygttygatyggaggtggggggggtttttttagtygtygtygttttyggttygttttgggtttygtygggaygttttttggagagtattygtyggygtaygtaggttttttttygttttttygygtttgttggagtttttygggygttyggagggttyggatgttygygttgyggaygatgttggygygygggttygggtygggttaggaygyggygyggtygtttgtgttttyggtttttyggtttygygttygt

SEQ ID NO: 6886 - DNA, 1108 bp, synthetic construct
  misc_feature 1..1108: note = Description of Artificial Sequence: Synthetic polynucleotide
  source 1..1108: mol_type = other DNA
ygggggtttygattttttttaggttygtttttaattttatattgttattygttyggygtttatttattttttttagaggygtatggatttygtyggtygggttaggttayggyggttgygggttatagygattttttygggataggaygggtgygggttttttttattygtaggttygtyggtagttttygttygygtttttgttyggygtttttttygtyggttyggtyggggttttatygygtyggygttgagttgggttaagatggygaaggtggagagtyggttatagaggtagygygttyggagggygtygaggggtatygtgyggtagtygygttaygattagggttygagttgygggggggyggaggaggagggtttgggggygggygggataygggagggagataggyggagygttagyggyggyggggaygygggygtttyggttttygagyggyggtttygygtttyggtttyggtttyggttygtygtttygtatttgygttygtagtygygygttygttygttygtygtygttaggtttygyggttygggygtttatgtygygttttgygttygtygtygtygtygttgagagtygyggagygtagttygagggagygtygggygggggagtygagygatygggggyggggyggggggygagagttggttyggggttyggtagtygttygtttygygttttygtygtttttagttttttyggggttygygttttyggttygygygggaaggagggggaggttyggaggggygygtgggygtaygtggagyggggagggtgygagtygggtgtggtttgggggygyggggygggttyggagygyggygagggttygtttyggagtttttyggtttygyggtttagggygtyggttggagttgaygattttgggatygttttattttttatatttatttttttygggttttattatttttggtgtttgyggtttattttttgggatagatatagtttttttygyggggaggtttgtygttggaaatttttttttgyggtttgatttagtygttygttgtttaygggtygygattgtttygttttttatttgagtaygt

SEQ ID NO: 6887 - DNA, 1700 bp, synthetic construct
  misc_feature 1..1700: note = Description of Artificial Sequence: Synthetic polynucleotide
  source 1..1700: mol_type = other DNA
ygaatatttataygtatatatatattygggagygtayggaygagttgttttttttaaggttatttaaaygttttaattattttygggygygtaagtttaagygygggagttaggatttatygttaagaygttttgggygaggaattttayggttattgtttttagtagtagttatttgtatgggaaagggaggaagagagaygtgaaygtgygggttyggtttgttagttttygagagttatatygaagggtttatgygygygtgatttayggggattaggtagaaagtygtttatygtygtagggtagggtyggttatygygygttggtttttttttatgttggyggttygtttattttgggtttyggttagttttatttagtttagaggygatagataaagygagtttagygtaggatgagggaggtagtttatttttatygtyggtttyggttygygagaygyggggatagygyggtgygyggttygtatgtaggggtgatyggagggtygttttttttaygattyggaaagaaggagagtttttygttaggtttttgtgggtgttttttggtygaggagttyggttttygtttttttattttttttttttttatttttaagtaggagagygtgtagttttagtttgtataaggygttttaagtyggtgttttygggttagggtttgggygtygttygggggtygtttttatttygggttyggttttaggggttgttgttygaaygtattggtttttttagaagtattygtyggyggtatatyggtagggyggtyggttttgttgggttttttgggygtyggtttygggggttygggyggtttttttyggttttyggtttggattygygaaygygygggygygaggggttgggaygygggagttttttgagtgyggagygyggagttttggtgtttyggygtattgtagttatattttygggtygygygttttygtygttttttattygygtygtagggtttttttttttgaggygtygttygygtatygtygggggggagggggtagygttaataaattggggagttyggttygtygygtttaggttttygtttggagtygtygtattygggayggtgygtagygttggaagttyggtttttygagagttagttgttygtygyggttttygtaygtygggtagtygtttttygtygtttygggygygttattatggggtttyggtttagygtttggttgttgttgttgttygtygtttttttgttttaygaggagtatagtygggtygttgygaaggtgagttttyggttagtttygttttyggygtttygtttygagtttgggygtttygagaggtttttttgttygygtttggattygttygtttgtttttygggggtygygygtggtayggttaggtgtattttttgggtyggggttygttgggggtttttgtaggttaygatygygtattggtggatygagttttttttgttatggtatgggtattggagagttaaggaattttttyggggaagggaggagaaatagttygygttgtggyggggtgagggtgtttgggagtyggygggatttgaattygygtygygggtatgttyggtagttgggygtttttattygtttygggtgygygagggagttgggggttggagggtygggagygtttatttygygt

SEQ ID NO: 6888 - DNA, 692 bp, synthetic construct
  misc_feature 1..692: note = Description of Artificial Sequence: Synthetic polynucleotide
  source 1..692: mol_type = other DNA
ygattygygatygtatattttgtagagattyggtttygtttttgtatttttygtagatttygttttgtgattatatttttygttttttataggtattggttygyggtygtgtaygtttygtttttattggtttygtttygtgattaygttttygtaattttgatagattttattttygaggattttttttaggagtatagtgatttygtttttatagggttygtttygttatattgattttttygtgtygttygygggattttatttttgttygtttgtttyggtgtttatggggaagtttggtgttaggggttattagttagtttaatttatygttygattggtgggataaggataggttagygggttataggtyggaagtgagattygttyggtygttttgggaygygggaagatygaggtttyggtggtttttttttttttygtttggtttttttaggagaaggagyggttaaggtaggattygatatygyggtygtattygtttttttttttgttttagagtatagtttgggatttttaggggggagattgaatgagtgttgtygaggatyggygagagtttggaaygttygygttttygtaggagaaygaggaggtgayggatagggaayggggagyggtygttgggtgggaygtttgagattttygggaaatggtygggtygtyga

SEQ ID NO: 6889 - DNA, 1924 bp, synthetic construct
  misc_feature 1..1924: note = Description of Artificial Sequence: Synthetic polynucleotide
  source 1..1924: mol_type = other DNA
yggyggagtaaattgaaygttatttttygattaaataggagtttygggtttatttgtttggaagtttttaggyggtttggaggggttyggttttygggygygattygtaggggttgttttgttyggttygyggaayggaygtttattygtygtagttaygaatttattaaygatattaagtattggtygggtagattaggygtygtggaggygttttagttttttagtttttygtaaygaygygttttaggggtgygtagtgtttggygyggtgatyggattyggtygttttttygatygygtagagygagaggttatattttggattttaggtygggtttttgyggttttgggagggaggtttyggaygttttttagatttygggtttttgtaatttygaggtygggttttaaaattayggttttttygagttatayggagagttygtggttaagggttaagggyggttttygattttygggatygtttttttgagaaatggttgagagttaagtttagagttgygtagggaagggagttaaagagttggygtygagygygaagggtygggaggygyggggaggttttttattygttttattgttttgttygttaatgaygtygatgatagygatagygtyggtygagtgttttttttgtttygggtygtttaggtatygggtttttttttagtattygtagtaygtattgaagaagaygttayggaagttttygttttttagattygggggaattaggaaaygygttyggygattttygggtagtagtatygggttaggtttgttttyggaatygttgaygttattygtygtttttttygtttgggtttttygygggtygtaggggtggaagttygatttgggttagggttyggatttttttttttyggtttttgygtygtygttttyggtgttaggaygygttttgttttygtygagatttagaygygtygaaagtttygygygggtagtttttygttttaygtttygggttgygygttttttygygaagtttttgtygagtgygygygayggygtygtyggattttttyggatygygttttygygtaygtttgatyggagtatttygttttaygggggygttttgygygtttttttttttyggtgygattttygtttttttttttttygyggtttttaggagtttaggtatttttygaygtygttgtyggyggaatygggaatttttttyggggttttttgygggttygaagtygttttttygaggyggyggagttgggtagtttygggtttygygtygtttygygtygtttygyggagtyggagttttttttyggagtttggatatagtttttygtttygtygtygygtattggatttyggtagygtggagtttgttygggaagttgggttgygtyggtttggggygaaggtttaaggggygygggggtygggaygyggggttgtggygaygatyggttttttgygaaygtttaggtyggygggttyggggttataggttgggagtggagttggyggttattggggagtagagaggaygtttaggaataggtgtattagggtttyggyggttgggtygagggtygtaagtagaggggatyggyggttgttagtaagttttaagtagatgttttyggyggggtagtygtattttatagygtttatttygygtatatygagtatttaaaaygagtaaaatyggtttataygttggaatgtagtttatgattttaaaattttatttttaggttgtttagattatayggtttygttttatttatttttattgaataayggtygttggataatttagagaagtagtagaaattaygagaaaaatagtggagttaaayggyggtaaggatygataaggttggyggggatattgagtaaayggygg

SEQ ID NO: 6890 - DNA, 1991 bp, synthetic construct
  misc_feature 1..1991: note = Description of Artificial Sequence: Synthetic polynucleotide
  source 1..1991: mol_type = other DNA
ygtttagtttttatttayggagggygaagataaaaagygttttaggygygtagggaaatygygtaaygttgtgtttattgtagygatttttttagaaaaataaataaggtttttygataggttattygygtaagtagtagtyggtygagtttttttttttygttaatttagtagttagygttgtygttttttaagattttttttaatttaagtgtaatttagtaaggagggagagttagagattttggggaygttygaggaaatygaatttygaaattttttgtttttaaggygyggtyggagatttttgggattttaaagyggagagaattttttaattttttgttagaagagyggggttagagatttttgggatttttttggagtygaatttttttttttagttttatttyggagggygggagygaagattttgaagatttttttagygtaataaatttttttaattttgttggaaygygggttttgggatygyggggaagtttagaggggygaatttyggaattttttgttttgagagygggattagggattttagggattygggagtagagggaattttygtaatttygtygaaatatagggtgagagatygtggggaatttygagtygagygaagttygtaattttgttyggygggygggattagaygygttttyggygtttttagatyggygatgtagygtggtygggagtttaggattttaagygtygtygttgtyggtaagtatygtygtatttttttataatttaggattygtatggtaayggttatgttggggggattttatttaagaaattygggttttgtygggagyggtggtttaygtttgtaattttagtattttgggaggtygaggygggtggattatttgaggttaggagttygagatyggtttgattaatatggtgaaattttygtttttattaaaaatataaaaattagtygggtatggtggtgtgygtttgtagttttagttatttgggaggttgaggtaggagaattgtttgaattygggaagyggaggttgtagtgagttaagatygygttattatattgtagtttgggtaatygagygagattttatttaaaaaaaaaaaaaaaaaaaaaaattaaggttgaattygggttttygtaygttygtatttatttgygyggttattaygygttgtttttyggygattaggttgtattttttgtattggtagtygygttatatgtagaagygtttgtggtttttgagyggygaggygtagtygtggtttttgtagygtgygtatttgggtagtygyggggattttttgttttyggtatttaggttygaygtttyggagtyggagtygttttttttgttgttgttttyggygttygagtygttggtygtttttattagygttttagaygttttgttaaagttttyggttttgttttgyggyggtatttygggggygtgaggggttttygayggtgtagagggtttgttgaatgtttygtygttgggtatggtgtttttaggagaagtgygagtattttggttttttttttygtttggagattgttgygagggatgaattygayggatagygaygtttyggaggaggaggygtaggagaygtgtgygttgtagtyggaggygtagttggagtggygaggtttgggtaygttaygttyggagtggtggggggttgtgtttttttttttggygygygygygatttagaattttyggatattttttagaatattttygggattgtttgggagggagygtggttaygtttatygtttttygattttagttatygttttttagttgtttgtaaatttgtatyggttgtaagtatttagggttttgttgtagggtttttgtaagygtatygagagatatagagyggtttgggaatygygtggtatttttygtttygttttyggaggygttaagattyggttgttaaagtayggtgtatyga

SEQ ID NO: 6891 - DNA, 1667 bp, synthetic construct
  misc_feature 1..1667: note = Description of Artificial Sequence: Synthetic polynucleotide
  source 1..1667: mol_type = other DNA
ygattttatygtagtgagtgtgygtaygtgggttttaattttgttttgttttaatttygttgtttttttgtttaatttgataygtttygaattttttaatttgggaaggtatttggygatattgaygtatagtttygtygtttggttgttyggaggygttttttttgygggygygagtgttattygygttgggtttagatttagtyggtttttttygggagaggaagtttyggtttggyggagagtaggaaggaaagtttygataggtttaygttttaaaattttgtttttagtttttttaagtggagttgtagttggtatttygaagttgttttygygttyggttaaattttygtattttagaygtttttatttggtttggygagttgygtttgtagagtttygggttgyggttyggtagtttaaygtagtgyggyggtygyggttaattyggtagtagggygyggyggttgyggttgygayggttgagaggttggyggyggttgyggggyggygayggygtttttyggyggygggggttttggtagagygygtagygagtyggggatgaggttttttaagttttygttggtttgttgtyggygtagygttatttgygtagttatgattygttgtygttygatgatgaggatgtatttttygtaggtgtagtttttgaagyggtagtaaygtttgtggtttttgagttaggataggaygttatggttgyggtagygygygtatttgggygtgygttgtaggggygttygtggyggttgygatatygggtygtttatgtataggtagggggagtygtagtygtttatgtttygggttttygaatgagttggtagtttggttgygggagagggttagggagygttggayggyggggttgygaggttygtttaggggyggttttygggygaygyggtttttggtttygtagtttyggtggtygtgtgtgtttyggggyggtyggaggtgtygtagtygtttttttagtttttttygygtttatagttyggttttttagtttaygtttagttaaygtygaygygggtttttgttttgggygygtagtygggtyggtaygttttttttygyggaggygttgyggyggttgtaaggagtyggygatagttttgattaaggtttgagttagtttttttgtagttttttygtgagtyggtyggatttaatattttygtygtttttttttaatttttttttttttttatygttattttygtttttggggtttttgtttttttgtatttttygttttaygtttttttttttttttgygtttttygggtgtttgtattttattttttttgttatttgtagttaggttattttygygggggygttygyggtttttttttttaagtttttttygttattttagttygyggttggagattgyggygttttagaaygyggyggtgttygyggggyggagaaggggaggattagygggagtgagggtgggggtgtttgtaagygagtgaggtggtygtttygtttttttttttttttttttttttagtttagatttggtygygttttttygagtttaaggtygtttttatttygatatttggtygtagaagtttagtttygggagaattygaatttaygggagtgttgyggttgtatttygg

SEQ ID NO: 6892 - DNA, 433 bp, synthetic construct
  misc_feature 1..433: note = Description of Artificial Sequence: Synthetic polynucleotide
  source 1..433: mol_type = other DNA
yggttttttgtagtttygggygttttattttgttgaggtygttttyggttttttttgatttaggttgggygggaaaggtygggtygttttygtttggtttagatygttggtttattyggygggygygygtagttgtatttagygtagygttattggttttagtttgtagattgygtttttttttttagtattgttygtttaggtttyggagttttaygttttttgattggtyggttgttaggyggtgtgaatattgattggtygaggtaygttggtagggagtttttygtttttygyggtttatatttttttttttgaagygtttygttagagttygtttatygggttttyggtgtagtyggttygtttgtttagaatttaaattygaggtatgayggtgtttgtaagagagaagttattatttatttygygg

SEQ ID NO: 6893 - DNA, 896 bp, synthetic construct
  misc_feature 1..896: note = Description of Artificial Sequence: Synthetic polynucleotide
  source 1..896: mol_type = other DNA
yggttttatattttggygggyggygtayggagygtttyggttttyggtattagttagygtyggagtgggtaggattggagatggtagttttyggtttaggggaagygggattttayggaagggttgggaagagggtaggaagagggggygggggygggaattgtttygttttttttttttttgtttatttttattggttaagggttttttggttttaatttatttttygtttttagggygtygtttaaagtgtgyggagtaggtgttttgggtggagttataattttgygygagtgttttggttgagygtagygtttatttattgttygygagygtttatttatttgttyggtygattgtttagygaaaggggttttaggtygggygtagtygttattygggggatygaggttaggagaggggttaagagygyggttgatttttgygggtyggggtaggggayggtggtygyggttatgtagttttgtgttagggygtgggggttgygtttgggtygyggggtygggggyggtygtygtttggttgggggatyggggtygtgttgggygtygyggagtygggatagtagtagtggyggyggggatagygtygyggttggggtttygygttttttggagygttttttgtttagataygaygatttygttyggaggtatatyggttttggggataaagattagagagagatgttgtagattttggggttggyggtaaggatttttattyggtttttygyggtttttttttygttttgttygggttttgtttgygyggtttttyggtttttattttgagttttgttgygtttygygtggttttygtattttgggtttygggtygtggygtggaagtaaattygtgtttttggttttygt

SEQ ID NO: 6894 - DNA, 1494 bp, synthetic construct
  misc_feature 1..1494: note = Description of Artificial Sequence: Synthetic polynucleotide
  source 1..1494: mol_type = other DNA
ygagyggtttaggagygagtttaaaatttygtataggtttgttyggtygygttttttgattggttaaggygygttygtygtttygtyggtygtaggygttayggtagttttagtagtttgggtttygttatygttttygyggtagtttyggtyggygtaagtgyggygygygttgggggagggggygyggyggagygttaggttggygtygggttatygygggattaagttttttagttaygygtgagtgtttgtgygttttgattygaagtttttygtygggtygttattttagaagagaagatagtgagygtgggygaggygaggtatttagaggtttyggygatttttgttttttagtttttygttttttygygtygyggttttgggygggygtygygagtygggtaagyggygtttgagtttyggtttagaggtygaggygygttttygygttttgygygygygtyggyggggaaggtgygygggygttttgggttyggygtttgggggtgggggtgggggyggggatgggggtgggggtgggggtgggggtaggggtggyggygggtygtggggyggtggggyggtgygtttgttttatttygygyggttyggygtttygyggaagtygttgttgtggtttttttaaaaggatggggtttagaagttttttttgttattygtaagtttttattttttttagtttygyggtggataattttagattttttagtattttygttattttttttttttgttttygttgattaagaggtttaaaagtttttttttttttttgatttagaggggtatagttttggtgtyggggggttgggggtggggtgttagtttgggggttyggagygtagattaggtttttagggygygggagtttgttgtttttttttgtaggggtygttttyggaygttttattygtygttaygtggtttygggatgtgygggttgyggtagagagtgggtagtaatgtttttggttttgygttttygttttagtygyggggatttygaggygagtygttaattggtatyggtgtttygttttttatttttggtatyggygtttttttaatygtygttttygttggtgggagtaygttggttttgttttttttttagtttttttatttttygygttgatgggygtttttgtttgygatttggtagttttaggatgtyggatgttattagggaagygatgtttgggagaygttttgtgttttgyggagttgygygtttgttgggtggtgatggtgtatatttttgtttgygttttttgtagaggtataaaggttgggttatttttgtttgtagttatatggaaattaagyggagattgygggggaggagaagtggttaggygtyggygggaggtagaggtygtttygtagttattgggggygagtgggggtttttggagatttttattgygyggtgyggtttttgaggtgtttygtttgggaagatttygg

SEQ ID NO: 6895 - DNA, 828 bp, synthetic construct
  misc_feature 1..828: note = Description of Artificial Sequence: Synthetic polynucleotide
  source 1..828: mol_type = other DNA
yggaggttaygagttattagttyggayggtgaaatttattttttttttgygttttaygttyggatgggagaattttagttttttayggygtatyggggaataattttagagtagtaygygagtagagtttttagygtttttaygtttaygtttaygattttttttttaatygygyggtataaggaggtatttaygyggagttaatttgatagttttygtyggggtggaaattygyggttttttygtatyggtatttyggatataggtttygygtaggygygtagtttyggatttygtttttgtttttgtttttgtttttattttttttgggtattatyggatagtgttttgattygtagtttaatygtyggggtgtygattygyggggatttatttttttgttttttttttygyggyggyggyggygttagttygttttygattygagygtggygttttygygttggtygttyggttygggaaattgttaaattggtygttattatttaygygtttgtyggggaagggttygtyggygtygygttttygaggtttttgyggygaatygygttaygygygatttttggtygggggygggaggyggyggyggyggtaggagaagtttaaggttygagyggttygtagtttttaygtttgtatttttttattttygttagttygatggttygtttygyggygtgtattggagtaagtaggtttygtttygagygygygygttttgggaagtgttgtaagtttggagatttggagtgagtttygggygttgttggttygattgttygyggtgttttttyggtgaggtygygg

SEQ ID NO: 6896 - DNA, 2705 bp, synthetic construct
  misc_feature 1..2705: note = Description of Artificial Sequence: Synthetic polynucleotide
  source 1..2705: mol_type = other DNA
yggggttgttygtttatttaaatatttttygttttagtaaaggttgagattygttagttttgttyggtttgattagggygtttttttttygtygggtggtttgggyggtttygggttyggygttttttatttygttggtttttttaygttygtygggttttttaggagtgtattagtatygagtgtaaggagtygtttttgttttyggtygaggtaggggttgtgggttttagtagagaggtaaygggygaggtygyggtygyggagtatayggtggatggygtyggaggttgttgygaagtygyggggatagtgagtttyggttgtagygyggataygggyggtagygtaggygtgggtttgatgggtatyggtatggtaggtaggttttggtttgtygagtggtatagggatttgatygggatttygaaggttttatatttygggtttatagggatttyggttgyggttgyggyggtygyggyggyggttatygaatttatgaygttaaygtgyggttatayggagttgaygaygttgttaagttggtygggtayggggtagtttaggtggtgtatgayggaygttaagggtagttttttagtttgtagtaygtttttgtagtttyggttaataatgtttttaatggtaaaggggtgtttgaagtttgaygtggaygttgyggtygyggyggtagyggyggyggtygagtttagttygtagggtgggaattgagataggygttttaygttgtttatygyggttgtygyggtygtygtygtygtygtygttayggtygtygttttttgtattttgtyggggtgagayggttgttgaggttgygattgttggggyggttgttgygggggttgtgaygggaggtgyggaggyggttgyggagtagtaggyggttgttgatggaaatagtgtattatgtgyggyggyggygggggyggyggyggyggyggttggggtgggtggtggtgatggtggtggtgtgyggtagygtggtgatgatggtggtggtgggggtggtggtggtgatgggggtgaaggtgttttttyggatyggygttyggygygtttttggtgtttttygygtgtaagtgagtatggtyggygygtagtattttgaagygtttgygaygtygtaggaagttgtygttttygaatatgttttygtagtyggggtgtagygtttagaagttatttttgttaggttggtygggttttygyggaattttgatgaagtagtygttgaaggagaggttgtggygtaggttgttttgttagygttgtgtgtgttygyggtagtaggggaagygttttatgatgaatttgtagatgtygtttagyggtagtattttttyggtygagtgttggattgttatggyggttagygagatgtaagagtagggyggtttttggtygttgtaygagttttttttyggtygyggtatygttttyggtttttttatygtttttyggttygtattggattatagaattttttygtatttygtttttggggtttggttgtttttattaatttttattyggtttttttagtttygttattttgttttttygttttttaggttttttttgttttttttttttgtttttttygaattgtttggtgttttygattttggtttttygggtttatttagttttyggaagttggtaatttttggtttygayggttgtygattggygygtatagtygygggyggagtgtattaggtttatygtygttttttttgygttttttttygggtggttaaagattgagtgttggagttggttgtagaggagagtggtaaggggtygtgttttttttyggtttttttgttttttttaggttygagggaaatttagattaagatggttgggaggaaggtttgggtagtagagattttggttttttaaatttgagtttgygtttgttgttttggaggttagtgatagtaggatttttagtgttttggaygtaggtttttggttaggtatttagttagatygygttggagtttttttttttttggagtgaaaaattagggtaaggagagagaagattggtttttagggygtttttttttttttygaggttygtagygtygtyggggttagaagagaygygtagttttaggttgtygttgaggagaaaaaattttggtggtttttgaagyggtagygttygtaggttttgttgaggagtgtggggygtaggattttgggagygagyggygggttggagagggygtttgygaatgttgggtgagtgttggtyggggaggtttagtygttygygtygtagttgtygtttttttttygggtttgttttgaggaggagaggygayggtagtggtagygaygygtttttttggttgygttttgtaatggttttygagaygtygagattttygtagttagygtttygagattattatatgatygaggttgagggatttagtygtygtygtygygtttgtagttgaagaaggggtaagaaggygtygtgtttygttttygtttttttttttatttygtttygggygttttttatttatygygtttattattygttyggtagtttttagttatttttyggtgyggygggtggygtaggttgttygtygggagggggtatagtttygggtgtatttttygtagttgygttttattygggttattaagtaygg

SEQ ID NO: 6897 - DNA, 704 bp, synthetic construct
  misc_feature 1..704: note = Description of Artificial Sequence: Synthetic polynucleotide
  source 1..704: mol_type = other DNA
yggtaggggtygtggaagggtagygttagttaggygttatgtagttygygtatgaagtttagtattttttgggagttgtygtyggttgataygaagattatttygaagggygygggtygtygygtttyggttattagygtygtatagaagtygtagagtagyggygtgaagtygyggttyggygygtatygggtygtygygaagtatagtgttattattttgttttgtagygtygtttyggtttttatygtygygtttttataggttattaggtgtygttygtttagaatgttaattatggygtagataygtagttatttgagattygaggatatttgtaggaggatgattatttgyggggaggyggyggygagygtygyggtgtttygtttttgttygtattatygggygttggattttttaagatttgttttagatgygtttatattttggttaggtttygtttgtggttggagtaattgtgttygygtygataatgagatatttagatattagagattttagatatttgggygatagygyggtattygtttttgggagyggggttagttaggtaattttaagtttttaggtttttgtatttttttttaattgygtttygtttatatttttgygtttttttattattgygtttygtttatatttttygtaagttttttaattgygtttygtttatatttygt

SEQ ID NO: 6898 - DNA, 950 bp, synthetic construct
  misc_feature 1..950: note = Description of Artificial Sequence: Synthetic polynucleotide
  source 1..950: mol_type = other DNA
ygtgtaattttaagtagyggtttttygggtyggggttgygyggtygtygttgtgttggtttttaayggtgggagggtattatttttttgttttgttttygttttttagaaggttgtttyggggtttttatttttygtttygtttyggggatagtggttygtttgttatgygyggtagttygygtyggggtyggtattagtagygttygggyggatgtagygagtttayggaggggtatgtttttaygtattaagtataatygttttaggaatgattyggtgatatyggtygatgattttttttatagtttgtyggtgagyggyggyggaggtaaggtttyggyggygygygygatttyggyggyggttttttatttggtgttyggygaggygttgygtaaggygttygaygatgggttyggtagtttgggttatttgttttataaggtgttttatttgaaattttttagttygggttttygyggtttgtygtyggtygttygggagygggygggygygyggttttygggtagttgtagygygtttagtttggtygtttyggayggtagtgygttttyggygtttygygtttyggttatgagygtygttaggaagggtyggttyggygaygagtygttgtttaggttttttyggggggygtygtaygttagygattaggtgttggggttyggagttatttaygtggttaaggtgggtgygggygygggtygttttgggggttgggggttttggggttagttyggggtagatttttttattttttgaagttyggggtgyggggygttttygygattgttaygttagaggtaagtaaatgygtattttttagtaattagttygtttgatagyggtgaggagggaattataaatgygtttttttygtatttattgggaaaaggtttattattygggtggttygtttygtttygg

SEQ ID NO: 6899 - DNA, 4861 bp, synthetic construct
  misc_feature 1..4861: note = Description of Artificial Sequence: Synthetic polynucleotide
  source 1..4861: mol_type = other DNA
ygyggtttttgtttttttttttttygattttttyggggttatttaaaagtygattaagtygtyggttttttagttgtttttatttttttatygttttttttttttgtttygtttgtttttgtgtttttygttaygttatagttygttggtttttaygttttttttggtttttttgygtatatttyggtggygtttttggtgtttttatattattgtttggaattttgtttggtttaygtygtttgtttttgtttttttttttatttgtgtygtttgattttttygattttygtttttgggggttttgtttttygaatttttyggttttttttttttagggygtgygtttygtttagtttttttyggtttyggtyggtyggttttttttaygtggtttttttttttttggtttttttttygttttttttttttttgggttttttttttyggtttagtttaggggttgggggtggyggygyggggyggggyggggyggggyggtgaygyggggttggtygggtaagaggygyggyggygtggggagggggygtagtttygggttygatyggtygagtttygygygtttygttygygttttgygttttygttyggtyggtyggygggggagggggtatgagtyggygttygygygtygtttygagttgygggtyggtttagagtttygygygggtttygygtyggagttaagtygtygtygtygtygtygttaaatygygggygtagtagtgggygtygygatgtagyggtygggggagtygggygtygygygtttyggttygttygagggttgygyggattatyggtygtatygttatygtagttttatgattgaggagatttttayggagttattygggtttaagggygtygygttygtagtygtygttgtygyggygggygagttgttgaagttyggygtgtaggygttgttggyggygyggtttttttatagttatttgggtaygtgtggyggtygyggggtygygggtygggtttggygggagatagygagttgaatygygggggygtttygagtttttttyggtatygaagtagtttygggaagttgttttgggagygtaggttttgggatygtttttyggagttttttaggygggaggyggagggtgtaagttttaggttttatagaaattaggtttygtgttygygggtygttyggggagggtgttygtttttttttttattgttttttttyggtttttagttyggggatttygagtgagtatttttagtgtaggygtattgttaggttayggattttygtgggtggaagygattttaggttaygggygtttgggtttygtygtagagggatggtygggagtggtygyggttgtttaatttagggaagtyggatttttggggaggaggtttgygttttygagggttgggtgttgaygygggtttaagtyggttyggagttttygggagttttagygggygaggaaygyggttttggtygtagtgyggatttgtttyggttttgttttggggttagaggtttgattgtgagtagttgtttggttgttttttttggttttaggtyggttgggtttttgtagggtttgaayggtttgygtagatttttttagtttttgtttttttttttaatttggyggggtttgttttgttttgatggtgttgtttttatygtattttattttygttttgtttttttttatttygttttttaatygtttgtyggtyggtttttttygttttttttattggggtyggtttgttttttattttttattttttttttaygggttttttgttttatatttatttgygttttgttttgtttttttygattttagttaggttaggattygtattttagtgataggtttgtyggggaagggaggtttttaygttgtagtygggattttagttttttaagtygttttttttgtatttttttattttttagtyggtgttttttagtttggagayggtagggttagygygttttttttaagtttagttgggattyggttattyggttatttttygtttttatttgttttgttgttattaattygtttgaagygggtatataattattttaggattgaagaaaatggaaatatttgtatggggaagygtttgaaaatagaaaaygtgaataataatttttaggtttttagggtattttggaattttygggaagtatttaatttyggtttagatgatttttggttatygtatggttgttgtgttaygtayggaagagtaaatgtgtaygtttygtgtatgttttttttttaaygtagtaaggttgatttggttggagtaaaygttatttttttaggattagttgtygttttttttttggtttttatttttttygaaagataagatatatttygagtttttygtagttgtaaatatgtttattaggaatttygagattttagaggtagttgaggtttggggaattttaggatagaatayggatagggtygaggagatatttttttttaaatttggggaayggtaaygttgaggagggtttttatttgygttatyggygtygatyggtagggygtggaggttttgygttgggaggtattggttaagygygagtattttygyggtaygtggtgyggtagtttttggggtagaggagygyggtygtagtttattygggtttttatttttttttttygtagtygtgttgaaggtygagtaggyggyggtgtttaagtttttattggygtygttgggttgtttagggttgagttttgygttgttggyggtagggttygggttgttyggygtygygggtgygttatatttgtygttygagttgtagtttygygggaagttggaggyggtaggttttggggagttaggtattaaagttaagaaggggygtyggagtygtattgtgtttatygagttgtagttgatgggtttggagaaaygtttygagaagtagaagtatttttttaygtyggataggtagggyggtataaggttggggttagygggttgtgggagtgtggttatttgttttgttgagggtgygttttgttttttttagaatagattttgttgagtttttgggtttgagttagttgtaggtgaagaygtggtattagaatyggaggatgaagtggaagaaaatagtgagtgtgtttggtggttttttattttttagttttttgggttatgtttyggtgtatgtagagttgtttttttttttttttttattgagattttgtttaatttttygattttttyggtgtttggtaygtatyggaatttttttagttttttttgttttttgggtaagttaatatttygttttttttygyggtatttttaggttttttggtagttttatgttttttaggtygggtygttttttaggyggtatttggataaatggtygttatttttygggatatttttttattatttttttatatggattttgtattttttagttttatttgggtttaagttttttygggggtttttagtttaygtgttggtttatttaggtgttggyggtttttygtgtaggtgttgtagggyggyggtttggagttttttattaagtttaaggggyggtttaagaagaatttaattttaaygagygagtagtttattgagtaggagygygttaaggatgtagagaaatyggyggaggtgtygggygagtttagygataggagtygygaggattgagggyggtatayggtgyggggtttgggatgttygygttattygtagtttttttattyggyggaaattygygagtyggttttttygygtttaagaagtttattttttaagtttttttattatgattttgaatgyggataattggggttaaaygaggaaggatatagatttaaaagttagatttaggttttagygygtttttgggttttaatttgggagattygtatttagttyggyggaagttatagtttttattttgagtttygtggygtagagygttttaygygtatttaygtttygtttttygtttgtatttttatttygtttggggtttgttttttyggtyggggagtttttaggtatatattygtttttggaygtyggggatttagyggttgggtttaggttataayggtttgagattgtttyggggtaattygtyggttyggtttggaggtygggttttygatgtygttggggtttttatttttttttgygaagayggtgattttttttttaataaaatattttatgatataatygggttyggtggagtagtttttgaattygtagggggtgagggtgggggtgggggtgggttyggtaagataagyggaaygygggtagttgttttttaaattttttttttttyggttttgtygaaggtagttgtgttttttattattaagttygggttaggtayggygggyggttyggtggttgtaggattttaggaatygtttttattttgggygtgaggggttagtttgaattttatttttttttttttgttagttagagagtygttggtaggagyggtttggtygtatygygggtgtttaaaggagygggagttagaggttygtygtagagttygtttyggaagtggttyggatagagagtygtttyggttgttgtttyggttttttgggatttgaaggattagttygtgyggtttttgagatggtttttattaattttttatgaggyggatgggaagtygaggaygtaaggtttggatagagtttttttattagygyggtagttygttygygggtttttgtagtagtaatggttttttagagtttttatatttttygtaggatatttagggyggyggygt

SEQ ID NO: 6900 - DNA, 999 bp, synthetic construct
  misc_feature 1..999: note = Description of Artificial Sequence: Synthetic polynucleotide
  source 1..999: mol_type = other DNA
ygttgggagtyggggygygtttttgtttttygygttaggagaattattttygttttyggagggagttygttttygtgagggtygtttttagtttyggttygtygtttgaagatagtagtttygggaatygygaygatagtatygaattggagattaggaagttttggtggaaaaggttaaggagtggtgtgtaygyggagttygggattygggyggggatagagygggagygygggygtagttygttagygtyggyggtagagttttagttagaggttgygaggggtttaataggtygttaaaggtgtttttggttagagatgttatagygygtatttaggtaggaggtataggggattttttataggggttgygggagttggygttttttygttttaggtygggagttgagaggggttttagygtttaggtygattgygttttgatygggagttattgygtttagygtagttygagggygttgagttyggaggatgyggygyggggygggggtttygggagtaatagagattgggattygagggttyggttygygttgttgtttaygtagygtttttattttggaaagagtgtttttygygyggygggtyggtttttttagygygtatttggggttgtttttgtagggttattttygtttttagggaggtttaygttygtyggygaggaaggatggtgagttttggtttagygggaaggttggaggaaygtaggttyggaggaaaaagttttttagatttgggttattaaygaaggtttttatagggattattaggatygggaygtygtgggtagaggygttatgttttttgygttatttttttggggatygygygttagttygtggtgtagggtygagttttggggttgtgagygygygtttygttttygtgygttggtggaaagyggggtgttygtgygtgygtttgygagygtgtgtyggttgtaatygtagggagygtaaataggtygttaygt

SEQ ID NO: 6901 - DNA, 1750 bp, synthetic construct
  misc_feature 1..1750: note = Description of Artificial Sequence: Synthetic polynucleotide
  source 1..1750: mol_type = other DNA
ygygtaygtattttagaggttatttagattatgtttygtygtttgggygtttaagttgtagtygttttttgtgtgtaggtagtagttgtttggtaattttygagttygttygygtttttagtatygtagaattagggttaggtgttttagtggttgtagttaagttaggtattttgtttagyggyggttgtataggagtagaatygagaattygtygtttaattttatayggggtgattgtygagtgtttatgttagyggttttaattttttttaggtggaggagtgggygggaggtaygatttgggggtttttaggttgggygygttggygatttygaggtygattaggttatgtatttttagttygtttgggtatttaagttgtagtygttttttgtgtgtaggtagtagtttttaggtaattttygagttygttygtattttttatattttagaattagggttagatgtttttgtggttgyggttaagttaggyggtttgttttgtagtagttgtataggggygggaatyggtttttagttttattttyggtggttgtagagggtttttggttagaggtttygagttttggtagaggaggagtygggtgggggtagggtttggygggtttttaggttaggggtattygygatttagaggtygtttaggttatgttttattatttgggygtttagttataggygttaggtaatttttaagttggttggygygtttagtttygtagaatyggggttagatgtygttgtggttgyggttaagttaggyggtttgttygyggyggttgtatyggggtaggaatygatttttagttttattttyggtggttgyggagagtttttgttagyggttttattttttttyggaggaggagaggagygggagttayggttaggygggtttttaggygggaagggatgygygtttgygatttygggatgttttgygygagtttaggagaattygtaagttagyggygtttgygttygagttgtagtygttttttgtygtttaygygagttygagagyggttttyggagttygggttagygtygagttgtaggygygygtttaatygttttgttgggtttaygyggtttgagaggtyggagygtttaattgttggtaygygagtaayggtttagttaagtttattyggtttgagaggtyggaggttgygagtgtygttgttgaaggttgtggtggatygggttggatygyggattttgagttatatygyggggttgggggtggattttgggtttgggggtggattgttggtttggtggtggattttggatttaggggtggatagyggggtggggagggggatygyggatttggaatttggtyggggtggaaaggttaygaggagtygyggyggtttagtagygggtggttggygtttgagaagtygttattatgaggaaattttttagtttygggagaygtttgggttaggygtttttgagttttatggattaagagtaygygggtygggggtattatatyggggattgggaattgyggaagatttatagggtggttattaagggygaygtygyggaggtggagygttgtttgattygtaggtttygggatttggatgttygygatagaaaggataggtagygggggtttagttygyggtgggagggggtttttaggttttgtttgttygtagygtttgaggygggggttttggaggtygtygggttttggagtygyga

SEQ ID NO: 6902 - DNA, 391 bp, synthetic construct
  misc_feature 1..391: note = Description of Artificial Sequence: Synthetic polynucleotide
  source 1..391: mol_type = other DNA
yggtgttggagygaggatgygtagatygaggtagggaggygggggtgygggaggtttygyggttgygygggygygtgttggtggtttyggyggaggtttagtttyggttygygttygyggygttttygttgyggttygagyggtttggttgygggatttgtgygtayggatggygyggtygtttyggtagtattygggggtttgggygtygttgtttttgttgttattgayggggttygtygtttgygtagttagtttygyggaygayggtgygggttyggggggtyggggatttyggggaygygygyggggggataygggygtygaygaggyggtgtygygttaygattttttttayggtattttygygggggagttttaygatttgygt

SEQ ID NO: 6903 - DNA, 817 bp, synthetic construct
  misc_feature 1..817: note = Description of Artificial Sequence: Synthetic polynucleotide
  source 1..817: mol_type = other DNA
ygygygtygtttttttyggagttttygagttgttgaggagtttggattgtgtttgtttttagtgttagatgaaagggygttgaggtttttggtygttgtttygygtttagtttygygtaygtttttttgygagttyggtygtttagygttttttttygttygagtygtygtttgygtttyggggtagtygttttgtttttagygygatgtggtttygtttggttttttgttgttggggtttggygttygtttygggttgggygattttttagtagatgttttygtygygtaattttagttttygtttttttttygagatygygttyggggttttygggagtattttygygtygttygtttttggygaygaagyggyggggagtagagtggagyggttgggttaggygtttyggygaygygtgyggttgttgygggagtttagygagygtttggagtttgtttttttggtggatgattygtttagygtgggygaagttaattttygtagygagtttatgttygttygtaagttgttgttygattttttygtggtgtttayggttaygygygtggttatygtgattttttygtttaagaattaygtggtgtygygygtygattatatttttattygtygygygygttagtataagtgygygttgtttttttaagagatttttgttattttttatygaggtggyggtatttatattaagggygttttttagtaagtygyggtaaggygttygtttttttygattygggttttagttttygggtttttygatttatygttgtttgttygtttttatttygg

SEQ ID NO: 6904 - DNA, 814 bp, synthetic construct
  misc_feature 1..814: note = Description of Artificial Sequence: Synthetic polynucleotide
  source 1..814: mol_type = other DNA
yggagtaygggttaygtgttttaggtttygggaattagtttttattggtygagggttygyggggtygttaggagggttttttaggttttttttagggatggagtagttaygtttttygagtgtgtttattttatygatggagtaaagtgaggtttttagttygttyggatgtttttgygtygttygyggggtagttttygtatagataygttygtaagttttygattygttygttattygygtttagatattygygagtttttggggtygtagggayggtgtagygttygtygaggygtttttatttatttgtgattattgtyggagatttttggttttttttygttygtagttatatttgtagygtgaaygygtttyggggtagttygaggtyggttyggaggygtagttgttygtttygttygttgaaatagagygttyggttyggygggttyggtttttyggtggygtttttygtttttygttgttgtygtygtygggggaygygtayggttttttaggtatygttyggyggyggyggyggyggyggygaggygyggyggtygygggtygttygggtggygtaggtggtygggtyggyggyggggygygggggtyggtyggttygygggttttttygggttyggyggggaygttyggttagttygtagtttagygyggygtttagtagttttaggtgtagtatttaattttagagtygtatgttygayggtttttttygtttttttttygtttttgtatygttattyggagttgttagttttgggagtttyggygtttygatttttttygt

SEQ ID NO: 6905 - DNA, 1429 bp, synthetic construct
  misc_feature 1..1429: note = Description of Artificial Sequence: Synthetic polynucleotide
  source 1..1429: mol_type = other DNA
ygygagggaaggattattaaatttaaagaygygygtgttygtgtgtttatatagaygtgtgtttyggygtttgtatayggtyggygygtaggtatgyggaygtttataygaatatataggtatgttttattgaygtatttggggtatttttttttaaagaaagtaaggaatgaaaatttaatttgagagttattagggtttatttggaggtygtttaaggggtagaaaaaatttgtaatgaygttagagtgtttgtttttggtgtaattttattttygggagggttggatataataygtttggaaagttygaggggttgttttaggatttgggggyggggggtggggtatttagtaatttttgtygygggttgtttaagaaaygtggaaatatattttgygattttttatttttttatatatataggtaygygatttygtygttatttttyggattagtagtttaygtttaaygttgggtygattttagatatataggtagtygggattttygttyggtgygtttgtttatttatttttttgygttaggttgggaygygtttygtttgtaaaaggtttaaaygtatttttygtygyggggygggatttaggggtttaggtttyggggtttagaggygggtaattttgttaattttttttagyggyggggaaygtygygtaatygttgagttttgttygtygagattaaataagtagaggaataggttgtaaatatatattttgataygtgagtgatatttaygyggtgygagaagttgtagttaagggaaaggtaaggggtggggggagygggtatygataggtayggaattttygtaggygtyggaaayggyggtttttygattttttttttttttagaaagtggtaaygaatgtttaagtttttygaatttgttttttgtgggaggtgataggtgaayggaatttaggtttggttattttygtygttgtttatttttttattatttgttttttygtagataagtagattyggygtataatgaggtagtagtttttagtyggttatygtgattaatttagaataaaagygttttttttaygttttttttaataaaggggttattagtttyggygtttttygaaggttgyggggttttyggttgtyggttgyggagttgtygygygtaaatttttyggggttttyggggttgtyggygttayggagtyggggtygyggagggaggaagygtaagtygttyggagaaagtgaggttagattyggygggggagaggggagggagtygggyggtygyggaaggagggtgattgattagtgygyggtgttyggygttttgtttygttattagaggyggttaaagtagggttaygtaataattttagaatygttaattaattgaygttgtaggtaattattttattgtgygygt

SEQ ID NO: 6906 - DNA, 7708 bp, synthetic construct
  misc_feature 1..7708: note = Description of Artificial Sequence: Synthetic polynucleotide
  source 1..7708: mol_type = other DNA
yggaggggaaagygagtttyggaaataggygtagtttgtggygagggttyggtggtygagttgaatttyggggtttygggagattyggtttttgygggggaggtttttttygaagtygttattggygggggagtagagaaaaggggaaagaaggggagtggagaaaaagggaaaggagtyggttttaagtagygaggtygaggtyggttagaggtaagggtagggggyggyggygggggaggtagtygtggggtttaggtttggtyggygtttygaatttttttattttygtttttagtgttygggggygggtygagattttttaggatyggattyggggaggagygaggggtygaggggagggggaggattygggttttttttttttttttttttttttttttttttaattaggtygatttaatggagttaaagagttygtaaaattatgaataatttattygtgatttgttattaatttatygggtttygagtttttgtygttgggattgaatttgtaattaaatttgatttygttttattttattaaagaygagattgtaggtttaattgtttaaataatggattggaattaaattagtaattaygtygttaggtatatatatataaaaagttggggttgggggaggtygggygttyggtyggttygygygggattttygyggtygyggygygtaaatttaggygtaaagtgygyggttygggtttttygttygtttttgtygtygttttygtatttttagttygttggtagtttttttyggggtagggggaggttttygttttatyggggttygggttygaggggttgygggaagaggtygttgyggtttygtttyggaaggatttttygatttygyggttygyggttttgttgtaagtttagygttyggygtttygayggygttttttttttattyggtttttagttygtygttttttagtaaggtgtygtygygtttyggagggattgtttttagagtaagaggttttgtaaggggtygtygtggttgggttataggatgtgggatattgttataaataagttygtgttttygtggtyggaattttgtaygtataygtataygattygygttygtatatttygttygygatygtattttttagggttttygttttttagttttagttgtttygyggtttatattgyggttattttttttttgttagtgygggaggggagggaagggyggaygttagatttaggaagattgggttgggtttygagaggtyggggagatgttttttttttttaatttagtttygggagtttygaaagagttagtygtatagttatygtyggygtatygaaygtygttttttttaggattaggagtttyggttaaggtyggagaggagggtaygggaataaataygatatatatagagatagagatagagagaaaggayggagagaayggaaaggaaaaaaagagagagggaggttagagagaaagtgagatggttgaatggagggtgttttttgtagaggttaaataaggtttgaaatttagtttttagtttatttygttggggtaaayggyggttgaatagtaaaaagtagaaataaatttttgtattttttattttttttttgtataattttaaaatyggygtygaattttygtgtttaggaaaataatatagttttttagttattaggtgttttggagtygagtttygygaggtgttttygagtggaagttgatttatttgataaatagaagyggtttggtgttgggggagtyggtttgaattyggttttgtttttttttggggggtggtaggagaggagggatggaagttttagagagttatatttgtggtagtgtttttagtaaattttaaattygygttatygatyggtttatygttgttttattatttattaaattgggggttgygttttttttttagtttygtatatagggatataygttttatgattttttaagygatttygttggagygaatattygttttttatttttttttttatttaatttagattttttaagatgaaaataattgattttttttygtygtagtattttttgtatagttttgggtttgtttttgtttttgtttttttttgtttgtgtattagattaaagggaaaaggaagaagaatataaaatttttaaatttaattttgttgtaaaygaaagaaagaaaataattgtatataaattttagttyggaagttyggagagttataaattttttygggttttgtagatttygggtagatgttgayggtttatttgtyggaatttagaatttttgtagttgttttgagtagggaggggygygggagggggtagagttttttygggaatggtttggggtttaaagatgtyggaaattygaattaagttttttattttattttattttattttattttggygygaggttaggtttgtttyggtttygttttygttyggggggttygttttygagggttayggtttttattttagtaggygttaggaaattyggaggaaaaagttygggaaaattgagatttgtttttaaaggaggatygggtygagtaaaaggaatygtagtttttgtttttttgagttttttaagttygagttttttaagtttgtygtttttgggatattttaygaggttaggtygtattttaggtygagttyggygtttygggttatagttagtttttttttttgggattttygtygttttgtttygttttttygttgttttagttttyggtttttagtygygttaatttaaaatttgtttggygttagygtygttttgttttttttatttttgttattttttgtttagtaaagtggggtaaaggtttaaattaaaaagttatttttaaaaaaataatttattagagataaggttttgtattyggagtagtaagggattattgtatttttttttttygttttagtygaggaygtatagtttggaagtttagggggttaatgttttttttgygaggtygttyggtgtttaaggttygttatttgtttagtatatagagatttaatttagttttyggtygtygaggtygtatatttttttttaattttatgggggygtttygtgygtygygtatttattagygttgtaggtygttagattygtatyggggttygggtttttaygttttttyggtygttttttttgtatagtgtttaygttattgtagtagggaagatttagagggttggtttttgttgygtttagtttygygtttttggtygtygyggttgtagyggtygtygttgttaygtyggtatggttgaagtgtgyggggtattygttttgtagtagygtttygaagtgtaagyggtagtagattaggttgttttttatgtygaagtggtygttygtggttagtattttgttataygtggtgtaygtgaagtagttgaggtgataaattaagtttygagygygtattattattttygaggtygagatgtttaggtggtagygggygtagygttgtatagagaagygtttgtagggattatggagggaggggttgtgggaatatayggttgggtattttttttttttttttttaggtgtygttgttgttgyggggggtaattttttttttaagaygaataattyggtttttatttggaggatgggggggagagagaattagattttgatttaggtttggttttgttttaaaatagttttttttaatatatttatgtttatagagatttttattttatttagagttttygtaagttttaggaaagtttttatttgggagtggagggagatatttattatttattttttttttaatttttatttttttttttaaattagygtttgggaattttattgatttttataatttggaagaaatatagagatagggaaagagagagagatatagaygtagagatagagatagagagaatatatatagattttaattttaaaattggggagaaggagaaatagagaatttggagtttattagtgattttggttttttgattttggttattttttatttttatttttttaaaagatttggaaatgtatttatttttatagttttttttttagttgtgttttattttagtttgggttgtttaggtttgggggtgtttgtttttataatttyggattaatttaagaaattttaaagagagaggggagtaaggattttaatttaagtttttttgtggtttaagtttygagtaggagggtagtttttgttttttttttggtttttttatttygtagatttttttaagagttttttaaattgttgttttaaaaggttattatttaatttgtggtggtttggagaatttggggggggagygggggagttttgagtagtgaatttttttttgggattaaayggaaaggagagggttaaattgtaagattgtgtttgagattggggggaggggttttgaggggtagttgggtgggggggttatttgtagtagttttttttgtagtagatgttatygtttttgttgaaataggtgagtttygattttaggttgagtttgtattygtagtatttgaggtagygtatgtgttattgtttgtttatygttagtaggtagtagyggttygagattttgttttygtagtyggygtatagygyggygyggttattgttgatggayggtatggtttgygaagggagggaggyggaagatagtagygtttgygttagttagyggttttttygtygtygggaaatyggtatttataattttttttgtggttttggttattttgaaygyggagggggttgttaggatatgyggygygtttttttttattttaaaaggtttatttttatttttgggyggtttagaatttaggtttgtttgygtagttttygttagttaygggtttaggtygggtttttggtttaaatggttttggtgtttattttttttttttttagttttttttgtttttttttttaaaatgttygggttgtgtttagggattaggatagttattttagttaagttttttaagagttttttttaaattgttttttaaatgagttattygggggataaggtgattattaagttattttttatatagaattttttttggagagatagyggagtttttgggttttagttttagtgatttttggatttttagattagaggttaaggttaggataagttagttaatttttggtttttttgttataygggttggggtttttttgggttyggggatgaggtaagtggggtgtagggatatttttaaagttygtgggtgaaggataggtttaatttaaatatttttttatttaaattgattagtagagaaggtttaatygaagaagygtttagaggtygggaggatattggygtygttgtttttgttttyggagtagagaagtttttttygtgttttttattttygyggttttttaaaggttatttttgggttygttggtygggtagtgtttgttygtttggtttttagggaggtttgaggygaggaattggttatttggggttgggttygyggagttaggtgtagagatttaaatggagtttttttyggygagggttaggtyggagtttgaatttttagttttggtttggttaagtttgattagttaagggtttggggaygygattaaygataaatgttggtttygaagatttyggtttttgaaattgygttgggggttgaggaggattttygattgtyggaaagttgggagyggtttaagtyggttggagttttaatgtttttagttggttygtttttttttggygtygttygyggygtygttagtaatyggagtygagaggtggaggagagygyggggttgtygatttyggtatygggtaaggtgagaagggagtygtttygggtygyggatgggatttygtttttagttyggaagaaaygtttttttttatttttagggtygagatttyggttttaattttgttttttttttgygttttagtagtygggtttttttygaatygggagttatyggttttgtattttgatygaggatttttagtatttagtttygtgyggtaygaaggaygttttttaaatttyggggagtagaggygttgattggttyggttttattttagtttttagtttygattttatagtygygygtttatygtttyggtgtygtygyggtygatggyggagttgatggygggagtttygtttttggttttgyggtttatttygtygatgatttygtgtatttyggggttygatagattgtggaatagtatygyggygggatyggyggggtygggggygyggttttttygagggagggtttgtttttygttttagttgtttggygtttttggygttaaygggttyggtgtatygttatygyggtttyggtttygttygagttyggttgagtttttaggtygggtttygggtttygggygttygyggggtaggaygtttttygtygaggygtaggggtagttatattgyggggygtttgggygayggygttaaagttagggttataagggtaygggataagyggggyggggggagtaggagattaggatagaggtyggygttygtygygggygtttttaygtygygggtatygttygttyggttttagygttyggggygtaaagtaagggygtaaattttgttygaggyggygayggttgyggtyggggtttattttgaagtygttaggtgttygyggyggtttagttgtttggattttttttttttttggggtgygtttttagtttaaggygatttttttgggygttgagtyggygattggagtaggggttttttygaagtttgygagtygagtygagttatygggagaattgaagaggaggaggaagaggaggaggaggaggyggaggaggaggtggaggaggagaaaaaagaggaggagtagagtgggaggaggagtygtyggtygygggtttagtygygygtaatgttttttaagygygygtttagtttagtttyggttttgtagttygygttagygtaagttttygygttttttttatagtygygtttgatattaygttttgtygtygtgttattggtygttyggygttttaggttttggtagygygtgtttygggaaggygggagatttaagagggaggggagaggtaagaggagtagaggagagtygagatggtgggagttggtgggygaggttggagggygggggtgggggggaggtagggaggagggagagygyggggtttggagtttttaagataygaatagttttttgygatatttttagaaaggaaaattaaattttttattttaagaaggygtagtaaggggatgttygttttattgyggttttttttyggtttggagtygyggttttaggtattygtttgggaggttygggaaggtaggtttgtggtagagttgtaagagttttyggtyggtygttttttatygagtttygttttyggttygggttttgtatagygggttgtaggyggtygtgtaagttttttgggtattyggtagagtttgagtggygagatyggygagagttgtgattttyggggaggggggttagttagtatatttaygttttaagttygttagggtttaatttgtagtttagygtgtagtttttygtttttttygg

SEQ ID NO: 6907 - DNA, 3969 bp, synthetic construct
  misc_feature 1..3969: note = Description of Artificial Sequence: Synthetic polynucleotide
  source 1..3969: mol_type = other DNA
ygttttttttgygagtygygygygtttgygatgygtaggttgttttggatttttyggggattggggggatttttttgggaagttaagggggatattttaagtgtgttttgtaaatygtattttttgatgtgaaaatyggtatgygyggtgyggtygtayggggagagygygtgtttgggggtggggggtatygtttaggaaagyggagttatttygggyggaaagygattttygtagaaagygtygygygggygtygttgygtgttygtygtttatagtygtagttaaagagaygtaggyggttttaygyggtttggtttatygtygtttgtagtgttygyggygyggggygtttygaggttgggtttatygtttttttygygtttttgaagatttttygggttttttygaaggagtattgtttttttttgtattttttttttagggagttyggtygtagtttttttaggaaygygttggygygtyggygtyggtgtaggaygtygtgggtttttttttgggttaygaagattgggaaatgygagtttygtgaagygtttatygygtgtttygtttagtgtttyggagatygttttayggtttaygyggygggggtatygtaggttttygttygttttggaggaggggagyggygttgttygygggtttggttgggtgttttttttgtygtgttttygggttagttattttygtygtttatttttttyggtttggtttttttgttttygggggttgatttygagggygygttygggggtaygygyggaagtygggtygaagggggttgygggygtygtygygtaaaygtgaggttgygggtygatgtyggygaggagaaggyggygyggtttygggtgtygggtaattttttggggtttaygtgaatygygygtggaaattygtatagtygttygyggaaatttaaatttttygtttttattygtatygygttttyggyggttagattygttttttttaggttttygttttggttygaggygyggtttttgttyggttttttygatagygagtttygggttttttygttagtttttggyggttttgggtttttgtygtttttttygttttygtttggggtttttttgtttttygygatttttgagagttttagatttygygyggatttttttggggtyggttttgagagtatagtttttygtygtagtttttggttttttygtaatttygayggttatttgtggataaataggatygtygttttgtttatgggaagayggggttggtgagggttagagaygtttagggygaggtaatttygtgygtttagtttygagtaggtygttttttaggaygttttatagtygaggggatygttattygggagygtygtgagttgtgggtattaygyggtggtggagagtgattttygtttyggggyggtygtgttgttygaatttgttttagttygygaggggagaygggtttgggggtaggygggagagggaggtttygggaggaggygagyggggttgagaggaygygygggaggggttttggagaggtygtaggaggygygtttyggagggaygatttttgttgggaggaygaggttttaggtggaygttgtgggtyggtgggtaggagttygagttttgtaggagyggtttaaattggttattgagygyggaagaagggayggaaggtgagygttattgggttaygtggggtygagagaaaggttattgtttgttttttttaaaattagttttataygtygaygtttttagagaattggtttggtttggaaggaggttgaggatgtaggyggggatattaaagaatygggtttaaggaggtgggaatttayggatttygagtttttataggaggtgttttgggyggtaggagtgggaggggaggtttatgtttttgtagttttygatatttaygttttygggatatttaygattttygggatatttatattttygggatatttaygtttttyggatatttaygtttttgggatatttatatttttgggatatttaygttttygggatatttatattttygggatatttaygttttygggatatttatattttygggatattttygttttyggaatatttatattttygggatattttygttttyggaatatttatattttygggatatttattttttygggatatttatattttygggatatttaygttttygggatatttatatttttgggatatttaygttttygggatatttaygttttygggatatttaygttttygggatattttygttttyggaatatttatattttygggatattttygttttyggaatatttatattttygggatatttattttttygggatatttatattttygggatatttaygttttygggatatttatatttttgggatatttatattttygggatattttygtttttggaatatttatattttygggatatttaygattttygggatatttatattttygggatatttatatttttgggatattttygtttttggaatatttatattttygggatatttaygttttygggatatttatatttttgggatattttygttttygggatatttatattttygggatatttattttttygggatatttatattttygggatatttaygttttygggatatttaygttttygggatattttygttttygggatatttaygtttttgggatattttygttttyggaatatttatattttygggatatttattttttygggatatttatattttygggatatttatattttygggatatttatattttygggatatttatattttygggatattttygttttyggaatatttatattttygggatattttygttttyggaatatttatattttygggatatttataattttygggatatttaygttttygggatatttatattttygggatattttygttttyggaatatttatattttygggatattttygttttyggaatatttatattttygggatatttaygtttttgggatatttatattttygggatattttygttttyggaatatttatattttygggatatttttattttyggaatatttatattttygggatatttaygttttygggatatttatattttygggatattttygttttyggaatatttatattttygggatatttttattttyggaatatttatattttygggatatttaygttttygggatatttatattttygggatatttaygtttttgggatatttatatttttgggatattttygttttyggaatatttaygttttygggatatttaygttttygggatatttaygttttygggataygtatattttygggatattttygttttyggaatatttatattttygggatatttatattttygggatatttaygttttygggatatttatattttygggatatttaygttttygggatatttatattttygggatatttaygttttygggatatttaygttttygggatatttaygttttygggatatttatattttygggatattttygttttygggatatttatattttygggatatttattttttygggatatttatattttygggatattttygttttygggatatttatattttygggatatttattttttygggatatttatattttygggatatttaygttttygggatatttatattttygggatattttygttttygggatatttatattttygggatatttattttttygggatatttatattttygggatattttygttttygggatatttatattttygggatatttaygttttygggatatttatattttygggatatttaygttttygggatatttatatttttgggatatttaygttttygggatatttatattttygg

SEQ ID NO: 6908 - DNA, 2490 bp, synthetic construct
  misc_feature 1..2490: note = Description of Artificial Sequence: Synthetic polynucleotide
  source 1..2490: mol_type = other DNA
ygtgaattygagtttyggttayggtygttattygtttttatttatttttaygttgtagtgygattagttattygygtggtattygttaygatttagttgggtttatagataggagttgtttttttttattgtaggygggtgatttaaggtttttattgttttatatttgtttagatygyggggtattygggtttygtagttttttggtygygttyggggttyggggagtygggttgyggttggggggtttggaggatgagggygaagattygagttggattgyggagagggtgtyggygygggtygggtttggggggaggataygatygggttttygttttyggatatygtaygygtygatatagaggggtyggttttyggttttggygyggygggttggygtagggyggggtggyggttgaggggttygggttttaggtgygtttyggagyggtttyggyggyggtgygggggggaatagggaggtaggatggggggyggggaggygggaggggggagtygaggttttygygtygttagtttygygttttygttttttygttttyggttygagyggtygttatygygggygggyggygttgygttygggtgyggtttttygtyggyggyggyggygyggtygagaggtgygggtttygygygggygggaygyggggygttgttygtaggagygattaggtgggygtygggtygatygtagtygtygtygygttttttttygygtttygggttttggtttttygygtttttttttttyggatttygttttttygttygaggtygttttttygtttygggttyggtttttyggagttygtygattttygttygaggttttttygttygaygtttyggtggtagyggyggttygggttgygtttttygttgtygtygttgttgyggttttgtttttttyggggagggggtttyggyggttttgygttttygggttttyggtttyggygtygtygtttttygttttttgyggttygggttttygtttgggttygattttgyggggtttygttttggygtttgggtttttgttyggtaggttttygygygttttttgttttygattttygggttgggygttttygtttttaggtttttttttygtgtttttgtagtttttyggtttygttttttyggggtttttttygtttyggygtttttgtttgtygtttatygttgtgtttttggttttgygttagttttttttgggtttttttttygggttttygttgttttttygagtttttgatttaattttttatttttygtttttttttttttttttttttttygtttttttttttttttttttttttttttgtttttttgtttttttttatttttttttgtgtttygttttygtygggttttttttagttgggygttttagtgtttgtgtttttggtattttyggattggtttygtgtttgygttyggtggygtyggtygttgtttttygttagagtttttttttatttttggttttttyggattttgtttttgtttttttygtttttgtygggtttttagaatattygggtygggygttttagygtttttgggttttttggygtttttttygyggttgagtttattttttttttttagaatyggggttttgtttttagataaaygaattttaatygaagygtatygaattygagggttttagatygggygygayggggttygygygggaggagtttttyggayggggygggagygtggggtttggtaggggaaggtygggygyggggattgtatyggatttatttygggaygttgygyggggygttyggtgggtgtyggyggtagygtttgggtatagagaggggattaygygaygggtyggygatagyggttggggyggyggtygyggggattttaggttgtyggttttygtyggttttttttgattygttgttttttygtaggyggaygtygygggtatggattattygtaygaygaggatttggaygagttgtgtttygtgtgyggggataaggtgttyggttattattayggattgtttaygtgtgagagttgtaaggtgagyggygagygygyggtaggggtgyggtagaygggygttgyggggtttygttgatttttagttttygtagggtttttttaagygtayggtgtagaataataagtattataygtgtatygagagttagagttgtaagatygataagaygtagygtaagygttgttttttttgtygtttttagaaatgtttgayggtggggatgygtttggaaggtgygygtygygygggtttygatttttgattttttatagtttgagggggtagggggtgggggtgggagaggggttgaggggatagtattattggttttygygaaggtttttygtgygatattagggtttagtygttgtaagagaatygggygttggygttgggtgggtttygggyggggaagggaygt

SEQ ID NO: 6909 - DNA, 5370 bp, synthetic construct
  misc_feature 1..5370: note = Description of Artificial Sequence: Synthetic polynucleotide
  source 1..5370: mol_type = other DNA
yggtyggtttagygtaggatttygggataayggatggtaattgggggtygttyggaggtttttaggattttattagtgttygttgggttgggttggttygttttagttttaagaygygtagttttyggaatttttggagttgttyggtttagtygygtatagagtyggyggtagagygggygygggtygggttyggtagggggttgatygggttygagtgtygggyggtggyggggaaggaggaygagaagygtttattgttggtagttttgtttgtagtatagttttygatttyggaagtagtagttggtggtgagggtttgttgataygtygygtattgtaaatatttttygtgttaggaygattygttgattygtattaggaagyggtyggagatgggtygttggtagttttygtagayggygggatgygggtagtyggagtttgtagygtatagggygaaagttyggtygttagygtygttyggtttagtttyggygtttyggtygtatygggtttatagttttyggtttygagggttygggtygttygggattatygtttgtygtttgygtttttyggatygtygygttaggggtygggyggtttyggttagttygttttagttttygggtttyggygtggagaggtygygggtttygagttttggttyggygttgtgtttttttttttttyggagaattygygtttygtgttaagataaatgataaygagtayggygtagggtggtyggttgggattaagataggygaggtgaggttggggygttygttggttgataygttttayggtggygttygtggttttttattttygatttttttaaaatttgtggtttgagtgattagggagaygttttttttttagaattttttttattttaggtgattttgygttttttttaagttygttaaggtgattgttaggttttttattatttttgttattygttatttattatatyggagtggtagttttagaatttaagtttggaaaggatggtgggtggygattggagttgttttgtttttttaggaygtttgtyggaggygtatttgyggttttttggygattattttaggagttttgtttttgttttttttttatgttttgtaaatttattttttttattygttggttttaaygttygtgtttatagtyggaygaygttttattttaygttygagattattygggygtttygatttygtatttatttagtagtatttttagagtggygggttyggggygtagggygtgtttttttattttgatgtygtttaatattttggygtagttygtttgttygygagggaagtatttttttagygattygggatttgttgttatatttatgggaygyggggygygttgyggatttygtyggtygggttgttygttygtyggttygtttattygtttttygttgtygyggttttggaatyggggaggygyggttttygtagggtaggggttgygtyggttttyggygatygtggagyggygaygygttggtttygggtttyggygtygtgygggygggtyggggyggttgtagttygygtygygttttttyggatatttgtagttaygygygtyggtttttttgttatttgtttgttagtttyggaattyggyggyggyggttgttgtagayggagtygyggggaggaggyggyggyggyggtggyggtggyggyggyggtaggygggggagggggtgggggtgtaggggyggtttygygggtygyggggggggygygyggygtagyggggtttygggyggggygtagygggtygyggggtttygggygygtttttygygttattttagtgttatggtgygttygttgagtygtygggtttagagttggggttggyggyggagggataygggtygttttatttttygaaattttttgatatttgaatttygyggtyggtatttttgygtygggatgygtygtyggttttaygttaaatagtgtygtttygttttttygygygtttyggggtttygygtttttggttygygtttygygtygygtttggtttygagtttaggtttyggtttttyggttyggtygtttygygggtttttygtagaagttttgatygttttygaaataaatttttttgttttatttttttgaaaaattgatttgggagttggggagygaaggttttttttttttttttttgttttttttattattaatattttgtaaagttttagygttaygaggagtggtttygagygaggttagattgygyggayggtagggagygyggyggtttygttaggggayggygtyggtygggagtggtygtttgggaattttygattgtyggtygaggtaggtygygggggttgagtyggagtttttygggyggyggygtttgttyggggtygtttggttygyggagagggtyggtttttaggaaygaaggaygggggygggtagaaggygaggayggttggttttggattygtgtaaggggggtttaggtttaggaayggggagtgagtttggagtgtgggtgaggggtttgggaaagtttygggtttggtagagattgggygggggattgagtygatgggaggttggggtttygggatygagaatgggggatattgggaygataaggaaggttaggtttgggtttaggygatygagagtttagaggataattaaggttggaaaaggggttttygggtaggggtaggagtagtgggtaagattygggttttttagggtttgtagtgaggggygttaggagggagtggtggttttagggtagyggttttgaagaaattaggttggttgttaagatyggggttttttggygggtygggtgttyggttaggggtygttgggaygygyggattaaggatagtgttttagttagtttgggtaaagtggatttyggtaaygggaygygaaagttggygagatggagttgtygattttygygttagtygggtttggtattygygttyggtgygagaggttatagygtyggatyggttgtttgyggttygtggtttttatygaygygyggtttatyggggagtaggggggyggttgyggttyggggtagyggygggttgatttttygygattygttgyggggyggtttyggtttttttyggagygaggtagyggygyggagtygggygggggyggagggtatggggggygggttttttgatttygttggaggygaaagggyggatyggatttggaatttgygggaggtttggttagaagtggttttttgygtygyggggtttygyggaggggttyggttttgtggaggattagaggttttygttttattttatttgygtgtgtgtyggtgggtatttgtgtgtgtttgtgygtgtygggttttygtttttgyggtttttgttttygtgtgttttttggttttgtatatayggtatgtgtgtttttgtaattttttagatttttaggggtgaatttgtggatttgtgtttgagttttttgtattygtgtgtatgtgaatgtgtgggtttttygtgtttgtgtttggggtgtgtgttygtattattttatgygggggtttaagtttttgtgygtgttttagtttttgtgttgtgtttgygatttttttttgtatgggtgtttttgttagttttgygtatttgtgtttattttyggggttttgaatgtttttgtgtgttygygtgttttttagtgtgtgtgtgtgtgtgtgtgtttgtgtgtggtggggggttttgtgttttygtgtatttttaggygtttttgtgtggttaggtyggggagagtggatagttaatgtggagttttttttttatatttyggttttttttttgtttgatttggaaattttaggtttggattygygaagttgggttgggtttgagtygtttttttygggtatttggggygggggygyggttgttgtagggagaagtygggygggtaaggtttyggygtatagagttagagtttygaggygyggagygyggttyggggtyggygggyggattaggtattttttgttttttgttggtygyggtttatttttgtaatyggggttgggygattgtttgtaggygagagttttygttttaggtttagatttttttttttttttttagggtgtatatggtaatattttttygttataggttttgtatttttaatttttggygtaaggttttattttttttttattttttttgtgtttggttttttttattttatagtttttttttttttttttttggttgaatgagggtttttgygatttagttttttaggtttttttaattygggttggygtttagtgtygatttggggtygttggttgtgtttagaggygtatttttyggattattygaaggtttggttttaaggtaggaggatttgtgggaagtatttttttygtgtygygtttggtttgttygggtgygtatgtatttttagygtttttttygygtttttgttagttatattttaygttattaaggyggatatagggtggtttgtygttatgyggttygygtttagataggggygttggttyggtggaygttagagtttggttgttttttttggtttggggtggggttgttgagtttatattttttgggtttttttgtatgtttttttygttgtttatttattttttttatatatatatatatatatatatatatatatatatatatatatatatatatatatatatatattttttttataggtttygttttttgttttttgtttttatttttygtgtttygtgtttttagttgagttggtyggtttygggtttttygtaygtagaygygtaggggttttagatttttttagtataatyggggttttygygtttttttatygttttttttgtygaagaagygaagaagyggtygattggayggtatagtaggggtygaggtttagagtyggtttttgttygtaggyggygaayggtattttgtttygttaggtttttgygggtgtgattygtgattygtagattttttygggygtttttggtttatgaygygggggttgttygttttaygtaggyggtttygggatgttttttygtttagattttagyggtagaaatagtttyggattttttttatttgggggaaagattgagtygggggttyggaattattggaagaagygagaatggaaagggaggttttggagygggggtttyggttttttttagtttgyggaygttttagttttattgagtttygttttagttttttygtttttttttttagggttttgtatttttttttttgygttattygtttttttygagtaygg

SEQ ID NO: 6910 - DNA, 3120 bp, synthetic construct
  misc_feature 1..3120: note = Description of Artificial Sequence: Synthetic polynucleotide
  source 1..3120: mol_type = other DNA
yggayggatyggyggaygttgygggttyggtygggttgataggaattatttgygttgttttaggtygtttttyggtttattgtttttttgaattyggtyggttttygygggtygtttgatgtttgtagggttatagattttygtatataaattatygtygyggggttgggggtggggyggaggygttgaaatttaattygtagagtttgtttygtygtygtttttttgttttttttttygttygttygaygttttttatttatttttttttaaataaggtttattttttttgttaaaaaaataaagttggtattaagtgtttygagggagaaagttttttttttatttttgatttggaaggaagggtyggttgtygattgagtygggattgtagagggggttttaggagaggaygggygggaggtgagtttagggtttttggttttatyggttttttttttygttttygtttgttygttttatatttaatggtagygaattttatggttttyggttatgttttgtttttttattygttttgttyggaaagggttttttttatyggagttttyggtttttatgttgttagagatggaagtattattttttgttttttttttttttttataaaatagtttttgtttgtygtttttaygaggtgatattttgtttttagttygattttttttgygttyggagtttgggttyggygygtaggagattgygtgtattttggygttttygatttttgttagggygtayggggattttagagyggattttttaygagttttaataggaggttagggagtygggatattagagataaattttttygaagttttttttyggttttattgattggagtttttgggttgaaattttaygagttttttatttttatgtttatgaggggagtaaaayggagttttygggggtaygtaggtttygtttttgggtgttggttttgtttttggtttttttagtyggtgtagtgattyggaatagygyggtygttttttygaygttygyggttttttattgygtygaggygagygttayggttaaagtttaagtttyggygttygttgygtttgtyggagttttgtttgttygagtaggtagyggggtttaggtayggyggygaygtygaagggttagtyggtagatagggttgggtttttgyggttagagygtygtaggaaagttttgtaaayggtgggaygagggtggyggyggyggyggyggaggtggygagaaaggygttaygggtttggyggagaagagggttttygtgggggtggaataaaggaatttattttyggaagaaaggggtygagtatgtagtygggaatggttaattttggagatttgtaggagtgygagygttgygatattagttttagggatttaaygaaatttgtttygtygagggttttagtttggtatttttattyggttttttttttttggttaatttygttttaatgggggtggtgggtgtgtattyggagtgttattttttttgggaagaggggatagagtaggattygtgttttyggttagaggaggtaaatatattttattaattttttttttatttattttttagtygtggggttattgtttttattttttagaygttgttaattaaggtattygtaaaattattttttttttygtttttayggtaaygtttyggtttttgaggtttaagygygttyggaaaygaaaagygttagggggttatagggtyggagtttttttttttygtygttttyggaaggggtggaggggatayggttgtaaggtgttyggttttttttttgtgtttgatatgaataaggggattaggatggtaagttttygtygtttatttygtgggataaagggtttygyggtttgagyggtatagtttttgattaaaygatagagttttgttatttagtattattttaggtatttgtgttygtgatataattttattagaagataaaatyggygaaattttttttataatgaaaagttatatttaatggtyggattttttttttattttttttttyggagtttgttygttttttttygttgttgttggatatggttygtttataattggtatttaaagtattaagttygggagaaaaayggggtttagggtttttgtaatttttttaaattgtttttgttygaaatttttatagatataagtttgttaagagtaaatatttgtggattgatataattatattttttttttgtaaattaaatttaaaaaaaaaaaaataagataaaaaaaaatttgttattygtygttttygggttggggygtaggagggagggggttggggtyggttttagtattygygtygggaattyggttttygggtygtttggttgtttttaggagttgagggatttygtaygttttttaggygggaaaagggttttagattttttttygtaatttttaattttttgtttttttaataaataaatttttygaatttgttgtttttggttagttygagggggtyggtaggagggtttggggaggggygagggttgtgtttaataaggaatgaaaatgttagtttttttygttagttttattttttttagygggagtttgtagtggttttaaggagaattattggttttttttggatygygtaaggttttatttggyggggtatttygattttagtttaagagagttttygagttattaagggttttygaaaygttgagaagttygaaagttgttgtagggttttggatttygggttttagtttagygygttttaggatygaatttttttataaattagttgttgggtgaaagggttgygttttagaaagggtaggatygtgtgygygtattagagygygyggtttttaaattygggttaaatttttggtgatatygaaatttattaatygtygttggtgttygyggttyggttgyggagtttaggagtttatgtatggtgttattttatttttagtaaagaatatgttgtaygaatygtygagaggtgggtttggaggggtgygygggtggaggtygttgaaagtygttttattygygtgttyggaygtygaaggaagttttttygt

SEQ ID NO: 6911 - DNA, 3120 bp, synthetic construct; identical to SEQ ID NO: 6910
  misc_feature 1..3120: note = Description of Artificial Sequence: Synthetic polynucleotide
  source 1..3120: mol_type = other DNA

SEQ ID NO: 6912 - DNA, 7861 bp, synthetic construct
  misc_feature 1..7861: note = Description of Artificial Sequence: Synthetic polynucleotide
  source 1..7861: mol_type = other DNA
yggattttyggtaygggttgggaggagtttagaggyggggtgagttttaggttygggyggtttagagtttyggtttagggggygtttaggttaggagtgttygtygtttttagttygggtggaagyggygayggtyggaygttygagttttattygygattagygtttttygtyggtttttgygtttttttgttttagttygygygtattttttatatgaggttgttgtttttgtagatgtttaygtgtttyggggygattaygyggtyggtgaaggggtttatttyggttttygttttgatttaygttttggagaagatgtygaggttttygttagggatggagttttgagygatgattattttygtaggtagtattaggttggatagtttttgtatttttgyggyggyggggttaggaaaatyggttagagttygaggtagtygaggttyggttttttttttttygtygggatttyggtttyggttttgtttagattagttaaatttaagtyggttttaaatttagagaagttattygggtgtggaggaagtyggatgtgyggaggtttaaygattttttttttgtttgtaatttggagatttttygtgttttggaaagygagtggtgygttggggattatttttagaagtgggtttttagttttttygygaatttttaaagtattygtaattttttttattttttgtttyggataagtttaagaattaatgagttaayggtagygagyggttttatgtatagggaaattgaggttaggttttgtaaggaggtgaaggttaatyggagattttttygtttagtyggttttygggagtttattgtgtgtttaggttttgggtattggtagaggagtygggtygtgattagygttggggatagatttygggttggtaggtgttggaggtgttaaagaagtatyggtagtagttggttaggttttgygttygttgtgtgatttygggygygttygagtttttttttgtttttaggttttggggtgttagggagggyggygttygggtttagataaatttygatgttatttttttgggyggggaggagtygyggyggtttttagtttttygagggtttttttgtygggtatttgyggtagggttggaagyggygaggygtataagggyggtttttatgttttataaggtttttttttaagttatttgggaaaatattyggygagygggtyggttgaaaggggggggttaaayggtgtttattgyggygyggygggtaatttgttaygttgttaaagtgatygtatttattyggttttattygaaagaaattgttaattttaaatttattagttttggaagaatgttgtagtagtaaattgtagtttaatgyggaggggatttgtttaaaaggggtygaggaattttttttataaaaaagggggattagatggttgatatagygtgaatggaagtggaattagtttttayggtaaattaagagaggaatagaaatygtaaagggggaaaagagggygaygygtagagatgttagagttagggaaagatattgtttgygggttgatgaatgaggaataagaatttgagatattttaaagaaaagaaatttttttygttttttttttttttttttygtttttttygyggtttttttttttygttygttttttttttattttttttttagtttyggttgttttttaaagtttttggtttaagtgggaattttygtgggttaagtttaagttaattaaatgaatttaaaattttttttttttgagttaattgttattataygtttagtaaggttgtaaatgtygggaattygttagtttaagygtaggaggggaagggaggggtyggygggggygtyggggtygagygayggggtygtyggggtyggtttttgagtygggtgggttgyggagttgtttggtggttygygttttggtttggtttatggggaaattgaggtgtatygagygtygggagagtttaggttggygygagtagtagygaggtygggtattttagtygygtttygygtatygttaggaygggaatgggggtygtygggaggagggattgygtygggtttygayggttggatttatygtyggagaaggattgygttagtatttyggyggtgaaggttgttttggggttggygtggtggtttttgttttygaagagttgtttttygagtaygttgygttagyggtygtataggaagttgtgtaggatgtyggaggtgataatttyggttagygttagtttyggygtttttagttyggttttgagtattagggttttagtygggagtayggagtttattatgggyggttyggagtttttyggygtygggggayggtygggtygaygggggaggtgggygggygagaggggagtttaaggggygagaggagagygttgygatggagaaggaattagagtagggggaggayggagaggaggaggaygtaggagggagygggaggtgagggggygattgggaggaaagygaaygagggggagaggggaagagagatggtgaaatttgtagagatggtaaaggyggygyggagggtggagagaygygggtggaggyggaggygggtgyggggggtgtagggtgggtgagaggygggtggttgtagggaagyggtagtaaggggtttaggygygygttagtttttygtatattyggtyggggtygttttttttttggtaaaattttagygtttttataggagtygtagtgatttttttaattggttattaatgattttttgaygtyggaggatagatttgttgtattyggttgggttygaggagttttygtygygagagygygaggggygggggygygyggatygttttaaatagtatttttttattttttttttttttttttggttttttttttttttttttgttttttttttttttttygtgggaagygtagggtagggagggaggtttagtyggttttgaggagaggaggggayggagaaggggagggggtgyggygaggttttttaggattttagggattaggttagataagaggggaygtttggtttygggtttygygttttttttaggtttgatttatgtttatyggtttggtttagttyggygtttatttttattttgttgtttyggttggtyggtttagttttgtatygtttttttttttyggttagagttygygttttttttttttttyggttttgtatttttygggtygttatagtygtttygagttygygygtagttttagttgttaygyggattttttgtttagattgygttgttgaagtyggygtttygttttataygggtygygttaattyggtygttgtgtayggtygggtgygaaattttttygygggtttayggggttgtygaggyggggtygtagyggtygtyggggttggggttggtttyggtttgagatagttttatggaaggttaggttttyggtttttgyggggttaggtygggggtygagatgggyggataggaatygttttggtagtttgtttttgggaaaagaattttttaygggatatagggggattgaaaggggtttygagattttttttaggtgggagtaggygtgtttgagagygaagttttttagaaattgtaggtagtttygygagaggttttagtgygggttyggtttgyggttyggtttttyggttttttgttgagttgtaatttygggaagtyggtggygttgyggygtttttttttttttgttttttagtttttttttttttttttgtttttttttttttttttttttttttttttattttttttgtttattattttaggagtagatttgttttgyggyggtttygaggtatttyggagtttagygattttttttttygaagtaggtagttgttgagtttagyggaaggtttygttttttgtaggtttygyggttttttagtgttagttttaagtttyggattttaggttttgatatgttgggtgagggagtttattttatttgtygtatttttggtttttattattagtttataattttagatgtygttaatagaggtgtttggattttttyggygtgggttaggtttayggattagttttygttggattgtgtggattttttagattttttttttagygyggaggatttgggtggaagaatagygagttgattttttatgagygagattttgtttaaaygtttgttggtatagaygtttttttattattyggaygygttttggttaagagggttttatatttggygtttagattttagatttttggtttttagtttttgttagtagttttyggtatttttygttttygttgggaygtaaagggaggaaggyggyggtagttggtttttagattttgygttygggttygttygaggttggagtttaaggaagggtatatttggtagaaggtaggatygttgggtagggygttagtagagggtagygttgttgaggagggaggtgggttagggtygtygaattttttatttatttttygaygtagtttgtgggtygtatyggttttttggttagagttygagtttgagggggygtatggagttygatggtttttgtaggggagttttatyggggtttattttttggtttttgggaagatttaggtggagaggataaagtgttaggagygagggagaygaygtyggggagygttgttaggagttaagygttgyggtagtttttaagtttygaaagygattttagtttttttaggatattaaagggggataaggattgttgtgtgttttgtggattgttttttttttttttgggtttyggtgtttttgtttgtgtaatggtttgagttggattttgtgaattgaggtttttttgtttggtttttttttgggtaagattattttattttaygataatttygaggattttgttttttttagggttaygttttattgygggaagtttttaggtttgtgtatttttygtgttggggtgtagygtttgggttttgaatttyggtttagagttagaggtttggatttygttggygtagtgattaygggttyggattgyggttagggagttttatttttttttttyggattygtaagttyggagagtagtattgggagtygggtagaagyggagygtagaaygtttttttagttggtgygtttaaatttttatygygtttatattttgtgtttttagtttagyggtaaaatttatttggattttygttyggggaaaaaggagttygtaggtagygtttagttttaaggtgtattgaaatagggagtaagattttgtgtttatattttttygggaggagatttygaggggaaatatttygggtttttttagyggatgattygtgttattttgttatttttygyggggtttaggygyggaatgtgttygygtaaaagtttttttttttyggtygggtyggagtttttaggtttygtygtttttttygttygttggtygttatttggygatttttttaatatttatgggygttaatagagaggtttttagtatatyggtttattgtgggyggttygtaggatttgaataggtttyggtttttttttttyggygyggtttttygaggggtygggttaggagtgaatggtttygtttttygtttygygtttttttttttttttagggagaatatttttattttttttttygttgtygtygtygttygggtttttatttaygyggtttyggtttygggyggaaygaattaatttgtygyggtttttyggaggttattttygtygttygggtgttttttttttttgagtttaygggagtggagagagggtygtygyggtaggtygayggttttayggagggatattgaaggggaagtggaggagaagagtaggggygattyggaggggtggttgggtyggggygggtaagatagttttagggttyggtagtygttyggggttggttaatttttagttgttgtttygtttagggyggagygtygaggggaaggaggtygyggtttaagttyggaggttygttygttttttttttgaggtattagygygygttttttyggttyggttgaggtatttatgagaaygggggygtgtgggatagtttagggtttygtaygaygttttygttttygtyggtgygtyggggtttagtttygggagagttaggtttygatagtgygttttagggggaygttyggaagggyggtyggtttygyggtttttgygttttygttttggggttygggtttgggtgygggggaggggggtgygagtyggttaggyggggttaaagygtaygggttttygttttgttygtttygtyggtttttagaggygtagaaagaagtttattgttygtygagaaatatatttttgggggtygagtgaaagttygttttttttttgaattttagaagaaagttttttgttttygtttttyggagggagagatttgttttttttttygggagtttygygygtttttttttttygaaatatttgtygggggaaaatttattttggagggtagatygygttygttttaagtttggygaatttattaaaaagatattagyggygggggtaggtttygygtaggtatygatyggtyggaatgagttygaggaagaaaaggygaagaatgygttygygtygygtttagaygtttattygtttygtttagtttttgygttttagtttygtatagggagaggggttttygygtygtttygtattgtttgtgagtttygyggttygyggtttagtygtttttattygggtttttyggtatagtttttyggtaatttttttttgtyggtgttgygtttygttttggttttttttgygygtaggttttyggtygtttttttttttygttygttgtygtygygygtttagtattygygttttttttttttttttttttttttttttttttttttttagygtttttttttttygttggygtttygattttttttttagtttygtatatttttttygtttttttttygtaygtttttttttggttttttgagttttaatttttygtagtggtttaggaaatttttttttygygtggggttygygtygtttttttttttttattttygtttttygtaagayggtttagggttttagggygttttygtyggygygtataaaggygyggttggttgttaaggygggtgggggygaggtygaaaaaaayggttttaatagaygtgattyggggttaggtttgygyggggttgtyggyggagtggyggtttyggtttagtgaatggggatagyggtttttttttttattttatttttgtttttttttaatgtaattagtttttaaggttygggagagataaaggygygtttyggggygtttaygtggagtgygtaggygygaagtyggygtttygatyggtaggtgattggtaygygagtttttttaggygtttaggggyggaggaggggaagttttttttttgygtttttygaatttttttttatygtttatatttyggtttttaggttagygatgttagygttatagtttaggttgattaaggyggygggaaygaygggagagaygtyggggatattaggagatygggyggtgggagagatagaggygtaggtttttggaagtagagggggygagataggggtygggggagattgaggtaaggygatgtygaggtggagggagtagatgaaaggtygagtyggagaygtaggggtataaagattyggagatgaaggaagtagagggggagaggtayggttttygaaagagygg

SEQ ID NO: 6913 - DNA, 1434 bp, synthetic construct
  misc_feature 1..1434: note = Description of Artificial Sequence: Synthetic polynucleotide
  source 1..1434: mol_type = other DNA
yggtttygyggygaggggtttagaygaaggaaaygtygttttaggggygygygggyggagatggagtggtttaggttgggggagyggggagtagggtygttatygttgygtyggttygygaygtttgtttttgttygttttgtttttygtygtttttttgggygattygggtttygygyggygttygtttagttyggggtttyggattgaggagggggaggaggaggaggaggaggagtygygttaaggyggtyggygggygtatttaygtyggtgttgyggtttagygtttygtygtyggtygtygagagtttggtggtgttgaggtttattagygagggtagygtttgggatatttagttagtgattatggttatggtgtttagtaygatttygattttgagtagyggtatygatatygygtttygagttgtttttagygttygtttygagttggtatyggttttygygtttaggyggtttttaggyggygggtatygyggygggtaggggygtttggttgtgttttygygttttttyggttygtygtygttygttygtygtygtygtygtttygygygtttyggttatygtygtgtttttttygggygttagggaaggtggttaggtggtttttgttygtygygttttgygtttygygtygttygttttgygttttgttttgttyggttgygttttttygggttttttygtygttatygggaagygtygttyggttttgagygttgygygggttgygygygggggtygyggtygggaggyggggttyggtygggygggatygaygtaattygtttaggaaatgggtggattttttttttygttyggtttttygtygttttttggttgttggtagygaggtttgtaaattttagttygtttaggagttgggattagggtgatatgaggagayggatatattattatttttagattataaaatattyggyggyggygyggggattttagttgggggtayggttygyggttttttygtttyggggttttttttatttttaygtyggggtattttttttygattttygtagagggttygttttggggtaaaggttgtyggtagagagayggygtygttttgtttattggagttttttttygyggtgattygagggttttagttagtttgggtygtygtttgaaatttagtaggtagggtaggtttygaaaagtagttagattygygagggtttttagygttaggggggygtyggggtatyggtggagagttaaaggygtttttgygattttagggtagtygyggtgttttaaggttttgtttgggaggaagggagttaatyggtatttttgatatttgtatagtaaggygggggttggggtggtttgtygtggttygyggtgygtagtgagggttttgggagggygtatattygg

SEQ ID NO: 6914 - DNA, 5053 bp, synthetic construct
  misc_feature 1..5053: note = Description of Artificial Sequence: Synthetic polynucleotide
  source 1..5053: mol_type = other DNA
yggttyggtattttgyggtttyggtaygtagttttyggygttatatttattttttttgygtttygggttgagttttygtygattatttgttgttttygaggttaaattttagyggygggaggattttgttgttttttygatttttttttygggaattttagtttttttggygtgtgttttagtttaggtttttgtttttgggtygtttyggygtaggaagttgyggggtygggaygaaygttggygggaagttttgatttgggtttttttttatyggtgttygttttygggtygggtaygyggggyggtttttgggtatygtaggtttyggygtaaaggygtttagagttygtagtggttygggttggttttygygattttyggtttygtttygtttygyggtttygtttttyggtygtttygtttttygttyggttagaggtttygggttttagggyggttygygggygtagygtttagtagtattyggagtygtttggaygtyggttyggggttattgyggggtggygtygttgggttygggaaagttygggattggagagtggygaygtygggyggygggatttatggaggygygyggggagttgggttyggttygggagtyggygggaggygatttgttgttagtattgttggygyggagggyggatttgygtygaggtgggtgttygggtygagtggttgtatyggggagattaggagatttttaggttttttygggtttggtygyggaggttggtaggagttagaggatttgggygggagtgggygygaggatttyggaaygttygygtttgggygttttagtttgtatttgttgtagggtttttggtttgggttgttagggagtgagtgaggttgtggtattgygttgtttyggttagggagttttygggggtttagggtgggtttaggagatttttgtagttyggagttagttttttgggttggaggaggygtagggagtagtggyggggtagtgattaygggataggagggtttttaagaaggtygttttagtyggattttttttaygttttagyggaatagagttagatgtaggggttaaggtygagttgaatttygatygtyggttttttygaagttaggttttagygtttgygtttatagatattygttyggtttattttygtttagggttygtttgtaggaaaaagttttttttttttaggttttttagttttttggtggtattattttagtttttagtattttggtttttagggaatttgggtagtttttttygattttygggttagttggagtygtaggatggggaaggaggtttyggagttagtggggagtgagagggatyggtyggygggaagggggttatatttaggttgtgggggttygyggttttttatttatttatttatttttygayggtttttgggaggggttggtygygggggttggggggyggagagagggagggaggaaggaggattgygygttygygttygggagagttggtyggagygggygggttggygtttaggtttygtygatttygttatttttgatataggagttttygttagggttggagtygttatgtagygtaaggttggggtygygggygyggygyggggtgggttggggyggtttttgttygaygygggygtyggyggygagttgyggtygaggygttgttyggttygyggtgttgaattygygttgtgtyggtttgtygggtygtttygtttygagtygggttttygtttgygatygttgtttaygatggggatttygggygygtagygggttttygaygtttygtattyggagttgyggttttgtyggatgyggggygtatttatygtyggtttttygttattgygtggggaggygtagtttagtttttttygtyggaggtygagggagtttttttttggtgttttttatttattgggagatgggttggagtyggyggggtttatagttagggaggygggtgtaatatgttagtaaatttyggtttttttagygggtattttttttttttagagattttttttaagtgaagagggagtttttagtttttgatatttggaaaattygtttatagattygaggtttttatagggtatttttggatttttttagtgtggtttttttagggggtttgtagtatygaagtggggtgtggggggtagaagtagygggaagttagaygtttgagtaattttgayggtgttgggggtatttaygtttgatataaaggtagtggatyggtttgtttagtttatttataagtaattttgyggttgtttaatgatggggaaggtattgatatttatttyggaggtttgtagatagggttattaggtagggtagttatatttgygaggagtttttagaaagagtggttatgaygtttaatatgaaggagattygatggggtgttttagttttaggtgatggtgaagattygtttttttatgttttttgtygggttttagagagtagatttttttggggtggggtttttatttgagttttatatgtattttttttggtattggtaatattttgtaattgagtatttagtttygtgaaatggtttgggttgtttttttgtttatatatatttttagatygatgttagtttttttttagtttttgatataggatgyggtgtttgtatattttyggaatttgyggggttatttaagttggttggggaagagggtgtgtagggaaaggaggatttttyggtagttttgagttttgtgggtyggaggggagattggttygygttggggtgggaaggtggttttattgttttttggtttaygaggtgatttagaattttttygtgtttatagagatttygttgtgygttggttgtgattagtatattttggatygttttatttttaaggttttggatygttattggtatagtaagtgttttaagtgtagygattgttataygttattggtygagygttgttttagtygaggggagagygtttattgtaaggaygatttttttaagtgagtttygaaattttattttagtgtgggagyggagggtaygtttgttttagggatttttttttttataattattaaggttaggttttygaagtttgygtttttygtaattttagtttatttttgttatttaggtagggtattttgtggtttggttaaattaagggtggggtttttttatgggtgttttttgggtggttgggtttggttgggatattagtaagtattatttggaaaaaaaagtaatttattatttaaattatagaagtagttattagagaagatatatttttatttgtaggattttattggatttagttttttygaaattggtgatgttttagtttttaatgttggtatttagyggttttggtttagtggtttttatggttttagttgtggggtgtgagggattggttttagatgggtttttttttttyggatttatttttttagatttagtatgggttttgtaggtaatggyggttgggtttttygaggtttttttgagattgaggttttttttttagtgggagtgggtagttttgtttyggyggttaggttggygattattttgtagggtyggatagagttttttttyggggtygtttttttaggtagtygtttgtttttttttaattygttyggggygaaatgagtttygygttttygygttgagttyggttttgtgygtttygtaggygtttygggattaagtgygtygygtgttagttgggtatttygtttaygtaggtggtgygtygygtttaggatttygtgtattatttgtattgttttgtttgygtygtgtgtaagyggtagttggttaygggygaygagttttattttatggaggatagtyggttygtgtgtaaggyggattaygaaatygttaagtagygaggttagtygaggggaygaygtttttattttttttggtttgaaaaaaatggggttgaggttaygtttaggggggygttyggggaaattttttttttaagygtttattaagggggtttgggttagggyggtgtaggtagtaggaagtygaggtygggaayggyggagttayggatagattygygtttygaatygtttygttyggttygaagtgtgyggtttttygtttttggtyggaattatygttttaaatttttggtygygaaggttgggttatatttatatttttagaataaaggggagttygyggggaaattagggtgtttggagaagggagttaaggttgaaggygggggygtygtggaggtgygattttagggaaggygtygttttygttttygyggtagaattygtttttygtyggygttttttttattttagttygggtgttgttygtttttgttaatygtttttagygttygygtttttygagaagtttgtggggygggatgggggtgggtatttgaggtttygaygttttygygtyggtyggggtgggagggttgggggttyggtyggggtyggaggggttgtygygttttatygttygttygtygygtagaggtygaggttayggttaagyggtygygtaygattattatygttaagtagttggagaygttgaagagygtttataatatttygtttaagtyggygygttaygtgygygagtagttttygttygagaygggtttggatatgygygtggtgtaggttagygttygtttttgtttttttttygttygyggttttgggggttttygtagagtygggyggtygtttatttygtttygtttttaggtttggttttagaatygtygggttaaggagaagaggttgaagaaggaygtyggtyggtagygttgggggtagtattttygtaatatgaagygttttygyggyggttttaagtyggataaggatagygtttaggaggggtaggatagygaygttgaggttttttttttyggtaggyggagggatygyggagttyggggggggaygagygygygtyggyggggtygtaggggttttagggagttygygg

SEQ ID NO: 6915 - DNA, 6343 bp, synthetic construct
  misc_feature 1..6343: note = Description of Artificial Sequence: Synthetic polynucleotide
  source 1..6343: mol_type = other DNA
yggtagggygggayggggttgyggtttattatggaatagtygtataygtgaatttttttgttttgattttggtgggagatgygttygtygtttagatatttatagtygtagttttgtttttgtatgtygttygatattttgtygtagatgttygttgggatgggagggyggttttaggaygtgttttggtygtttttggaggtygygggaggaatttttagtygaaggggtttgaaattttagttttgaatagttttttttttaggagagaygaagttttttgaggttgggatagggatgaatgagygaaggagggtggaatyggggagggygygggaattgggagattgttggggagggtgttaggtygtgttaygtttttttygtttaggattttagtttgggttaaatttagtaggggtaggattyggagtagagygtagttygttayggttygtagtttygttttygtttygttagtttygtttttgtttygttagtttygttttygtttygttagtttygttttygtttygttaggygtgtttttggtatgttygtaggtttygtttttattatggtatttagtttatttgtagtygygtaygatttttttgttttttgtagtyggagtttyggagyggggagtygagtggattyggattagtatatatttgaagaygtygtyggagtygatgtttatattaggaatgagagygaggttygttatygttatgttttttttttyggagttttttttttttattygattygggggtygtttgtattgygggaggygggttttgygagagygaygattaatttygtyggggaatgttttttaaggtttagygttttagttaattgtatygtygatygaggtaygtgttgattaatygtaatttagttttttgtygttttgyggtttygttagtttygtttaaaggaaaygtggaatygggaatgggtggtgatgaaatttagttaayggagaagtttttttttagyggggttyggtggtatttttggaayggggtagttaggyggttygygaggttggggtaaygagggaggtttgagggatttgttagttttgattttttgtttygtaygtagttygaagattatttttttygtggtttttatygtttaaaggttttttttttttttttttttatygttygaaggtttttttttttttygttttttatygttygaaggtttygttttttattttttttatygttygaaggattttttttttttttygtttatygttygaaggttttttttttttttttttttatygatygaaggttttygtttttaatttygttatyggtataaggaggtaayggtagtygttatatttaagttttattttatttggttygaaagtttttgttttttggaaattatttyggtttaggggygttttyggtyggtttttaggggtggggtygaatgtagaggttttggggtagggggygyggggygyggyggygggtgggtaagygggaygtttggtyggtgtagaygygyggggaygagatgggygtgtygggtgygaaagtaggagyggaggygggggtgtttaattttttttatttggtgtttttttttttggtttygaagtagggttggggattttaggagggtttttgygtttggtttttatttttttttygtatattttattttttagagagttttgggygyggattagggtgtatttgggggataggtggaggtygggtygtygggtttgygtttttaygttygtagtayggygtgyggttagagygggtgtgyggggatttttygggataggttaagttttttygggtgggtttttaygtttattaattagtttttttttttatttgttygtattaygttttgttttttaggtttttatttgggaaygtttygttttttggtttttttttttttagttaggtgttagttttggttaggtttaggtgttttgttttttttgtttaggttttttgttttttyggttgggagatttgtatatyggtttgaagatttttttgyggttttttttagtttttgtagggtttagattgtagyggttggaggygaagggayggtagggygygtggygtggttagtgtgttggtttygattagygggaaygtattgygtatygttygttttgtttatygtttyggygggaygygttygygtatayggaygtatagaggtygattagggtgttttttagygaggaggtaatatagtygygggaggyggggyggggygtgtttaaagtgatagattgggttttggttaygtygggtttttggaygaggggaaatyggagtyggggaggttttagygagagtttygyggatygayggggatyggatttttaygggtggggtttgtgtagtagtgattttttygagtgaaggtagagttyggyggtttttaggtttatttygttttttagyggggagtatygagggygaggatygattttttttggggattttygagggygagttgggagagggaggaggttyggaggagggagaggggttgttgggggtgggaaggygaagggtttgtgaggaatattayggggaygaagggtyggggggtgggggtttgggyggagttggaggtygaattgagyggagtttggaaggttggggaattagaggyggggtttagaagaagtyggggtggggttttggyggggttygggggyggttttgggtgggtygggyggggtttgagtgggtagggtagggttygggttagygtttgggttaggtttggtgggttyggygttttatatgatgtygtttagtaggttggygttggttatttagtygagygygygyggttyggaggyggttatgattatgtatatgaaggggyggtyggtgygtyggttygtggggtagatggtggtgggygtgaagygtttgttggtttygaygaattygtaaagttgttygtagaygygygggaattygtggygtaggaagaygtygygtagtygtagttygygttggatgtggatgaaggttatttygygygygygtyggttygtttygtygttttgatttaggttygtygtgttyggyggtggygttaggattagygtttttatgtygggttygyggtttygygtygggggyggtygygyggggttgtyggtygttagygttattttggygaatttgygtattgttggttygtggttgygtggygygggygygggtagggtyggtgttttyggtggygyggtgtygggttttayggttayggataygttgagtaggaagtattttgtyggttygtagaggygtttagyggtygttagttygygygygtagttgtttaggggygtygygtgtgtggttagtttaygtagygataggtaggtgggggatagtagtagtttttttaggttaaagygtaggaagttgtyggtygagtttggatttgggaagtttaggaagagtaygtygyggtygygygataggaagtygataygygygatgygygagaaagygyggtgtatygggtygttgtygyggtaaaattgtagtaygtggyggtataygttgtttaygyggtygtataygtagygygttttgtgggygttttagttttygyggyggtataggygygagtagtagtaggtgtagtagttgtggtaggatttgaagtagaggtaggygttgaatatggtttyggtgygtyggtagygygtattggagtaggttattaggtygttttygtyggygttgggttygggggaygygtyggtygtttttttyggggtygygggtttttyggygttgtyggtygaggyggggggygagygtggyggygttagygygggggtttyggagttygygggtygygagtttagtagtyggygtagttgggggtttaggtagtyggtygygggttttgaggtttggtyggyggtgggtygygagtygatgattaggttygtgatgagttygtttagttgttttaggtttygttggyggttagaggtggggtygtygggggtygygtggggaggtggtygygtgyggttttygggtaatttttaggttttggygttygggygttyggtggygygtaggttattgttagtgatggtgatttygggygttaygtattagttgyggtttaggttttygttygygyggttttttttygttagygaygtttyggatagggatagtgyggygtagygtttgggagaggtggataggtttaygaygaygggygggygtyggttttygggggataygtttygyggttttygtatttygygttttagtaggttttygtagttgyggtygyggtttaaygggttttttyggygyggtttyggggttagaatgttgttttaggagygygagtagtggyggttgtyggtggttagtyggggyggattggtgtyggtgtygtygtgttaggaggygagtaaygggtyggggttagagggyggtattatttgtagggtgyggtayggtygygggttttagttygtttaggtygggttgttgygygggtgygggtaygttygagttaggaygttaygttygyggtatttttygaagtttttygtgtaaaaggggygggyggtggagtgggttyggggtttttyggggatatagyggggttygtagggtaggtygtaggttygtggagtttttttatagtaggagygggagggyggtttttggattgggaaggtgygtattttttttgygtagtagtygtttatgygttttggattgggtttygagagtttttyggayggatagggtttggggtagtaggygtygaaggttgggtygggattggttgtaaagttgtttyggaagttttggggtttttttgtatagaagaattgggtggggttyggyggggtggtgaagggtagattgyggygttyggygtagtttyggggtttaggtaggggttygtygtagtagaaygttyggggattygtatagtatgagtygttgggygtyggggtgygygatagygttatgtggyggggttygggtatygtgaggtygtggaattgyggggyggggygggtttagtgygyggtttyggtgggttygtaggatygygagtttygggtggygtgttggagtattgygtygtttggtttgatgtttaggyggtagygtaygtggggggygggattygygggtggttygggyggtgygtagyggttygyggyggygtataggggygygaygyggtyggggtygtttygttgyggttgtaatttgatgggatgtagttygttggtaagggygyggagygtygggtaygygggttttyggygyggygatgtttyggttygygtygtaygttgggtttttygttttyggyggggtaatatyggyggygaggygggygygggygttaggttygggggygygyggggygtatttttggagygggygyggyggygtggttyggtttygygggttygggygygyggtatagyggatttyggyggyggtggtttyggtagggtttttatggtyggttygtttagygtttttaggaagtygaagttgyggtagtggygtttgttgaaaggygygggtttagtaggtygggttayggatygtttatatggygagtatttggaygygggtttyggggtygttattttgatgttttggtatayggtygatattagtaggttyggagggttygtaygggttattttaaaagaggtttttaggttggyggttttagtttatattgttttgyggggtttttgttttggggggagaygygggttagggyggtttttttygtagtttaggtttygttatttttttaygttggttyggtttatttggggygtagygggyggagtagttttggttgygggtttgggtygagaaygygggygttttttttatgtyggggttagaagtatttgygggaggaatttagttgtttaggygttygttttgttygttttttygttttttttttgygatggggygggygggttagaaaggtttagtygtggttgtggttttygyggygggagttttygygtgaagttttagggttttttttttttygattagtgayggyggggtyggttygggtggattttttttygggtggggtaggggagtgggggygtggttttggggttgygttttttggtgttygtagttggaaggaygggtygtatttgggttttatttataggtgttgttttaggagaygttagtgattgygttttygttatagygtttattgtagagygattttttygatygygtatagtggaaggyga

SEQ ID NO: 6916 - DNA, 1089 bp, synthetic construct
  misc_feature 1..1089: note = Description of Artificial Sequence: Synthetic polynucleotide
  source 1..1089: mol_type = other DNA
ygttgaggggtygtatttattygygtaggtattagtaggtagttttggygttygygggaggyggtygggggygggggtttttyggtgtttatygtygtttttgyggttgggttygygtttygggtyggtygagtttaaygttaggatttygttygagttttttagggtttygttaggygtygygttygygttygygtttttttgtyggtttyggttygggttttatyggggygtagggttggggaatyggagtttygttygtygattyggagtatygtttaygtagattygtttygggygagggaggggtygggygygtattygyggggagggyggygagyggggattagtygaagtygggagaggggygtttttayggggygggaaattggygygygattttgggggaagtgtaggatggggggataggggygttttygygggggtggatgggggattatagyggggttggyggggtaggggtyggygtaygaggttggaggaggggagygygygtttttattygggttgggtygtygaggttygyggygtatygtggyggyggtgggyggaggggggyggggggtatttttttttttttgtggygtaggtgggygygttttggatyggtttgaygattttttttygtygttttatttttttggttaaaggtttttagtttttaattagggatatttttagtttatagtttygaagttatgggtttttttyggttttttgaagtygttatatttgtgttagtyggtygygtttttagattttttttygyggagtttttttagtatttggagaygtagygtagggtttygaggayggtttggttyggagaaaagatatygaagttttaattttttttaatttygttttttttttttttttatttttttttttygtttttaaagttygggggttttatttttttttyggttygyggagtttttygaattttgyggggattyggygttyggyggtgtttttttggggygtayggggttggggygggagygaggagattaggtggggaggggattttagattttagaygttaggggagayggygtttttygt

SEQ ID NO: 6917 - DNA, 1020 bp, synthetic construct
  misc_feature 1..1020: note = Description of Artificial Sequence: Synthetic polynucleotide
  source 1..1020: mol_type = other DNA
ygtagagatygtagagattaaggaggygttygyggttgtagagttgtagagygggattttttygagttgtttgtgttygggtagtyggygygtaattgagttagaggatagygtattttttyggygygggtyggtagggtttttgyggtyggtaagttggtttttygggtggttatygggattttygagtttaatggygggggyggyggtaaaatygataatattgtagagattatttttatttttaayggagtaagtgttygagttttaggtggygaygttatttttttttagtattttygttttygyggagygtttggtattttttttttgygtatttttygtttttgattgtttttttagtttttttttttatttgttttttgtttttgttttgyggtttttttygttttattttttttttgttattttttgttttttaatagtaggtygggattttyggagatgyggtgtttayggagtagttgtagggtgagygggagygygagygggagggggagggagaygygggyggygayggattgggtagtagtttgtygttggtygtgtttttaggtttttttagttttgaggygttgttygtttaggtgggggygttgggyggyggttagtagttgtagttyggtttttgttgtttgtyggtgtttttygtggttttgggtatggtttyggattttatttttaygttggygttttygttgtattgttattayggggtttttttttttaatgtttttggttgggagtagttttttaatgttagyggygttagygtygttagygttgttttagtagttagygtygttagtygtgtygttattagtatygatttttygtgtagyggtttygtttygtyggattttaattattgttttaaggattgggattataatggtttttttgtgtttattattaaygttatyggttaggtgaggyggttaggygggtygygggtttgggggygggtagagagyggygagggyggggttttaygttygt

SEQ ID NO: 6918 - DNA, 6343 bp, synthetic construct; identical to SEQ ID NO: 6915
  misc_feature 1..6343: note = Description of Artificial Sequence: Synthetic polynucleotide
  source 1..6343: mol_type = other DNA

SEQ ID NO: 6919 - DNA, 1109 bp, synthetic construct
  misc_feature 1..1109: note = Description of Artificial Sequence: Synthetic polynucleotide
  source 1..1109: mol_type = other DNA
ygatatagggtggygtgtagggagygtgttttggtattaggygggygygagggggtagggygtaygttygggataygttttagggaaatygtttttgggtttggtagttgaatttagaygtygagtgtagttygttyggtgygygyggygttttattgttagatttyggaaattagttgttagggtggggtygygttttggygayggttattyggttatttttgtygttttygttttttttaagagatttttttagygggttaattttttgttygggtaaattttttggtgagtttttygttttttttttttygttttttttttttttatttttgttgtttyggttttttagttygttygygtygygttttatygttttygtaygttygggygtaygtttttttygttygggtygttttttggtttttygygttyggtagttagtgttttatygygtygtttygygttagggttygtttygagagtygtttttttttygtygyggtyggygygggtttttyggttatgygttttygagttttagtttgygtygtygyggygttygggttttgtagttttttgttgttgttygygttygggtaygygtgtttygygggttgygtttgtatygattygtatatygtggattgtygygatygygggttgtttagygtgttagattttttttttttggaygtgygtaagttgttggtggtyggtaatygtatttagyggattttygaggatttttttattttttayggygatttggtttatttggattttaggaataattygttgygttygttggaggagggtaygtttagyggttyggttaagttygtgtttttygattttagttataataatttgatttagttgggygtyggygtttttygttyggtygggaggttggtgaagtttagtttggttaataataatttggtgggygtgtaygaggaygttttygagattttggagtygttgtaggtgttggagtttaaygataataatttgygtagttttagygtggtygttttggtygygttgttygygttgygttttttgygtttggaygggaatttttggttgtgygattgtgatttygt

SEQ ID NO: 6920 - DNA, 1109 bp, synthetic construct; identical to SEQ ID NO: 6919
  misc_feature 1..1109: note = Description of Artificial Sequence: Synthetic polynucleotide
  source 1..1109: mol_type = other DNA

SEQ ID NO: 6921 - DNA, 1384 bp, synthetic construct
  misc_feature 1..1384: note = Description of Artificial Sequence: Synthetic polynucleotide
  source 1..1384: mol_type = other DNA
yggaagggattygtyggttgygtttygtttaggttggtyggggtyggtgtgatygtgtgatttygtgtatattgygttygggttttygtgaatgatagtagtttgtaatttttagtyggagagtagyggtggttatygtygggyggaaagggttataagttagaatgtaaagygatttygtttygggtgtgggggatttygggttttyggttattttygaggtygggygtgttttgttygttttttttygttttgggygtyggggygattttattttgygttttaagttgggggttttttatgttygtygtygtygagtttttygtygtygaggygttggtygyggttttygggttygggtyggggtygtygtygtygtttagtttygttagttttyggttggtggtygtgagttyggttygtaggttggttattttttggttggtygattggatygttttatygatgyggagygygagttgtttattgttttttattatgtttaggattttggtttgggggygagagaggtgataaagagttgtatgatgygyggggggygygyggtygggtattttyggttttatttgttgtgtttttygyggttyggtttygttygygtttygatttttaggtatyggtagygtyggttttttyggtataggaatgatagyggygtttttagttttagtygyggyggtggygaggyggyggggggaggaggyggaggagaaaaaagaggaggagaaggaggaggaggagtagygatygtygagatttyggygggygggygtygagagttgttttaagaaggatatygygygttattaggtattttttaaatggagtttattattygtygtyggttygggagggggtttyggtyggaggttgggggtatttttggtttttygygttttygtatttyggagatatatttttygggggggyggaggyggyggayggtagtygggagggggttaaggtggygtttttggygaggggtaggggtygtttggatygaggtyggttttttgtttttttttttgagyggtggggtagttttygttttggagaattggtgtttygagtygtgttaaggttggggaggtgttgggtgttyggaagagagggtgtttggaaagggggttttagaggggagtyggggtggatttttatggaagggagaygtttgygttagtttaggagtggagttygtgttttatyggttttttaaattgygagtaygaaatttttagaggggagttgagttggtgtttygygtgttttttattttttattttttattygtaggttagatttgygttgtttattttaggagggagygtttatttttttyggygtgggtygttggtgttttygt

SEQ ID NO: 6922 - DNA, 1384 bp, synthetic construct; identical to SEQ ID NO: 6921
  misc_feature 1..1384: note = Description of Artificial Sequence: Synthetic polynucleotide
  source 1..1384: mol_type = other DNA

SEQ ID NO: 6923 - DNA, 835 bp, synthetic construct
  misc_feature 1..835: note = Description of Artificial Sequence: Synthetic polynucleotide
  source 1..835: mol_type = other DNA
ygtgaagtyggygttatttagtttttttygttaattgtttatttttttyggttattgtttttygagtgtttatygagtgttygtgggttagygagyggggtygttggaggaaggggygggtgtgtttagggttggyggygggttyggggtttttgggaggaaagggtygttygtttagttttttttyggagtttagagayggtttyggyggygygggtatataggggtatatagygyggggyggagggagggggtggyggtatygttygtggagggygygggttygtttagtttttygtatyggygttttttygygyggtgtttttttygtatatttataygtatttatttttatagttatatattttagtatttgtaggtataaaygtttgtagggatatattaygatatagatatttaagtatatataggtatyggtttatagattygtttttgagttatatataggtatyggtttaaaggtataggtaggtttatagattggtttttgagttatatatagtttagatttagatgtatatatatagatgggaaygttygtttgtaygtgtatagatatayggatatattygtatattatygyggggtttygagtatataygygtttyggtagaygtttatagatataygtagggtygggagygtatatatatagatataggtttatatagatagattyggttttaaaaataygtattygtagaggtaaaggttagygtataagtaygtatagatatatygataggyggttttyggatatygygttttttgtygtatttayggtttaygtaagggtttatatayggttttaygg

SEQ ID NO: 6924 - DNA, 2248 bp, synthetic construct
  misc_feature 1..2248: note = Description of Artificial Sequence: Synthetic polynucleotide
  source 1..2248: mol_type = other DNA
yggttttygggttagtttttygttgttatygtygtttagttagygttygtygygtgggagtygygaggttaggtttygtagayggygggttttyggtttygttgttttyggygggygygttttttttagttggttyggtygttgggttgtygtygttttttagttygyggtgttagttttygygttttaygtttggttttygggtttygtgttttygtagtagaagggattggggtyggyggggygggtggggaygtttgggaagygaggagagttttygtttttygggygtttttttataatggggttagggttttttttttygtttttygygtaggtgtgagygygygagtgtgygtttyggtaagtgtgagtgtgaagtgtgtgtgtgygggggagtgygyggagggagygygggyggygggyggygygggaggygggaggtagggygtaggggagggggttgggagggagagtgtgygygygtgtaattttatttyggggttttgtgygagttygggygatagtatyggyggyggttggaggaggagyggtyggagaygygtgtagttygttygttagagttyggtagtyggggtaggtgggagttygygygggagtygagtygaygygagtyggagtyggagtygagttygagyggagttygggyggagtttaggagtttygttygygggtagttygtgggyggtagttaggyggggygggygtyggyggggyggttttttagtaagatgtgygyggygtygyggggygttttttatttgtagyggygttygggagtygggyggttgggttaggyggygttttyggggttgttgygygttygygtttagagttgtygttttagggagttygttayggtygygtttygggtaygttyggyggygtttaaygatgatygttttttggyggygttttyggagtttggtttgggaatattgggtygggtttttygtgtgygttttttggatttyggattygygygggatgttttaygttattyggatyggtaagygttttttggagtygggggttttygtgygttygggagggggygggaatgagggggttttttaaygygtttyggagagatttttttaattttttttygagttgttgagtygatyggtgattattaggagtttttttttgtgaggataaagttttagagtyggggttaygggttttatttattggggaggaggtygtygggtygtagtgggygaggggtttttggygygtttttgggaggttagatttggtatagtgtggygaaggtttttagtgygatttygagtygagggygtatttygyggtgattgttagtatgaatygtagtygatygagttttgygatygggttttttygtagagtggggattttggggaaggygttaattttttttttttgtttattttatttttygygggtttttygtttttatttttggtatagttygagtagtygtagygaggtygtagggtatagattygtatgaygagggtagtyggtttttttttttggtggtygtttttggtttyggtggtatyggtttagtttygtgttatggggygggggttgggggagtaggatttygttgttygttgtagttggtttttyggggttaaggtttttttttygtttggggtagtgtaggtagagggaagggaygatggaggtygtttagtgyggttygggtaggyggtttagggaygttagyggtttttaaagttagttygaattttttygtagttggyggyggttggyggggttgygygyggtttttyggggtttyggttttttygygttttttttygtyggagatttttatttyggtttttaattttgttgtggtygtttaaggtattttgtaggtttgagygtygygtatgtttygggtygaygatyggtagggttgggtttggtygggttaagayggagtttttattatygtaggttttgygttygttattaggtyggatatttgggtygtttgggtttattyggygttagtattagygtttggtattaggygagtyggatttygtygagttagggttattttttttttttatagtttttttttagggyggattttgggttgttagyggygtgaaagaggtgtyggaatyggtgtygggtttggttttygtatttgagatttttttaggaggyggttagaaatttagygggtgggtttttttttgggyggtygttygggagtygg

SEQ ID NO: 6925 - DNA, 3541 bp, synthetic construct
  misc_feature 1..3541: note = Description of Artificial Sequence: Synthetic polynucleotide
  source 1..3541: mol_type = other DNA
ygaggttggatagttttyggtttgtaygtyggatttttggagagttygagttttttttttgagtttattttttttttttttyggggygtgattttattaygattatagtygatgagtygtttaagttgggagaaggagygagaaggttgtagyggygtaggttagatatttttgggtttaaygtttatttttaattagygtttttgttagtagygtttttttyggagttatagtttttatttygagattttttttttttggaatttyggagygyggtygggtattaggggttygygtaggattgtagaatygttgtygttygtygttttagttttagttgttygygyggtatttatttgggttttagtgttygggagaaggtgtgttygygygaggygtgaagttagagttygttygatttygttygtatyggaygygtttttagggtagaggaggtyggyggagttgtgaygttgggattagaggaaggagaaggaaagtygagaygggtygggtagaygygtygaggagygtttagtgtaygttggtagtygygggaggygaggygggygyggtgagtagtygygtyggaatygagtygygaattygygtygtttygygttygtagtygttaggattygygggaattttggttygtyggtagyggtattgaggagggaggggygyggggttgagtygtttttyggagttygagygtttttyggagtyggtaatttttgttgttygggygggatgygggygggaatttagttygygtggaatgtgggatyggtygggttyggagtttttagygttgggggaaagyggggtttatatagttaggaygagagggggtgyggttttagggttattttygygttattttttaygtggyggtygygttttyggggygtgagtgtgtaygyggayggtaggggggtygtgaatgaagttttagyggttaattagtayggtyggygygygggatttygggagygaygtttaatggagagttttgggtggtygggtagggtggygggygggygygyggggygggggtygggtaggggaggygggaggtagtttygygggtagttaatgggyggygggyggggtggggtttyggagygtygagygggtyggggttttaagtyggyggagygaggyggyggggttygtagayggagyggagyggyggyggyggygyggygtagggygyggggyggtatggttattatygygtagtatttgtygyggggtttyggtggyggagtygggggtatygggtygtttatgtattyggaygttgyggyggyggyggyggyggyggyggtygyggagygattgtatgtaggggtygygtatygygaagtgtagaagttgatgtattaygagtggttgggygygggygygggttatttygtgggtttagygtatttttagtggttatttaygggaggaggyggyggyggygattgggtyggyggttygtatttagaatayggtaaggtaggyggyggyggtatyggtygagtygaygayggyggyggyggyggaggtttttaygygygtttggtgtattagggggyggtttaygygggygyggtatgggygtagggtagtatagygtattatttgggttyggttatgtygttttygttyggggttagygggggttattagttttagtygttygggttgtaygygtaggyggtttattyggggggyggyggyggyggtttggtygggatgttggyggygggyggtggyggygyggggtygggtttgtattaygygttgtaygaggatggttaygaggygtagttggagtygtygtygtygtygtatttgggygtttayggataygtatayggatatgtataygygggyggtttgtaygyggyggyggygtatttgtattygggygygggyggyggyggtttatyggtgggygagtattyggaygaggatgygtttagttyggaygatttggagtagttygttaagtagtttaagtagyggygtattaagttgggttttaygtaggtygaygtggggttggygttgggtaygttttayggtaaygtgttttygtagattattatttgtygtttygaggttttgtagttgagttttaagaatatgtgtaagtttaagtygttgtttaataagtggttggaggagatygattygtttagyggtagttttattaatttggataagatygyggygtagggtygtaagygtaagaagygtaygtttatygaggtgggggttaaaggygygttygagagttatttttttaagtgttttaagttttyggygtaygagattatyggtttggtagatagtttgtagttggagaaggaggtggtgygygtttggttttgtaatyggyggtagaaggagaagygtatgatttttgyggtyggygygggttattygtttatggaygatgtataygygtttggggagttagggtttggygggggyggygtatygttatttttygygtttttatygttttygtyggyggygttgtattattattattattatatattgttyggtttagtgtagtgatttygygggtygggttttygtyggygygttgtagggygygggygygtagttygttygygyggtttggattttttttgttyggttgttttggattttataaaaaaaaaaaaaagtttagaaattttygaataaaattaaatattyggaygatttttttyggtgagyggygaagatagttyggtaggttgygtygttygagtttygggagagaggagygaagattyggaattygttaatttatttygggtattttgttygtygtttgttttttgtttttattttttygaygattttygtttttgttttttygggttgttyggggtyggatttyggtagyggtttttttaaagygataggtaaygtagtgyggggttagggatttttygggagagaggaygaagygaggagagttttttatttttttttttygygtggatttttgagtttgygggtttagggtggggggttgttattttattygttataygtttttttttttttataaggatgygttttatttygttttttttttttttygggtttggttttttayggtttttatttattygtggagtttttyggtttttggggtttttttaatttygttygygtttttaatttaaatygtagtatattgtatttatyggggtttyggaggggaggtygygagagtygygtttgtgtataaaagtaggaaatagttaaagttttaatttagtttaatttatttttttttttatatttttttattttattttttttttaaaaaaaagtaaaaaaaaaaaaaaaaaattaataaaaaaaattygagtgtttatttttygtttygttttattygagtttyggtttggttttyggttaygtyggaggggtttgygtttttatatatttagaygggaaggggtttttgttttgttgtagatygatygtygtatagygyggtttttgtttttygygg

SEQ ID NO: 6926 - DNA, 1513 bp, synthetic construct
  misc_feature 1..1513: note = Description of Artificial Sequence: Synthetic polynucleotide
  source 1..1513: mol_type = other DNA
ygtaagaayggtttagygaattttgtgtaggggaggygtygaggattggagaggttttgttaagggtttygttgggyggaaggygygygtttttttttatgggaaagatagatgtggggttaatgaaagggaggtygagaggygyggggayggtyggggagaygggggygtggyggggagaggaaagttttyggagaaagtygatyggattatygtaagygaggtatgtagyggagttyggaggaggaaggygtyggggattggggtagggttagggygggaygggggtggggggtgtggggggtattataggtagttggattygagggttttgagttgaaatttaatattygtttttggaaggatygtttttttttttttttygttttttttttttttttttttttttttttttttttttttttttaatttttaggayggagttttgygygggagaggagagggtttgaggggaggagaaaggaatagtattgagaggggttaggagtttaggaaggggagggaagggtagtygygggttaggggtgagtttgygggttaygygygattttyggagttttygtagtttttttagtgtttttatttttagtttaggygagtttataggattygggtttttgtttttttttygttttttttttgtttttttttttgttttgtggtttttttttttttttttagagatatttgggagttgtttttaagttttggggygtttygyggggttttgttaagggtgygtgtgagagagggyggyggagtyggygtygggtgttaggggtygagggtgggagygggagttygtggttttgygttttggagtygaggattggaagggggttgggttttttygtygtttgggygtaggtygygygtygggaaggtagtttygtttgttttaggggtgtttgygtgttggttgttgttgttyggggygaggygtygtagyggygattttagattttygggygygttgagtgagtgygygygtgaaaatygtygtatygtygggggtgygagtgtttgggtygaagyggttattttagygatttagttttayggttaygttttygggggtttttggttttaggtaatttggggtaagygttttagttttygtttttttttttttttagyggggtygtygtagattttagttttgggagtatygttttgtagygyggtyggygggtggagayggttggtttttaaattygttygtttagtttaatygtttyggyggttttttttagttttygaggtttttttgagyggtttggagaggygtygagygtagtttagygttygtttgtttattygtttyggttygggaagggaattttyggattttgygagttyggggygttttygyggtttagggygggtagttttyggggtttggtygagtyggtggygttygggaggtygyggggatagtaygtagygygygtttttggatgtygtttygtagygaygtttyggttygtttygt

SEQ ID NO: 6927 - DNA, 3541 bp, synthetic construct; identical to SEQ ID NO: 6925
  misc_feature 1..3541: note = Description of Artificial Sequence: Synthetic polynucleotide
  source 1..3541: mol_type = other DNA

SEQ ID NO: 6928 - DNA, 558 bp, synthetic construct
  misc_feature 1..558: note = Description of Artificial Sequence: Synthetic polynucleotide
  source 1..558: mol_type = other DNA
ygtgtttggttttyggaaagtgyggaygagayggtgtgggtgggttaggagttatttgtaagggtgtttgtaaatygtgaagtttagaggagaaygggagaaggatggaatygagyggagaggggaggtgtatggtaagaatttygttygtttygggttgaaggggagttgtgggtyggyggttaaygtttgaaggagaggggtttygggtggygggaggyggttggggattygygtaggttagygtgtyggttttttttagtttatygttgtygtygtyggggttgttttaagggagttaagyggagtgggagygggtttgygygtttttgttttgygygtaggggygggggggtttaggayggggygtttttttttatttatatgttgatttaggatttttaagyggttyggtttaggatatygtttggaaatttagtygygtgggagagggygattttatttttaatttttttgttgtgygtyggtttagtttttagaagttagyggayggyggaggaggtggttyggttttttttggtggttttgygttttygg

SEQ ID NO: 6929 - DNA, 7244 bp, synthetic construct
  misc_feature 1..7244: note = Description of Artificial Sequence: Synthetic polynucleotide
  source 1..7244: mol_type = other DNA
ygtatttgttgggtygtttygggttttygagttttygtggttatatttttggtttttgygggattttyggttyggagtggggaaattttayggtgatttggttttaagygagaaggatatttgggttatygtttttttaaaagttaggtagatttgtatagtttatttygttttyggtttaatagaatttttygaaaattttgtttaaaggagttttgggagtaggygtttggyggtttttgygyggaattyggyggttgtyggygtttttttttygattttatggtttatttatttaggtgtagtyggggttagatatatttggtttyggaatttttaggtgttggaaggtggggtttgggttttgygtttttagaggatatattatttttgaagtatttttttatttttattttaygygggagattttygygggggttgatattttttttttttttaaatttatttatagattttagtaagtggtattttttgggagygagtaattagttttttatygttattatagattttgttygtgtyggagygttttygygtyggggtttggtgaattttttggaagtttttygttyggttttttagygaattatttttatttatttttttttttagttttagtttttyggtgggtattttttagggttttttyggggygttaggttttgyggttttygggtgggggttygttagtygtatygttttttttttatttttatttttgggtttagaagttgatagattgataagaygyggtttagtagtygtgttaggyggaatgggttgygttttgaggtygygaygattygggtygagtttgygygtttagattttygtyggtttggaggttygaaagagtaaygtagagaygtayggttaagagtggagggagaaygataggaaygtttattttttttattatttaaaygaattttttttattttgaaggagagagagaaaagtagagaataaaaaygagagtgatagaatattagaaattagagggaaaaatagaattagagggaaaaatagaattttagaaattagaggggaaaagatatagagataaaattagagttatagaaatygagggygattygttygagggtygyggtattaattttagatgtttgaaaggtaatagttttttaaaaaggaaataaaatttgaaatttgttattttttttgtagaaygagttgttttttagggtygtgatattaagataagaygagaataaggygaaagttaaaattgaaaattgttygagggggttttttagtagtgattttgttttttgtygggaaggtyggatagatygatgygygttttgagtttaagagaatttgyggagatatagaggttattttttattttygtttagaaaagaaaaaaaaaggggggggggttatttgtttatttgtaataaygataaaaagaattttattattayggaaaagaaatygagatgttgaaaagtgaggaaaagagagtttaaaaggggttgagggaygygaaaagaggggyggggagaggaaaggtttagggygygagggaygtggygggtatygataggaagtgtaattttattttttttygttgagtttttttttaaataygaaaatttttataaattatatttattttttaggatgattatygtattaggatttttaaaataaagtaattgagttttaaggagataggaggaaaaaattaaagtagtttttaattattttaaattygtyggatttgggagygygtygaaatatagtaggaagaaggtaggaaaaatygttttggtatttatgttttgaatatttttttttttttattttygtatttttgtttygtttttatttygatygtagtaattgaattgttatttgttttttatttygttttagggttttagagttatttgggaagttyggttttgttaagygttttaggttagtaagagyggtgtagtygagtyggygttttagaagtygagaggttatataagtttaygtagagaggygtatyggatayggtaattaggagtaatttataygttttygggygtayggaaattatttgttaggaaatttttaaygttttttttygtttatttttttttattttttttttggygygttttttttttttttagaggtaygtagtggagtttttggagtttygaatttttyggatattgtagaatgyggggtttttygggygygggttyggttaattagagygtygtttgttttttttggttaatggtaggygttatattgttgtttaattttgtttaatggagttttaaggattaataatagagygggygagyggtttattgagagtttggtagygtygggtaattgggtttyggttgygygtagygttyggygygtatygygaggggattyggtayggygagagttaggtygygggttttaattaygyggttygtagaygagttttygattyggatttttgaagggagggttggattgygttgygttttgaggggttyggaagttyggatatggtgattgaaggagggtgaygtggttagataaggggtygggggtaaagggaagyggttaagagttttagygtygttagtggagtygggaggygygtgtagygttagyggaggaggaggatttyggagtttaaggtaggtagttgagggtygtagggagagtagtgggtggagatttggtttgyggtttttgttgaggaggtttgggtttygtgggttttagggaygttygaagggtttgggagaggaggtaaygtttatagagaggaggtttgggattttyggayggagatataaggattttgtygygggttttggtagggayggggaaygygggaagtagaggagatygyggtagaagyggggagttgggtttgtttgggttttatggggttgyggygtgggagggattttggtgttygtttatggttagttgygaaggygatttttttggtttggtgyggtttgttgggttattygtgttttaggattttaattttgagattagaaygtaggagtttgygttygagaggggttttttgggattttaagayggggagggygtgtttgaygattttgtttttaaattyggaggggaggggagggtagtgtgaggtggttttygagaaagatttttttttygaaatgtttaatttttygtaggataygtttttygtttygattattattttagattgygaagttaaaaaattgtattataggttttatttaatttttttttttagtatttgtttgtggggtttttttttatatattttttttttttaggygyggtttttggatttyggatatttagattagttgttttttattgttttttttgtttatgaagtttatttttgggttgggtttgtttatatagaaagtttttttggtygaatttttttttttaatattttttagttttaagttaaattttatatatattttgttttttattttttggaggtttttatygtggaatttttggygtttatatttttaygggttttagagttattgggtttaattttgtttaagttgttttttygtttttattttgttttttaaagttattttttttgttgttgatttttttttttaaagtttttgttttaaattgtattaaaaataaataaataaaaagaaataaaatttyggtttaatyggtttttatatttgygtttttatattttttttttttttatttttttattaaattgatygttttgtttygggtttttttgttttgtttttggtattagtttaatttttgggttaaaattgtygttttaattttagtttygttaaaygagtattttttttattygttttattttaattaggttaagttttggggtattattttaatttttttaaatttttattatagttatttgaattagtgatttttatattttatatgtttttttattttttttagyggaattattaatttagataaaattttatttttagygtgtatattaggtttaagagtagttatggttagattggggtgaaggtgttagggtttataaggaggtttygattgtatttttttttagtaattttggtttttttagtttagttttygyggtttaaatttttttttttagtttgggttttttaaggyggygttttggtttagygygyggtgtgttttttattaggtttttttttttttttattttttttttygttaggttttgttatggagttgygttyggagttgtttagygtgttyggtgyggygayggyggyggyggtaatagygayggggtygtttgtggygtyggtggygtyggtggyggtagtygyggyggtygttgtatygttatyggtgagygtggtaggyggtttgttgygggggtygttattgttgttgygggtagtygagaagtattygyggatttttaagtgygygygttgtygtaattatggygtggtgtyggtttttaagggttataaaygttattgtygttggaaggattgtttgtgygttaagtgtaygtttatygyggagygttagygtgttatggyggygtaggtggygttgygtaggtagtaggygtaggaggagaaygaggygygygagttgtagttgttttayggtattgtygaggggttggygttggtygtygttaayggtattattttttygaggttygtttaygaggttttyggtttagtgtgygtygtygayggygggggatttggagygggagygttygyggggatyggaggyggagtagttggygtagggggtttaggtgagagygyggttaggtygtaggtaggggtagtaggatygtagttttggggtayggggtttaggggtttgtttyggtttagaaagagtagaattttygtgtttagtygtygygattgttagggtttatygttygtttagtttygggtatggagygtgggtatagaaatttttttttttttygtttttggagtatttgtattttattttttttttttgtatygggtygaaatgtataygttttaatttttttattygtttttatttaaaygtaggtaggtttttgtttttttgtttygttttttttttaggtggaaatttgygtattttygttygttttgygtttttttataggttttttttttttgtttttttttaatttttttaaggaatttttttttttttaattgatattttaggttttgagaygttttaggttttgagaygttttagttttttttttttttttygygtttttaaygttttttggataatygtttgttgygttttttttttttttagtttttttygtattttttttggttttttaggtttgtttttttatgttttttttttttygttttttattgtttgtttagtattattttttttttttggattttygtggttttttgtggggagggaagaaattaggttagagtygttgagggaaaggagggattygttttaaatttgggagggaagaattttttaggttttaattttggaaagggtggattagaaataggggttgtatttttgtttgtagagaagtttgggattttttagataattaaggygtttttttttataggttgtattgttagggtaggtattttttatatagtgggtttttttgtatagygtggttaggtagaagttatgttgttttttgtttgaattttggatttggttatttttttayggtagggtaggattggaagggtagttaagggtggaggtgttggggtatagaygtggggaaagtagtattgaatatygagtttatagggtataggtagttggggttttgaggagtatagaaagagagggagttttggggttagggttgtaggggtttagagyggaaggaatgttagagtaaaaagaaagaggggtattggagtttagtgaataagggttgtggggttgagggagaggaaattgagatttaaagggtygaggtgttgtgattgttgttttttagttaatygttttttaygataygttttttttttttttagaggttaagttgtagaagtttgatttgttttttaagaygttgttgtaggtaggtygttygggtagttygttgtygtygtyggtgaagtttttattattygayggygtagattyggggttygggaygtygtttttagaggtgyggttyggtttaggttyggagaayggygatggygagtttttttttggttygtttttagttygggtttttaaagaggtaggtggtagttgtttaggtagygttggttttggyggyggyggygaggaggatagttygggtttygttagttttttgggttttgaattyggtttagaggttgataaagaagagggtgaggtygygtyggygttagggttgggyggaggttygggtttayggtagyggaygtygttggatattttgataygygtgtttttaggttatyggygaggygttttggagttggtgttgtagggttgyggyggygaygtggtgtaggttatygagtaggtgttgaattattatygtgggggtttggyggtyggtttgggttttgyggygtttttagataaggtygtygtgggtgttgtagtagttgtagaygaygygtggtttagtygygtygaygtygtygtygtygtygtygtygtygtyggggggtttgggttgtttgygtygttgtaggyggggttygtygtattttygtattatagatttttgttggtyggygttatggygtttggggygttgggttygttgagtagtygttyggttttttygtygttgtagtttaaygttagttatttyggtgtygaygygggygtttattygttgggygygtygttyggttttagttttttgygtttggtttatttygyggyggyggygtatagtygyggtttggtttttatggygttttattttattgtyggtttggtgtttaygttyggttttygtttatttatggattaygtttttagygattttatgygtgatygttyggtygtygttgttgyggyggtgtataaggagtygatttayggyggyggtttgtaygggtttatggttaayggygtttyggagaagtagtagggygaggggtttggtagtyggtyggtttttaaataggaattttagttttgttttygygggttatygattttttttygtttagygttttttttgygttttggttgggygt

SEQ ID NO: 6930 - DNA, 824 bp, synthetic construct
  misc_feature 1..824: note = Description of Artificial Sequence: Synthetic polynucleotide
  source 1..824: mol_type = other DNA
yggagtygttaggagtgagtatttttttttygggatatttagtttygyggygtttttygygygttttggttttatayggatttgttagttttagggaataaaagyggagttygttygttttttattgtagtyggaggatgagtygagagggttgagyggagagtgtggttttyggyggttggaggtaggagaatatgttgygttygttygtygyggygtgagaggttygaggtgggygygtyggggtaggggyggtygygggygtttgttygtttagtgggygttgttyggatttggygaggtggtggtttgtaatattgtgttygtattgtttattgtgggtygggygtygagttttygyggtygygagggagttttttgggtgggaattggaggtagtgggggaaaagtttggagttagaagttaggtagyggttgtygyggyggttgtggagggttgtttgyggtatttggyggygygygttttatygygaagagygggaaggyggyggttgtagtgtgygtaaagttttgggtggygygtaaaggygtaggygagggtygtygtatagagtygtttaagttgtggtyggagygttagggygatttttgggaattttttaagyggaatttttygagataagyggtttttgttttttgatattttagtygaggtygagttgaygygtagttatttaattttttttgtttyggggaaataattttattygygtygaygattggattttggttggttgggtagygtygagattttyggggggtttagttttgtggttttgagtattttttygtttagttygygt

SEQ ID NO: 6931 - DNA, 824 bp, synthetic construct; identical to SEQ ID NO: 6930
  misc_feature 1..824: note = Description of Artificial Sequence: Synthetic polynucleotide
  source 1..824: mol_type = other DNA

SEQ ID NO: 6932 - DNA, 1415 bp, synthetic construct
  misc_feature 1..1415: note = Description of Artificial Sequence: Synthetic polynucleotide
  source 1..1415: mol_type = other DNA
ygtttaaaatgatttygggygttttatttaaagagaygttttggtttaggtagttygttggggtygaaggttttattttttttygatttatygggtttygyggyggaagttttygtttaggtaggggatgttttaggagggaaggaggygayggtgtttaaggaygtyggaagtyggggattttygtttttttygggtttyggttaggttattagtgttggttygyggygygggtgtttagttgygtttgggatattgygggtayggttgtggyggtaayggtagyggtygtygygtygtygaygttyggtaggattgagygtayggagyggyggaatttttygtttttttaygtgtagagtagyggattgagygyggatagggygtagtataggagttagttggtygtttgtattttttagggtatyggtagygagaagtygttggttaggtttatttatattagtggttgygtggttagtaggaagaygtagtagagtagtagtatygataggtygttgagaygtygttgtgttygtygygggtgtagygygggyggtaggggttgggtttgygtygggtgygyggygttatyggggttyggygygtgttgggygttygggaaggyggyggyggyggyggygtagtygggtaattggtgtagtaggtggaagttgagtaygttgattygtttgaygttgataygtaygyggygtaygatgtttaggtagtagtgtagtagtagagttgtttgygttagtagygtygyggyggttagtagygtygggtagtggattygyggtggygyggygtygggtygyggtgtttagggygggagtagtagtaygaggtttagggygagygtttaggatagygttagtatgttygtygtgtggygtttttggtatagygtttggtaggtggygggygttygggtgatgagtaggtagyggtttagggttaygaggtagtgggagaggagggatatygtgagttygaggtttagtagtttatttygtagtaggyggtagttgtttttagygtygttttagtttgyggggggtttygtagagtyggtgggtaggagttygagtatygttttttgyggtatttagagggygtagaygttgaggtyggyggygtagtygtttaygatgaaggygttgttggtggtttgtagttttyggaaggaygataygagatagatgattatgtygttggttagygtgttttygatggttaggttygaatataggagtgatatygggatgygtyggttygtttaygatttttttttttygtagagtagtagtagygagttatyggtggtggaggaggtggatgtggaggaggagttggttattttggttaattttttatatttttttygttagygtyggtttttggtagygygg

SEQ ID NO: 6933 - DNA, 1415 bp, synthetic construct; identical to SEQ ID NO: 6932
  misc_feature 1..1415: note = Description of Artificial Sequence: Synthetic polynucleotide
  source 1..1415: mol_type = other DNA

SEQ ID NO: 6934 - DNA, 3039 bp, synthetic construct
  misc_feature 1..3039: note = Description of Artificial Sequence: Synthetic polynucleotide
  source 1..3039: mol_type = other DNA
ygggygtttataggyggygygggtagygygagtttyggagtttyggaggtttgtgygttttgagtyggtatggatttygagtattgygygttttttygygtggggtttgtattyggtttttatgtggtttygggggaygagttttygggttygtagggaattttygtygttgygttttatttgtatttygygtygtttygyggttygyggttgattygtttttyggtttgygggtttttggagttttattttttagagtyggttaagtygttygttaagtatttgtaggatttygggttyggttyggtttttaayggyggttatttttaygagggtttygyggaaggtaaygygyggygyggggygtagygygtagttygatttttttttttttttttttattygggtttattygggtttttttgtttatttttttygttygtttattttttaattttttgtttttttygtttttygttayggtttttayggaagtygggttggygttggttygggttaggtaaaggttagtgtggggygggagggtgaattatygtttttyggyggygggaatggaaggygggaggtygagggaaggtgtagtggygayggttyggagtttagtyggggttygaaagtagttggatttgggaaggagagagtatgttttgtygaagttggattggaattgttatttattttgaagtttagattyggtygagggttgtggagttatattgagatttgaygaagaagygyggtttttgtgtttggygttttttgagggttttgaggttgggttttaatttagagtggttaaatyggggtyggttggggattgyggtttggttttggttygtttttttttttygggtttagtttttataggaagggtgttgtttgtgyggtagattggtatagtttggtygygattggtygtgtaatgttagggttgtttttaagayggaataattgtatttttattttttatattaagttggtttttttgtygttatgtattatgatagtygtttttttggtagttttggttttttygygttggattattatygttgggtagttaggagtagttttgggtagtttaattttttggygtygygggtttaygggtyggtgttttgtgttaaggtyggttggatygygtyggtattygagaatgygtttgaaggtaggggtttggtaggttgatyggtagttttgyggtygttygtygtattttatgatttgtaaggygtttyggttttygtattgtatttattttatttgygttgttatatttygtagtttaggtttagaattggattttttaagattygttttaattttttgtygtygttyggttggygtttygygggtttttayggagtggtygggtattttyggttttygtttagtyggggyggtgggaatgtgtaggggagggyggggaggtgtgtgtgggttaayggaggaaatgaaygagttygyggagtttygtgtttgtgttttttgaaagaggtttttttgataaaaattatagttgggatttaatgagaagtagttggtttggtttttttgattttagttagayggtagaggtygygtagtgyggtgagtatygttagagataggtattyggtttggtttagygtttygygtygggtaggagttatttttttaggttygygtttttgttaggygygtygtattyggtatygatagttygggttttyggattatatyggtgtygygygaattgtagagagygttggtgyggaaygagyggtygggagaaatttagtatttygggattygayggtaagggtggttttgataaygaaatatygagaaagaaaattaaagaaagygagygataattaagaaaaggggaagggaaattgaataaaataayggagagygyggygagaaygagagggtaaatggtagtyggygagttgggatgaattaaaatgaataaatgaggaaygaaygaataaaaaaagtaggagtaagatygaaygaaayggataattagagaagggggaaaggataaagagggagggagtagattaaataaaagaaaayggagtatgtttaaagygtagaatatattaaaatgagaataagggggtaagaaaattaaygattttagttgaayggaggataggttaaaygaaagggaggtaggygggtgygagtagagtttggtagagattttggyggtygttagtttttggygtttttgtyggtgtttaaygggttgttagygtttttgyggtagagyggatttyggygtagygyggygygyggtggagtttggttgtttgaggatagttagtttttagggtygtatagtttatttggtgggaagtggygggygaagagggaattygttttatttttyggtttttaaaataatyggttyggagygtttttagtttataygagtgagygygtagttgygttttatttgyggygygattttttaygaggttgggtagttgygygttttagagtttggygtatttygtttttttttygtttgtagttygtygttygygtagttttaggtygttttttgttgagagygtttagttttgttttgaatttaggttgygtgttggygttgttagttattttygygtygttygygtttggttagtttgtttygagtttggttttgaygtygaaataygttttyggtaagagatttttattagagttttgttygttgtygttgaggttttgagtyggatgattyggtygatygttaaagtygaggagagttttaagtttttagattygggttgaggtttttgggttaaygttgagaatttttaagaagggtatygaggttttatyggggttttgtttayggygtttatgtttattttggttttgagttttyggygggagttgtaggagtttgggttttagygagttttgtaggtygtttagtgattttatagtggtyggaggaaatagtgyggygygggataaggttgtagygaaatgtgaaagttaaggttggtttygygg

SEQ ID NO: 6935 - DNA, 1277 bp, synthetic construct
  misc_feature 1..1277: note = Description of Artificial Sequence: Synthetic polynucleotide
  source 1..1277: mol_type = other DNA
ygygtttttggggagyggtttatttatagtattgygagtatttagtatygttttagagtayggygtatataggtataaatgtagtagaggtttttygattygttaggayggygttttttttagatgggtattataygtaygttttttgttttagttatttygttttttagatgygttttttaygagggaggaagggttttttgttagtttygaatttagygaggattagttttaggattgagaattaaatatttatttygggygtgatagttttgtttygtttgttaatgttattgttaaggttataggtttgaggtygagyggttggggttggggtttttagttgygtaagaggtttttagtggaattgygttttgggygygtagttttaagtygyggatgggtyggataggtttttttyggtttttygygggygtttgttttygtagttaagtttaatttttttyggagtttttgggtttttttgagtattagaagttgaagttyggtgtttaattygtgygtaygtygttggggatttygatgygygaaggagagygggtttyggggtttygtygttaggtaayggyggttggagyggygagaggagttygggaygagygtagggtygggyggatgygggggtagygtygttttatattttggtttttagttttttttggttggggyggggttagaatagggaaagttgtagtggtyggttyggtaaagttaggyggggygyggttagygatttatttgttaygygtgggtagtygygtagattyggttygtgtatttyggtygagtagttgygattttygaygggtygyggaygtatagtttttttttygggttataggttttyggttggggttggggygattyggagttgygygtyggygtaygygatttygttygttttttattttttgttttattattagttttaatttggttttygttygtygygygttyggggtttaggggagyggygyggggatttaggttttayggyggagagagygygygggattgygaagattggggtygagtgtygttttttttgygttttggtagygtyggttttgyggagtagaayggagttgggyggagygttgygygtattgttttttygtttttygaaaggttattttggyggyggggygtygtgaygtaggtttgatttaygygygggtyggygttaatgygaggttttygggtagygagygaggttttgatggtygaygtaggyggagagggtgggygtggggygg

SEQ ID NO: 6936 - DNA, 2394 bp, synthetic construct
  misc_feature 1..2394: note = Description of Artificial Sequence: Synthetic polynucleotide
  source 1..2394: mol_type = other DNA
ygttgtaaatgygttaatatttyggttgttagygtatggygagygttttttaygtttattygtaggagyggygtttyggtygttttttygtttttagtttgttttgttttygtttttttttttttttyggttatggttatttttggaygtttgagttttatygtgygtagttttttagatttattygagtaggaygygtaatatttgtygaggygggagttagaattaygygttttttagttygatttttgygtygtttggttggattyggagygyggttattatttttgtaagtgygtggtggattgyggtgyggggtgggaggtaggaggygtggggtagtagaattaagggtttagtttaygaggggtyggaaagtygaaattttagtttagagtttagatttttttagttttggaaaygggagttttgttttygaatttttaaygtatttatttyggtyggtatattttaagagtagatttttgtttggtattggtgtttygagatttggggtttttgtgtttgaygatttttagaggtyggaataattgaaatttaaaaygygtygttatttgtygtttttattttatttttygttttttttttatgtttgaaaatayggttaygatttttaggttttygtttgggatggttagtgttggygagtttatttttatttygtttttatttagggtttygtaaatttyggtatattgtagtgtagtygatttggaggaggtyggygttggtgatttagtttgtgataaattggtyggttagygtaattatyggtgyggatatgttaagagggtttyggggtgggttttttyggggtaygattttaggttygttgatgatygttgtggtatgaatgaggttatygtattyggagaggtggatgtttagatgtggatttaggaaatggttttatttygaaagtttygggttagtgggygtgttttttggttagtgtttttaygttygygttagaagggtagtaggttttygtagggttyggygttttatttattygtgttttttttgttgtttttagtttyggaygagagtagtttggagattagttygttagattygtygtagyggtygttygttaggttygygttttygggttyggaygtygagaaaaggaagaagyggygggtgttattttttaaggygtagaygttggagttggagyggygttttyggtagtagyggtatttgtttgygttygagygygagtagttggygagtttgtttygttttaygtttaygtaggttaagatttggttttagaattatygttataagttgaagygygttygygttttaggggyggyggagtygtttgatttggtagtattygtygagttgtaygtygygttyggtttgttgygtygygtggtggtgtyggtgtttgttygygaygggtagtygtgyggyggyggyggyggtggygaggtgggaatygtygyggtttaggagaagtgyggygtttttttagtygtygtttgttttttgtygggttattttgttttyggtttyggttyggygtttggtttttttttygtttattagtatttagtatttttygttttggttttttggaattggtgaggtygtagggyggtatttggggttattttygattttggagygygttttgygattggagtagggtyggagtygaaygtttggaaygtttttygttygtttttttgtagttttatttttttgggygttagggtttttggygygtttttattagtygtygygtaagtatataygagggaygtgtgttagagtttttttttttattttttttttatygttagttttagagttagattttatgtttgggttttatttgtatatttttaaatagygatttgtataggaagtaagttatttttttaaaaaatagagtattttttttygtagttygagaataaaatgtgtggggttgggttttttgygygtttgyggggaaygtaggygggagtygtgttttttagatyggtgttygtatygttggttygttttttgattggttaagtggggttyggttttagttggatygaagggygggttgtagtttygatayggttttaggaagatatttgggggatggaggggtggtgatgttagggttgggygygggaagaaaaggagaggaggaagttgaggtaattttgggatttttgttagygggaggygttattggttttagagtgatttygatttttygttgggtttttagagttgttggygtttygaatatygaaaagttaattttgtggattaygatagggtagaaggagttttttyggagatgagtyggygaggttaggtgyggggygygttgtatyggagtagtttaggtygggtygt

SEQ ID NO: 6937 - DNA, 1627 bp, synthetic construct
  misc_feature 1..1627: note = Description of Artificial Sequence: Synthetic polynucleotide
  source 1..1627: mol_type = other DNA
ygtttygggtttggagggaggggaggtttttyggaaaggggtggygagagattttygttaygatttttaagttttttygygygygttggaggggatayggtgggygtttaattttyggygtagtagtaggttttataggttgtttgttggggtttggggaagtygaaattgygtatttygggattygggagtttttygtagygyggtttyggygtggtgattgggaagygtatattgtygttagttagttagtygtygtygtattggtttagtttygaaaatttttaggyggygtagaggtgtttaattttggttattayggygtygygtygtyggtaygtygygtgggttttagatagygttagtygttygggtaygaagaatatttggtttggggattatagygggttatygatygagggtagggtgggyggagaggggyggttgatatttaggaggyggagttggggtgygggatygtagaggtgttggatygagtttgggtaagaggagttgggggatygaggtaaaagtgtagggagggtttggagaggtgagttggagtttgggygggygggygggttgatgggggggyggtgttttggagggattyggagattttgttttgattttaagttgaggtttatttttygttttttatattttttagatttttttttaagattttgttttygtttygygttttattygttagygyggaggtgaagtagaaggygtygtagyggtygygtattyggtygyggggttygtagttgyggatttygggtyggtttyggtygtygtayggggygygtgyggtgagtatagggtagygtayggagttttygagtagttagttygygttatattagtttagattttyggtttaagttggygggagayggyggaggtyggggataagaggygttataggtaggagttagattgagttygtttggygttttttttygggtttttgagatagtttygyggggtttgggaagtgttgggttyggtygtttattttggtagagttgggagtaggtggttaggygttygttttgtttttygtaygtttgtttygtttygtagtaattgaattggtatyggtttyggttgggttggtayggaaatattatatttagggggtggyggggattttggggagggttagyggatgggagyggagggggaggaagggyggygyggtttgggagagggagttggggtttttaggggtgyggaggagatattgggaaggagttttgggagatttaggygaggyggattygttgttatataggaatggggygggagyggaagggttttattttttaagtttaaggttagygttaygttttygttttygatgtygttgatgagttygtagyggtatyggttttygttttttaggygtaygttygygatgattagggaggygtttagtygatgtttttttygtattttggygygtttttttaggggtttatattttygggygtgtagttygttggtgatgaggattagygtttttyggagttttttaggttttattttgttttagygtattttgtagttgggaggygtggtgtttaggaygtagggtagygtggtygtggttttayga

SEQ ID NO: 6938 - DNA, 271 bp, synthetic construct
  misc_feature 1..271: note = Description of Artificial Sequence: Synthetic polynucleotide
  source 1..271: mol_type = other DNA
yggttygyggagttagygtttttttygygtygatttygggtttygggyggtygtyggggggygtygggygtatttttygttgttaatttttygttygtgttttygttygygtttgggtttygtygtattttagtagaagttattatagagaataaattatttttttgttttygagatgggttttyggggaggaaggtaaattgtttgtttygtgtataataagttaggygtggagagtagygyggaggaggtygyggtagttatygagygg

SEQ ID NO: 6939 - DNA, 884 bp, synthetic construct
  misc_feature 1..884: note = Description of Artificial Sequence: Synthetic polynucleotide
  source 1..884: mol_type = other DNA
ygtagtattttggygaatttttttaygtttttggtgaagttgtttygataaattygaaatatatgttgtagygttttttattgttggtygttgaaygtgttttgggattaaggttttagagagyggayggtgttygagtygttgttttagttgtgygtttgtagtttttttagttaygttaagtygtyggtgygygtttagttgttattggygaaggaygagatttggaggtagyggagggggaaaagtttttgygggattgggagagaatgaagattggaggygtgtagtaagtggtygggagagtagttagtataaagagaaggaagaaagaaataagaggagatgagttttaggaggyggttgatgttagygaattttgtgtygygttgttttttttyggagttagggagtagygagttttttatttagatygygttagtgygtttygggttttattagtttttattaggygttgtttttttygtttttatttagtttttttttttygttttttygygagtgtatttaagygttttygttttatttatttttagygtttttttaagtttggaggagygtttagagtagtagaaatagtaggtattttatatygttyggygtggggatttygyggagygtygttgygygtygttttttgatttgygtatttttttttttygtygtttagtttaygttttttttygttgggtgttagttaatttttaagtttagatttyggtagtttttttygttgggtttgtyggyggtttgttgtttttgtygaagggygttttygtttttagttgtgygagttgtaaagaggtyggggttttaggaattttggygtygtygtttattttagtaggttttataatyggygt

SEQ ID NO: 6940 - DNA, 1007 bp, synthetic construct
  misc_feature 1..1007: note = Description of Artificial Sequence: Synthetic polynucleotide
  source 1..1007: mol_type = other DNA
ygygggtttggttttaatttagtaygyggaggtttttttttttttagttttagygaaagggyggygggtgggaattattygttattttggtaatttttttttgtygtttgtttataatagtttgaattatatttttgttaggtagttattagttygattttttttttttttagttttygtttttttttttagygtttaggttgggggyggygtyggtgttagtttagtttagggygaagtttttagggtyggttygggtygggttgygggattygtygtggagygtaaagtgtttgaagttttygygygtattyggttttgtttttaaaggttttttagaaatgtaagaggttaggygtagaaatatatayggayggtagttttatgagaaaatgtagataaagagttyggyggtagggttatatgttttttataatttttaaagtygttattttaattagagttttttttgagttttaatgtttaattttgagtaaataagtygttttgaaagaagaattyggtttttaattaaaagtgtattaatattttttttttttttaattttygyggagtaaagtttygygygggyggaggygaggttaggtygyggygaggtygtttygggttygygtygtttygygtygtygygygtttttaggtgaygttaggygggttygggattagggtttattttgygtttttygygtygygtygtagagttaattaaaagtaatgttayggtaaatttaaaggtttttygttggyggagtygygttttygggttagtttgygagagagggtttttygaggtaggtgttggggatttatttgtgtgtgagtgtgagtgtgtgtgtgtgtgttygygygagygtaygtgtgagygtttgtgttgaaagggagagttttttggattttttggagatygagattgttttttttttttygtttatgtttttagtttttttygtatatgtattagtgaagaaaygtayggatatygtygt

SEQ ID NO: 6941 - DNA, 2191 bp, synthetic construct
  misc_feature 1..2191: note = Description of Artificial Sequence: Synthetic polynucleotide
  source 1..2191: mol_type = other DNA
ygtygygttttgttyggttttatttattyggtggygtttgggttygttttagttttttatttttattttagggtattatttattagggtttygtttygttttagttttaygtgyggggttttatttyggygttagyggttttttaaatatttttatttttatatattattttttttttattyggayggtagtygaatagggataaaatttatggygtatagttagtttttttygyggagtaygttttgtgttgttttagtygttggggttttttatttygggttatagttttttggygtttttygggtygaggtagtygggtygaggagtgtyggtgtggttyggttayggggyggggtyggygggagtttyggtygtygtygtygtygttgttgttttygtttgttttttgggtygttygttygttygtygttgggtgygttgtaygyggggggtagtygtggtgtagaggtttatgtagyggyggyggyggyggyggttgttgttgttgtygtygyggaggtagatagatygggygttgttatygtygttttttttyggttttatgtygtygtygttgtygttttttttttttyggygaggggyggggggtttyggttyggggtgggtattatttttygtagygtygtttttttttttgtttttygttygggygttggagtyggygagggtattygtygttttttaggagtgtatttttygygygttttgtyggagygagggggygggygtgggyggaygtyggggtagyggggatttygygyggttgtaagaggagggggtttttttaaggatgttyggyggtttttygtttttaggtgygagttgagtttgatygggagygagyggygygtygttatgtyggygtgaygggygttttyggttgttygygygggttttygygttgttttaygtygygtygtgtyggtatygggttgtaggatgggttgtatttaaagtattatttgtaaggygyggattyggygygagaatatygtggtgtaygatgtgtgygttattatygattagtgttttaygygtatygaggagatttygtttatygttttgygttataagattttttattttaaagttttygttygygtggttatgttttttatttttygttaygagatttgggtggtgggttggatttaggygtgtaattagatggagttttttaatatttatagygatttgggtatgtaagygattygtygygyggtaygggagyggattttgggtttttagttttgtttgttattttgatttttttttttagtttttttttattgttgtttttatygtttttttaaatttttttttygtttttttttttattttttttttttttaygtttttgttttagtgatagggygggtgtagggaggttttttgygaaggtattttttygtggtttgtttttgattttttagaaaygygaggagaaaggtgyggggygggaagaaygygataaggagggttygagaggyggaggtggggatggttggygagtgtttggygagttttagggygtygtttgtgttttgtggggtttttygggaagagtttgggggaaattatagaggagtggagtggagtgtygggggygtatgggttgtgtygygygttttttggagaaatyggagygggtttggaagagtaggtttygggtattygagygggagttggtagttttgtttttgttttygygattgttgaagtttygaatttttgtttttygggttagggagttyggaggygttttygtttggaattataagtyggatatagttgtttttttgttttygygttttttggattagttttggtggggagttggaaggtatygagtgygtttyggttaagaagggyggatagttttgtgygagtagygttyggttggygyggygyggggtgttttttatgttaaaggaaaggatggattttttgtttgtttagggtttttattttttaaaatttttttaattgyggtattggaagggatttttttggygtttatygtygaattttatyggygagttgggagttttttaatttttagtagygtyggttggtgygygtygggtttggttgttgyggtgaagattaaggatygtygyggttttttaatygttaggggtygtaggttaygggyggtygygttygg

SEQ ID NO: 6942 - DNA, 859 bp, synthetic construct
  misc_feature 1..859: note = Description of Artificial Sequence: Synthetic polynucleotide
  source 1..859: mol_type = other DNA
yggygygttaygtagggaggttgttyggggttggygygtatygagggggtgggggtygagttyggggyggatttttttttygatttttygattggaggatagggaggaaatggttttgtatygtaygatgaaaggtaggtaggagggttattaggyggggggtggtaggggayggaggatgtttagagttggaggatttygttygttttayggatatygttattttgttttttattttattttgttttttattttatygtagygtttggtttatttattttttggttttygttgttygtttaygttttaayggttygtagyggggtygttttattgtygtatttttatttygygttttgygygtttatttgtttaygaagttttygagtatygagtttttgtyggygttttggtygtttattayggygatttgyggtagttttagtaggtagttttgttttagygtygaaaaygygttttgtagayggtttattagygggattagtttttttatttttyggttttttattttgttygaggggtyggygattagttggtttttgttygtttttaygatttgatagggagtaggggtygygttgttttggttgttgttgttgygtygggtttagttagttaggttttggygtagaygtyggagttygtygttagttygtygtttggttttgatagttaaygattygtagygygtttgygygggygggtaggggygtggtttattttygygaygtttygttttygtttygyggttgtttygtttygggttttttatyggattattaggttaggygygtaygtattgtagtttagttgyggttagatgttayggtttttgygt

SEQ ID NO: 6943 - DNA, 791 bp, synthetic construct
  misc_feature 1..791: note = Description of Artificial Sequence: Synthetic polynucleotide
  source 1..791: mol_type = other DNA
ygygygattgtagttttggggggygygttyggaatygaaatggtttaagagatttgaggatyggygygtttttttttttyggttttagtttttaattttygttatagygtagagggggtagtgyggtgggagggggggagttgtggggttggggtttyggtttggtyggtgaagttttaggattygttygtttggggttaaggtaaggggtgyggtaygaggagygtagggagtttygagttttaggygtagatttagttgyggattygtygtatagttttggtgttgtaagygtggatygtgggygtaaggtttyggygggaggtattyggttyggtygyggtygggtttgtagggttttggygtagyggatttyggygygttttggttygyggttygtagggtttagayggggtygagatagttaagttyggttygttygygttaggygttggagttaaggttgaygggyggttttgaattatgtttggaggagyggygyggtttttagggtttygttgagaygygttgtagggttgttygggttttttttyggygaygyggttagtagttygygtygygtttttagyggyggtaaaaattaggagtttyggggttttgtygggygtyggtattggagggtaagagatgttggtttttttyggggtttattatttyggggttttatagtatttaygtgggatggggatttyggagtagattayggayggaaaggaayggtggttttattttttgtaaaagaaattttygygygtataygggtgtttygg

SEQ ID NO: 6944 - DNA, 586 bp, synthetic construct
  misc_feature 1..586: note = Description of Artificial Sequence: Synthetic polynucleotide
  source 1..586: mol_type = other DNA
ygggttgygygtttygagttgtaygggtaggtatttttttyggttttgttttataaggtggggagagyggggttggaygygggagggggygggggggggagygtgagaagaaaygaaatygygggaaggaggggatatyggygggttgggtagagggygaggyggaggttaagttgggtttgggygtygtygttttygygygygtttgttgtygggttygggttattyggagagygygggygattygggtttygygtttgttygtygtygtygtygtygtygtygtygttaygygtttagtttygggttgttygttggttyggtttyggtayggygyggygygggggyggtgggtgtagttttagttgtygtgygtttyggygtttttgtgygygagtttygtttagttttttttygtatgtttttgtgtgttttttttygtaatgtttttygtgtttygyggggggtgtgtggtayggttygggygttygtagttttgtagtttttygttgtttttttttttyggttygtttttgtygttttttgtyggttygttttttttttttyggaattttttttttttygt

SEQ ID NO: 6945 - DNA, 1678 bp, synthetic construct
  misc_feature 1..1678: note = Description of Artificial Sequence: Synthetic polynucleotide
  source 1..1678: mol_type = other DNA
ygggatygayggyggygtttttttttygtttttygtyggtaggagaggayggggygggagaggaaggggttagttgtggttgtagtygttatttttyggygttygggattygggaygtttagtygggttttgtagagggtgttttatttgggtattagyggtttttygtttttagttagggtatygaaggygygttyggygggatgtagygaattgttttttgtttygggatagtggagyggtagaaggtttaatttttyggttygtttaygttygtaaggtggaaaaagtggggtgaaatyggggaaatttagygaaattggggygaaagaagagagattaaagygtgttatttaygtgttagatggygaagaagatgagygtagygtatagtattagagatagtatgtagtagaaygtagygaaagtgaaggttatggtyggyggattttaattttattatataygttaagaagtttttaggagttygatgtttttttagaggatygtattttttttaaggagtygygtttgtaygtttttttttaggttagtgtttaggagggygtatagttagygaagygattygagggttagygaataagygttggattttygtaggtttyggygattttagattyggtttttyggygaagataggaaaaygtgtgtygagagtygttggagggaatygttygtaaatygaagaagaaattaaattagtagygaatatttgtaaattagtgttaagttgtgagtttttygagattaataygataagygatgygaygattttayggaggatygagggaggaggttttattygttttaggaagagttttttgtttttttttattaaatygttgaggagagaygagygtttygtttyggattttttygygttatyggggygtaaayggatagtgtttagygaggtgttygagyggttttygagttttttttaaattttagagtygggtagygttttttttygagagaaggagtttttaggtagtygggaggaggtaggtttygttggttttgygttttagaygyggtttttagygtagtygtgygtttygaggygygttygtttttaatygtgatttyggttagtyggttttygtaatttaagtgtttyggaaatygggggtyggatyggggygagtattggttttatttaaygggttaattttagttygggtggttgtagtagtgggttttaggttaaaygttgtagttygttttatttgttgttgtygttgtygtygtygtygtygtygtttttgttattgygagaattgtagyggtgygattygggatttttttttttyggygttttattttygatttttgtttygttgagygygtttttttyggygggyggagattgtagygtygggggttgaggaaaggtgggtggygaagygtygtygggygtttggtggtygttgtygtygttattgtagttgtgtaygttygtttttyggaggaaatttgaagttagtagtataagtagggttggaggtygagyggaggtggggygggatyggttggagtagggattttttaaataygtgygtttggaggaggtgggaagttgyggaagggtatggtgtgtgtttygygtttaaaygtygtagtygtttttttyggtttttgtagtttygtttatygg

SEQ ID NO: 6946 - DNA, 1600 bp, synthetic construct
  misc_feature 1..1600: note = Description of Artificial Sequence: Synthetic polynucleotide
  source 1..1600: mol_type = other DNA
ygagayggagttagtatttgattagygattaatagtggatyggygaggygggtttttaattagagygagatttttagaagttggatagtttttgtatttatgggagtatgyggygtagttggtagtgatttttaggaaatttyggtagtagtygtygtygygggtgtggtgatttygggttygtygtttatttggagygtttyggyggygtttggtttagaattatyggggyggatagttttttggagttgtaygyggattgyggaaggggatagtgagygggatyggttygtatttygttygygggttyggatygttggaagtattygggtttttttttttttttgtttttyggtttygttttttttttttygygttgygygtggyggtttygggttgygygtttttgtaggaggagatyggtattgtygtyggyggttttttttttaatygttagtttyggtygygygtttygtttygtttygyggaggagggtgggggygtttttygygtygggttygtttagttttttygyggttgttygggtygggttttttattggtyggygggygggaggtgaggggyggtagggttygtttttggyggttygygttygggaaggtyggtagtygagygtyggaggtygtggagagggygggtagggaggyggygggygtygaggagatgtagyggyggyggtggtggyggtggtggyggyggtggyggyggyggygtttggtttyggtygtagtttttgygtttygttygttttgggtygtttttgttagtttygygygyggttygtttttygtygyggttygtagtttgyggygttygagtttygagggygttttttygggygttgggttygaggyggttaagayggygggtyggtygggtayggggyggygggygttgtgttgygggttgygttggtggggggyggygggtygyggygygggtttagggttyggygtgtgyggttgggaggtattgtgggggygggygygygggyggyggtyggggttatggtygagggyggygggggygygyggaggagggygtyggygttgttygaggttgttygygygygttaygagagtttgtatatttyggaygaygtgttyggygagttyggttyggatagyggygggaattttttttatagtatttyggtygtttygygttttttttyggtygttttttyggaygaygagygygagttttygggatttttaggggtygtttygttatygtttygygtttyggaygtataggagtyggaggaggaygaggtyggygygggttggagygtagygttgygggatygttygttttygygtttygaggatatyggyggtaaggggttgttygygggtggatgtygggggyggygttggaatygggygygggggaggygtgggtgttggggygggygagtttagatttttygtgggttggtttgtgggtgttttttyggaaataaatgaggttgtaggagyggtgatyggtttgattgtttttgggggtttygaattygtgggtggagagggtaaggyggaggtygtggttagtatttttttagtgataatgtygtygg

SEQ ID NO: 6947 - DNA, 2394 bp, synthetic construct; identical to SEQ ID NO: 6936
  misc_feature 1..2394: note = Description of Artificial Sequence: Synthetic polynucleotide
  source 1..2394: mol_type = other DNA

SEQ ID NO: 6948 - DNA, 1160 bp, synthetic construct
  misc_feature 1..1160: note = Description of Artificial Sequence: Synthetic polynucleotide
  source 1..1160: mol_type = other DNA
ygtaggattygtttttygatggaygtgagttttatyggttygttggtgagattttttayggagygygattattttagattttttttaatygtttygtttattattaagtatttgagttgtyggagttgggggttgatgtyggatagttttygggggttgaygttyggtgatttttttatgttattgyggtygtaggygttaygggtaggtgggtgggtagggggagtatggatagagaggaggggattygtgaggagtagattttagggygagagtaagagygyggtyggggtttttygggggygagygtygyggtagagttygygttttttttttttygtygttatttatttattttttygggtagttgtttttagtgttttattttgggygtttyggggtagtgygggttggggygagtggygagggaaagaatgattgaaatttttygagtagttttatygygygygtygttttttttygagttttagattgtttagtgttttagttgtaaagggttatttyggygtttyggtttttygttygtyggttygtttatttaygttyggggygttatttatayggtaatgtttttgtttttgggtgygtygttgggaaattttygaatttttataggtaaagatagagtgggatyggtagtttttagatttgaggyggaggggtygygggtyggagttttttgtagtygttagtttgggaagattggagtgygttgtttatygagggtttgygtygygtyggtygtttygggtygttttgtgygygttygygyggtttgtattygagygttttygyggygtgyggtaygatgtaggygyggyggtttagttyggtgattttaggtyggttygygygttygtygtaaygattyggtagtygaggtagygtygygttttaygttygttatygtygtygtygttttagtatatygtaggygtgagtttygtygygatygggagagtttttttagttgtgygttttygaggtatttggtygggyggggaggygtygggtyggggygtataggggttaggygggggygttgttgtttatttttygtttttygggygtgygtttygtttyggagttygtatttygygttygygtttygtttggaagttttggggtatyggaygygt

SEQ ID NO: 6949 - DNA, 588 bp, synthetic construct
  misc_feature 1..588: note = Description of Artificial Sequence: Synthetic polynucleotide
  source 1..588: mol_type = other DNA
ygtaggyggyggygttttgtattgyggagtygygttttgggggagtagtatttttagtttyggygtttygtagttagatagttttttttagggtggtagtatttttyggttagggtgtagggattttyggggygaggyggtygygtattattttttattttggtaagggttaggatyggattgttgtaggygttgagyggggttattygggtygagtgtttttttatgatgagtyggtygtttgtaggagygttgtygtygatygtttatattttggggtyggttggagygygtttttttygggttygtggtygaygyggttttttgtygtyggggagtattagyggttygttttttttagtttyggttttttyggttgttygtygggtttyggttgtygygttgtttattgyggyggtygttttgtagygtatatttttttyggtygygtagttattttatatataygygygtatagttttttatttggaggttgttgtaaattttaaygttaygtataagtgtattttttgtttttatttygtagtttatttgtttygttttttttttygggaygtttagtttygt

SEQ ID NO: 6950 - DNA, 878 bp, synthetic construct
  misc_feature 1..878: note = Description of Artificial Sequence: Synthetic polynucleotide
  source 1..878: mol_type = other DNA
ygggaggygaaaaygaaatttatttttttgygtttatttttgttagaggtttgtaggaygtgttttaatttggtatttygagtttagaataaaagttaygggggttgyggtatgggtagggggaaggygygyggtggttgaygyggggtaggggttttggygagygygggaggggyggttagtagtygttygyggggttggattgggagtttygtgygatttygggtttggygtttgggtygggggtggttttygggtttttttygggggtygtygaggttyggtttygatagttttgyggttgttgygagygtttttygagttttygtttygyggtgttygttttaggagygggygyggygttgtgtttttttatttgygygtagagggtygttyggtgaagttatggyggygggttaggggtaaaygagygttygagyggggttggtaggttttyggggygygggaggatygtgggattayggggatgaaaagttttgyggtttygaygygtttggagtaaatygtggttttgygygtttttgttttttttygtttttttttttttttttttttttttttttygttttttttaygagtttattttttgttttggtaattagtaaagttttttygttgygygtttttyggtatttttttttagaggygyggggygggagtyggggtgtygygattyggggttgggaygtaaggyggggtttygagtgtttygggygtttttagygtttagagygygygttttgttyggtatttaygtttttttgggygggttttagyggggggttgataygattgtygttygggatagattgygagygaaggattggttttaagaaayggttgtagtygygggtygt

SEQ ID NO: 6951 - DNA, 561 bp, synthetic construct
  misc_feature 1..561: note = Description of Artificial Sequence: Synthetic polynucleotide
  source 1..561: mol_type = other DNA
ygagtgggygygaatttttatagtagygttaagtagtaggattatagygttagygtttggtttyggaggaaagataagttggagtaygtaagggygattygttttygggggtttyggttaggtatttgtygtatgtatttttttygtggtggtggtatgagygygygyggggygyggggggtaggygaggggattttggtaggygtygaygttttaggtyggattygggggtttttttgtttgtagttttttgttttaatgatygggttgyggggaggggagggtaggtttttttttaggtttttggtttttgtygattygatttgtttatttgygtttttyggtagggtttatttgtayggggttttggaggtgtttgtgtagagtgagtaygaaggggaagtgttattagygtggtttygagtaatttggygttgtatggtagtgggttttagagyggygtttgttygygtttttgggggttgttttatttagtttaaaaattagtaaattaaygaatgagtaaagttggygtygttagygattagygtggattygygt

SEQ ID NO: 6952 - DNA, 1235 bp, synthetic construct
  misc_feature 1..1235: note = Description of Artificial Sequence: Synthetic polynucleotide
  source 1..1235: mol_type = other DNA
ygagttgagttgttygygaggttgyggtaggaggtttygttttttygggtagggttttttttggaggttttttyggttttttttagaygtattygygtygygtttttgtttttygggagtagtttttttttagtygtyggttttgggagttttatygtttaaaygggagttgagtttgtaagyggttaggyggyggtgyggttggtgttgttgttgatgttagagttagaaagtagttgtgattggatttaattagaygttgttgtagtaaatagataagttttttgygtgattggttttaaagtggttggtgttaaataattagtagaggygtaaaagtagtttttttgygttgggagtttagagtaggaggtagagttygygggaagttyggagtatttaggaygtygygygttttttttygttttttttgattagggagtagttygttttaggygtttagtygaggtttttagtttagtgggagtaagttatagagaataattygagagatagagagayggagygygtttttttgtttagttttgaaaagtgagtygttttygggtttgtaattttaagtttygtagtagyggyggyggyggttgtygggaaggaggtaggtgtaggtgtaggagggaggyggttttgggtttygygtttgggtttyggttatggtttyggttttggggagyggtagagggtttggagggttgagtagttaatttaaatgtaagtttaagaggaggaggaggyggaggtttaagyggaaaggtaaggatygygtggygygtyggtttttgtttttttttattttyggtttttttatttyggttttttatggggttttygggtttgttygttgtgagtagttttattttggggtgttggygggatggttgtttygtgtagggygttygggagtttagatttygtggaaatgtttggggtttttttttgtttagaggggatagtgagtagttaygttgygatatgtttgagggattyggaygaagtggggygagggyggygaggagtttttyggggatttygygygttttygggtttygtagtttttagtggtyggtygggttggtattgttttttatttttyggaggttatttygttttttagtgttaaaggaattatttaaaaaygggggaaygagttttygygttagttatttttatttaaattgtttyggaggaagggataggygaagttttgygatygt

SEQ ID NO: 6953 - DNA, 5964 bp, synthetic construct
  misc_feature 1..5964: note = Description of Artificial Sequence: Synthetic polynucleotide
  source 1..5964: mol_type = other DNA
ygyggtggttggttgtagtttaygtttttaygatttttgtagaaggaaattaygttttttttttttttttygtatttttatttttattttaagttttygggaagttttgygttggtattagggtaagygtttgtyggttttygggagttaagygaggtygygyggtttgggaygtaaatgggagggagtagtygttgtygttttgyggggttagggttattgggtaggygtagygygggttaagagtgggaggtttagggtaggggattygtattyggggttatttttgtygyggygygttttgygttttagtagtgtatagggtggggatttttygaggatagtggtgygtygaygggtttttyggtttttttttttttataggtttygttgtgtggtgaaggagttagaagaggygatttgggtgttgagattyggggttaaatygtggagagtgtttggagtttatattttagatttttggaygtygtagttagtttagtaggttttatttggagtygtttyggggtttaatygggaggtagyggggtgtaggygagagggttaatgygttyggttyggttggtttgaggagtttttgtttttagygatttatagggtagagagtttagggtttyggtttgatgtttttaatagttggggattggagagttggaggggtygtagatttaggttagagtttaaagtgygtygygyggygagtygttggatttttttgggttttaygtggtttttgtgttatatggagtgataggtyggyggaaggygttttagtygtygtttagygttttttaaggtgtaaggaggtaggatttttttatattggyggygtagggggttttayggttgyggaygttygttttggattttttagttyggtagattttttgggtggagaggygttttttagggtygyggygaaggagagyggtttttyggtaygttttttygtattttttttagattagtttyggttttatygtttaggagagggttygtttgaggatttttgtttgtgtygygygtggttagtttyggtttttttattttatggttggtttttagttttttagagyggatatttttttttagggatgtagggygaggaagggygggtggagttgygaatttayggggatttggaggattttttggttttttggagaggggtattatgagagggatttatgggatatagatttgggggattgggtaattttattttttttggtaattataaaaattttgagtaaaygtgtttattygttatttygtagaaatatataatgtaggtttatataggtatttttgygaggttttttagttaagggygtagygtttttyggaagtttttggttttgttattagggygttatyggttttttygtattggggatatttygtttgggttttgygtagtygttgtatttaaggttttgggagtttygygtttttttttaggygttygggataaagtgttygagggtttygtagaygtttagttttgttyggggtttayggtygtyggggttttttaayggatygtygagggttaygttttgttggggtgtgagygaygatttttttttygttttatgaggttygttattagttaggtgttttatgagaygtygtggygagtayggttatttggtagttygttygggtagttttaatttaattttttgtttttyggggtatttttttttygaatagtttttttyggtttttttagttttgtttaaggggtttggaaatgttygtagttttaagaaaggttttatttaagtataggatggggtggggygggyggggttaagattgttttggggattgaatttattttygtttttagygattttyggyggataaagygtaagtttgtgtatayggtygattgagttattggaaatttagtttaygaatygtagttagggaaaygggagtttgtttagttgtttttgyggaggggtgtgyggaaaygttygygatgggaattttttgtagattatgtatggagggagtttataaaaaggaggaaggggagygyggtggggaggaggtygygtgggygtggaaggttttagggttttgggggtgttygtttgtttaggygtagggaatggygyggagttggttggggaaggagtygattaygtttygtaggttaattggtttaagaaattttgtaagygttggaaaaggtygttgaaggagttygttgtaygygtaygtatatatatatatatatatataaaattttaaaaaaaaaaaaaaaaaaaaaaaaaaaagagygtygagtatgygtatagagaggatgttatattggaatgagttgtagtgggagtyggaggatyggagygggygygygagggaggyggygggyggggagygagygggtaagggygggygagygagtaagygagygaggtyggtgttttttygggyggygatyggggtttgggtttaygtygagggtaggaygaattttattaggtaggaygtygygtyggttgttgttttyggygtttaggttggtyggagagtagtttttyggttygtaggttgagtgygttggttaggggttttttttagtttaggaaaaaaaaggaaaaaaaaaaaaaggaaggaagtttgagggagttggggttggaggtggygggtgggggaaggttggggagggtgtaggggagygaaagagaagggtaggagaagaaagygattgtatttgagygaagttttaaatttttttgtgygttttaggttgttatttttgtttttygggtttttttygtttgygttttygggttyggaaaagtygagtygtgygggagttygttyggagttgtaaagtgtttttttttttygggygtagtttgttttttttygtygtttatttttttygtttttgtatttattttagygaygtagtygtygttgttatttatttygygttttygygtttttttygygttggggtttttttttttttttggtttgggtgggagaaaaagatggtgaggayggggaatyggagatyggtatgggggtaaaaatygtgtagatattyggaatygtttttttggaaatatttgtttgagtaattgaaataaaattggtagtagtagttttggagygtgttttagygaggatggtttttttgtttattattttttttttaaagtaatattttgttatttaggggtttttyggttgtttttttttattygatttttttttaaaattgttgatttgagttggttttggagtttattttttaatatgygtgygtgggtatgtgtatgtgtgtgtatgttttgtagaaattygttaaaatgtaattgtaggaattgygagatgtatttattgattttgattaggggyggtgggaaggggttggagggagttgggggattttggagggtgggaagtggttgattttyggtggtyggatatttatttagagtttgattygtattygtgtttttttggaagygttataattgyggggaaggagtttttagaaatygtgttagttttaatatggygggttaaggtggtttttaaaaattgaaaataaaggttttgaggtgggaaaaaatttagttgaagtttttattttttagtttygattttttttggttattttaggaagygttttagygaattaagtggggaaaaaaagaaggaatgggttgttyggtttttttttttygtggttagagtttgtgtgttaagtttattgttaggggggaaagggatggagaagtgtttttggttyggattagggtatygaaaygtaattgtygtgtgtgtttgtggattagtgtgtaggtttgygtgtgygtagtttttttgggtgtgtgtgttaaagagaattatttygaatgtgtgtgtgygttttggaattagattttgttatgatttgaygtgataaattgyggataygtggtgtaaagtatatgagggtagagggagtgatttattttgtttttttaggagaygagttagttttygttttgtgtgtgttggattttgygygggtagattttygagtaggtggggygaggaggtgtttattaaaaggattaattgtttygggtattgggtgtaatygggttgtagaygttagtyggatttygtgtgtgtagggggygygttgtatttaatagtgggtttttgtttttttttaygtygttttggggtgggaggtgggggatygggatygaagtttggagaagattaaagtggtggtggtggtggtggggtggggtagaagggygggagygygyggttttgggagataagtaygtagggtygaggygaggggttgttttttttatttttgggtttygygttttagggaaggtgggggatggggatagygtttggggaagaaattgttttttgttyggtttaggaattttttyggygtatyggagaggggtatttttttgttttggygggtatggaggtygggtagtygtygggggatgtgagtgggyggygaagtgygggggaaaggtyggygttttagggyggggaggatttgggagtggagttyggagataaaatyggggttaggtagaggagttagagggaaagttagtaaaygygagttygggtgagagttatyggaatgygggaaygtagtttagtygggaatagggttttygataggggtygttygtggttaggaygyggtygttgaatagaggtygygyggyggtttttgttygagggatttygtgggygggggttatayggaggtygygtayggttttyggggttggygggggtaggtgggaggatttttttygggttygygaatttgatttggtagyggttaggtgtttggaagygtttttaaatgatagggttataaagatatgttggttaggtttgtagttagygtagtaaygtggtttgtaggagygtagaaygaggttagatagggttattyggaygtygtgttgttagtgggtgggggtygggagtaagyggtattggtttggagatttygyggtaggtgattttttttatttgggtagygaggttgaaygatggygataygtyggttaggaygygttygtggtttttttagtttgygtttgggygygttttttyggggtyggtttttttatgggtttygygaggtggggagtagtttaaaatggttttgtgttgygaagttgtagttttagtygygaatttttttttttgtttttttgaygtygtygttgataagygtaatttgttttaaggtttygaaattygygattttgtaygaggtygtgtygtggaagyggatgtatagttgattataaagaatattttatagggttttygaagggtttaagtttttttttttggtggggaggagggaggagtygagattgggtaggagttyggtygattatygttttggtatttaggggttyggggygtattagtagttggggttggggatttggatgygygaaaagtygagggagttttyggggaygyggatggggattattyggggtaatagttayggatatyggtgttygtggttgatggygtttgtggtgttygagaatttygggaygaygttggaaagtttgggagatygtttttaaatttttggagattagttygtagtttygttttyggaatttttaggatttttgggtttttaaagttgggtgggattttaagaaggtaaggygaggttygtggttttgaygatyggtygttygatttttygtttattttagttttttttattttgtttttttgaattttgtygaatygagtygggtttggggtttyggggtttygygtattaattttagtygygttttgagggttttygtagtatagtygyggttgattygaggttattggtgggaaattaatttagaygaggtygattttttttggatttggttyggttgtygt

SEQ ID NO: 6954 - DNA, 5964 bp, synthetic construct; identical to SEQ ID NO: 6953
  misc_feature 1..5964: note = Description of Artificial Sequence: Synthetic polynucleotide
  source 1..5964: mol_type = other DNA

SEQ ID NO: 6955 - DNA, 5964 bp, synthetic construct; identical to SEQ ID NO: 6953
  misc_feature 1..5964: note = Description of Artificial Sequence: Synthetic polynucleotide
  source 1..5964: mol_type = other DNA

SEQ ID NO: 6956 - DNA, 703 bp, synthetic construct
  misc_feature 1..703: note = Description of Artificial Sequence: Synthetic polynucleotide
  source 1..703: mol_type = other DNA
ygtttggggattttygtgttgggtatttygtaygttttggaygygygtagttttatygggagygaattttgtttygtttgygggtgttayggagaggggttgggaagtygagttagttttggyggygattgggggygtttttggttttttgggggggygggggygygtattgttgtttaggatygggyggygggyggtggyggyggyggtggygygyggtggtygtttagtattygatttagtagygygtyggggattggttyggggygygttgggygtattatgyggygggtygggygygggygaggggygggtyggyggyggggtttattggygtygggttaggttyggygygagaggygygagygggttatgggttgaygtygagggtttgyggygggggyggyggyggggayggggygggggttygttagttgygggygttaaggtygtttagtaggttaagggttttygttygggygaatgggaygttygtttyggggtattagtygtttgtagttagaagtttttyggattttttggaagygtaaaaaataaaaggtaatgtgtttttgtttttyggtygyggtggtagggaggygattgayggtagtttttygtttttygtgtttttaygttgggtyggggaaaagggaygygtygttgtttttttattgggggtttggagtygtttatttygygt

SEQ ID NO: 6957 - DNA, 1315 bp, synthetic construct
  misc_feature 1..1315: note = Description of Artificial Sequence: Synthetic polynucleotide
  source 1..1315: mol_type = other DNA
ygtgggygttygggggattygygggtattygggaygaggygagggygtagaaaatttggagtttaattagtayggagttgagttttygygttttaatttttaggtgatttygtgyggyggyggyggtagtagtagtggtagyggygatyggagttygtagtagtttygagygttttygggaggataggyggygagttyggygaatygttatttgttagtygatygyggygtttygygggtyggggtygggagttyggggygagttygaaygyggtttttttttygttygtygyggagattttgtygggtgggttgygggygtttttygttgtygtttgtgaaygttgtgggtgygyggggttgyggttayggyggyggtggyggyggyggygggagtygygagtyggggtygttygggttgtgtttygtttyggtagtagyggtggyggyggygtttgtggtttaggatgyggtyggggggygtattgttygttttgttygttagtttgttgttgttgttgttgttgtgtttgttttggtgttyggtagaygygttyggtygygttaggtaatttatttattygtyggtygygtttygygtygygygtttygtttggygttttyggatttttaagtygtttatygttttttttygggygyggagatttttggtygyggyggggagtagtttaygggyggygayggtttgagagtggagtgggggagggggtygtagggaggygatttttygatyggtggayggyggttggggagtagagggatyggttagggttgygggggttttagygygtatygttgtgggygaggtagttgtggagygggatttgtygtygggtttygtattaggattttatgttttttattttggtttttgttgttttttttttttygttttaaggtttttttaattttggggttggggatttggtttgggagtyggggagtgygagatttttttgttaggtaaggagygygatttttagttttttagttaatagttttyggyggggtgtagtaatttaagtttttttttyggttgtgtaggattttggtggaggaaagtagggaggttatttayggtattttygtagygttgaggaygtttyggagttyggygatygyggtatygygygttattaataggtatagyggygtttagygygggyggattggggttygggagttgygagtygggtatggggygyggttgtatyggtttggattygttgggagtaggtaggttgggayggygygagtgagtgtaagagtgtgygtgtgtttgaagagggygygg

SEQ ID NO: 6958 - DNA, 1316 bp, synthetic construct
  misc_feature 1..1316: note = Description of Artificial Sequence: Synthetic polynucleotide
  source 1..1316: mol_type = other DNA
yggggtttttygaggtygtttygtygtttaggatggagtaggtttggtttttggaagggygygygggttgtttggggaygggggygttttttttygygtttygyggtttttttttttttattgtaggtagygygygtttgtagygttttgggatygaattgatgtttttgggaaaygaaattaaatttttttgaagtttttagttygggttttttttgtttttygttattyggygtggtttagttygggygyggaaygagggyggggtygtggttatygyggyggaaaygattygggtygggggygggyggygaggataagggggttttgtgyggtattygtttagtttgygttttggggattgyggtygggyggyggggttggaygggagtggayggggttgggygygggttgggygygttgggtyggttaggyggygygttgatygyggttttygtgygtttygtaggyggggagttygtatygtygygttygggtygygagtgatgataatttaagaggtyggygygggygggygtgagyggyggaggagtygggygyggygataygyggttatggagygggagtyggyggggatygaggagttygggttttygggayggyggaggygtygagagggtaggaygygtayggtgygttttaatttgttgtygttttygggygtygaggattttgyggttggygyggttaagggygagyggygayggyggygygggtgtgtttagtatttggtygataatyggtttaagattattaagtataygttgttgttttttttgtttaagaatttgttygagtagttttatygttyggttaaygtgtattttgtttttatygygttgtttaatttygtgtyggyggtgaaygttttttagttyggtttggtattggygtyggtgttttttattttggttattayggtttttagggatttgtgggaggattatagtygttatygtttygattataagattaattatttgggttgtttggtttttagtaggtgagttgggygggygggygagygagygygyggtggygtagggtagggygtttygggaatttggtgttgggtatagtgattggtaggggttgggtgtttagaaggtagttttatttagggtggagggttyggttgygygggattyggtgtygatygaagttatagygtygttaaggtttttttgtgttttygtygtagttaaaggggygttttggatgyggggaygygtggggattttttgttatttygtgtyggggttagaatgattttaaggttagaaatygayggtygt

SEQ ID NO: 6959 - DNA, 1110 bp, synthetic construct
  misc_feature 1..1110: note = Description of Artificial Sequence: Synthetic polynucleotide
  source 1..1110: mol_type = other DNA
ygtttatttyggttyggagygtggttaggagagtyggtatygtagaaagygttgygggaagygggttttttttygtttattyggatttaygatttttagtaggtttagtttatttttttgatttatgtttttttatgtgtttttttygggaaggggygaggagggttagttggagtaattygggagaagtttgggaggattggtaggtttttttygtttttttttattggtttttyggaagtagagaaaaatggaagtygaggtagagttaggaaaaggygtaaaggggtagggttttyggygttaggagaggagtagagggtgggtaggygaygaggggaggaggtgygaggttagagatttttgtagtggaggygtygggagaattygaggtyggtgttttgttyggyggtttataaaggaaggagaaggygtygygttttygttatttgtgyggyggtttygagygttttygygggagttaygttttttagtagttttatttggattttttgygttatygtygtygtygttgtgggaggygatttggatatgtttttttggattattggygaaaagtyggttyggagygaagtagttagttttyggyggygggttttttttttttygttttygttttttygygttttgatyggttttgggggtygtttagggtttaggttyggtygttttyggygtagygtttygtagygtttygggattyggygttttgttgttaggygtttagtgygygggayggggtyggggtatygggygaagygagtygttygggaggygggaygygggggygyggttgyggtgtttgggagaggggagtttttagyggggtagtyggggtygggagagygggygtagygyggyggggatyggagtygygggygtygggaaaggttttygttaggaggggagggaatttygggagygygagttagggggaggygygtyggaaagygagagtgataagtagtttataagtygaaaagtttttygygggaggygygygtygygtgggtttygatttagtygttgygygtygtygtggtatataggttgaaaagtttgygaagttatagaagttaggttyggygt

SEQ ID NO: 6960 - DNA, 1655 bp, synthetic construct
  misc_feature 1..1655: note = Description of Artificial Sequence: Synthetic polynucleotide
  source 1..1655: mol_type = other DNA
ygggttttttatyggygaattgaaattggttygtgaagaagtggtaaagtaatataatttttgtagyggttaggtyggttttygggaatttygttatgtygtygtygttatttttttattttattygttagtttttygtyggtgttygggggttttygatgtaataggtaygatygggttaaaygttgyggatyggtttyggtaggattyggaggtttttgtaaatgtygttgygattttatagtagggaatygagaagaggaagaagygaaygygagtaggagygtagygtttttyggatttttgaggttttttttgtaatttgttatattygtagtttttattygatattgaataataatygyggggaggagaggttatttgtagtygaggttygtaaattgtyggttttattygggtagygttaattyggtgttygyggayggtgattttygagttttagygatgygttttattgggtttaaaatagatttaattttatagttagygtygttgtttgttttagatttattagggttggtyggttttgtaggaatttttttttgtttagggatggtttyggtaggaggtttaggtttgygggaaggaggttgatgaygaaattttttygataagttttgtttttttttttygttygaygtagggygygygttttttttygtagtyggaggaatgggtagttttaaagagttgagttttgggaaggttagggttgtagtagtttgaggttygaagttaggaaaaaaatgtgtttaaaaaaaaaaaaaaaaaagaggaagaagaaaggaaaagggtggagtgggagggagttaygttggaatttatygggagagggttttttygggtttaggaggaggtggttttaagttttygyggagttttaggagtttggtggyggaggaggygttgtygtygttaygttttttygygttttttttttatattttgaggagggaaggtagttygtaatttgttagatttgtygtygtatttttttttttttttttttygttttttttttygtttttttaggttttttttatttttttttttgaaatyggtagttygtatagatttgtttaatggttgtatttttttyggggttggttgaggagtygyggttaatagattaagtygggggagtttagygaaggggagggagagggttattttagtttygtgygttttaggtagtyggttgttttagagygyggggagaggggataggtyggggagttatygggggagygyggggyggtattttygygtygtyggggygttattttygtagtttgttygtaygttttgggtagtttygttaattgygttttatatttatttggttttygggtygttttygygttygattgyggggggygatygygtttygtttygattttggyggggtttttttgggtaygaaagggttaattatagttygttttttygyggaggttggttttggtagtggttagggagtggagaaagtaaattagagtyggttyggttatygattttgygaagttttttygattttagtttagygygggagggtggyggaaggtggtgtatygtagygtggttttygtygttgtygtygyggttttgtaaagtgttagygggggygaaagyga

SEQ ID NO: 6961 - DNA, 1655 bp, synthetic construct; identical to SEQ ID NO: 6960
  misc_feature 1..1655: note = Description of Artificial Sequence: Synthetic polynucleotide
  source 1..1655: mol_type = other DNA

SEQ ID NO: 6962 - DNA, 304 bp, synthetic construct
  misc_feature 1..304: note = Description of Artificial Sequence: Synthetic polynucleotide
  source 1..304: mol_type = other DNA
ygyggtgggtagggttttaggaggtagttttygttyggygatagttttyggggygtaatttttygtaggaygygtatttgttaggatagttattaagaggatgyggaggttgggggttttttyggggataaaattagggtattttaaggaattttttgygygtttaggtttgtttgtgaagttggtaggyggaggataatgggagtaggggtaggtttttagaggygagttygtttttattttttttatttgttttttatttttgygtyggtygtatttatttygttttttttttagygttygt

SEQ ID NO: 6963 - DNA, 1666 bp, synthetic construct
  misc_feature 1..1666: note = Description of Artificial Sequence: Synthetic polynucleotide
  source 1..1666: mol_type = other DNA
ygaaatygygygagtggtaggagtaggttaggtyggaggttttttttyggtttttaattyggyggtttgttttttttttttyggggygtttgtatagtagatatttgtagtaygggyggtygttygggttttygatataaggygttggtatttgagtttttgattggtaatgtattataaatygttttttttaggtttttttagagtaggagtayggaggttatygtgtttataaatttttttgtgttygttaygttttttgggttttgggygttygggtttttagtygtagagtaygtttgttygtgggaattttaatatttgtgtttygygaggtyggyggggygggggygggggattgggattattttgtttttttttagttyggtttttttygttttgttygtygttggtttatagagygtagygagtggaaygaattgggtgygtygtttttagaygttggyggaaattaaatgatgaggygaggtgggatattygtttttygtttygyggtygaygtttagtttayggtaaaggtattatayggtgtttygtttygyggygaygygagyggygggatgattyggtttgggttttggygtagttaaaggttyggttygttggggygygattttagttyggygygtatagtttttygagttttaggttggattgggtgyggttgtatttgtggagtgggtggttyggtgattgttattygggttagtgttgttagtagatgtgtatattttgggygggggttggyggtygagtgttattagtaggggyggyggttaggtagttattygtygttttttaagttyggygttgygygtagggtttggagtattyggtgttgagaygygaatgygtataaagagaaaagtgtttttagtgtttttttaaaatggggaatagggaagaaggataagtattatgtaagattgttattgttatttgttttttgyggattatgttgttttttttttygttggtttggttttgagtattgaaagtyggggagagggygtyggttttagagttagtygtattyggggatygtaggyggygttggttygggttatttaagttyggtagatgagtttttggtttgygggggatygggtyggaggttagggggayggtagtgtygtyggagggagygygtagtttaaggtyggtgtttyggtttygygygttttttttygggttygtagggaattygggttatttggggagtygggttttgtyggttaygttggtttttygyggttttagaattaattaaaygttttttttggttaagggaagttttgygtyggaygggggtgggggygtgtgggggyggtatgtgggtatyggaataattagttttatttttgygtttttatagaattygyggygtagygagaagtgaatagyggtygtttgaatggyggttttaaaaggygatatttgtaagygyggtyggttgtgaattgaattgagttaaatgyggygttygttygtatttgagtygygagttattagtgttaggygygttyggtygttygggyggggaagygygyggttaggtygttygygttgaatgyggtaagttgyggygyggtygttttatgggaatgtygttatttgtgttgttagyggtygggagggggtgygt

SEQ ID NO: 6964 - DNA, 5030 bp, synthetic construct
  misc_feature 1..5030: note = Description of Artificial Sequence: Synthetic polynucleotide
  source 1..5030: mol_type = other DNA
ygygttatagtggtttttttygtttagttaygygtagtgaaattttyggtaatygggttagttaagataygggatttgtatygtagttttttagtttttggagtyggagtygagygttttyggtagtttttttaattttttttttaaagtgygaagggaaaagtttygtttgttttaygattgtaaggtyggyggatttgggagtygygttyggtttyggaggattyggygggttyggggtttttyggtagyggtttttttgttaggggttaatagtagttttygyggtygggygggygyggaygttttttttttattygttygggaaygtggatatygygttygtaggatgttygtyggttgggatyggtagttaggaaatatgagaaggtttygttatttttgttttygggyggygygygtygggttgggtaaataaagtygagaygayggyggtggyggtggtgagygygttggagttygygtggagaatatgyggyggggatgggagtgygtttagtttygaggygggagagttagtygttttgtagtyggtygtyggtttygtagttataggtatagttttygygtygtygagttttagtyggttgyggyggaaygttaggttygttttggtttttgygttttgggygtyggtgttttttygttttttttttaatttttttttaaggtttggtggagaggygttygggtagyggttaaggttggtttaagggtttgygyggagtttgggagtttatttggtygygttttttttgttttaaaattattygtyggygttgggggagggggatatttttgtagggagtgattttttyggttatagtttggagtgaatyggggtaagtgatttgagaagaggygygggtggtygygygygggagttttgggagggttagtaagtgtggtttataygttttyggattttttgygataggatagygttyggatttttgttatygtttgtttttgagtttgttgtttgtagatttatagygygtygggtgtttgtgtttgygatttttgygtgggtttggggttgtyggggaagtgttygaggtggttaatttygtgatgatttygttaggaaaaataygtygtygtatttaggaggaygygttggggtggttyggagaaggtygggtyggggaagggtgttttgtataaataaagtagtatgaatatatatttttaagggtatgattttaaaagaaaatattaaygygagttttgattgtagaataggggttgtaagtaygaaaattttttttgatatttattatygaggttatgtgtatattttaggtaygtatttgtttgygygggaggaygtagttttaggggatataygatatttagtagaggtttgattttatttttttaygaatatagatygtagtygtygtttgatygyggtggttaygygtggttttaaatgttaygygtggtttttgttgyggtggtygaagggyggggygggggygttggygagtgtgggygtttggygaggtaaagggtgtgtgtgtgtgtgtgtgtgtgtgtgtgtgtgtatgygygygygygtgtgttagtggagtagtagtttatgtygyggttggaygggtaaagggggygttggtagygaagttgaggtygttyggaggaaaygggagttgtttygaggygygaggygaggagatggggygggygaagttygtygygygttttggggttgtaattttgyggtttygyggtygygyggatttgtttttgaygtyggtgygyggtaggtagaggtttagggttttygygattttagaggtgagttgttggtttttttygatagtggtagtagtggttygggaggtgygtygattaagttgttttttgttttgggtttttgatatttttatagtttttgaaagggttttyggagattttagagagaggygggtgtygaggggttaygagttygyggttgatattygygttgyggaagagaatggtattgattgagggttttggggatttgggttttggygttttggattttaggattatgtatttttyggggygygttgggggatgataggaagattttgggagagaagggggagaagtggtgttttygttttgaygttatttaatttttttttgtttttgaatttaattttatttygggggattttggyggatagaagatgygggggttttaattaaattatttaygatttagaaaataygaaaattttttaaatttyggtatggtttgggatttatgagttggggggttttgtggatayggttggtatattattttaaatttttttttttatttaattttttttgaygtttygagttggggtttttagaggttttagttttttgttgtgattgaagaattaygygyggttttaygtyggtygygtttygtagttyggagtatgttttttttagatttaaattgaaatttagaggttygtttgggaattygttttttttgtttttgygggtgaatgattttyggttgtagttttggggagtgaagggattggggggatygatygtttaggtaaggaagagggtaggtatttgttyggggaatttgtaggggygggggygtgtagttaattggggagagtygtagggtttttgttagttgyggyggygtygttttttttttyggtttygtagttyggygattyggttaagtttaaggttttgaatttgtaggggtttgagtatttttagttagtaagtaaygagatgtattttttttttttagaagtygagtttygttgyggagttttyggyggtttagtttygaggttttgyggtygygtygygygtttttattaatygatattatgaatattatygtttttaataagtttagyggtgyggtgttgtttgaggayggaggygtttyggagygggagyggggtggtyggttttatagyggtgttttggatagtttttaygttygtttygaggtgggtattttygayggttygttttttaaggataatttyggtttgagatatyggaggatygggtatgygtatttttttgggggttttgttygtttgyggttyggaggggtgggggtggtgagttgtgayggggtttygtggtaaygygggygggtggaygggaaagggttyggagttttttgggagtgtaggtttgtttttttagggttygygtatttttatgttaaggggtttttattttaaaatatgagggattaattygtyggggtagttttaaagagtttggtggagattaagggygttaggagttgtttttyggtttttygttgtttggatttyggagttgggggttatttgttttttttyggattgtgggtgtyggtgygyggttgagggygaggaaaaaggattgagttyggtgtagagaaataggygaagtygagtagtyggggagtttaggtttaggtttygyggattttttttyggttattygagtttttygttagagtttygyggttygtttggtttaaggagtygggaaggtygtttttygttagggagtttygggygtgagygyggttyggttgggttygyggygaattyggagggggaggtttygggtttgyggggtygggtttgagtttagyggggtgaggggtatgttggggggggyggtagtttgygggtgggttagttgtttagattgtyggtgagtggagggtaggttttgtttggttygattyggyggtttttygggygtttygtyggggaggggyggtygttttagtygtttttatttgaaygattgtattagttgtttgttttgyggygtygttgtttagtaaaatagagattyggtttygttaaaatgttattattagtygtttygggtggaattgtattttaaagtgtttaaagaggtagaaatttaggaggtttyggygtaggygygtaagtttyggggagyggttgggttygttggyggtygygygygatatttttyggattygtgagggagygtagygttttaggttaygttttaggtttttggttgtttttgttttttttttttttgaatgtgttttttttgaggtttttttattttatatgatgggatagagtttgtygtatttttaatttttttttagtygggaaayggttygayggtgtttttgggttttgtagtttttttttataaattattaatttttttagaaagtttttttttttttttaaaagattaaaggaaatagtttaaagagagtyggggyggtaatgtttttttgttttattttttatgtttagtyggygattttttttttgattataagygayggaaagtttttgggagtagataagagattttygagggaagtttygagagttagtygtatattttgttaggtttgttaggttagggttattygagggtgyggygttagygggtgagggaagggtagtagttagtttygttgtttagataygygattggaatagtagtattttttaaattatttgattttygttttttaaatttttaattttggggtattgggtttaaggtatttttttatttaagataaatttatygaaatgatttttttatttagaaattgtgtggtttttattttttgttttttttaaatattttgggygygygtaaagtaggggygtaaggtaggaatgygtagtttggatgyggggttygggtttggtyggggygtggagygttygggygggtaaaygygtygtttattagggtygttttttttttttatgttttagygttyggtagaatggygggaaggtgaggtataagyggtaggttttgtaagatatggygygattttttaagtagtggttttataagtatygtgataattygtattttattaagatygagaagatatttttggttttyggttygtagatgaygttagtgtaggtaattaggatttattaatattttgattygttttttygygaggggttgaagagygggaaygtttagagttygtgtggttttttaygtggygt

SEQ ID NO: 6965 - DNA, 2868 bp, synthetic construct
  misc_feature 1..2868: note = Description of Artificial Sequence: Synthetic polynucleotide
  source 1..2868: mol_type = other DNA
ygygtttygtattttagaggggagggagaaagggagtttaggygyggggggtggggttgggggagtaygagagagtttttttttaaataygtattttttygttttttygaygttgtagyggttttattatagaygtatttattgttttttttttaaaagtygttttaaaaataaygtaggaattaaagygagtttttyggttygaaatgtaygtgtaattttttatatagtttgggttgyggtyggyggtagggtygttgtygtttattattatataaataggtatyggggyggygtaggygggggttgttttttttgygttttygtygttttygggyggataagtttygtttttttygttataggaattgtttagataataataattagtagatatttygttgttgtaygagagggagagaaagtatagtatygtttygagataattagaaatataattaatttataaygtttttttaaattggaaaaggygattgtgtaattattattatatgtttaggtttygatttttygggttgtttttttttttttttaatttttaygttaggtagaggggtgtgtgttttttttggtatagtagtataaattaataaatattgtagttgyggtgtaagtagtagtttygygygttygtyggttygttygtttttttttttattttttttttattygagatttagagygttatttaagttttattattyggttttagygtttygtgygttyggtttaggtaataatttttttaaaaatygaaagagaaaagygygaggygtaygtatatyggtttatttyggygtagagatttygtttgtttygggagggggatttgtttgtggtgtttttyggtttttaagtttaggtaataatttygtaaatatattygtygtttagttygtttttattygygyggttttyggyggygttaagtgggtattttttttgttttgtttttygygtygtttygtygygtttygttaaaygtggattttattygyggggttygtygyggagtttttaggtyggggttttgggtygggtagygggaggygttagggaggaggggygtttagggattygygttttygygtttttaattttygttaygygagygygttyggttygygggttttaattttatygtygtyggtygaattttgttygttygyggygygtatagtyggygttygygtataygygygtataaattttaygtaattygyggtygtttygtttygtygtygtygtagttygtttgtygygygtttatagttyggttygagtygyggggttygagygatagygayggygtyggtyggggtygyggygygyggaagttattttgtayggttagygtygggtataagtttgtttygyggttttygggggtttgggygttgagggagaatygygttgagggggttaggaggagggggagagggaggygtygaagggtataagagtggggaaaagtgyggaaagaagtaatagtygttttattygggattagaaaagtggttagtgygtttyggtygttygttttgygtyggggatgyggyggygtyggygtyggttaayggtttagggaggyggtaggggyggygggagtygttaggyggagagagattaggtaagagatataayggtttagggagagygagyggtygyggygyggtttyggtagyggyggtagyggaggggggtagagagtattattttttatttttttattttattttgtygtttttgtttyggttgtttttagttyggttygttttttttattttygggggygtttyggttgtttagttttttttgatttygtygtttttyggtttttttygttatttatygttattgygtygygggttygtttgttttttgygtttatatttggggttattygttatgattttttygtttgtgtttaaatgttygagttattttttttttttttttttttttttttttttattttttygtttttattttttttttttttttatygtatttggtttaygatattttyggttttaygatattattttttttatatttagaggttttygttttayggtyggaattttgttgttagggatygggyggtttgyggtaatygtgggtattgttgaatttgaattgaggggygagggaaaagttttttttaggtgtggtggggagagggaggyggatgtygggaaatygtagggaygyggttagaaaggygaygggttgtyggagttggaaaggtaaagttggaggttyggyggygttttgttttygygttggttatattygtygyggttgttyggggtagggagggatttggttgattttttttgtattttgtgttttyggagttgttttttygagygtttagaggttttygtttgtttgttttttggaggtagggttattattagttttaygtttygygtgttygtttttygtatttyggggttaaggaaagggatygyggtttggatttttyggggagtttttttgatgaggggaagggtaggtttggggayggygaggataygyggygatyggagagaggttatttgattygygtagttyggatttttttttttttttttttagggaygtttggtttttttttaagygaatygggatgggaagtgattttaatgagattgaattttagttggattgaaagagaggttagaagtttygtttgttagtagtttttttagtagagyggaatgagtaatatttatayggtgtttgttttatttttttattygtattyggtttttatttgttgttatttyggttttttatattyggttygygtttttygttttttttttygygtagaatygt

SEQ ID NO: 6966 - DNA, 2678 bp, synthetic construct
  misc_feature 1..2678: note = Description of Artificial Sequence: Synthetic polynucleotide
  source 1..2678: mol_type = other DNA
ygagaggygatggygtttgttttggttagatttaagggtaagygaggttgygygyggttttygtagggtyggattttygagttttagggygtttttttattygggtgtagatttttygyggattttttygttttttygggttttattagttgygtaggaatggagttggttagagttttgggagyggggagggaggygtygttattagagggygtyggagttttagygttgyggtyggtgagyggttaggtttttyggtttagtttagtaaaggtttggggaygttygayggttgttttttttattggattttattgtttttagttttttaagagtagggttaagttagtggggttttyggttttaagtttagtgtttagggtgggtgggtgggtgggtgggtgggtggatggatggatggatggatggatggagtgtyggtttatagttatttaayggttaaagtggttttggaaaaaaaatgtatagaagatatttatttttattagyggagtttyggagttttygtagttttttgttgatygttttygtttaatgtagtygttgatygtttatttttygayggttaggattttttagggatagggaygtgtttttagggtaggtttttggatggaygyggygattgattttatttygttggaygttgtgttgggaaggatatagagaggtggttggggtagtttgyggttataaagygaggtttaaaggggygttttttttatttttaygttttttgggtgtygatttgtatttttttttygttatyggattggggttatttgggatgtttygggggtattyggagggttaagtatygtygagggayggtttygtgggaagagttttttggatttagaaggtagaygttagtagtattgttttaggagtyggaggtyggggtgggggagtttttagttttttgggtygtayggagttttttttgggtaaggtagtaagtatttaggtttaaaggatttatttatagttattatttattgagtattgtttgtttgttagataygatgtagagaatttygyggygtggggygggttttattgaatttttygttttatttygyggggtgggtttgtgattagtttattttattattgagaggtyggaagtataaaggttatattygtttttattgagagtygtyggygttttttgttttgtttgtataggygaggaaattgaggttyggttggtggygtygtgggtttggagttygagttaygttgattgtaaagaygggttttattttygtagatygagttttgtyggyggttgygtygtaagtygggtaggtggygagtttgagtttttaygtatagaaagtaggattttttyggttgttttgggtygttatygttagtaggtttttygttygggattaatttgtttgttttttattggtttttatttagttttygttatygaaaggtttygtttygtagttttttaygygygttttattttaygtttaaggtttttagtttttttagtggggttttgttatagggataataagyggttttttagtyggygtygtttaggttgyggattttattgtagatygggttagyggtgyggggtttagyggagtttgagaaggttaaaggtyggagygtattgygtttygggagtatagagggagyggaggaggggygaaggggatgggtggggggtgtygtygagggagtygygygttagagatttyggttayggttagtattyggtttygggttygttttttatygygygtttygtttygtttygtttggtttttttttttaaagygttyggygygygttttttatygtygtatttttatttttygttagtygtattgttygttyggygttyggttttygattygygttygttygttygttygttygttygttygtgttatgaaygttaaggtygtggtygtgttggttttygtgttgatygygttttgttttagygayggtaagtgygttyggyggggaggttttggygaggttttgggtttyggttttygttyggygtagagtygyggtttttttgtttgygttygtagtttgygtygttygatatagtgggggtggaggtagttygtttagttgggygttttggtgyggtgtygygtttaaagttttatttttgygtygagggtttgtgatttgtagagagygatygtttgattttaagttggttgtagagygaggttagtygggataattgggtaggaaygttttaagagagygttygggattggygygggaaggygygagggtggggagtygyggattttagatttttgtttgtttattttttatttattgttttttygttgygggttyggtttttataggygaatgggtttygaggttttgttgygtatagtgttggaggtygggyggtgtatggygagagygygttttgtaaagttygttttatgtygygatttgaggttgtgaggttygatgtagtygygtagttttygttttttgygaagtygattttttttttatattttygyggggtttttggttaggygygggygggttgygyggygtagttgtygggtttgtgttattygttaggtygygtttttgtatagtttygyggttygtagygaygyggatttgggygygygtttagtygt

SEQ ID NO: 6967 - DNA, 2756 bp, synthetic construct
  misc_feature 1..2756: note = Description of Artificial Sequence: Synthetic polynucleotide
  source 1..2756: mol_type = other DNA
ygttttygtaygtattaaaagggttaggygggttgygaggttygtygttttggttagatataggaygtttaygtaggygtatygtatygtatagattttgyggtggtttattaagtagtatatygygttyggaaygggagygygttaggaggtttaygttgyggagtagtagtaagaygggagtatagagtaggttggttagttttatgttaaggttgagttgtttaaagtttagygagtgtataatgtggtttgttattatgggttygagygygtaggttatygaataggagatgtyggygatggygtagaygttgttatagattgagatatggygtaygtttattaggaaggygagygtgggtagtagtgttgtgtygattagggttatgttaaaatagaggtygtatagtgagattattagyggygygaaggagyggtaggygggtaygatgtaygagttggygtygattatagttagtttaagygygtygtatagttattgtaggtgtgggtagygygtygttaggygtayggtgaggtagaygtttagtatatgaggtaygaaggtyggtagttaggttatgtttattttttattyggaagtygttatygtatgttttatttaygtggtaatggtgggttygaggaaggygaggggaatgttataggtggtgagygygtyggttattayggtaatgtaggggtttagtatgaggyggtggatgggagtgtttattggtaggttggttygagttygtgtagtygtygagaagggtttggttattgttagtagtaatagygygttaaagagygatayggtagttagtattaagaagggtaygygtttgtyggygaatttatagaggatgttttygaagggyggggttattaggttttygaagttaatgaaggttagygttaygtttagtgtaygattgygtttyggttttttygggtatttatyggygattatggttatgttagaygtgtyggygaaggttgagtttaggttttgtaggttgygygtygygaatagygtggygtagttttyggygaaggygaataggattgtagaggygaatatgaygtttaggtygattagtagyggtaygtygtagtttatgyggtygatgaagggttygtttaaggggtttattagtagttgtaggatagttttggaagtaaatagtatttygatttttaygttttygtttttygtagggtagyggggtygaagggttgagttygttggttaygtagttgtyggggaygtygaggtgttggtygtgtaggygttggtattggtyggagtgggtagyggtagggtgggtttttatatttygggagttygggtggggttttygtygttttygygtatgtgggygatgtagtygggtattatgggtaygatgattatgtatagtatgttgtttagtaatagygttaygtataygataataagtattaggygtttttgtygtyggggtttttgtagygtygygtttatagttttygatagtttggtggtygtygttygggtttggttygtaggtttygyggattttatgtttttatttygatgttttttygaggaygttttygttagggtygagygttggygtttygtagtgtagaggygagggtaygggatttyggggaggttgttttggtygagtagatttttttgtgttttaggtggtygyggagtttatggtttagygtttygggaaaggaaaggatttygttyggygaggygttgtagttatttttagtygatttygggattygyggttgttgggtttaggggyggtygggaagtygggygygtygaggggtyggggtyggagattgggygtatttygttyggggygygtttagagtagttttygtygygttaagaggtygttygygttggtygagggatatgttgttgtygttygttygtttgttygttygttagtttygtygttgygttttttttttttygygtyggtttttgtttttttygtygtttttttttttttttttttttttattyggggttgtgaygyggygagttttagttttygagtggtgttygggttatttaygtygtttatgttaatgygaygtyggyggggygggggtygggggyggggygtggtygggtaggggttygttttttagatgttttagggttggaggtttaggaagggttttyggtgtggaagttttgaattagtttttgggatgggygtttygygtyggtagttggttttttgtttttygttttttgtttgtttttygttygyggttttaggattygyggggttagygttygtttttttttttttggggaagggggygyggtagtyggtttttygaggttttttgggagaggygggagttagaggtttgygattttygttttagtttggatttyggygtatagygagtaggaagttttygaggtgagtygtygttgygtttatttgttttygtagttggattgtggagtygygttyggaggagygttggatayggatatttttaatttttttttygatttygttttttggttttttgtatatatattttygttaggaggggaggggaaggtttagtaattgtttggtttggttttgatttatyggttttttygtagaatttttyggtygygaatygyggtygggagtttgtggggattgagggtagaagttgtygygttttagtyggggtygygaatattagtttggtygttgtygttttttygt

SEQ ID NO: 6968 - DNA, 990 bp, synthetic construct; identical to SEQ ID NO: 6738
  misc_feature 1..990: note = Description of Artificial Sequence: Synthetic polynucleotide
  source 1..990: mol_type = other DNA

SEQ ID NO: 6969 - DNA, 829 bp, synthetic construct
  misc_feature 1..829: note = Description of Artificial Sequence: Synthetic polynucleotide
  source 1..829: mol_type = other DNA
ygtagygatttygygtaggtgagggtattggggagttygtggtttttttygttygtyggtttttttttattagtygttagttagggttttyggygtyggggaagttttttatagggttttaggttatttaagygyggttaaaygtyggyggttyggtttygtttatttgaygtagtygygygttygtttygatttattaggygygtagggttygttttygaaattygygygggttttygtagtyggtygygyggtttttagtygygaagagagygtygygtayggtggygtygttatagtygtgggtygtygygtttaggtagygttttagttgttygtaaagtttttgtagygtygtttygtyggggtttaygygygtyggttagagtagygtttatygttygagttttagattttaggtttygtygtygtttaygtttagtttyggyggtagtygtgggaagtagtgttttagaggyggttatagygtygttggttgtyggygygygtygyggaatttygyggtygagagtyggtyggtttagttgggyggggatayggyggtttygggtttgtgttttagttttagtygggttttttygygtygttgyggttgttgygyggtgyggtygtgataagttatagtaaatttgtttttygygtygttttaagttattaggaagygtaatyggtgtttttggggatyggygaagaggttttttyggagyggygtttagttttttaggttgtygggttgttygttttttatggtygtyggyggtagyggttttagggtttggygggygygggtttgatttygtygtatygt

SEQ ID NO: 6970 - DNA, 4119 bp, synthetic construct
  misc_feature 1..4119: note = Description of Artificial Sequence: Synthetic polynucleotide
  source 1..4119: mol_type = other DNA
ygggaaaggtggtagtygaagatttygyggttttttttygtttaggtatttygtttygtttttagtttyggttttgtttttygygttttgttggtygggtattygggygtttaggagttttttttyggggtggygygyggygatygtyggygggtttggtagtagygttagtygyggggyggttygggtaattygttygtttgtyggttygtttaygtgygtagagaggagygaagygygagtagtygtttygttygygtttgttgtyggtgggtgttttatttaaggggtyggygggggtygtaattygagttttatygtagggattygtatttgtataattyggttttttttygttttttyggatttagggttygagatgygagtyggattttttttygaggygtygttttgtttatggttagygygggggtygygggattygttagagygtaggyggagtgggttggygtaygtggtaagaaygtagttatttttttttgtttttttttttttttttttttttttgagaaataggattttgtatatttttgttggggtggggtatttattagggtgttaattttgttgygatttttttttatgttttttttatttttaattggaaaaaagygtatagygygagygagaaatttttttaaatgtgttttgggtgatttaagttagagagatggtyggtygttggatatyggttgttttggagggagggggagaagtagygttttagtggaagagtagagggagagatygttttyggtagttttagggttttgatygyggtgygttgggttyggygagagttggygtayggttgtagyggtygaggtaggtgagyggttgaagattygtttgtagygtygygttttttttayggygtggygtygtggttttygttygtttyggtttatattaagttagggtygtttygggttyggggtgaaaaagggataggataggtttgygaggttgattttgygygttatttttggttttygyggttttggagygggaaagggttttggggtagttygtaatttgtataaaygattatgaatgagttatgtaggyggyggtgygttggatttgggtattygggattagttttttgtggggtttyggataggttyggttatttattgygggttggggygtattgggaggtagaagttttgygtttagtaagttagaatttgttgttatttggattttggaaaagtttttaaaaattgttttgggaaygaaatagaagggtttttatyggggtttygtaaagtaaaaygagtgggttgggggatggggatggygttttgaaagtgattagagatgttttyggtygttattgaggatygygttgggtttatygaggtgttttttggggagggagagaaaatatttattttagtaygtgtattttggttygggtgygggtagggygyggttttggattttgggttatgggggttagggggattttgtggttgtagggatyggtagtgaaggttaggttagtgtttttatagaattttttgtttagygagttyggagttygttttgtygtygggatattgttggtaaygayggygygyggaygtagttaatagggaggtgtgtagtgtaaggtgtgtgagygggtgtgtgaagagggtagygggggygggagtgtgtagyggaagtggagygagtgtgagtgtgtgtgtatgtgtgtttggaggggtagggtgagtgtttaagtttttatttggaygtttttaygtagtygatygtttagaygygtygggaagggygttygtttygygtagtagttgaaggggggyggggagygygygggtagaggaaggagggtgttttyggttgaggatttttttygaagttttttatagtaattttgttttttttagggtttatttttttagttttaaggtgtttaaaatatttaaataaataaataatttaaatttgtttygttttygtttttgtataaatagaatagattttttaaaaaagtaataygtatttatttttattattagttatttttttttattaagtaatttagaaaaaagtagttagttttygtgaatgtatgtagtttttttttttttygttgtttttttttgtttgyggttttgagttgttaagaaagtgagtaggggtttgattgtagtgtttyggtttygttyggttttttttygaagtttaatttttyggaatggtttttaaataagggttagggaggyggagtygtyggtatyggattttygttttttttggaaagttttagagaatyggaattttttttygtttygggaggttgagtygtagtttggagtagttygtttttttgttgtggttgtgattgggtttatggygygttttttttttygygatttttgygtttyggatttaggttgtagttagggtygygygttygggattttagygattttygtygtttgygagttggaagtygygagttyggyggagttygygyggtygagttygtgtatgtaaattagttatgtgayggtaaaagtygtttggtttagttttgttttttagtttatatatgggtagygaygttaygggtattgaagatttgtttataaatatttagagtaatatttttygtttaattgagygaggagtaattgattaatagttyggygaggggatttattgattgttataataatattatattagtaatttttggttttttagtagtyggaatatagataggagagagttagtggtaaatagatattttttttattttttaaaaaatagtaatttgtttgttatttttatttttgttgattttttttttttggtgtgtgtggtggttgtttttaagtgtggagggtaaaaggagatattattttaggtttagtttaatttttttttaaaayggtttttttgatattttaggtagygagggagttgggtttttaggttgtgygaggagtaaatgatgatygttaaggtygtagataaaattttagtaatttttagtggttttgtgtattagttgtttgataatatttattyggtggaggatttygtygttaygtyggtgattattttttttaatgtygaattgggaggtttttttgattagatgaayggagtggtyggaggtaagtygygtgttttygtaggttyggatttgygyggttyggaggtggtggatggggtgtagtgggtgtgygggaatygtaggagaggattggggttttaggtggayggtgttgattgtattggttttgaagattggaagtgggtgtaggaggaatttgygatagttgagattagggygygygggtagatgygttaggtygttagtaaatyggygtgygtgygtttyggygygtttagtttygggygagygtagggatgggggtggaagaggygttttttygggtttygaggtttgygtaggttttttggtyggtagtatttygattttttttttttyggggtaggggtaaagtgayggtaaagttyggggttttyggggagagttgygygtttggagagtygagyggyggagaagygttaggggaaagygtyggtagtttttttttgggtagagtygatttygggaaaatttyggagygttttttttttgyggtttggaggygygtttttatttgttygtygttygygaagttgagggggttagtaaggygggggtttyggtyggyggaggtagygagtgggtggtggaggagggygygtaayggygggaagtagttttyggattgtygagggaggttygygggggtatyggygaygtyggtttttttggygatgttgtggaaagtygtttttygyggttttygygtttttttygaggtygggttattggttttgggttgaggyggggaygygyggttgtygggaaaggyggagaagattgggagggtayggaaatttayggatttttttttttatattttttattygttttagtagttttyggttgaagygtagygggagagggagggagaaaaaggtataaggygtyggggatggggagtagtygggaaattatttatttttttttygggtttttttttyggtttggtattattaygg

SEQ ID NO: 6971 - DNA, 1575 bp, synthetic construct
  misc_feature 1..1575: note = Description of Artificial Sequence: Synthetic polynucleotide
  source 1..1575: mol_type = other DNA
yggtttgggtttttgggygygtttgtygttgygygggygyggggyggttgttatattattttggtygggtttygaaagggaggagtggagtttgttygttttygygagttttygygygtttagtttttttttatttgttyggygtgtttagggygtttttagygttggaagtygggggygtttgttygaggygggagtygttgggttatgtttttgtttattaggtttttygaatttttggtagggtagygtttgttygtgttttygatttttttygtaggtaattygygygaatttggggttygtagagagygagygttygyggatatyggttgaatagtttggaggttgygygagggggygtygyggggagggataaaagttagtaataaagagtatagatttygtttagtagttgattgattygttttaaaatagtygtttttatttgttgtttttygygtttygtttttaggygtagtattygggtttgtagttyggtygttygaaagtgggygagtaggttgagtgttagygagtagagggttagygttagtagttygtaygattttggattyggtagtygtgygtygygtttygttygygtygttattagagttatygtttygggygygtttaattttttagggtygygggtatyggtggttgtygttttgtgggtgygtttygttattattttttygygttttgagaattaataaataaataaatagaataaataaaggygatagtygttgttaaaaggttttatttaaattgyggggtagggggaaagggtttgtatygttggaaaaygttttttttygttgttttyggtaaagaggayggaaaaattagtagtaggagaggaagtgtygaaaaagtataattagyggtaattggggtatatttaggtgagaaaaaagttatttygaagaaygttttaagtttaggaaagttaggggaatttgatyggtttttttttttttygtttagtttttttttttaagtgtttgtagagtagttggtgtygygttgttagtttttttgggygtttygtgtttttygggttagttagttttagttttygggygaaggggygtatayggagggttttatgggtagaggtgggtygtggyggttggygaggagygtaggggtygatttyggygtttttgtaatttgatatattttttgyggyggtayggatyggatgagtaattygtgttattttttaaattaatttttttttttttttttttttttttttttttttttygttattttttttttatttttygyggggtygayggtttggatttgtttatttatgtaaattygtttagggtggggggygtggtgagtaggttyggyggttttagttygtyggttygggagtttttttgtygygtttttygttttttttgaagtgatatttggggttatttataggtaggaagggggtgtggagtggagttggygttgtattttttttttttttttyggatttatatygagggttygtttggttttttayggaggyggtgaggygggtattattttttatggaygygt

SEQ ID NO: 6972 - DNA, 2401 bp, synthetic construct; identical to SEQ ID NO: 6748
  misc_feature 1..2401: note = Description of Artificial Sequence: Synthetic polynucleotide
  source 1..2401: mol_type = other DNA

SEQ ID NO: 6973 - DNA, 1579 bp, synthetic construct
  misc_feature 1..1579: note = Description of Artificial Sequence: Synthetic polynucleotide
  source 1..1579: mol_type = other DNA
yggttyggtgtaygtyggtgttattttygyggttaagtttggggttgatattatgtagtatayggygttatttataatgtatyggtttttttttgttatatataggtaygtatatttattttygygttyggagggagtttagggttyggttygtgggygtttaggygtygattttttygatttygtatttatttagaagttgtatyggtygygatttygttttggygttttygggggtttggggttyggtyggyggyggtygyggygagygatttygggtaggatttagttagygtygaataaaggttgygygtaggtagygggygtygtttgtattttygtttygygtttyggyggyggyggyggygygggggttygggygggttyggygttygttygtttygygttgttygtttygagggygtttyggttttygygttttygttygttgttgttygttatygtygtygtygttyggttatygtatygtatatattaattatttatygttygtttttagtttttygggygaagttaattataggyggaggtttygttaatggggtygtygtygtygtygtygaggaggtagttagtygygygttygggygtaagygatagttttttagggayggggatgggtygggggygygyggggggygggggygtayggggygygtyggagaaattttttayggttygygttttgygtygygttygyggattttgygggygtgattatttattttgygtgtgttygygtggggttgggggtttygggggaggttaggttagtygyggtggggggaggggagggaggaggaggaggagygygggaggaagatgaaaggygagtagatttgttttggygtttttagggagtttyggttygygygygtttttttygtttygygagtttygtygttygtatttygttttttagttygtygttygtatttattygygygygtagatygttagtttagttatttygttgygagggagygygagygagtatgaatyggaggtagtttatattttaaatttgtaygtaggggtggtgttggtgtaygtygttgtygagygaaygtaygattygaygagtagtattttagttttygggygggggyggygaygaggtttttttttttttttygtttaggtaattaattggaagtaatatttgtgygagtggggttttyggagygttgtygttygaggaggtygtygggaaggygttggyggtggatgatttygggtgtttttygttttttagygaatttttttaagtgggtatgttaatgagggtttayggyggggagggggtggaggagggagttgaattggagggggtttyggtyggggggaggggaggggaggggaggggagggyggggttaggtatttagattaaatttyggtttaaaggattttyggaaygggttayggggtggagaaggtaggyggttyggtattttatttttttgattttgggtgttttggtattttygggatttttygagygaggggtttaggatagggtgaataygygtaygtaygttttygtttttygatttygg

SEQ ID NO: 6974 - DNA, 919 bp, synthetic construct
  misc_feature 1..919: note = Description of Artificial Sequence: Synthetic polynucleotide
  source 1..919: mol_type = other DNA
yggtttatttatttygygygtttttatataygttttttttygattttttaygagtataygttygtttygygtgttygtttttttttgtttttygtttygattttaygtttttttttttttttggatttygttttttggagygygttygtttttttttgttaygtttttttttttttatttttttttttttttgttygttgttttttygtgygygtttttttttttgtatatygttttatttttgtygtaggttygatttttgaaygtttttttttttttggtttttttttttggygygygttttttttygtaygattttttttttttgtygggygtttygygtttgtaygtttttttttttttgtygygttttttttattttgyggygggtttttatttttgtaygttttttttattttgtygygttttttttattttgtygygttttttttattttgtygtttgtttttatttttgtaygtttttttttttttgttgygygtttttttttygttgtttatygygtgttttttgtttatttattygygygtttttttygttttgyggygtttatattggtttttgaggygygagttttygttgtttggtaaygggaygtygtttttgggtggygagtaggygygtgtgtaggggtgagygtatyggaaaggttygaattgtttttgggatttgtttttttagtttygttgggttyggygggtagaggyggttttgatygttgggttttgggygtygagtaggatttatttgaggyggagagaggtygtttygygtttggggttttygaaagyggttagttgtttttttgttttttttgagyggggagygttgygttttttgygggttgygggagatttttttagattttygggtgggaaaattatattgagygtttygg

SEQ ID NO: 6975 - DNA, 944 bp, synthetic construct
  misc_feature 1..944: note = Description of Artificial Sequence: Synthetic polynucleotide
  source 1..944: mol_type = other DNA
ygttgggygaggttagggttgyggtaggggagtygagtygggagaggggygtaagatttggygttgggygggaygttygggtagggtgygggaggggttgagggtygtttttattgttttttygttttggagttggggttaggyggtyggagattggttggggygtayggygaggttygggttggagtttygaggtgggaggygttaggattagtyggggygttygtagygtaggttgttatttatttgggygatttttgyggyggyggyggyggyggttgggtagagttagggtygggggygtaygtyggaatatttgggtygtygggtatygagygtyggggggttgygyggygygtatttggagagggygtagttatgygggyggyggyggygggggggggygtgyggayggtygygttggygttgttgttgggggygttgtattgggygtyggygygttgygaggagtaygattattatggttggtaggtygagtygttgtayggtygtttttattttaagtygtygtagtgttttgatatttttgtygatttgtygttttgttatayggtgggttataagygtatgyggttgtttaatttgttggagtaygagagtttggtygaagtgaagtagtaggygagtagttggttgtygttgttggttaagygttgttattyggataygtaggtttttttgtgttygttttttgygttygtttgtttygatyggtttatttattygtgtygttygttgtgygaggtygtgygygtyggttgygygtygtttatggaggtttayggttttttttggtttgagatgttgtattgttataagttttttttggataaygatttttgtatygtygtgtagttygggtatttgttygttatygygtttttaggtagygtygtygtygtygttttygygygtttygaygg

SEQ ID NO: 6976 - DNA, 1096 bp, synthetic construct
  misc_feature 1..1096: note = Description of Artificial Sequence: Synthetic polynucleotide
  source 1..1096: mol_type = other DNA
ygagtattaggaaagygaagttatataaygyggttttttttagtttyggygyggtagtttggaggggatgttttttttgtaaagygagttttttaattttttygggttttggyggagtttygggatygygtaggggtaagtggagtgtyggggaaggggygttggggttggggtgtyggggtaggggtgttttgttygtaygtatttaygatagtgagtagtatgttgtttagtagtagygttaggaataygatgaataggatgagttttygygagyggyggtttttttgtagttagyggattagygttagttygtttagggttatggtttyggggtttygttgygggygyggtgygyggtgaggatttaaggyggtygtggattttttattttttygttttttaggtygyggaagggygggttagggagtygygygtatyggtattyggggatattttygggygttttagtttyggtttatttgtttygagygygtttttaygagagttygygttttttggaaagagygttygygagygtygtyggggatttaatttggagatttaatttagaatttttaggaygttgttttgattttygtygtttttaattgtgttattttttaaattgtaygttyggtttygtgtattttgygttttgygttttgygtttyggttgtttyggggttttygtagtttygttygygtagttttgggggtttttttgtttttttgtttttttygggttygttttttttyggtatygygttttgygagtagggaatyggggtygtgttatttyggggtygtttgygatgtttgttygggtttttygtgttygygttaaygttygtatygtagtgggtttygttagttygggyggtttygggtygtagttttygttttagygtttygtygtygtygtttagtttatttygttyggttttgaygttayggtyggagggagygggggyggggggttggggygtttyggttttygttygttygygtygtygttgygtaggaggggttgtygtttttttgttttygtttyggtygyggtygygtttttttttyggatttagygygtggtyga

SEQ ID NO: 6977 - DNA, 4048 bp, synthetic construct
  misc_feature 1..4048: note = Description of Artificial Sequence: Synthetic polynucleotide
  source 1..4048: mol_type = other DNA
ygtaygtttagatgggtttttygygttygggtygtagttatttgagttttygtgaggttgaggttgtgtgttagttgttttttttyggygtttattaygtagtgattttttttaaaggygtgttttagttttagaagttgggayggggagaaggyggttyggattygtttgggttttygggttagygygttgtgtaaaaggaaattttyggggttagtgtygttttttgyggggagtatagtagaaattttattagggggggttgttttgatyggagtygygtatttttttygagtygggttggttyggtatygtgtttagggttttygtatagtygygtygttygatttgygggggtyggtggtttttttaagggtttaygaagggaaygtttgtttagttgttyggttyggaaygtygggtttttatyggtgyggtatttaattagtygttgtygtagaggagttagtttttaggtttttgatttyggtyggtttygtagtygttttggygtygygggtttygttattttttygtygggygttggaggtaggggagggagtygtagagtttggttaggggattggygtttataattygaagaaattatttttttttttttttaatttttyggggaattttgatttayggtggaaaggyggygggttgttttttagagtttttatggagatttatttttaaattatttgttttattgttttttyggaaaagtatagaggyggggygagtygttgaagttygatygggatagaaatttggtyggygggtgtgtttggttatagtygttgttgtttttygygaattgggtttyggggttttyggttttygagaattagaagagaaaygygagygaagggatygaaattyggggggttatygatttgtagatatygttaggatagtttgtaaygtaggaagattttagyggtttygggtttggtgaggggattataagtatgattgatagygaatgaggaagggtagttttaaattttttaagtaaagttttagagttttgggtttatttattagtataggaaatygatttatygaaaatttaaataaagaaaaataagtygatagtttaggtaggatgtaggtaaatttagttygggattaagggtaaaaggttttttgggtttttttttttttggtttgattttttaaaatatggggaggggggtgatatttattygattttaggtttyggtaggaaygtaatgggttaatgaatggataagtygyggagtattgatyggttgtygtyggaggtaggttttttattgattttaattygtaaattaattatttttttttttgaagttttaatttttttttttttatttygtatttagagaaaaataaataaataaaaaatatygtaagaaatgaaaatataygaatagatatttttttttaagatagttttttgattaggttttttttttttttttttaaagaaagaaagaaaaataaaaattagatygaatttgttttttygttgtggttgttyggygttttaattaagtaggtygyggygagagygttaagttttggagtttttttttygtaygggttttygtttttttttaggttttygaaaagtaggaaagaaaaaataaattttatatttttttttyggggygygaggattttttygtttttagaagagggtggaagattaagaagtygygggtttggattgaaggggygtaaagtgggtggtgaatagggtygaaygtagtygaaagtaagtttggyggtygagttttgttygygtttttyggagttaggayggttgggggtattgtygagggtattaggagtttggggatttygygggttttgggtttygyggygtygggtaygtatagtttagtttgttttgattygagygtattgggggataattttttygttygtatttttttttaaagggttaagyggttygtaggttattattttaaattagtygtagtttyggagattggggatygatattaygttyggtttygygtygtttagttttttaatagggygygttggttygygagtyggaggaattttygtttaggttttgttaagygtttattyggagtaggtygggggtagtgaaggatgyggygggagyggygygttgtagtttygygaygtggtaygtattttggaagygatgatttagatatyggtagyggtggatgagttaggggtagaaggtggayggatttygttgttgygaggygaatagggggtgtggygagtgygaggagggtagggggtgggyggttagggygtgyggyggyggtatygggtgtattggtayggyggggttgggygggtgygagatygtttyggygaatattaagttygggttggagtagaygtttttatyggyggyggyggyggyggtygagtggaagtygttgaggaayggatttatggggttggagttagygtagttgagtgtygygggayggatggggttttyggagygygaggygggtaggggattgtttttggttattagygattygatggtgaagtagygtttgggygtyggttggaatatgttgygtygaggagygggygttttgggtttttagtttttggygatygtygtaygttgttttygtygttygttgttygyggygaggayggaygagaattggggattygtttgtttggggtgggggtgggggtggggggaaggaaaggaagaaagaaaggaaaggaaaggaaaaaggaaaggaggggggagggagagggagaggtaaagtygaggatttygagaattttgtattaaaygygtttaatttgaagagaggggggaaaatttttttagaagaatttgtaggygtggattggggtaatttttttttttttttttttttttttttttttttttttttttttttttttttttggygagatggygtggggggatyggagttagaggtagggaggagaaggggggaaagttttygggggaggtaaaaaaaaaaaaaagtttttttttttttgtaaaaggygggtagggygttttaagtttaaggataatttatggaagtgttygtttttttataagttgtgtaaaygatttgttagtttatgagtttaattagtgyggggattatataaatagtttttttygaagtttggtaaatggtttgatgattggtygttattattygttttgaggtggaaggggggagattttttaaagtgygttagagggaggtgagygtttgggaattyggaggtttggattygggtygagagtggaayggagtyggygtygtygtttyggttgagttttttgtygtttatygggyggtygggttttttygygttttygtttttygtttttagtttattygtttttgyggygttygttgyggtttttttttttttttygtttttttttttttttttagttttttttttttttttttttttttttttttttttttttttttttttttttttttttttttttttatttatttttttttagttatygtttttttttttattagtattatttttttyggggtatttyggtttttgtagagtttttggtyggygtygttttygttgyggttttttgaatttygagtttgtttygtttaagttggtaggatagaaggatagatagatttttttagtttagygtttygtygttgttgttttaygyggtttygygtygggagaattgggatygttttaagagtatygygagggtaagygggtaggggttggttttygggttaaaggygtygttyggttatattaatttttatatttagtaaaatttttagyggttttttaggttaggagggattttggagtgaggggtayggggtttttttattttattaattaygtttagtttygaggttttagggtyggtgygttygygatttttgattyggttygttygtttgygagttgagatygggagttgtygatttygtyggagtagtgggtttttaattttttttttttttygttttayggtttttagygt

SEQ ID NO: 6978 - DNA, 3292 bp, synthetic construct
  misc_feature 1..3292: note = Description of Artificial Sequence: Synthetic polynucleotide
  source 1..3292: mol_type = other DNA
ygygtttaagttttagtttttgaaggtygttggatttttyggygttttyggttyggtttagtttttttyggggttyggataaggaggtygggygtttttttttttatttttttggggttttagatyggtygtagtagyggtayggaagagattatygggtgygagtagtagayggggtgygggaaggtgagtagyggttggttgattggtatyggggttttygyggttgtagtygtygygttttyggtygtygagttttygtggtagaggatgggtattygtaygatgygttgygtygyggtatggtttaggttggtygtttttagtttygtygttagttgtygtttttatttgttgyggyggttttggaattagattttgatttgygtttyggtgaggtgtagggaygyggttaggtyggttygtttygagttgtttagatagygttttatgtygaaggtggattygagttggaagatttggttgygygagaagattgtgygygttttttttttgyggtaygtyggttttttttttggatttttagygttttttttttagttttttgygttyggagtggtygtygtygtttttaygttygtttyggtygygtttggygtygtttygtttttttttttgtttttttyggagtygtttttttttagaatgatttygttygggtttttggagtttagttttttgtgatyggggtyggttttgagtagtggtttyggagagtygyggtttgtgtyggaggygggggaggagttttttagtaaggtttttttygaggttggggagatagatagayggaygtatatatatgtatatygatatagttttgagygaggttyggygtttggggayggtaggtttaattygygtyggtttttaggttttaggttatgaggttttattattttygygggttgtttttttttyggttgggttagagaagggaygtygagttttgggattttttttttttygaggataggtaagtagatggtggtagygyggttatttttttttatttttttagttttttygttaggggtyggtagaayggttttttttyggtttaggygtattggaattattttttttttttaggtygtgttttaagtttyggtygttygaagtttttttatttaygttygaggttatttttttygggaagtatygtgttyggggttttaattttatttttttttttattaagtgggattggattaaygggtagygtaatttagygygagggtaggttaggggtygaaaaaaattgatygagtagagggtttgygggtgttggggttttagaattgyggagggaagtagygyggggyggggayggggygggygygtagggggataaygaaagtttaaagagaggtyggtatttttaggtygygggaggtggtygtyggygggggttagggtgtaggggtattattaggttggggagygttttaggtagtgygygggtagggtaaatttttgygtygggattttaaagygagggaaagttaggtygtttatttgygagagygygaagttygyggygttttttagggtttttttggtygttgyggtagyggtagyggyggyggyggyggtagtygaggttggygygaagagygttygtgggggyggttgaggtttagggggyggtyggtggtggttttygttgagtaggtttttgatggagaayggggattttttgggagygggtggggggggyggyggyggttggggttgtgygttggyggtgtyggtagygttyggttygggtttyggtatggttttttttttttygggttttygggagggagggagygggataggygggyggyggggygagtaggygagaggtyggaaattagattataaayggaatttaattayggggygtaaagtygggggtygtttygggygtaaatttaayggygggagggyggagtgaggatttagaygggygggttygtatgagggaggggtgyggaggggyggggagyggttttgtygyggtatygagggatygaggyggttyggttgyggttgyggttttygyggaggaggtagtaagagtagttttyggttygaggttgygttaattyggygtyggatgttaatgatgaaattaaaatgttatttaagttaaatgyggggagtatayggygattgggygygtataatggtaaatgggattaggtaggygaaggtttagtygagtttyggtttygtagtygttttygttatygtttttttttygttttttttyggattttggygttttggtttygggttataagagttygttygttattggttttatatagtttaattaggtagtaaatgaggataagtttattagtataaaaggatattggttttygttaaagaggtattyggagygtttttgygagygtaggaggygagygagggaygyggagtaggyggygtttttggtygaagygtattaayggtygygagttyggagatygygtttgttttttttttttgyggygtagggattygtttttygtygttaggtttgygggaggggggaggggyggattaggttttttygggttatttyggggttatttgygttygtagttgtygttttttygttttttggggttggataggggttygtygtttttaygtagttggagagttaygtagygtyggtttaagaggtaggaygtgatttyggttttyggagaatttattatttttttattttttggggttyggygatttyggtattttttttaaagtttgttaggaagggygaggttaagaagagagggatttgggttttttatttattatttagtygatagtaagggaatttaggtgtaagttttygtattgygttttyggatttagaaattygygtggttttggtttttagttttggaaaatygaagagtgagttttttttygggattaggagtgggtgtgtttgtgtgygtatgygygttgattyggttaaaattygygygttattyggtggggttgttggggtaatagtttttyggtatygayggttgttttyggaagggtatttttttgttttggtygtyggtgtttaaggttygyggattaatttygagtttgtgatttygaygatagtatttttttttaggaagttttttyggttagttggygtttggagttgtttaattaaygttttaatgggggtaaggtgaatygaaggygtagyggygtagtttttttygtygyggtaagtagyggtattygttgygygtttygayggtagyga

SEQ ID NO: 6979 - DNA, 3753 bp, synthetic construct
  misc_feature 1..3753: note = Description of Artificial Sequence: Synthetic polynucleotide
  source 1..3753: mol_type = other DNA
ygyggttattttttyggtgtagygtttttttagtttttgygyggtygtaggtgttagggygaggaagttygtgggygttttygtygygygttaaggttttatttagagtaagyggtygygtgttagtyggtgatttagttataygttgaattaatgtaaattattaataataaaagagtgtagggaagygtttttgttttttttattttttttgtttggtttygggtttyggattttttttgagtygtagaattgttttatygygtttagtttttttttygygygagatatataattttgttatyggtygggtagttgggygtagygataagttggtygygttaagttygyggygagtaaagtggaggttttattaggtataagtagygttatygtttgttttatatttttggagaggaagtgygyggtatagggtatgttatagygggagttgttgtggttaagtttaaggygagtttagtgtygggaatatgtygttgggtatttagttygtttgtttttagaaggtaatygtttaaatggygaggtttgttttttagtttttgttttttttygygyggatttttgagttggattttagtyggggtgygttttagttygygygaygattttgggygttaggagggagagtgggygggtagttttagttaygtgtagtttgggyggygttaaggtttygatttttaatttttgatttyggttttattttttaygtggagygagttaaatttttatagatagaygtatgtaagtttttttatygaaaaatttgaaaatttttygtgygttattatgtygggtaattaagtttattaaagttagtaaagatgtttaaaatgttttatttttttttttttttaaaaatatttatagatttgaattttttttttttygtttttattattttygggatgagggaaaygaaaagaagtaatttagtaattgtttaaagtttttgagggtttggtttggtygagygtgtatgtatgtatatatatataggtgtatatatgggggaggagtgtatttggttttgtaggtgtttttttgatttttttttttattaattatagtttgtttggttaaaatttttttttttattattattygagaatattttatttygaatggtttttaaagygtattggttyggtttaggtaggaagtaggttttttgatttagggaatgttaataaatattygaaataattaaaataaaaagtagggtagagattataaataagagttaatgaatatatatggtgtatttttttatatttttggaaataygtygttttgtttyggagttttgtttatagtatagtaygygttyggttttgygggtagttgggggyggygyggggyggygggtyggttagtagtygagtttgttgtataggttgtagagaggtaaggtygagaggttgtttttygggtagtagagyggygygggaaaggygagygagygyggtatyggtaygygtagtagygaattgtttyggaatattagyggtatgtttattagagtttgygtygaygygtgygttatgttggtygtttttagtttagtygagagttgtygtttttatttgttgyggyggttttggaattaagtttttatttgggttttygtgagttgtaggttggaggygaggtaggygygtttygagttgtttaggtagygttttatgtygaaggtggattygagttggtatatttggttgygygaaaagayggtgygygttttttttttggtygygtyggtttgtygtttagygtygtygtttygyggtygttyggatttyggygagggygagttygygggtaggagttttttttttttttttttaaagttygagtgygaaggagagaggaaaggygtgygttttaagtygttygggttygagttttygttgtttttgggggtatttgaggagygagaatagatagaaaggttatggagttggttggggagtttyggagatygttagttttttttgggattaagyggttggtaagygtttgtagttttggttttattttattaattttttttttttattttttttattggttttttaaatttagtatttygttttttaaaagygataagagagggatttagttatttggagtatggggtttttgtgtttttatttttatgaatgggttaggggtaatagggagaggaggtttggagggggaaatattagtatggttttaaaaggygaatttgtttggtggtaattgagttggaagagtttttygagttttatagggtggtattattttataggtygtttgtttggaaattaygttaaggattaaygtaggattttttttygttaaatgttgtaaagaggaatygtttttgaaatgtattattgttaattattttggagtgttaattattttaaggaggagagagagagaaaggtagagatayggagygagtgaggaagaagatttagaaagagattayggtggagatagattgtttagattygatttgtagatttttatttygtgttyggaaagaaagtattagatgtgtagtgattgaggatagtygggtgtaaggtyggtygygtgtttttttygttgtggtttatttttttaataatttaattttttttaggaagtttaagtyggtaygggtttgtgttygtttgtttttaggggtttatygggyggaggaggtattatagtgygygttttttttttygyggtttygaattttyggttgtygtagttttggttagagggggttyggygygggagttttggyggggygtttagttttttttttttygygttygttygttgttatattggygaygtgygatttttatttaggtaaggaaaagggatggggggatggtgtttggggttttgttttttagggtygtgttggtttgggtagaagtaggygggygttttttagtygtygttyggttttttttttttygaggatayggataggttgygttttttggttggttagtygaygggttttygyggtgttttygaggggttttygtttaggatggattggatggtgaagttggagaygttatyggtygtyggatattttttgttygtattttttttgttgtttattttgggtttataagaaatygaaggaaattaagaattttttttagagaygatttgggtgatttgggtggaaggtggtgtagtaggtaggtagtggggaggggyggggaggaaatttagggggagggggygtygaggttggtgaggygtttttttygygttagggatatgtaggtatyggatggttgygtaggggtttttgttygtttggttttgggtgygttygtttagtttyggtgtaaatgtttttttttygttygttaattygtygggttttyggyggygyggaggyggygyggttttatttgtatagaggttattygaaygyggttaatygtagygtygtygagyggtttyggaaaattttaaaaygtttyggttaggtatatagtatyggtgygtttttagagygygtygagggtttggygggtattagyggygtttaattaggggtagttagggttgaaagtagttgtagattttagttygggtttttggyggttgyggtaatttygattttttggattttttggatttttttttttagaggtaggggyggtgygggattyggagttggagtggttygaygttttygtaggygaygggttttygygt

SEQ ID NO: 6980 - DNA, 829 bp, synthetic construct; identical to SEQ ID NO: 6969
  misc_feature 1..829: note = Description of Artificial Sequence: Synthetic polynucleotide
  source 1..829: mol_type = other DNA

SEQ ID NO: 6981 - DNA, 1328 bp, synthetic construct
  misc_feature 1..1328: note = Description of Artificial Sequence: Synthetic polynucleotide
  source 1..1328: mol_type = other DNA
ygggygagagatgtttttttgggygtttagggtygggyggggtygygygtygggttgtgggtygyggtggagatttgattygtatttygagggtttttagagagtyggggagygagtagtagagttatygtttttagttttagtttgaaaagttggatygtgtygtygtatgtgygtttggtagtygggygtttygggttttgyggttatattattttggggyggggaygtgtgygtttygggygttyggaygttattgagttaygtttgagtygtttattttygggggtgagygagtygyggttyggggygggattttggyggggggattygagyggtttttaggattygygggaygtygttaattggygggggtgygggggagataataatttgtttygyggtaataagaayggtgattgttggtygtggatttattttataggtttgtttttttttattaaygttttttttagttttygggttaattyggatagtttgtttatttattgtaayggttaaggttggtttgtgttagaayggygygygygygygtaygtaygtatatatayggggggaaatttttttaaaaatgaaaggttagaagagtttagyggyggygygggygttgygygagggtttyggagttgattygtygaggtaggaaattttttyggtygygaygttyggtttyggttyggygttygygtgggatggtgtagygttygtygtygggttygagagttgttgtattgaaggtyggygaygatggtagygygttygttgttygtgtttttygttygygtttttttgttygttttggtyggtgttttgttygygttttgygaggttygaggtaagtygtygaattagggyggttygttgttygtttygtygagggtatygtaygttgygtttgggygygtygaggtttagggttgtttygaggggygaygygtttyggygtattttyggagtttyggggtttgygtttttagygyggygagatygattttttttttttaggtgttaattttttggggaagggygatatttggttygtagttttataggagttagtatttgtttyggagggtatagtttygggatygttttttygtttttatttttttgggtgatatttgtagatgtttttgtattttgatatttataygtgttattygggaygatgygtgtygggtttttttgttggttttatttygtagtgaatatttttattttaggtttygggttagttttttattaggttttttttttagtttygtttttttygttaatatatttaggggggygygtagyggtttygt

SEQ ID NO: 6982 - DNA, 2957 bp, synthetic construct
  misc_feature 1..2957: note = Description of Artificial Sequence: Synthetic polynucleotide
  source 1..2957: mol_type = other DNA
ygagtygttttyggttttgygtttttttttagggtattaaggtttttaaygttaataygtggggttgttattaggggaaatyggaggtttgagtttagtatttttggattygtattyggttagtttttagtttttttttaaatttyggttttttttyggttgtagaggaggtgattgaggyggaagtyggyggtygyggtttggtggttaggggygaagttaggggaggggttaagggtttggggagygtgggtggygattgtyggtggtygtttttygaaagaaaagtygttygttaggttttyggggaaggtgttaaggtygttagttagagygtttatagtagaagygaaatyggagaagtaggtggyggtttygggtgyggatggagagggygaggtttgtaggtttaggtaagtygygttygggggttttagygttggygtttyggttttttttaygtttttggttttygagygtayggtygygttggttttagttttttttttttttttttttyggaagttttygttgttaaatattttttygtagttggggtttagggtttagtaattgtttttatttgtagaagaagaaatagtttagtttagaaggttygagttttgaygggtygtggtgtgagttagygaggaggttagttttagaaagattttttgttggtttttatagagggtttgagttttygtttttattttatttttgaygggtattttgtattygatgggtttttatagtaggattgggaagaaagtgataatttagaaaggaggaggaagggagttttgggaaaggtygagtttygttaaggtgaaggaaggtttgygagatgttaatggtgggatttygttagtygttttgttaaggatagygtagattaygttaggtttttaggtaggttttagagttttttaaaygggtattttatttgttttgtttatttttggggtaggygttgttttttttattttattaggtagggtattgaggtttagggaagttgagttatttttaaggttatttagtttgttggttttttygttttttttttygaaggagygtatagagattgagagtttygggatygtygtattgtaaaygygggtttgtggtgggtttagtygttgtttgagaatttgtttatgtttaagtattttttttttttttttttttttttygggtatttttaatygygtagggagaaattaggttgtttaaggtgtttttattttyggagtgttygyggttyggygggaagatggggagttttggayggagygagtyggygygtygttgttatttgggtygttttygtygyggggtatttttttgaagtagtygttgagygataggttgtggyggatggagttttgttagttygttttgttgygtttgtagaaagggaagttattagttaygtattggtagatttggttgagygttagttttygtagyggygygttttggatggttatggygatgagygtygagtaggagtagggyggtygtattagttttagtagtttttgttggtyggagaggtttagttaggygaggtyggygttygttaggtygttyggggygtygaggagygggtygggagtttygtagttyggggtygygtagggyggygtaggttygggattygaagygtaggatttggggttgagygttggygygtttatttataggagggggttttygtttatygygtttagattttttggtttatagttyggggggtgygyggtggtttgggtttggtygggyggggtygaggaggggtttaggtygtygtagtaggtggttatgtttagtygygttygggtttgggttagyggtgtygtatygaaatttattggygatttatttagtttggtygttagtagygttygggtgygattagttyggtttagtttttygttttttaaatatygtyggggttagagtttatggagagtgayggtggygagttttttttttggtagttttggaggagygaaatttttgttttygttttggtgttagtttttygtttygtttaggtttgataygttttggatyggaygtttttttgatttttttttttttttttgtgygattygtttygagtttatagtygttygyggttttggttgtagggattttaagttygtagtttygtttggttttaygggtttygtagtttygattgttttggatygtattaygattttttaaggtttttagggttgtggtttgggagtttygtttaatgygyggtttttttgttyggttygggatatttygttttaaagaaattygtttygtyggggtttttgggttattygggattyggggttagggatagagggygattatattgygtaagagatygtaatgaagttygtagatttttaggttggagtygtagagygaggtggygaggtggagaaygyggggttgggtttggatagyggttttggggtygtttggagttttygtttttttaattyggaaggtagyggattgatatttgygtygaagtygygygtattttayggagggtygggattttggaaatttygaaygttttagtagtttagggtagttatygttttttttaagtyggggagttyggggtttygttaggttttttygygttgtgatttygggygygtagagyggagagygttaagttttttgttgggtgtyggaggaygygtygaaaatagggaygtttttgtagtgygttygatattagttttttagttttgttgtygttyggggttgttgtagttygggttatttyggttttttaagttgttyggttttyggttttttttgtttttygygttgtggggtggyggaggatggatttaggttgaygttgggttgggtatttggaaagagggttygtttttyggatttygagtygggtatttgtgygaaagaggyga

SEQ ID NO: 6983 - DNA, 1860 bp, synthetic construct; identical to SEQ ID NO: 6755
  misc_feature 1..1860: note = Description of Artificial Sequence: Synthetic polynucleotide
  source 1..1860: mol_type = other DNA

SEQ ID NO: 6984 - DNA, 1422 bp, synthetic construct
  misc_feature 1..1422: note = Description of Artificial Sequence: Synthetic polynucleotide
  source 1..1422: mol_type = other DNA
ygyggggagtagaggtgtttagataygyggtttgttttyggtttttattttatagagttttttatttyggtattgagttyggaagttyggttattagttygttattttataatttttttagtttgggagtttttataygggtggtygttttttygtagyggtttagtttttagttgtaggattttygggattttygtatttattatgagygttgtaaagttgyggaagygtgagygtygttggaggaggygtttagggggaggygattaggtggygttttgtttttygttagtttttatggtttttggaaggttaaagttttagayggyggttaggaggtygygttttygggtttttggttttagggtgatygyggyggggygggygtagttygggagttgtttttatttgtgaagatagyggyggttagyggggygggyggagggttttygyggagggtagttygtagtttygatttygttagggagtagtygyggtttttgtygttttttttttttygygggyggtttgggggttgygtttggggttggyggaggyggtgtyggtggggatyggtggggggttyggatygaaygygttagyggtagatgygtttttttttttatatttaaaaattaatttgygttttattttyggtttyggagttaaatttaattatttygggttgtataaagttagaggygygtyggggggtttgtatygggaatyggtatygagtgattygttygttttagttyggtygyggygtttgttttgtttggatgtggttygagtttygggtygggygygyggggygggggttttggattattygtggygtttttygttttagyggagtygaaagttattyggagttgtttttttygyggttagtgttatttyggggygygagtttttttgtygagtygyggtttygygygtttttttygtygtttagattygygygttttttttatttgttgtggtygaagyggttgtyggggyggtygggtygygttttyggagatagaygygttgygtttttttygtyggggattygttttttattygygagggtagyggtygagttgggatygagttattaatagattgyggggttgyggygtyggtyggtgagttatagtttygygtaygagyggtttagttyggttagtagygtygtygtttttgygygtatttttygyggygatagyggggattyggggtyggaggtaggygygtaattatggggatyggggygggygatggyggygggygggtttttgtygtagggtggggatggtttttttagtygggyggtygtygttatattgtagagygtatttaaagagatatttygtttygygttygttttttagtattagattttygttygaaaaygtygtygggyggattgtayga

SEQ ID NO: 6985 - DNA, 1479 bp, synthetic construct
  misc_feature 1..1479: note = Description of Artificial Sequence: Synthetic polynucleotide
  source 1..1479: mol_type = other DNA
ygaygagtttaygaattttatygtggtyggyggtagtygttggtygagtttagygtttaggtttaggttatttttatgtygtgygattygtygggaaygggtttaggttygtttgtttaaggttagaagtattttgttttyggtttaaygtyggatygygtttygttttttttattttatattaaggaaaggaattagaygtttgggagaaaggatgagtagtattyggtgggattyggttttaattyggggtygtttttaatttttaattttttagagtttttttyggtttygtttttttttttayggtttygaggtygtygyggttttttttygttttgagtgtagatagttygggaagtggagagygtagttyggagttagggagtygtttttaggagttttggygatgggagygtaggtggygggygtggtttttttaattttgttttagtygattyggagtyggttttygtgtagtagttatygttygggttttygtttggttatagtattaggttatagtgygttggtttttgattatttttttggttyggtggtygtttttygtttttttttagttygygtygttgttttgttttaggtttyggtgyggttttaagttttagtttagggtttttaggtttttttaggyggyggtggyggtatttatttgggtygyggagtyggggtttggtayggtttygtaggtggtaaatgaaattttggtagttgtygtgttttagggttttaygggtatagagttyggttagtagttgtagygtttggtgatagagygygtttttggtttygggtatygttttttygtattttyggatygygtygggtaggygggygtaggagatagtttttygtttgttagtttagagtygtygttttygggtygttygygtttatygttagggatttgtygagaaayggtgygagtttgagttygagttttagatttagtyggttyggttttttatyggttgtatgtagtttttygttagtyggtyggttaggttttttttttttttygttyggttttttygtttttttttagatatygaggagaggyggtgtygtatagtttagagygtttttttgtttgygtttygttygttattygyggtygtyggggggyggggttaggttaggagtgygygtygtagggtaggatagyggyggttttagatyggggatttggggtatttttyggtttttggtygagygygagatttggtttgggatttygygtttagagyggtygygttttggtttggggagtgtgagtgagtgygygtttygggygttttygttattttattttttatttttgatgtaaattaagtattygtttttatygtygagtgtgtttaaagtaygtttttggatgtttagtgygaaggttataatttgggtatattygttagatgygtagaatygagtttttgtttygaatttggaaagagtygt

SEQ ID NO: 6986 - DNA, 446 bp, synthetic construct
  misc_feature 1..446: note = Description of Artificial Sequence: Synthetic polynucleotide
  source 1..446: mol_type = other DNA
ygtgygtttygygtattttgtttttygygygaygtygttygygtygttygyggttyggtygggagyggtagttygtgtttyggtttyggtttyggtttyggttggygtttgtatttgygattatygtgagtagttatggygtattttatagtgtagagagtygttttggtttttgggtttgttttggttttgtygttgttgttgtttaaggtttttttgtttygygggaagyggtaggagtygtygtygatatttgaaggtaagagtaggttagttttttttgagtttttyggygtygaagagtayggagaaygttgtttgagggaggggtgattttgagagtttgtagtttttatygaaatatttattaaattgattggagagggygggygagayggygttgaagggttaatgtttayggtttygttgttattagygggtggygg

SEQ ID NO: 6987 - DNA, 2991 bp, synthetic construct
  misc_feature 1..2991: note = Description of Artificial Sequence: Synthetic polynucleotide
  source 1..2991: mol_type = other DNA
ygtttgtygtttataggygtygttgagggatagttggtttagtttgyggattttttttyggattttatatttatgtttagggaaagtyggagttayggyggtataaattagygtttttattttgattatttgagygagygttygyggttygttygtttgyggtataaaygtataaattttttgtagtattatatattatgttttagagataaatatagttttaggggtttttgttttggtaaagtaatttttatttataggaatagattataaaagtattataaaaagtggttttgaatygggaaaygggttgggggtgggttayggttatatttgttatatttgggatyggagtgtattgggttttaygtttttttaaataatyggtgtatttyggggtagggtttaggtttgygagggttttatttttatgggggagggygygagaaagttgaatttagttttttaaggtttagttttggtttatygaggaatayggagyggttatygtaatgggttttygagaagggtgttgygtggaaaaaatygygttgtgtttttgttttgtggggygggggyggaaattttagttttttygttttttttattttaagagaggtygtttttaaagygttgttgggaggggggtatttaagtttaattttttgggygygagggattttaggggtattatttttygggygggtgggyggttattatttttttagagtatttggtatatygggttggggttygtattygtagggtattgyggggyggygttyggtgattgggtggggtygtygttgttttttttttygttgggggyggtagttttttgtttgygyggaggygatttagaaggtaygttygttagtaggagggygggygtygtagggttttyggtggagatgygttttaygatgttggataggtagtttaggttygatatygtygtatttttttygggtttgggttttgygyggggagggttyggttagtaagtaggggtggggtygygataagttttttattttygggtttagtattttgagatagattggaaattgaggattttagttagagttygggataatttaaaagatagggagttatttgtttagtattttattttttgtattattttttaggatataggygtgtgtgagtgggggtgggagygttttagatagaggttaggatagttttatgaaggaggaggagygagtagggagaggttyggaatatttatygttgggygtttygttgtagtaggygttttygtagtagtttygtygtygggygtygttyggggggtygttgtagtttatttgtaaatagtaagggygattgagttaggttygygggayggttygaggttygaatattaatttttgtagtygttttttttttaattttagtttaaggttttagtttygggtttagatttgttttggttgggggggtaattaygggtgggtaggagatgaggtttgtaatatgtagggttaaattaagggyggatagttattaaggggygtaaatttatattttggaagtagggataagtagagaaaaagatttttaygttygygttgtagtgttttaatagygtttttaatggggtagttygaaygtttgttygtatatttttaaaataggttattttagtgatagttgtttaggataagggggttttttttttygggaaggattttggtttaaatttttygtaaggttagtttttygttttyggaaaygygtttttgatatttygagygtygttttaatttttttattttttggggtttyggttttattatgtygtyggagtagttggagygygggttggaygygtyggagtygtygttgtagtgttygtygtygyggttygggggtagygggttyggygtatagaaggyggttgyggygttagggggygyggygttttggtygygtagtagagtttgtaggttttygatatagyggatggygttgygtaggatttttattttgggtaatygttggtttggattgttygaygtgtagygtttgagtgttttaaaggttttatttattttgtttaggyggygtygttygygtatggtggyggttttgyggyggtyggygttggtggttttgygtttgtaygttttgtaggtttatagtaggtagyggttygtttggtggtgttygttgggygygygtatatgttygtttttaygtgygttyggggtygggtgtatygtygyggggaagtgygagtgtttttygggttttaggagygygtttaygtgtattaggygygggtttaggttttygaagaagygtaggttyggggagtygaaataygggtygttatagaagtygttygttgtggtaaaggagtagagagagtygtygggggtygttaggtttaygtygyggagyggtggygatagtagttttatattttggyggtggygyggtayggttttggtttygtttaatttaagyggtagagagtggtyggaattttttgtygttygggagtttyggttgtagatagtaaagtgttggtagtttgaatgtttatttattgttttttattttttttttttttgttyggtttgatttgtggttaaggaaagyggyggtagygttttagggtttttttatttttagtttttygttaggygttttgggttatttattygtagtagtttaaaygtttyggagtttaggygggtagttgggggagggggagttygaggttaataggaatattgyggggyggggtttgggggggttttyggggtggtygtaggggttygtagattggttagttagttygtttttttatattggygtgygygttaggttttttatygggtagggagggagggagygatyggtagttttaggyggttgtatttggtttttyggtaygttttttttaaatttttttaatattygattgttgtattygygggaaaygttggttgygygygt

SEQ ID NO: 6988 - DNA, 928 bp, synthetic construct
  misc_feature 1..928: note = Description of Artificial Sequence: Synthetic polynucleotide
  source 1..928: mol_type = other DNA
ygagtttygtagtttttttttttygtttygttygttagttttttgttttttttttttatattttttattttaaagttaggygtygggygtttttttttgtygtygttyggtattyggttaatttttttaaaatgygtttttattttgttggttgtttyggtagggagtatggaggattgggggttygaagtttgtaaagggtgattttagygttgtagttttttygaaayggagatttgttatttttttagagggyggggaagtttatattattttttgttttatagtgttygtttygtttygtttgttggtttttygtttattygagatattttaggtayggttygtattggagagggtygygttgttgttgygatygtayggygttyggggtaggaatatgttygtttttttttgygyggggggaaygaaatttttagagtgygtttygataygttttttttattatttaaggtaggtttyggtagttttggttatttaggttyggggagttttagtyggatttgttgyggtttttttygtagygtaggtaaggattttaaattttaaattagggatttygattttttttttttttttttygttttttttttttttgaaagagaaatagatagaaagtttagttttgagataaagaaygygagtgattttttygaaataaatttgaagataaygatataatagtgaatggtaggaygtataaaattttatgggtttaggttaaatggtattagttataggttttagtygtagtygtygygtygygtagttttttgggttatygyggagtttgaaaagaygygtttaaggagattatttaaagtaagattttttygttygattttttgtttttttaggatttatttttttttttaygggyggttagttttygttttttygttttygt

SEQ ID NO: 6989 - DNA, 1267 bp, synthetic construct
  misc_feature 1..1267: note = Description of Artificial Sequence: Synthetic polynucleotide
  source 1..1267: mol_type = other DNA
ygygggattttagggttttttygtagttttttgttttygtygtatygygttttttygggtttyggtygygttygttagtyggaagygttttttttgygggtgygattttygtagttatttttttttagtttggygggggtyggygagagtggtttttatagtattttataagttygggaattyggggtaygygggttygttttgttgygggtttygattttttgggayggaaagtyggttattagtagtaagagggtgygtttattyggtygygttttttatttttgygtttttgaggtygggttttttgagaaggggtatttaayggggatatttttaagttygtgagtttttatttttattttgttatttygagtagggtaaagagattttaggaatyggtttaygttatygtygttttttagattagygtaaagttyggttttaggtttttttaygtygtygtggtttgtgggtatttttatttttyggatttttttaatygttatagttatgtttatttgttttggtagtgtatatatagaattatataattaaaattaaatttatyggtatygttttygagggttttygtttagtagggggtatygaagttaggtggaagtaaatgagtttggattttgaggygygtttggtttggagtygttaaatttgttagygggyggygggggaggtggttyggtagygtygggtgttgygttygtatatgygttygggaaggtagtttyggtygtttygtttttagttygttttttatygttggygyggyggyggyggygtggggttyggggttyggtttttygttgyggttgygttygtttgggagttygggtaggagygyggggtttggttattgtggtttgttgygttttttattgggggtygatttygttygtttttttygttygtagaattgygaggatttggattgtaggygtygtagtygttattattyggagtatygaagtyggagttttaggatttgyggtygaaaygagagagygggaggygtayggygtttttayggttttaygygttttagttttttygagtygtagtygttaatgttgttttttttattttygtatygyggtgggggttgtygaagttgttatagtttattttygtygagtygaaaagtygtygagttttygygggtgggtattttttttygggggaatttagatygaggyggygttatygagygygtayggattttttyggaaaataattattygggattygt

SEQ ID NO: 6990 - DNA, 1225 bp, synthetic construct
  misc_feature 1..1225: note = Description of Artificial Sequence: Synthetic polynucleotide
  source 1..1225: mol_type = other DNA
ygtyggtygttttttggtgttttyggggttggtaagygygtagttgaggaaagggtataaaggtggygagttttgygggagtagttgtgtagaatttgtyggattttagggtttggtyggtaggttygttttyggyggttgggttttttttttggagtttagattttttagtygtaggttgtttttygggygggttttagttagggygygtagttttgagygtttgtygttgyggttyggttggtaggtttygaggggygyggggtygygggtyggtyggtagggttttgtgtygttygttttygggtgtgygygaggygyggagtatttaaattgatattatatgtttttttattagttgtttygyggtygagttttaggygtataattatygttagtgggygagagygttagtagtttttagggaagggatataatgattgaggtttaatttttgaaggggaatttggagttgygttttttttttgttatttygatgttgggagtggygttttggttttggygttttttgggtaagtattagtyggyggtatttgyggaggtggttggtaygttgttattttttgaaatgagtgaggagggaggtttagatttaggyggttttaygygttygttttggtattagtagattgggaattgtygtggttatgttygaagtttggaaagtttttttyggtttttttttgggatagttttttttttttygggaagttttttgtgtttagaggtggggttttgtagttggaggggtagatggaatttgygaagtaaaggaaggtaataaaaggaagttaggagaaatyggaaaygtgggttaggttttgttttgttggagaagyggtgttttygtaaagtttttgtttgygttggtttyggtyggagtttagattttttaaaygtttgttattttttatygagttgaggtttyggtttttattygygttttggtgagggtttttttttagttttaagttttyggttattttgaaaaygyggtttttttygaaggggaaataagtgtagtttaatttygtttgagtgatttataaataaggayggaaagggtygttttattayggtttygtttgtygtgaygatgtaatttttyggagyggagtattgttataaagtgataaggttgttataagygtttygattgatttttttaattagttttttatgtatgattyggagygattttygt

SEQ ID NO: 6991 - DNA, 1627 bp, synthetic construct
  misc_feature 1..1627: note = Description of Artificial Sequence: Synthetic polynucleotide
  source 1..1627: mol_type = other DNA
yggttgtyggygygagyggyggttttttttyggttgtagaaygtttttygttgtyggagaaggggtttagtaaaattgatttttttttatttgtttttatttataattgatggggagatgagaaygtaatatattttagtatygagtttttgtygtttggyggagattttgtttaagaygttttygtaaagtatttttagtyggggaataaagtayggaaagttgttgggtagagyggtygggaggagatatygggagtygggtgggyggtggggtggtyggtgggttgtttygggttygggagttygttygtagygygttttgttagtaaggggagagggayggtgggaagyggtygtttttygggtttgggtyggggatggggatggttaagttattygagttttygtttttygtyggtaggtattattygggggtygtgtaattygggygtttattgataggtattttaygttygygaggggttgtttyggttttaattgyggygttgygttttttttttaggaygtaggttaatgttygttygttygtttttagtygggygtagagttgttagatttygggygttttagygttygttttggggttaaygggygggagggggyggttaagttygtaggyggttttttyggttttggtttagtttttttyggttggtttttggagaygttgtgttyggtagagaagtaatttttgttaattttagttatgtgygggggaygtygagttggttttgtttggtaagaaatttttatttgatgtttttttygttttttttttaagggggtgtatagtggaggagggtttttaagtttatttgtttttttttttaagtygttagttttgttagttttgaygygttygttaaatttttttagttttttgygygttttttgtayggtaggtagagagagtagtttggaaaataaattaattgtttagtggtaatatatatatatatatatatatatatatatatatatatatatatatagygattygggattttaggtttygatttttatygygygtatatatatatatatatatatatatatagygattygggattttaggtttygatttttatygggygttataagagtattagtaaattgttgaaaayggttttattttattggggggaggttggtaagaaaaaagaaaaagaaaaaaaaaagtttgttaygygtaaggaagaaagaaaataaagaaaaatattgtaaaaatagatatttttttgtttttttaggttttggtttttttgatagaattttgaaattygttattattttttgtagtagtagtagtagtagtgggatagagtaggagtaaaataaatygatgtayggtaaatggtgtaattygatttatttttaagttaatttattaggygagtyggagtttggttttttttaygtattyggtagttttyggygygggttttattttygggtayggayggtaggaggygyggtyggtygggygygttygttttygygggtgaatygtggttagygtygtttggaggtttttattttggygtygyggttttgttgatttttyggtggttttygygtttttttttttyggygttttgttgygt

SEQ ID NO: 6992 - DNA, 1857 bp, synthetic construct
  misc_feature 1..1857: note = Description of Artificial Sequence: Synthetic polynucleotide
  source 1..1857: mol_type = other DNA
yggyggtygtatttggttttatagtgtaaaatgtgtttggygaggaagtygaggyggygttgtagtagttgagygtgggggtttgtaagggyggttagttyggggaagygaggttygtggygtyggtagaggygtagtagtygggtygyggygttttgttygyggtgtagttttaggaygygtygygyggttygttygyggaataygtatattgattgtaatagyggttygttatatttgttttatatgtttgttattyggtagtygtgtattaagttygttttattgtttagaaagattagygtttygttyggatygyggtgtaggttgttggtggtaygttgtatgaygygygggttttattgtaggttgaagaggttgtttaygagtyggtygaagttggtygttaggtagtygaaaaggattaagtyggtttattgtattaggtttattagtttygtttggttgaggttggttagtttattttyggtatttyggagggggygtagayggtygtttttygagygttagggygygggtattattaygttygtgaggttgggtagttagygtgttaggtttattaygttgttttyggtttagtgygtagygygtagttttttttgtatttgygtttattgygygtttygagtttttattygagttagtgttagyggyggtaygtggygttggaggtttagtaggygygttagatagtaagatagggtttygttttgaatttgtttygggttgatgtygtagygtaygtaggygygggtgtygtyggtaaaaygggttagtyggttggagttgygttygtaattttygygttttagggttattattygggygtygygagtygtttttagttaygtygtygtttgggttttygaaaagttygggggtatttgtttttttaggtygyggttttagaagaygttttygtgtatygyggygttttttttyggtyggggttgtttggttgataygtgttatttgggttygtttygggattgtyggggygggtygttygygtyggtygttagggtgagtagygttyggaaagtttttagggagtygtygygggygttttaygttaggggygggggtagagggaagygaggygygggygyggggtygtygtttygggtygggygtygtgggagtyggttttygggyggtygggaggygggtagttyggttygyggyggtaggagttttttttatagygttagtagygagtttagygttagtagttagagtttygyggtggyggyggygtttygtatttttttgtttatgttttygyggttgtgtyggtgygtygtygtygttttaagtygagtttaggtattygggtttyggyggygaggygggttyggtagtttgtgggtttyggggtttygggygtttyggttttatygyggtygyggggygttgyggggttttgttyggygtttygttyggygttgggaattygagttttygtygttttttagttgtttttgtatttygttgtgagatttttyggtgggygygatttataggygttyggattaygtgggagttagggggatttttttttttttttttygttttygtttttygtttttygttttttygttttttttttttttttttttatttaaagyggygatggtttttttygagagggagaggyggttttatattyggttygggatttgggggtttggaggaagtyggattggttgygttygygtyggggygtaggagggggtggygtagagtyggagtttggggtttggygggagggaygygttttgggttttygygggggtgttttggtygtygggtttttttgtttaggtagygygg

SEQ ID NO: 6993 - DNA, 2423 bp, synthetic construct
  misc_feature 1..2423: note = Description of Artificial Sequence: Synthetic polynucleotide
  source 1..2423: mol_type = other DNA
yggagygtagagaayggttggagatatagyggtygyggtttttttygtagygtaggagygttaggtattgygttgggttaattgyggttagggagttatttgttygygatagygagygygtatttatattttygattaatttaggttggtttttagtttattttygggttttaaygtttaaatatttygtattgttggtttygatatttttttattygtygttaggaattagygtagagggagatgygttttttgtggygggtgyggggygaggattttgattttagttttgggaagtgaattgtayggaggagagagttttttatygttagttttgttttygttttttttgyggttttattttagttyggatgtyggygatggggaatagattagggaygtaggagtatattggatygggggtggatttatttggggaggtaggtaatygattygygtatyggtggygtaatttygtttyggtgatygaagtttgtggaggtagttttattttyggttttttggttygatatttttttgttatttttttttttattttttygagttttgggagtttggatttygaaggtgtaaaaagttaagagtttggaaaattgtattgtgtaaatatattgattttatttgtttttttttaggagttttatagatatatttaggtaaaaagatygttaaataaatgtttttagttatygtaatgtaaaaataaatattaattttttagaygtagtagtagtygygttgygtttaaagttttaayggttaygtttaataattataaaagtgtttagygagagtgttggygtgagtgtgaatgggtgtgygttggggggtayggtggagyggtgtgtaaaatyggagttgtaaattatyggataagggtatggagtggttattygtygtygatttagygygggygygttttttygtatatatttatagtagagttygtattgggaagagttaaaaaataaatatttataaggaygaggaaagyggtttygttttyggygttttygggttagggygagygyggygaggggygtatygatyggttygtagyggggygggagttygagygygygaggagyggyggtttygggtttttgygggtttttygggagtagggygygggtattttyggggtttataygtyggttttygygyggatygyggaygygygygtttttttygygggyggygttttttatagggtygagtyggagtygttggagtttaggttgttttttagtttgtagttgttgagttgttttygttgtagygataggttttgygtgttgyggygtaggtattttaggttttgtaggaaygattttttggttttttttttttttatgggggatattttttttttttttattttttggatttygtygaaggttatyggttgygttttgaagygagattggygyggtygtygtagtyggtttyggtttttgggtagtttggygggtygtaygggttgygggaattygtyggttaggtataygaagtgyggtattatygtttggtaattggagtagatgtttattagttygtygggtttggyggttatggygttttyggygtttgyggggtygggyggyggggygtyggggtttttygagggyggtygttgygtyggggtttttygggaggtagtagtygggggttygtygggygggggatttaaatttgttgyggggtggyggyggttttygygggttygggtyggygtttttygggagggygggygggygggyggattygtyggggggtayggggttyggggggygttgtttygtygygtttygaggygttygtygtygttgttgtygtygtttgtttygyggyggttaggttygyggtttatatagttygyggttgtttatayggttttgagttyggatgatagygaatgttatttaaagygtgygygtttygygttttttygtttgaygtygtttygtygttttgggaaagtaayggtttttttttyggygtygttygtttttygttaatyggtttyggaaggtaggtttygttygygggggtttygggagaagtygyggtttyggagtaygyggttggttygagttgygttyggatagggatttttaatygtygygattgggygggtattgttttttttgggatttttaagtttgtattaatygggttggtygyggggtygtaggtttttttttttygttttttggttttagatgtatatatttgaggygttggttattttatygtyggttttgygyggggygygaggtagtttttagttttttttgtagtttggygagtttgagygttyggttttttagagttgagttyggaagaaggggtgggttttttttttggatttttgttattttttttygtaggygygygygygt

SEQ ID NO: 6994 - DNA, 1146 bp, synthetic construct
  misc_feature 1..1146: note = Description of Artificial Sequence: Synthetic polynucleotide
  source 1..1146: mol_type = other DNA
yggtatttgggtttttgygygtttygtttygyggtygggtttatggtattgtgagtttgtaagggagtttygtttagygyggggagygttyggttttttttygttttatgygttygyggttttgaagtttgagygggggtygggggtygggyggggtyggggtygtygtaggtatggygttygggagtyggtggyggtygatattgtygtygttgttgttgttgttgttgttggygttggyggygygygyggayggtttggagttyggyggyggtttygggtagtgggttygttaygygygttgggygggygyggygagtagyggygagtttagttttagtttgygtattaaygttaygygygygttgttgttttatttggaygayggyggygattgygattttttggagttgttgttggtggayggtygtttgyggttgygttttaygttttygtgygtygagtyggttaygttgtagttggataygtyggtggtygaygatygttggtatatggtgttgttgattygygaygygygtygtayggygttggyggtggayggygaggttygygtygtygaggtgygttttaagyggygygagatgtaggtggttagygatttgttygtgggyggtatttygttygaygtgygtttttyggygtttaygttgagtatygttaagtaygagtygttttttygyggttttttggttaatttgaagttgggygagyggtttttygygttgttgggtagttagggtttgygyggygttatygtygattygttgtgygygttygygygtaatttttgygttaayggyggtttttgtatygtgttggttttyggygaggtgggttgygattgtagttataygggtttyggyggtaagttttgtagygaaggtgagtttyggggagyggtygttyggtgtttgggygygggggtgagggtttggggygtttygtgggggtyggagtgtgtgtgggtttttgaggtaygggggttgggtaygagggtttgtgagtgggtgygagygttttagggttgyggggaygygtgttygggygagggygygtggggttggyggtgggyggggygagtgggyggggtyggtttgggygtggttagygtgagttttgyggyga

SEQ ID NO: 6995 - DNA, 577 bp, synthetic construct
  misc_feature 1..577: note = Description of Artificial Sequence: Synthetic polynucleotide
  source 1..577: mol_type = other DNA
ygttttttttattttgygygttttaygtgttttttgtaaataagagaaygygtaggygtygtaaattagygtttattggtyggygtgtygtygtttygttggagggaggatttaggtttygttggtygygggttyggtattyggtgggtyggtggagygtttgttgggttygggtygtyggtttygttttygttatggygttttggttgtagtttttgtygttgttggggttgttttygggygtagtggtygttttygtttagtttygagtygttagtttttaggtttgggggtygtygttttyggagttgttggygtttattygtttygygttggagatgtttaatygyggtygggttgyggggaygygggtygtgttgggttttgtgygyggtygygttygtygggtgaggaygygtygggggygggggygttaggttygggtttaagggataggagttttgatttaatattgggatggggtttgttygttggaygaatygatttttggtgatggggaatgggtagygtygtaygggyggggttttgggygtygttaagggtygattgtgttygt

SEQ ID NO: 6996 - DNA, 1721 bp, synthetic construct
  misc_feature 1..1721: note = Description of Artificial Sequence: Synthetic polynucleotide
  source 1..1721: mol_type = other DNA
ygtgagttttygaaaggygaagggtaggtagtagtygttggtttttgygtttattaggagtttyggatgttygagttagggttgygttaaggyggtyggagtagagagggagayggggayggggataggtagggataaagtgtaagaggtaaaattggttgaaaagtagaagtgtaggagtygttaaggggygggaygaataggttygtgggtygggyggagttaagggtgggggtyggggtttttttaggtggtattygyggygttagtttttagtttttttttttttttyggttttgattggtaggyggtttgygattagtygygaaygttatagygtttygggygtttaggagaaygygaayggtttttygygggagygggygagtaggagggggygtygggttatatatatagyggttyggtttygggygggtttggygtttagggaggygygtattgttttttagagttttagttttagtygygygtttttygttyggttygtygttttatgtagtyggggtagagttyggygttygggggtttygtygtttgtttttygtattttttyggttgygtatttttgttygaggtyggtygtgygttttygygggaygttataggygtagttttgttttttagtttttygggygtattgatygtttgatygaygtayggttttygggtygggatgtyggggttygggayggtygyggtagygttgttttyggyggttttgttggttttgttggygttttgggygggtygagggggygtygtygtatttattgtatttaayggtaygttggaggtygagttggagygtygttgggagagtttggtggygttttygttggygygtttgtyggtggtagygtagtttaaggaggyggtygtttagagyggygtyggygattatttgttgggtattaagyggttgyggyggttttattgtaaygtgggtatyggtttttatttttaggygtttttygayggtygtatyggyggygygtaygyggatattygygatagtgagtggygyggttaggygygaaggggygggggyggggggtaayggtygtygggttaattygtttagttatattttgagattttyggygggtatttgttygggggtttygggaatyggggyggattygggtttyggttttttttgaygyggggttggggaygtagatatttttggtttyggtagtttagygtaatttttgaggtygggygtygtttttygtttttagaaattygggtttygagygtygaattttagygttttygttygtgggtatagggygygyggtgtagttatagggggttygagataygygtttyggtttggtttaggttggggaatygttggggtygggttygygtttgaaggttygggattgggtgyggtygtygggggttttttatataggtaagttaatttgagttagygtaggtttgggtttyggaggttttagagggtagtttgggttttggaggtttttgggggyggttgygtygggaattttggttttttatttttaattttattttagaaatagggttttyggaggygaataagtygaggggyggagtgggttagggattatttgtttygtaatgatttgygtttygtttttaggtttgttggagttttygttygtggagyggggygtggtgagtattttyggygtggttagtyggtttttygt

SEQ ID NO: 6997 - DNA, 1721 bp, synthetic construct; identical to SEQ ID NO: 6996
  misc_feature 1..1721: note = Description of Artificial Sequence: Synthetic polynucleotide
  source 1..1721: mol_type = other DNA

SEQ ID NO: 6998 - DNA, 615 bp, synthetic construct
  misc_feature 1..615: note = Description of Artificial Sequence: Synthetic polynucleotide
  source 1..615: mol_type = other DNA
yggagtttygggtaygtatygtygagygttttattttgagttttttyggtattygtagtttygatagtttagttttttttatttgaaagttttatttgaggttttttttaattttgtttttttgtatttttggygtygyggggagttaggggttaaatttygtggttygygtggtttttttttttttygtagttttttygtttttattyggygtygygtttggagygttygtttyggagattygtataagagaggaggggaaaaagtgggtttgtttttygggtggttaatttatygagttygyggtgttttagaggaggygttagygttaggttagygttaggtygggttgtttgtttttygyggtaaagtataaatgygttygagygyggygtttgaagtttttggygagtatagtyggttygygtttagttttttttygyggtygtygygtygtygtygttgttgggatygtygtttygtygggttttaggttttygyggttygatttygagtttatygagtagggggygtyggtygtttttagttygygygttygtaatattygttggtttygygygtttygttyggygttgygygttyggtagaygtygg

SEQ ID NO: 6999 - DNA, 1542 bp, synthetic construct
  misc_feature 1..1542: note = Description of Artificial Sequence: Synthetic polynucleotide
  source 1..1542: mol_type = other DNA
ygggayggtygtygygygtttttttttttygttttttgtttataagatttaatgagttttttygggaggtagygtagygagttaggttyggaattagtaggttgygtygygygygtygygtyggggygggagttgggtttgggyggygggtaggagttggygggggygtaygggtagygttgyggatagttygggagtygyggygatggyggtgtaggyggygttttttagtaygtattttttygtgtttttyggtttygggggtttttyggaygggttagggggygttttyggagttttggataagggttgttgtttygaggaygatgagatyggggtttyggygggtgygttgttgtygggagtygaaggaggggaygtgygygaggttattygygatttatttagttttattgattyggygtttagtaatattaagttggygttggataagtygggtaagtygaagyggaaggtgaattatygtaagtatttgtagaagtagattaagygttgtagyggttttatgggygtygygtttttyggttygtttttttygagygtygtygataygttagttaaayggtygttggtygtttttagygtttygatagtygyggtttyggtttayggtaaggttgtttttyggygggaggygtygtaggtygtygyggtygttagtttgtaaagtygaagtttggtygygtttttygattygttgygttaygttttygggggtgtygagtyggyggggggtgaggtggttgygtyggyggtygggttaggaggtgygggtattgggggygygggaggggaygtggtaggtttygygggggttayggygattttaggggttaggaaggtttygttgygggtaygtaatttgttttygtttttttttayggagtygtttygggtaggyggyggygggtgtggttygtyggggtyggaygtgagtttgggygatttggagaagggygyggaggtygtggagttttttgagttgttggggttygattayggygtyggtayggaggyggtagttttgtttgtygtygagtttttygaygtgtttttygtyggagttttygtattgyggggattttyggagttggagttyggtttttttgagtygtygtyggtagtggtgggaaatttattgtatttygagttttggagygtttygggttgtttttygattaaaaagagttttttgattgtttttygyggyggtttgattttgaaygagtttttgagttttttgtatttygtygttgyggattttttyggyggggaggaygggyggggttatttggtttttttygtttttttttttttagattgygttttgttttygtygtygtygttttattaggtgttttaygattatagygygggttatagtygtatygtttattttagtttttggagattygayggggtttgggaaggggygtygggggaggagggggygtatygggattgatttygaggtaygtttttttttattagagayggttgtggagagygtygygttttygt

SEQ ID NO: 7000 - DNA, 1542 bp, synthetic construct; identical to SEQ ID NO: 6999
  misc_feature 1..1542: note = Description of Artificial Sequence: Synthetic polynucleotide
  source 1..1542: mol_type = other DNA

SEQ ID NO: 7001 - DNA, 1768 bp, synthetic construct
  misc_feature 1..1768: note = Description of Artificial Sequence: Synthetic polynucleotide
  source 1..1768: mol_type = other DNA
ygygtttggagtgggttttygatatttagggtaagtgggggyggtagagtttttttttyggtyggtatagtagtttttgtygyggtttyggtttgygaygygtttagttttagtttttyggttttyggygtttgttgagtgttyggygggagaggygtagggagygygttatygggaggygygggtagyggggattggttttttttygggttagggttttyggggtaatygtttttagygygtatttttggtgtaggtggaatagttttttgtttyggtagggttttatttatygygggagaggttaatttyggatttaaatttygtagtygtagagygggttaaaatygttattttatttttttttattttttttttttttattttaagataaaaagttttaggtygggtaggatttgattatttttgtttttttttattgygttaattttgygagygagaggtttygtatygaggyggaggttggtaaaggggagtggaaagggaggatggatggggtyggggggtggggtggtgatgagggygaygaaggagggggtgttattttttttttttttttttttttaaaaaaagtatttttttygygagaaatygttgygyggaygatatttgaagaggtggggaaaggagggggttgygggagtygyggtagagattgtgggtgttataagyggataggagttatagttgggatagttgygagyggagtygagtagtggttgtagyggttaygattgggagtagtygtygtygttttttygggagtyggagtygtygtttttttagtgggtgtagtyggggtttygaygggggtygggyggttatyggggttggagttgyggttayggaggtttttgygtttgygtygygtygagggtagggatagggattggggtgaggggttgtttyggaaygtttatagttggygttggtttttttttgtttgatagttttttggttyggggtttttggtgtygggtttygygttagatgttyggggggyggtggtatygttyggagtyggyggggayggygyggttggtttttagtttggyggagagggtaggttgaggagtggggygtttagagygygtatygygygtaattygtgtygttaaaaaaaataaatttagagagttygttyggggtttaggatygttggggatatgggtattttgygtygygtttttttggyggggttygggaggtygagggatyggtyggggttgttgtygtygggggtttgggttttttagttagttgtggattaaayggtttttttttatttaaattaattgygttaygygtaggyggygtaygggttgggtttgggaatggggatygygaggttttagtatttygatgttttgaaagttttttygtttyggggatttgtttttgtgttgtagttggtaggggtygtttgaagtgggagtagygtttggagaaggygggaggagttyggttygggggaygggyggygggatagygggatttyggyggygyggtgygttttagggygtagyggyggtygtagatygagtttygggygyggtaagaggyggygggagtyggtggyggttyggtattatgygtygagggygtttgttggagatygttttgggatttatygtgtttttagygttttataygagttatggggyggaygttaatttggaggttgggaaygtgaaggaaattagagttagtygggttaagagaagaggyggtggaggataygaygygt

SEQ ID NO: 7002 - DNA, 2656 bp, synthetic construct
  misc_feature 1..2656: note = Description of Artificial Sequence: Synthetic polynucleotide
  source 1..2656: mol_type = other DNA
ygtataggaattttagtygtttaagtttygggtgggygygtygtatttttttaggtattgtttagatagttygttttttttttttgggygttttttttagtttggttggggtyggggygggttgggggaggttttygygggtttgtttgatatttgtaaatggaagtgggatttaatttggaaaataaaygygttagagtttgggggyggagaggagygggaggaggggagaggggggaaaaagattttaattattatygyggttttagygtttttttttttygtygyggttgttgtaggttygtttaaattygaagttgagttttattgggygygyggyggyggygggatggagttggagttttyggtygaggygttaggagtttattagatttygygtgttagagttatyggtygtttaygtttygggtygtaggygttattttttttygggagttttttttagttttttayggagatttygtagggttttygtagttttttygttttygaygtttatttyggggatttttttttatygtttggtttgagtttattattttagygagttgtagttttaggatgttatygttagtatatttatatttygggagtatttttgttttttttatttygagtaatttaagyggtttttttagttygtagttaaatttyggttatttttgtatttttgttttaagtaygttttygttatttttygtttataagaggagaayggtggaaagtgaataaaagttgtttttygtaaagtttaattatgtttaatgttaaattatttyggaaagtatatgtgataaaagttaaygagagaggagaggagggaatttagattatagtatagttaaaaatattygggttygttattatgtaagtyggggggttagatgtattttagtttagygatttttattggyggaattttygygtttatygygygtygygttaagatggtttaggttatttttattgttttttygttagygttttttagttttttatatttgttttgtatatatattggtttgtagaggggattygtttygaatygttygggagtggggtttgagttyggagttggtgtttttggygttttygtttttaattyggagatagttttttygtatttttggggatggttagattygygttgttttttttttaaagataagtagtttttttataygttygttaaaaattatgtattttygtaaagtatttyggttttttttttttgttaagatagtagggatagtttttgtttttaattatttygtaaaggatgtygtttttagtygaagagtygtygtygtygtttattatattttattttgattataagtttygtaagttygagttaggygtggggaayggattygtagattggtaatttttttttttttttagygaaagtggaggttgggttttttttttgygtygygtttygtttagygatgatttaatttgtatttyggggttttttaagtgtattatttatyggtatttgaatattttttattgygttygagaggtatyggttgttaagtaggttygttatttgaatttttttatttatttgtaggggyggttgggagtyggggatgggtgtattgattygtaatttttttygtaatttttttttagatttttagttttaaatttggttaatttttygtgtaaatttttyggttttygtygyggggttaagttattttttttttttgtttgtagyggtagtaayggyggttyggggttgygyggaggttggaattttataaggtgaaaagttttttttaygygtttygtyggttttygtttttttagtttatttygtagtttatttgtatttagtagttgaggttgtgtttyggtaggygygttttagtyggtgtattaggtagttaaattattaygttataaatttttaygtatttttgttttygttggygatttayggttttaygaggygtttttttygtggttttttttattyggtgttyggygtttttgtttygggygagtyggtttttyggttgttgtygtygtagygtttatygygygttagtygggattgaggtygygagtagaagygttttgygttygggaygtygtygtygtygtygtygggggttygtaagyggaggaggggagtygagatgaagagaatagtagygggaggagagggaygggaggygygagattttaattygtaggttagtttatagygtagtttgyggggaggagygtyggtttttttgtttgtttygagttgtagtygtygtygttattgttygtygtttggttgtttygggttttttattatagtygaygtygaygtayggttaagtttttttttagtttttttttygygtttgtttttygtagttttttttttttaaatygygagygaaaagggygagggggagaggagtttyggyggyggggatgattagygatttaggagygtggygtaggggagagggggygygygggagggggyggyggaggaggygyggygaattggagggtattttyggygtygggtttggaagyggttaattttagagttygagtttttttttagttttttggggttttaggatgatattaaygtatttttttgtygyggggagagygt

SEQ ID NO: 7003 - DNA, 623 bp, synthetic construct
  misc_feature 1..623: note = Description of Artificial Sequence: Synthetic polynucleotide
  source 1..623: mol_type = other DNA
ygatattaygygagtgtgtaygygttggggattgagttttygaagygaagttttgtyggaggagttttaggygggagtgggaayggttgggygtggggttagtaayggygttattyggtagggtggggggagttaggtttgttagagttagagygygttatygtygtygygagagaygtygygttgtttaataggtagaggygttttttagtagtttggtgggagtagagatataaaagtgttttaataaattyggagttggygtgtygatygygggttggtggygggyggygyggtgtttygygygttygggttttttggtttttygggayggttttgtatgttgtgygtttygtatttyggttgygygtttygattttagygggaggggaygttyggttygtaggtttttaggggaggggtggtttttgtaaaatggttttttattttttgttgttttgttttttttttttggtgygagttatygagttttaygagggtygggtygaygagtagagygyggaggyggttttggtygtgtttaatgtttygtatttttttttttggaataattatatttttttygattggtagaattttgtgggtaggaggygttayggygt

SEQ ID NO: 7004 - DNA, 1967 bp, synthetic construct
  misc_feature 1..1967: note = Description of Artificial Sequence: Synthetic polynucleotide
  source 1..1967: mol_type = other DNA
ygatgatggaaaggatygttaggygattttttaaaaggtttattaaatattygggttttattgttaygtttttattygggggygaggatgttttaaaaatattttttttttttygttttatgtggataggtygygtygyggtatttaygggtatygyggaaaggggtataatyggggtggttttygtttaggtggtagyggagatttagggttaggyggattaggtttggtttttatttttttttttygggttttgttayggtttygtttygtygttagtagagttttyggttygyggtyggtyggttagygtaygygygtaggtgtgtttgttaggatgtttttttyggygaygygtttaggttyggatttygyggygygagagtgagygttggygggggyggtgggatgttttaagtyggygtgaaagaggygagagtgggygagtaygggyggtyggattaggagtattttyggtgattatttagtttttattttattttttyggaaattgtygggtaggygggggatyggtygtagggyggggttttttttggyggtgagtgagygagatygttaggttgaagtatygggagattgttttggtagtttttggtygttattygygtygtaataaaagtttttygyggtttttygtttagttagtttygtattgattggtygtygtgggagggattygagttggttggaggyggyggtygagygttgtttttgtgtygttygyggagggggygtattgggtgttttttggttygtttygtgygttttttaatygggggtyggtygtttagggtaggtataayggtatttggagttgygatygygatatatagttttttygttyggtttttttygatygttttttagtataygtttttygtttagaatgttygtttaatttatttagttttttgyggtttttgttttttttttttttttttygtttattagagttaaagygtaaatttttgggtggaggtggggggatgatagttggaggggagggtgggtaygtatagaagaattttttagggaggtygggatggaaatagttaaaatgaaatgtatttttttgtatattgtygaggttttttgggyggyggygtaattttygttattygyggtagtattattattgttttttttttagttttttattgtttatattttgttaggatygggaatttygtttaaagaaaggagatagggygaggtgtttygggyggttatttgttatttttttttygtttygtgtaatattgggtaygyggygygtgtaaagatataygygygtataygygygygtatatattaggtagttttaattaygtttttttygtttttygttttttygtatttttttttgttaaaaygyggygttygatttttttattttttagtgttygyggtygagggtaggttttgtaattaattagtaatttggtaaatgaaaaattaaygttatgtygattggggtgtaataayggttatattaataataayggtygtgygattttgtttattttgttttattttgtaaatygttatttttttggggygggggaagtaaagtagygattttgattttattagatttaggaatataaygatttggggyggttgttttagttttattgtttatttttttyggagtyggggttgataagttatttttttttyggaattygagttygtgyggyggtattattygagtygygatttttttygtttygtygttygtttttggggaaggagygttgtttattattagygyggtygttgagtttttaggagtyggtyggttttgtttttatygtygygggygtataaagtgggaagggyggaygygtyggaggggygtygggygttggyggttyggggaggtagtttygtgtagygtagttttggagggagyggggttyggttgggtagtaagggygaygygt

SEQ ID NO: 7005 - DNA, 2558 bp, synthetic construct
  misc_feature 1..2558: note = Description of Artificial Sequence: Synthetic polynucleotide
  source 1..2558: mol_type = other DNA
ygtttyggggtggggayggaggtygttaaggttgggatgagtatttagtygagtygagttatygygtgttttttygtagatatyggggtttttgagaattaggagggaatagttaaaagaatggaagtttggygttttgaaataagttttttgggttttgagggaaatttgggygtttaygggtagtygttttttttattygtygttyggygttygygattyggttggygttggttgtagygtttagttaggyggygyggggaagagtyggygataattygttygagtttyggggatygatygygtttttatatttttttagtttttagygatttttatygagatttggagaygattttagtaaatttggggaagtaatttttttygaggagttagatttttgaaagaaggagagttgagttagggaygagggaaagygaaagagayggggaggaayggygatagttygggygggttggatttygyggygagagyggtaggggaggyggattygtttygyggygaaggggaagtataaaagtttygtagygagttgtgggaggaaaggygagaaggggtttgttygtttttttttttygatttagggtygtgattttttgggagygatyggttgggttttaggtttttggttagyggygttagyggttagygygttyggtttaagtayggtgygagygtttyggggaggyggygagygagtyggtgyggagygtttygtgygttygggtggtttygygggtyggygggatygtgygtattttaagygygtgygggagtgtgygaggygttgtgygagttagyggygggygygttagggtgggaaaggtatttygaaygtattaggtgtagagatyggtatttatygagagyggtygggagygtayggygagtttyggtgttatygtyggtttygtygagagtygaggagggttygtagygttgtagattttttggagttttttttttttttttgtaaaaggggggtggggattaagtttaattaagaaaaagtttattaygtttttttaaagagaaataaaaygtaagtagttttagttttgttttttttygtttttagatttattygttagttttttygattttagttttttagtyggtyggygaataaatatataaataaataaattataattttattttgygttygygtatyggttygtatatataagagtatttaygggttttgttgtttygttagtttttggyggtataaagttttyggattttygatttttttgtttaygtttttagttttygtatatygttaygttttttattttttatttygatygtgttttgaagaggaagggttggggaggtagttgygtttaggttgatagtyggggtttttttttttagtygatttttaatyggtggyggygayggttgtagyggtaggaagggaataygttaaataaaaaaggtataagtttagyggtygagtggtygaagygagygygygttttttagatttttttagtttygggaagtttyggygygyggygttygttgggyggtgygttttttttyggttttttatttatygtagtygagtygggtattgtggggtgggtgtgygtgtttgtyggggggtgtgtgtttgtgtyggggaggggtgttgttggggaattgttgtttttygtattayggyggtagygatagtatygttyggtagttygtagtattygtttttatygtttttaatttttttttgttgygaggttagtaaattattatyggttgttgygttttygtygygttttaygttaaygtygagtttttttttttgtaaggtttyggygtttttttatttttagtgttggyggtygagttyggttttttgtttatagttgtttttttttttttttttttttygygtygttttygggtttagttygtttattatttygtattggtygagttygygygygtttttygttttatttttttttttttttttttttttttttttttttttttttgygtttygygtttygggtttygtttgatatttagttgttgttggggygtyggyggtygttttttatyggtygagyggagaggaaggaaggagttagaggataggagtgtatggggatttagaatttttaataggggaattgagggtgaagggygygtagtagtttttatttatttttaagattttaatttgtattggataygggttttgttttttttttttygtatttyggtgtttaagtaygtagttttgtttttttttttaatgtttgttttaatttagtgygtgttatttygtttttaattttttttttatggttyggggttgtagtttttttgatatttgttttaaaaggtygtttttttagtttaaattyggtttttttatttttttggttattgygygtttttyggtttgagtattyggattttaataagtttttygaggtagagttygygggygttagtgaattaggtgttagaaggttygyggggatttattgtygaagygagatattygtttttagttgtygyga

SEQ ID NO: 7006 - DNA, 2558 bp, synthetic construct; identical to SEQ ID NO: 7005
  misc_feature 1..2558: note = Description of Artificial Sequence: Synthetic polynucleotide
  source 1..2558: mol_type = other DNA

SEQ ID NO: 7007 - DNA, 1508 bp, synthetic construct
  misc_feature 1..1508: note = Description of Artificial Sequence: Synthetic polynucleotide
  source 1..1508: mol_type = other DNA
ygttttttagatagyggagtygggtyggggyggtttggttygggtygtygtttttgtttttgggtttgtggggttggggttygtttgggtttygggttygygyggygtttattattyggggtgtygygggggggyggggagagyggtygtttagtttagtttygyggatgataggagtyggggagtygaggagggaggagtygtygtygtagtygagygttgggttgaggagtagagagagyggggygtygagtgygggyggttgggagygygttgagygggggagaggygttgtygtayggtyggttataggattattttttyggagaatagggtttttttatggtatgtggttggtaattttttttttgtttttggattttttatataaaggtgagatttgygygggyggttgggyggyggaggyggyggggttagggtggygyggttggyggygaggyggggtgttyggygggttttaggtgygtgggggaatygatyggggtgtaaggtttygggtggggygtagyggggaggggtaggtattttgataggggtygagtgagagttagttttygatygtttygttagttattygygtttgtygttttggggygygttygtaggggtggtggtaaaggagttttttatttttttgttttttgtayggyggtagttttgttttggattttttttttagttttttgttttttttttgyggtttggtggtattgggatttyggagtgtttttygagtygaggggtttttaggtygtgatttttgatttaggagtttttgtttatttaggtttyggattyggyggttgattttttygttatgttygtgygtttttttttygtygyggattttagttttggygygaatgttggygtatygtatggygtttattygygtattggttggaggtagggtggggatagtgagagtttygagagttggaggtttttyggatagtaagtttgttttttaaatttagaggttattttttttyggttttattttatttttttgtttyggttttagtttyggtttggtgygttatygtggttatttygggtagygygttttaagatgygagatttttygttttygygtttggttagttggatttggggataagtttttaggttggggggygtgttttttttttyggagagagggggttgttaggggtgggtttaggtgttyggtatgtttagatttgyggttggggygttgygtatttgattygygaggtagtygggatygggaggttggaagagggtagatattttygattgaagttatttgggtattgagtygggattaggtaggygtaggtagtttgggttttaggttatygtagaggaygtgttttygggygygtagatggygggagatgaggyggtygaatttygygtttttgygtggtggagtatataygttttaataagtttagygttatttgtttagttttttaatttttttttttttygtttyggggygg

SEQ ID NO: 7008 - DNA, 1119 bp, synthetic construct
  misc_feature 1..1119: note = Description of Artificial Sequence: Synthetic polynucleotide
  source 1..1119: mol_type = other DNA
yggtggygatatggtaggtagtttygygtggyggyggtygggatagttgggygygttggtaggagagtaggtatagygttttttataggtaggatgaygygggtttygtagttygtttttttaygttgtttygtattattgtttyggttttgaygtgygtgygatagatttatygtaaatagtttttagygggagtaygaggtygggataggaggtgggyggttatataggatattttattttttttattttttygtagtyggyggagtygatygtyggaaaagggaggyggtgggygaaaggaaagyggggagttgggagaggagttgtaaataaagagttgtttttgtgygaagttttgagtygggtttagttagttygttttttgtggtttaygtattgttygtyggtttaygygggagtttygaggggygaggyggaggttgggygtagtttttgtagttagtagttattttygygygtttygtygyggtttagttaattatttgttgyggyggyggtygtgttttttagggtgtattagtattttygtygygggygttgttttygyggygtyggtatygatgttyggttatttttaggttygaaygattgyggttgygggaaggygggtygaggggggttayggtattttagggagaggtygggagtygttyggatttyggaggggatggggttttttttgggaggtattygttttttttttgggttttaagattttttttagttttgygtttygattttatttttttygaaaygtyggggaatygggaaaggagggttaygggtaaagygggggygggygttttttgattagtatgyggygtyggttgttygggttyggattttygagtttttttttygygagygtatattaataagtttataaatggaattyggtggygtygtttgtaataaaaggtagaagttgygtttyggygttttaatgagagtattttttttygtaataaggggttggatttagttgtttggtgtygtttgagyggggygagttgttagagtaattaaggtttagygygtaygtggggagagggagttggttggggttttagygttagtygtygtttgygygttygg

SEQ ID NO: 7009 - DNA, 1119 bp, synthetic construct; identical to SEQ ID NO: 7008
  misc_feature 1..1119: note = Description of Artificial Sequence: Synthetic polynucleotide
  source 1..1119: mol_type = other DNA

SEQ ID NO: 7010 - DNA, 653 bp, synthetic construct
  misc_feature 1..653: note = Description of Artificial Sequence: Synthetic polynucleotide
  source 1..653: mol_type = other DNA
yggaagtaaggygggttagttatygtttygagttaaagtttttgtagttttggtaatttttygygygtttttgtttaggagttttatattttagagaaatttttyggygtttttagtttygttgttttttttaggttttgggatatagttttaagggattgagyggttyggaygggatttgaaatttttggaggattagttaygttygtatagttygtttatgygygttggtattaggattygtaggttgttagyggygagttttygtygyggttttttagggtattttyggagaagggggyggttttgaggaattttttgtatttyggatgttttatttttttygtttttagygttttagggttttgttygggttttggtygygygtggtgttttttttagtygyggagttttgttttttagtgtygttgaaaggaaagagaaagaaaaygttttyggttttggaggttttgtttttttttgaagygatgttattttttttttttatttttttttttttagattttttttggggtttyggtagaggyggggyggttgygtttygagttttttttyggyggtagygygggagyggggttggaaaagagggygtygggagtygtttygttttttatygtttttggttttttygt

SEQ ID NO: 7011 - DNA, 1768 bp, synthetic construct; identical to SEQ ID NO: 7001
  misc_feature 1..1768: note = Description of Artificial Sequence: Synthetic polynucleotide
  source 1..1768: mol_type = other DNA

SEQ ID NO: 7012 - DNA, 1101 bp, synthetic construct
  misc_feature 1..1101: note = Description of Artificial Sequence: Synthetic polynucleotide
  source 1..1101: mol_type = other DNA
ygttgygaggattaagggagatggaatgtagygtaaagttttaygtaaaygtgtygtgtaatatgaagttttttattttgagttggggagygggtggtaygygtggaagttgaatgttattatttttgggattaggygtagygttttttagaagygtttttggtgaygggtttttgtttttttttaggaygttttttttagaatgtttyggggttttggayggttttggagaggaygggagggaagggaaggagaygggyggaayggggaygtatttgtttttattgtatttttttygtttttttatttttagttatttgyggaggaggaagygttttyggygyggggaygygttgggtgtggagtagttggattayggggtgttttygtygttggagggygtgatttygatggayggtagttgtaggaattttttgtygggggttaagayggygggtaggtttygggttagttyggtttttaggttttgtttttgtaygttttttatgyggygtattttgaagygtyggyggygaagygtgggggtygaygaattggattagatygggttgttttygggygtattttgyggttygggtatttgtagggygggtagyggtyggttttttattatgttggtygtyggtatgggggtygtygtttttgygttttttttgagtttttygttagyggtttggttygygtttttttttggttgttttttattttyggtttygyggtatattttttaattttggggtygaaggaataagtttttttttyggagygtagygaggaagggaygygaggggaygyggygtagygygtygtygttyggagtttaatttttyggagygygygtttttygggtygttagtygtyggygaggttattygggaggggygggagtygtttgttagttattyggtagtttttttggggtttttttygygygttygtttgtttttttttygttgygttttttygtttgttggygtttttgttttagygggattyggtagttaggggttttagggggyggtgtagtaaatttttagyggtttgygtttagtagattaggttggggagtyggtttggygt

SEQ ID NO: 7013 - DNA, 1101 bp, synthetic construct; identical to SEQ ID NO: 7012
  misc_feature 1..1101: note = Description of Artificial Sequence: Synthetic polynucleotide
  source 1..1101: mol_type = other DNA

SEQ ID NO: 7014 - DNA, 2341 bp, synthetic construct
  misc_feature 1..2341: note = Description of Artificial Sequence: Synthetic polynucleotide
  source 1..2341: mol_type = other DNA
yggtttttgtaayggaggyggtttygaaggaygtaggattttttyggaggygatagttttaggagttttggttttggagtyggygtaygtttaggygygaagggygggggttyggggygttagggatttgtgyggaygggggttggggaaggtttttygtyggagaggyggygaggtyggtttaggagtttygyggagtyggyggttttttagygtttagagtygggygattgagtgtygagaggaagggaaagygttgatatgtaaataggggtttttatttggaggagttygtttagatagatttttygatatatttatttgtatttttattttygtgtaaygaggttatttatttattttagggtttattaggtagggattygagttygggygattgtagttttygttttygtygtgtttygtttttgyggagaggaagtttagtgtttagygttggggttaygggagtttygggtgtyggtgggagtggtggatttygaggtttttygtttttgatttygtttygtattttggggtttttyggtttttygtygtttttttttgtagtttyggygggtagygaggtgggaggggggtyggggttttattttgggggttgggatttygggggagggtygtttttaatgygggygtttggtyggttggttygygagtaggattygttattygagygtyggaggagtyggygygaagtyggggygyggagggaagggagagaggttaygtttttygggaygygggtttygtatttattygttygtygtttygttttttyggtyggttttygtygttygygttygttgtttygtygtttattttaatagtttygtttatttggttaagtttgtagtygagttttttaatattttatatattgattyggttatagtttgatttygtagttttttyggattagttyggygyggtttttttggygttttgggttttttttgygtgttttttgygagygttttgtttttatttttttgtgtaygtttgttgttgtagyggagygaaagagatagttaatyggatgaaattttttttttagttaattttgggaagtgattttattttgygaatyggggaggaagttttatttttttttttttttttttttttttttttttttttttttttttttttttttygtttygagtttttttttttttttttttttttttgtttttttttgttttttttttttttttatatttttttttttttttttgttggttttgtttttygtattatatattatataaatataygyggagatgtttagatatatttatgygttgygtatataggatatttgtttttgggagataagagttagtygggaataatgayggggtttaygtttagygttygygttttgattttygaagtttgaatttttttttattatttttttttaaaatttaaagttaaagatttttggtttttttgttttttttgaggyggttggtygaaggtggtttttttgatttatttatttttygtttttttttatagataygtttattaatgttttttttagtyggagataaattttttgggggtggggtagggggggtatggagggagagttggttagggttgygggtaatttagygtttattgtyggggaagattyggaygaaaatygaggtaaattaattattaaaaagtgtatttaataagaatttttttatttaggtttttygttgtygagaygyggtagatttttagagyggtttatttatttatygaagyggattttgggyggtttygggttgattygygttgttagggygyggattttatttygggygtattgttaggagaaggggtttttyggggyggygygtttygattttgggttttyggtgttygtagagggyggagattygyggygttttaggttatttattygtattttttygagttaaatttttagygtttattyggattygayggtttaagtattgatttttaggtaagagtygttttttttggtttttagggaattgatattatygygggaygttttttttaggatagttagtaggttttaggagygtagtaygtaatagygtagagtagatttagatttttttyggggtgagattyggaggttygygttttggatygttttttttatttagtttggaggtyggygtttttyggtttaattyggagattttttygttttttttttgggtygtygygygttttagttggagtagtttygaggggttgggttttttyggtyggatttttttttttyggatatttaaaataggttattttgtttaygtttttyggattaygt

SEQ ID NO: 7015 - DNA, 3857 bp, synthetic construct
  misc_feature 1..3857: note = Description of Artificial Sequence: Synthetic polynucleotide
  source 1..3857: mol_type = other DNA
ygagtagaaattatygtgtttttgggggtttttygggygtygtggggygaygyggtgtagygtttagggtygtygtaggtygggggtagggtttttagyggttttttygyggttagyggttaygtaggaaaaattygttttttygtttttgtatttgttgataagtygttygaggtgtttgygttgagygtggttatatygatgtagttttttaggaaatggttygggagggggagggggygagtgagggattaggttyggttttttttygttttttttgygtaaatattattattttttttttttttyggaggtatgaggtttttaygttyggtttttygttygtattttygtygattttttyggtttygygttttattygttaggttttttttttgggagtygattgyggtgaagtygtygttagtayggtyggttttgataygtgttttaaygtatgtttgagttaaggttgtttttataggagataygatttggtggygtttttttattttttttttttygttattttttatttttatygygttttttggtgtattttattttaggaggaaggggagagattagygttttgatgtgttggttaagttggtaygtgtagygggtatggygtggttygagttttttgggtatatygaggtygattgagtgttttttttatygagagagggggttygggtaggggygyggagagttagtaaggyggggtggggygygggttgggtgagtygtatattaggttttttgtaaggyggaggaggggagygaataaattagaggtgtaagygattaatttaggtttyggagttagtttttttaaaygagggtggggyggaaggggtggtgggggggaaaggaggggatatygttttaaaagggtgaggaagagtttggggygtygttttttttttttttatttgtatagttaatagttttggggtttttgttattgygygttgattgttatygggtagattattttttttttttttttttttttttttttttagtaggaygygttttttattatattaaaaggaagttaagggagggyggagggagagygggygttggggygggygaaagttggggagaggttyggtygttttygattttattaatagtagygggaatgagtattttattttttatatgtaaagaaaggggagggaaggggygggygaggaaaatgtttaattgttgtggaagttattagtttttaggaagaaaaaaagttygttgaaaaatttaagttgtaaatttaaaatgaaatagtttagygtygyggatgatattygggtygaatatygtgtatattygtatatagtyggtttygaataattatttattggttttagttaygttgggtttttygatttaagtttttgagttatttyggataaggatatttatttatattttaagatttttataagggaattattttaattttatttaagttatttttgagyggattaaagaaagttgtagyggggagaggygagagaaggagggagggygggaggtatttttaaagtataaatttaattygataggtaagggatagaggtygtyggggtttttagtttttggatattatttgatatagttttgygagtaaggttttttttatttygatttygtatattttttttttttyggggaaaggtatttagagttttgggtttttygaagtgggggtagygggggygaggaagaagygggtggtygtttyggggtttagtttatttygaggagaatgtttgggtggygagtttttaygtttygggagtgagtygagggttttttygttttttttttttttttttttttttatttygttttgttttatagagaaattttagyggggaggggggtagygaatgggaggggtagagagggtygyggtyggatgtttttttttttyggygttttttgtatttatggagattygtaagttygggygtttttygygtggtaggttygttttttgaagtttttttgtttattttttttttygattattgattgttttygagygtgaagttygttatygaatttaattttyggtggttttgtagatttttataygtggggtggggygtgagagggtgyggaggttggtaggaatgtttttaggaggtttggattggaaattgagtttttttttttggtygttattttagttatgtgttaaaattttaatgttttgttaaaatgtattttatttagtaygygggaaaaygtatgttgttttttaggtaaaagtgtatatttttttttagtgtagatttyggttttaagaaaaagygtaagagtttgtgttttggttttgaagtttaaattgattatygtggygygggggtggggggyggygggagggggtagattgttggtttttttttattttttttttattttttayggaaaaaaaaatatatatatatatattttatgtaggattggtgataaattttagygaaygttagttttattggatttttatttttttttyggtyggttttttattttttaygttagygttttggagtttyggttggaaagtgtataaagtttggaggtggagggtgtagtagggtgttgggtgtttataggtatttttttgtaggagtttgtagtattaagtatatatatttttaagtttatttggaggatgttttttagttaggtgatttygyggtyggtttaaggttygggagtagygygagttygagtttygtttttttygygtaggggygtttaggttaggtggggagygggtagtgattgagtttaggtttagaaatgggagttattgtttttttttyggtttttttaaagagtggagttgtgtttgtgttttttygtggagggatggayggttaattaaaatygaaaattygattggtaaaatgygaggggatatataaattygaggggatatataggaggtatattaagaggaaggagggagtgtaggtaaagtagaaaaatgyggataaggagaagaggaaaaygtygggaagyggagagtaygggggagtagggtgggtggggaygggtagtgygattgtaggtgtttattygttttygggattttttggtygtagtygygttygtyggggygttgggtygttgygttttggaggggggtagagttygttaggtttgtgtattygtatttttttyggygaatttyggtttggayggggttggattattgaggyggtagatgygataggygtgagttaagaaggygagygtttgtygtttgttatttatttagtattttattttttttttttyggaaaaaaaaaaaattaaaagattygaatttttttttttttttgtttgatttagtttaggataygttttaygyggtygaaaatagttttggaaatatatttgttttataaaagtgaattttttaataagttttggggyggggggygttyggyggtyggygtyggggggttttgtttttygggaggagaaggaatyggtygttttygtttttttttttttttaggygttttygggagggggtygttgggyggyggaatygygttttygttyggggagttattaygyggttttttygyggaattttgaygttatttataygtgggggaaggggttgggagagtaagaggaagyggygggggagggggtygyggttgggagagygyggyggyggygyggygggtttggtattttygyggtgggygtagygtygggtagggttygggttttgggtagygyggtagaggaggtygtgtygyggatttyggagttagygtygygattygttttttttttygtttttygtttttygt

SEQ ID NO: 7016 - DNA, 1439 bp, synthetic construct
  misc_feature 1..1439: note = Description of Artificial Sequence: Synthetic polynucleotide
  source 1..1439: mol_type = other DNA
ygygggttttttygttaagygggaygtygygtygggygggtgagagaaagttygggtaggagagtatagagtyggygattggaygygagygyggggygggtggagagygttttttygggygtygttgttgttgtttygggtgttgaaaagtygggaatttttygggaagtagyggtatttttttttttggaaggtgggtgtgggggttttagattgygtatttgttaaatttttttgggtttttygggaggggttygttagatgtgtttttttttagttttattygggggagaaggatgggggygggggygtgggggtgagtatagtyggatatygtaagtgggaatttggggtgttttttttygtagttttygggtagtygygygtygygaatttyggtttatttgtaagtaaggygggtygggggtagagggygtygggttgtgygggggaatyggttygygtttygggattggggggyggtggaagagagagygagygggtatgygtagtggggyggaggaggtggygatggtygggggaggyggggggattgttgtttatttgtagttgggttaatttygyggygtaggyggyggyggagygyggggagttygyggygggtttagttgtygtagtattatgttygagttttttttygggtagaygtygygygtygtyggggtttyggtaggggaggatgttagaygttygggagaggttagggtagtagyggyggyggyggygygatggtggtgattatttttgttygaggyggyggyggggatygtatattttttyggyggyggggttgygggttagygtyggtyggggtygyggygttgttggtyggggtaagttgtttgtgttayggtygttttttgtagggygagttygtgtaygaygaygtgtgggygatygtgaataatttygaygtgyggttyggygtttygtttygttggggtatttttattaaygatttttggggtaagggtatggtygagaatattagttataagttttatyggtygttttgygtttttatttttaagtgagttttttatttygygttagtygtygttgttttttttatttttygttygtttttyggatygggagaagttgygggattgatttgggggtattttatttttgtygttttttttttttaygttttttttttttttaggatgtgtatggtattttgtttygggatttattgttyggttaatttgggttttyggggyggttygggaggygtyggttggggagttgggatygagttttttaattgtttgtttttttagygggtttttttttygaggtagggttgggagygggttggtgaaatygttttygtattttttygtttgtyggatygtgattaagtgggattagygyggatttagagggtttyggaggggtggyggtggtggyga

SEQ ID NO: 7017 - DNA, 1288 bp, synthetic construct
  misc_feature 1..1288: note = Description of Artificial Sequence: Synthetic polynucleotide
  source 1..1288: mol_type = other DNA
yggagagggtttttygggttaattttgggtaaygatgagtattttyggtttyggtaggggygtygggtygttygtttttttttttttttttttttgygagttttttttttagaggaygyggggagtygggtttgygygtttygtygtttgttatttagygttygygtygggttgygattggaygygtygtygttaggtattygttagaaatattagtgygttggggagaggaggggggygtgtttgygagtygagggtttgttttggtttttttayggtttttttttttttttagtattttatgtygggtttttagttttagygygtttyggttygttygygyggygggagagttggygtaaatttygyggtagtygtagttttttygygygttttttttttttttaygtttttygttttygttatggggttaaygtggggtttttaagagttgtyggtttttagyggygtaatttttagttaaagttatygygggyggattatggtttagggygttagaggggttagaggtaygggaagaggaaaagayggttaattgggaaaaaaagagaaaaygaaagaaaagttaaaygatgagtttttataaggaggayggagtgaatagtttgtgttagaaggttttgtatatygttatygagttgtgtttygtyggttaggtggagtgggagaagtgttygggtattttttttygggataggggtagttagggyggaagtagtataggtaatygggagggtttygttygygttttygygtttygttgggatttygygygttaggttgtaagtttyggggttttgygtttttygygtygttttygyggtatatttggggygttaygtttttttatttygttttttttttygtttagtttttgaygatttygagggtggggygtttgggttttgtttttttttgtttatttgtygggttttttttattttttggttygtttttygtttttyggygtygtttttygtttttagtttygtygygttttttygygtttttttaygttttttatttttttttyggagtggagaagtgagtgygggyggtgayggygtygggayggttygyggtttggttgtttgtgggggyggtttatttgtgggattagggttgttttygttygttttatyggtygttggtttyggttttgttgatgggggttaggygggayggataagttatgtttggaygtagaatttttttgtagaggtggttgttttggttttygaggtaattygyggttgtaatttgtygg

SEQ ID NO: 7018 - DNA, 1006 bp, synthetic construct
  misc_feature 1..1006: note = Description of Artificial Sequence: Synthetic polynucleotide
  source 1..1006: mol_type = other DNA
ygagttygggtttttaygttttatttggtagggggygygygggtttyggagttgtttagtattttttggttaagttttttgygtttttygygttygggaagtttttygygtyggggaagttttttagygtttygttttyggtagggaatttttttattaggatattyggggttttttaggttygttattygtttttattagtttttatttattttgtttagttttatttyggtagtgtagygtgttttggtggttttttttygtaygttttggagggggagtgttttgtatttyggggttgtttyggagtttagtgtaygagtgtatatgggttttttttttttgtttaaagggtaggygagygttattygttttagttttgttttttgtagttgggtggtttttttttttttttgttttttaagataygygttygaaatygaggggtgagagtaaagatygtttattaatttagtattttggatttagagtttttaatttygaaaggaggttggtattgttygggttatygagagagggagggagaagagttgaggttgtaayggtttttgggttttttagatygggtttggtatttaggagatygtgygggagatygaygttgagygtyggtttygttttyggyggttttttttttttttttatttygtttttttyggttygtttttttttttttggaggagtagttttttygygygtttttyggagttttttttattgtttttgtttttataataggttygggyggyggggaagaygggggggtgyggggtygttttagttygggtttttttggggtygttttttttttatygggtgtgygagtttttggttgtttttattyggttygggagttaatttttygayggagtygygtyggggygagttygattttttttttygggtttttttygggtygygttgtygtttyggttttgygtgtgggaatgatgtgygtattggagggtttaagttttttaygygt

SEQ ID NO: 7019 - DNA, 1185 bp, synthetic construct
  misc_feature 1..1185: note = Description of Artificial Sequence: Synthetic polynucleotide
  source 1..1185: mol_type = other DNA
yggagagttagggttygtttaataggagtaygyggagatattttagaygatagygygttttttttatttttatttygtttttygggygttttaggttagygtttattagattttaygtttgggggattgtttgggttttagygagagtgttayggttttgtayggtagyggggaggtggygagygygttygatttaygtygtttttaygtttatttttttttattaygagttttttttttttgttatagtattatttttattgttggtygygtttgttattttgtggggttggtgatatgaatggatgggttggatatatttttygttygtttagaaaaaaataaaaaataaaaaaaaaattygtttagatttgtatagagagggggaaagatttttttttgygtttttagagtttaygttgtyggttagagaaatttatagttttttttttttatatttattttttttattttttaaaaaaaygtttaaygtaaataaataatatygttttaagttygtygtygtttygggtggttttttttttttgtttggtttygygygttttagttttgygggaggyggyggygagaagttgyggttttgggtgyggtgyggggygttygggygataggygggygtaaggygggygygtagtagatyggttggygtygtattatgttttttagygyggtygtagtttaygtyggtgygtattgggaygttgtggtttttttygygttttttaattttttygttgygttyggttttggtaatttgggtaagagttttttgatygagaatttgttgygggtygggggygttttaaygtttaggttgtagtygttygygttttaygattyggygatygttttggttatygygggygygtagtttyggtttttgtttgttagtttagtttttttaaagttgtgtttygtagtygaataagttagtttygtyggggygttttayggaaygyggtgggttttttaagtgtttagtttttttgyggatagtgygaggttgtygggtygggtttygggggatygagattgtattttttagtttttagygttaggtgagttagtttttttttttttttttagtygygttygygtttttaggtygggtggtttagggatttgggagygtyggyggtgygtattgygtttagggagagtygg

SEQ ID NO: 7020 - DNA, 409 bp, synthetic construct
  misc_feature 1..409: note = Description of Artificial Sequence: Synthetic polynucleotide
  source 1..409: mol_type = other DNA
yggttttggttttaygygggtagygttagttggtyggtgttayggagttttygygtttttygttygtttagttttygyggatttatttattggggttgtttygtagygygatttttttttatttygggggagggttaagggyggyggtggggggyggggtgggggggaagyggygggagggggyggtgygtygtygttttatttygggttygygaattygtagygtttttygtagtatttttttaggttyggttttttttttttttygygtygatggtaygygtyggttygtttggttyggttgtagtggatgttgttagaatttaygyggaggaaggaagagaygtaggtaggttgyggttatttaagyggttattygggttttagggatttttttttygagagaygg

SEQ ID NO: 7021 - DNA, 1813 bp, synthetic construct
  misc_feature 1..1813: note = Description of Artificial Sequence: Synthetic polynucleotide
  source 1..1813: mol_type = other DNA
yggggtygttgygtttttttgattattgayggttaggayggttttagtttygttttatttgtaagttttattttaggttygagttttygagggtagggatagtttttygggtttygaggtttgattagagtttgaaagtttttgtygggggttgtttygatttagygaggygttaggttgttyggygyggttgggggygtttagygtygggattttagttttgtttyggtygttygttggtttagtgygtaygtttyggtagtttagtttttttttttayggyggtaggagagttttyggtatttgtttggggygggggygggggyggggyggggygggygtygygtttttttgtttgattggtaggaagatagattaatyggaggggtttttyggggggaggggyggtgtygtgtttgagtygggygygggygatygagggagttgtagttattygygtgyggtaygygtyggtygtttgttyggatygyggttattagtgtygyggtttttygattttygtttygtygagtygygygygygattgttattttttttaattgttttttaygattttttttgtgtatgtatttattttttgtttygttttgttttttttaaggyggtggyggyggygatagyggygtaagttygtagyggggagggggyggtyggaggatgyggygyggggttgygttygttaygttygttgttgttgttyggttygggtttgagygtygagtaggtgggtataggtgygtyggggggygggaggygagygttggttagagggaattygtggattyggygatygaggggyggatttggyggtaagggaygyggygatyggtgtygtttygttttatygtttatttttttttttttyggttatygygttttttttgggttttttttttattttygtattttattttagtggttttttatttttttatatttattttttatttttttttagatttttttgtaaaattttttagtygttgygtygttttttttaatattttttttyggtttygtttttagtttttagtttttttttaygttatttttatttttattttttttyggatttygtttttaagttaaggagygggagggggatttattyggtgtttgtyggagtggygyggggggtgtggtyggttygtttttttygtgtttttygtagggtaggttatagttttttagattttygtttaggtggtaaagaagatggagttgggggtygygtttyggyggygyggggttygaaggygaggtygtttagttygtattttattttaygtayggtataygtygtygyggtttttgttaygtatattttygygttgtttygtttaygtgggygtyggggaggaggttygagagatgggaagaaaggttggtatttatttttttgtygggtyggygygttttgggygtattggttttyggagatggygygtaaggattgattttygtggtgttagatattttgtygggygttttgygtyggggttagyggtttygttggtttgygttagtgygttgyggtttygttttttagtttttyggtttttygttttattttttttgttgtgggtttttgagtattyggtttgggtagtttagatagaggtygtttaygaggttggygttttttttygttttagaagtatttygtttttatatattttagttygtyggttttttgaaggttgggttagtttyggtttttygttagtttttgttyggttttttgagttttagygatattgtatttaatygttagttttttttygtygttygt

SEQ ID NO: 7022 - DNA, 1294 bp, synthetic construct
  misc_feature 1..1294: note = Description of Artificial Sequence: Synthetic polynucleotide
  source 1..1294: mol_type = other DNA
yggttggagaagttttygttagygttgtttgtggttagattygttttttgttttttttygggygtatatataygtttatttagatatttygygygttttttygygtttttgtttgttygttygtygtygtttgtttttttttttttgttttygtyggtygttttttttttttttttttttttttttttttttttttttttttttttttttttttggtattatagagttgttttgaaaatagaagatagagggagtttyggagttygttatttttagygatttttatattgggaaaaaatatggagttagtttyggtagttttygatttygtygttagygagttaggtagtagyggygyggaygyggtygtyggttttagggagatttygttgaattaggaattygttygtaagagygagtygtttgtttyggtgygtagatagagttattttagtattagtagaggtaggaggttggagaggggttggggagggggyggygggagttygggygyggagyggggggyggtygggagygggygttyggggygyggggttyggyggtygygygygagtttgyggyggygtttygagttyggaggattttttttttttttttttttygttttttagaaatgttgtaaatttttgtagttygttttyggtttgygggagtagagtggggygggggaggyggygggaaggttgatagtyggygggtttatttttttggttttgatttttttgtaaatattggaggaaagttgygttgttttaattaaataygtttttttaaaatayggagatgyggggagtgggggttygggaaagaaatttttaaagyggtagtgtttttttaagaaggggtaaaaaaatttgtttatggttatttttttttygttttattttttttttttttgatagtttyggttttggttgttygagtygggggtgtgttttyggttttttttagatttgggyggggggygggaggagtgagygatttgggaagtttygggggtggagagggggygtttyggggtttgggggygaygtggatattttttttggagtayggyggtgygtttgggatttgaaggaagggtygaaggaagyggggtgygggygggygagttgttygttaagttgtttggygggygyggygaggggagatgygtaagtttgtagatygggggttyggagttyggygtttaggttggyggggggygtgtgygygttaaygygtagagggyggyggttttgtggggygttttaygygtattyggagggagygt

SEQ ID NO: 7023 - DNA, 939 bp, synthetic construct
  misc_feature 1..939: note = Description of Artificial Sequence: Synthetic polynucleotide
  source 1..939: mol_type = other DNA
ygtygtaaggttatgggtygaagtggtgtaggggyggygttyggggaagygattggtagagttgtgygtattgggggtgttgtaggygttggggagagtgtggagaggttgygtggagttgygygttyggggtgggggttgtatttttaatgaagygygtgaagggtaagyggtgatgggttttgygttagtggggttgggagttygttyggggttgtatatggggttgygygtaaggtgaggattgygtatgtgggtttggggtttgygygtatyggaggttgtaggygttggggagggtgtggggggttgtgygtggggttgtttttatyggaagttgtaygttttgggaagygtagaggygggggtgttgttygygttggggagtaygtgaggggatatttagggattgttygygygaatggtttttaaygtatgygttttattttatattttatagtygttatgaygatygggaggttygtaayggttgyggggataagttygttgaggttgttaggygagttaggtttttttggatttygtttgattyggttgggttgtgtttgaaattgatttagttttattatattttttgattatgagaaaataaggagtaagtttaaagyggttgtaatttttyggtygtagttagtttaaggggyggygyggggtttttttygttygggagtyggaggtagaggaggagatggaaaagtyggttttaggyggygggaaattgttaaggggtttttggaggtttttttyggggaggatttaaagtttgaaagagygaaaaggtttggagttagaggtggtggttaagattttttttttyggttttttttagttygttygtaattttttggygtagtttygggaaaaggtgtaggaattgtaggygyggyggttttttagtagaattattttyggtatygg

SEQ ID NO: 7024 - DNA, 939 bp, synthetic construct; identical to SEQ ID NO: 7023
  misc_feature 1..939: note = Description of Artificial Sequence: Synthetic polynucleotide
  source 1..939: mol_type = other DNA

SEQ ID NO: 7025 - DNA, 899 bp, synthetic construct
  misc_feature 1..899: note = Description of Artificial Sequence: Synthetic polynucleotide
  source 1..899: mol_type = other DNA
yggtttttgagggttygggtagttattygtattttttygttaygyggagaaagtygagtatataggtygtagggtgggggttygyggggagagggtggaagtagygggtttttygygtttggggtggtygttgttttatttaggttttygtttgttttttatttttttagattaatygttttttgtaggtgttaaygyggtgtttygtattaggtggtaygyggattttttttagagtttttyggtttagayggagttaggttaaggtagaagygygggtagtttyggygttattttatagygttttatttgtagttttggggtttttattyggttttagggtgtatagtagtyggggygyggttygggaaatgtagttgygttttttgagtatattgtttaggatggtgtttaygtygtygttttgtygttttaggtattttttttygygttttagagattyggttagtttgttttgtygtattygagagygtttygggttttggtayggttatygttygtttyggttttygttattttattygttgagyggttgagttygyggagttgggtgagtgtttgyggttgatyggttygtgggagtagggagygtatagtyggttggtgttggagggttayggggatttayggggtatygygggagtygtygagygtagggaagttagtaggtatttgtagtgyggagtttgtaaggttgaggtaggagatygttygaggyggggagggygggagygagygagygagygagygygtgggagayggaggyggygtgttygtttttaatttyggtatygtygtgygtaggyggggtygttttagttttttygtgtttagaagygttagagatagggagttagtgggygygtaattgygttygg

SEQ ID NO: 7026 - DNA, 899 bp, synthetic construct; identical to SEQ ID NO: 7025
  misc_feature 1..899: note = Description of Artificial Sequence: Synthetic polynucleotide
  source 1..899: mol_type = other DNA

SEQ ID NO: 7027 - DNA, 547 bp, synthetic construct
  misc_feature 1..547: note = Description of Artificial Sequence: Synthetic polynucleotide
  source 1..547: mol_type = other DNA
yggygttttggygaattyggttattttagttttttaygtggtgagtatttagggtagygggtygatttttygaggttttatatttgggtttgaggggygyggttygtagyggygggtgtaggggygattgttagtttttatttygtttyggggtgygttyggaggtygatatttggaggaygtttttagttttygygggaygttaygtttgygygttagggattygggataagaagtgygygtygggtttyggttgygygtygyggggttattagtttgygygtagggtttaggygatygtgyggttatggataygttayggggtatyggtattttygtggtgtgggattaygtggtgttygygggtatgttggttatttyggtygttatyggtatttattaygttttygttgggggyggttagtagatttttaaggattttttgatgggyggtygtagaatgatygtagtgttygtggygttgttttttatygttagttttatgttagtygttattgttttgggtatttttttygaggtttatygt

SEQ ID NO: 7028 - DNA, 2505 bp, synthetic construct
  misc_feature 1..2505: note = Description of Artificial Sequence: Synthetic polynucleotide
  source 1..2505: mol_type = other DNA
ygtttygtttygtatygggggyggaatttygygttttyggatttgggatagtattagtagygtgaaataygygtattygagtgtaggagtaaataggtaattttttgttttggttatttttagttyggtygtttttttagyggtttgggatagtagygygtggttgggaagaygygggagggggaygygaggtaaatttgygttaagagttggttaggttaggtgagagggagtggtattygygtagatatttatygttggygtttttttygtagattaggtgttggtagggttgtaggagattttagattttygagtygttgttgatygtgtgttttagggtttttayggtgaatttgggygtttygtggagygtatggtggtggtgatggtggtggttggyggyggttgtyggygggattgyggyggtygyggyggtyggyggggygtaatagttgttgttttygttggygttgttggttgygttgtaggygtygtygttygtygtttttttttygggygtttttygttttttattygtygygggggtygtattagggttygagttygggtttgggtyggagttygagtttgatttagggttattgtagtttyggggtatttyggaggttaygattygygagtagatgtttyggaagaggttttttatgtaggttgttaggtagatggyggygtgttygtggatgygtagygttaygyggttgtttattatttagygatataygyggtttayggagaaggtgaggtygtagygggtygatttgtygyggtttaggyggtygtygtyggygttgtttatgttgtagagggatagtgyggttagygtagtygtygtatagtgygyggttaggttttaggatagtaygatttttatggygttttggatttygtatttggtgtatttggygaagygtaggtttaggygttgygtttttttggttatgygtattagygttyggtttattagygtygatagtttggttagygygtttttgggtaggtygtyggggatygtygggtttgttyggggatttygygaaygtagtagtagygtttttagtttttggagagtttaggggatttygtttaggttyggtagtagtygygagtagtgttggtyggygtagtttagtttttyggagttttttattagggtagtgttgatagtgttaaagttgttgtgtyggttgtgtatggagttagttagaggyggttagtagttttygttatayggggaygtygggtgygagtyggaatagtataaagataagttggaggagygtatygagttygtygygttattataattygagtttagygttagattttttagygtttttattaygggttttttattttttttggttatygttgygttattttatgttgtagtygtttgggagttaaagggaaggagyggygaggagtagygagtgtygyggggygyggggagagtygagttygygtygttttggtttatttttttattagtygttgttattaattgttagtattttyggttgtttttyggaattgtygtygttggaatatatagagtagattttggagttattttttagagttygggtyggagttgggygtaatggggagygagttaggtygggaaggaagttttygtyggggtttgttttttttttttaaaataaaaagtgtttagatygtttttttttgagtttygttgggygtagtagttatygggygtyggttayggtgttygtgggattgagattattttagatgtygtygtygtygtagtttygygggtagttggttttyggttttyggtttttagttttyggttttggttygttyggygttagtttgttttgtatyggagygtagtagyggtygtggyggttgtaaattttgtygaattttagtaaatttygggtagttagtgggaygggygtatgtaaagtaggggyggyggagagttagtggaatyggagaatgttaattatttygttttttttttttttttttaaattttttttttttatgyggtttygttttttatataygttttyggyggatatygaggttgtaggaagtggggagtagtggttagggatttggggaatttttgtaagygtagagaygtggatgttgttttttgttgttgtttttgttygtattttttyggagggtggtgggttgggtyggtgatttttttatttaggtgtgttttttatygyggtttataaggtgtttgtttgayggtygtttttttttttgyggttygtattttattttttttttttygtaatatttgaaatatggtttttttttttttttatttttatttygggtaygtaaattaattagtgyggtttttttttagtyggggtttgttttagtatggagggaaataagtttgtygagyggaggttygtggyggtggatattattgggaggtyggattttyggttattygttatttgttattagggygygttaattyga

SEQ ID NO: 7029 - DNA, 1587 bp, synthetic construct
  misc_feature 1..1587: note = Description of Artificial Sequence: Synthetic polynucleotide
  source 1..1587: mol_type = other DNA
ygaggagtggggygttyggaaggayggggattgggaagyggttaggayggggagaaggygygggtgttggaattatttattagaagaaatttaaygagatttgtyggyggattaaaaaaaaaaaaaaaagtgggtttttttttatttttagattgatgatttygygtttttygygaatgttayggttaaggtaggatgttttaatygttttgttattygtattattttttygtttttgattttygtygtattygtygagattttgygagattttaaggttggggggttttgttaggygygttyggggtatttygggaaagaatagaggtyggagtygygtttttayggtgygttttttgagattttattttttagtttyggtttttayggggttygtagagaatatttttaaatttaggggaggtatatagatttttataaagggaggatggggagaaagtgatggggtttygaagagtygttttagggaaggagagagaaagagtagggaagagaggaaagaaatagaagaaaagtagagaygggagagaggagaygaggggagtagyggggagaaaygtaggaggtagaataagtaaggaaattttttatttaaaagtttttttgggttygagggttgggagttatttgttttgygtygttttyggttttttatygttttggaggtaggagygtaaatttgygagygttygggtttatttttatygttygtttgtatttagatttgggaaggggatggaaggggygggggggtaaaggtaagaagtaagaygaattttaagatttyggttygaggagaagaggtttgtyggygtttgyggttagttyggyggyggyggttttggyggyggyggyggyggttttygggtggyggygygttygggttgygtagttaggygggyggygaaggttgaggtgtyggygagyggyggggygyggagtygttttttygttaatttyggtttttttttttttttttttttttttttttttttttttttttttttttttgttygttagttttttttttttttygtyggagttttagtygggtgyggattggtaagyggygygtttygyggttttttygggygtygygaagttgggaggygygtaaagtgyggtttaggggggatygtygggggttttygttagtagttttttgttygaggtygtagtttttgtttttttygtttttygttyggtygtttggtygttyggtygtttygtygatygagggtttattagygtttttttatggtygyggtagttaatygatgattgaatygaataaagagtagyggygagattaatttttaatatttatygatgggtagygggyggtygagtttyggygagtttyggtagtygtygttygtygttttagggygttygtttgttygttyggggatttttttaatgygtttagggygygttygggggttttttayggtygygyggtyggygttgttygtattaatttggagtygtygtagattaaatygtttttaatattgaaatatygattttatattggyggttattttgggggttatygagaygygt

SEQ ID NO: 7030 - DNA, 5693 bp, synthetic construct
  misc_feature 1..5693: note = Description of Artificial Sequence: Synthetic polynucleotide
  source 1..5693: mol_type = other DNA
ygygyggagagggtttaagagygtttttttaaaggtttagtttygtttggagagagtgggygggtatygggtttttgggggaggggttgtygtaggtttgggagggaatttagyggggttggtygtagtttgggtaggtygtagtttgggtyggygggaattygttattggattgaagaggygtttggtygtygttgaygtygttgtttttttttygattygttygttygtagtgttattttgtayggatygtagtttgttttyggatttttaggaygtattgtaggaygattttaaagagayggataattygatttygtyggataaggagayggttaataaygagaaygaggagtagaattygggtattaagyggygyggttttygtattattattaaggttaagtagttggagaygtttaaggttgttttygtygttaygtttaagtttaygygttatattygygagtagttggygtaggagatyggttttaatatgygygttatttaggtgyggttyggggygggtatagttttttagtttygttggtttgggagtygggagtttyggaggagtttttygttaagtttttttggttaygagygygtttggttttggtttgggagtagatygtgygttygagtggggtatttgttygaggtyggggattgtgaatygaaagattttatttagttttgttgtttttttggtattgygatttgggggygggttattttatttttttgaatttygtttttygttttgtttatggaaggttgtaagtttttttggggttygggatttttttttatttttatttttygagtagagaaataggygatgttttttttttttttgygtygaagygygggtagataaayggttagaggttggtttyggagtygaggggtygaggygagagtygtgtygggagggaggtttttatagagtygttaggtygygggygagtyggggattaggaagtttaagtttttatgagtygttttaygggttygygaaattttttatttttggttggttygtygaagtttttttttatttttttyggtttaattyggttyggtttygtttygggggagttttggtgyggaagaggygtaaggatttagtaggggtagtttagttagggaagggagaagagggggggagaggatatttttgattttgggtttatagtttttttttttgttttaggtgtggttttagaatygayggtttaaagaaygtyggatgaaatagttgagygttttaggygttyggaggtaygttttttttyggagttygyggygtatgygttygttgggyggtygtttggaygagtttgagatgttggggtttatttygtatatttattayggaggtaaggggygtttygggattygttgtttygtatttgttttatttygggagttgagggygaagggtttyggttagtaygtttttygtygttttagaatatygtttattygttggatataygattatagatatatgtatatttatttatatgttttggatataaaattagatatatggttttatttatatagtgatgtatatagaagtatataygagatatagtgatatatttatttaygtagggtataaggtgtatttatatttgygtttagagattttagggatataygtttagataygatygtaygattaygtataggtaaattttatttttttatatataggtatatttayggagatataattttatagaygygtatatttttattagttatattgaggttagtattggtaaatttatatgtatgyggtttttayggatagaygtatagtttttttgtygttttgtgtttggtgtatttggtatgaggtggatttygagygttggagggtagtgtgaggggaggggatgggggtttggatttattttaagtygtttgtttattagtatygaaggtagtaatttttgttttatgtggyggggtgtgtgygtatagtatttggtagtgttagtttaaatgtyggtagttgttttgggtaggattgtagtttattttttagtttygagatttttggggtttttatagattgggggtataagtgttgggttaattttagatttttatygtttttggggttgtagagagygaggagttttagtttataaagggttttagatggtggtattaggtttgggtttggggtgagttgtttttttgttattttagttttttttttttttattttttttatattggattggtgagttattttaattttttttattygatttttttagttttttattttgagtygtattgtttgagtttattaagtttattgttttgttttttttagggttgagggtttaagaaagtatttttttttttttattttgaagtttttgaatttggagagattttaggattgtttatgtttgagaggtatttgtatttttgagttgtaaygtaggttaggaagaggtaattttttttagaaagtgggtttagtggtagtgttagtaaggtaggagttaggtatttaggtagaygtagaagggaagggaagataattttattattaattttagtatattyggaagtttgaggggggattagattttgagatyggatyggggtttttagaaattgtgggtaaaatgttaggttgtgttttttagggtagagattttaggtagtggtagggtttaggttggagygttttagtygtttaattttggatagttttttaattttggatagatttttaatttyggatagatttttaattttggagagttyggatggtgggygtgtttttyggagtttttatttatygattttttttatttaaatttgtttttttttttataaaatttgggttyggagtagygaggtagtgggggyggtatyggttyggaattttttttygtttggataattaattaaggttttttygaggattatttygttttygtttygatttattttatygttttttttttttgygygttggatgaggtggggagttggatattgggggtttttygtttttygtaatggtggggaagattttttagtttttagygaggtagtttygtttaattygygttgggagatttyggyggtggygatyggtagygggygagaaaggggtygggyggyggggtyggyggtttttygtgggagygyggataaagttttagttgyggtttttgtgttttttttagayggygtttgttttaattattttyggttyggtygttatatgggyggaggyggygygtayggygygggggtagyggttttygttggtttttyggttygtygygggtygyggtygttttttatttttgtttttttggggttttaaatttgtygttttttatttttttttttattttyggggagaattaaattaatggttttaaaaagtaattggtaatygttttagttgttgtttaaattgtttttaagttaygtttttagatattttttatttggatagattttagggtttggagagggaagagggtggtagggggtattaggaattygttttttgattgagattttaggatttagtagggggagtggatttgtagaagagatttaggtttttggattygttggttttttygtygtataaagygggtgtttggtataaggtggttttttygtgaygttttttaygttagttttttagggttttatttggtgggggaaggtaggatatttygaaggttttggaaaaggggttatgtggggyggttagagagttgatatagatttgttgaggtagaatgggtttgtaattyggagtttttatattttttgaatttatgggtaaaatttttatttttgtattttttttgagagagagtttatagttattattagttttttaaaagattttaatgtttttagatgttttagaatttgggggtgttggtaaaattaattyggggtaaggttggaggatygagtttttattttaaggagttygyggagttttggttatgatttagagaattttygtgttttttttttttttttttaagtygttggagtttagtttttttttttttaggttaggttaggtyggtataaatggttttatygggatygaygyggyggtygtatttggygaggygaaggatttggattgggttggtagggygtagggatygagtttagggygttaaggtygtttygttyggtttaatttattagtygtttttgtygyggttyggatttagtttttttyggttaggtygtttttyggttttaattatttygygttttgttttgttygttggtttgtttttgttyggttttttttttygggtttgttagttttygtttttttggaggtttttgggatttatttttgatttatygttttgygttttttgggygtatygatttttttttattttygggtttatttttgattttttygttgtygttttygggggtttttaygygtgtttttaatygyggtygttttttttttttttgygttttttygattttttygygatttttygatgtttygggttttygggttttagtygyggatttygtgtttttgggtttttttttygtttttttttttgtttttttgtygattttttygtttgtttttygttgtttygtatttttgtgttttttatygattttaagatatttaggaattattgtttgtttttgygtttttggtygtttttgtttttttttatttttaggtgttagggaatttgtgattgaagttttygagtttttgtygygtgtgttttttayggtttyggagtttttttygtttttgtgtgtggtttttggtagtttgagttttttgttttttygagattttttattgtttttttttttaatttttttygtgagtttgygaygtttatygttttaaggggygtyggttttygtaggtttttttaattttgggtyggtgtygygygtttttttttttygttygttygggtttttttttygggtttygggtttttygtttatttygtttttttttatygygttttgtttttttttygttttttttttgtagattattaaggygattattaygygtygggaagtaattaygattttttygygtayggttygttttygtaggygtagttttyggtygattttagttttttggyggtttttggtttyggttygaygtygttgggagygttggaatygtygttygtyggttygtaygtygyggataattttaggtttatygatatgatttygtattyggatatatygagtttygagttaggtttgtygggtaygttgtattttatgttyggygaggtatttagyggygggtttagttygttttttttaatgagyggtattagyggttatagyggatttttgtygtattttaatttygagtttaaygaagtygtygtgtggtaaggtygtygggtygtttttygygttyggttttygggggtttygtttygaagtagttttttgaaattaaaaygttygaygtagaygyggtgggagaygtgggtgtttttygggggttttttttygggttygtatttaattggtagttgtttttyggttgggygtygagggggggtygatttttatttttatttygygggttttttaggagttttagtttatygttagtatttttttagtaatygyga

SEQ ID NO: 7031 - DNA, 589 bp, synthetic construct
  misc_feature 1..589: note = Description of Artificial Sequence: Synthetic polynucleotide
  source 1..589: mol_type = other DNA
ygtygyggaggttttagyggtaggtgygttttagtaggtagtagtagtygttattttgggtaagtagtaaatttygtataaatttyggagttattatgtttgttttttygttttatygtyggtttttttgttaggagtagtagaggatgtggtgaatgtatyggttttatygaaygaggtaatygtttyggtagatggttygggaggtttaggagggagttygtyggtygagtyggttggggyggygggaatggyggattttagttyggttttgtattttgtagagtatagtttgtagagattttgygyggttyggagtttttyggtaaatggagtttgggaggtygtygyggttggyggagyggtattgaggtttgtagaagtayggtttggttttgttaaatygtattttgttygttttygttagtttagagtttttygggattttggygagggygyggggtaggatttttttygyggtyggtagtgaatgggagygygtgtaggggygttagttttgtttttttttgttgtgagtaggtagyggggttttagtygtygtttttttgaagtttygagaaygaggyga

SEQ ID NO: 7032 - DNA, 1294 bp, synthetic construct; identical to SEQ ID NO: 7022
  misc_feature 1..1294: note = Description of Artificial Sequence: Synthetic polynucleotide
  source 1..1294: mol_type = other DNA

SEQ ID NO: 7033 - DNA, 1373 bp, synthetic construct
  misc_feature 1..1373: note = Description of Artificial Sequence: Synthetic polynucleotide
  source 1..1373: mol_type = other DNA
ygattttygttgagtttayggtttagtttttatatatttatgtygygtttttagtygttgggtgaggagttatttagygtygyggttttttygaggggyggtygggtagygagtagyggtygagyggayggggtgagttaggggygygygyggggygtttagtattgygtyggggaagttygtagttttygtttygaatttgggttygttgaggttgagggaggggaygtaaggggagggaagaagagaagggaggagtgggggttaggggagagggggtggggagggattttggaggtataaagyggaggggaaggggagggaygygygyggtttttattaggaggygagtgggtgtaatyggygttttttagtygygyggggyggyggattyggaggatttagaattyggagygyggyggtygygggygttygggaggaagaggaggagtaygaggygggygggygggtgygtagygygaagaggtagtttyggygttgttyggttyggygttaggtgagtttttgatttaggygtttygygtttttttttygtttttagggtttttygttttygttygagtttttggtgtgygyggaaggttygggttttgttgygygttttaatttggttygggyggttttattttttttttagygggyggttttaggtygggggtttyggttygggggtttaygygtttaggttttaattttgtaagattttagtygttttttagtygygygtttggtttygagttgtgygttggyggtaatggyggagtttttggtatagttygttattttttygygggtagttygggttgggggatgttagtttttggggatygttgtatttgtttaagtttaattttaygtttttttyggtgttygattttgyggtygaatygtaattgygagtygtaggtaatggyggagtttttggtattgttagttgttygyggttgggggttygaggttgggagggtttygttttyggaatatygtttyggtttggtttttaattttgygaggagtttttttgygtttttttttygyggttatggyggggtygttygtattttttatttttttygtttgggygagattggggtgtaagagygtygtttttaaaatttgggaaagttgtgtttttttygtaaaggaggttttagggaggtygaggggygygtttygttayggttyggggttgggtagtggaaggagygttygatgaggttgtttttaggtggttagggttyggagtagggttttygggggatttaatttttagggttatttaggggttttgygttygaggtttyggaaggggttttttygggattgygttttagaggaygttagaygttygt

SEQ ID NO: 7034 - DNA, 1524 bp, synthetic construct
  misc_feature 1..1524: note = Description of Artificial Sequence: Synthetic polynucleotide
  source 1..1524: mol_type = other DNA
yggggaaaggygtggaggggggttgagygggttyggggttygttyggaatttggggggttgaggggtygggygttgggyggtggagggaggaggtagggggatgyggggagtggtgggggagtttttttaggaagtgagtgtgygygygygtttgtggggagatgaggtagttgttggtgygttttggggttttygattygagttttgtggygggtygtttgttttttttttttttaagtttygatttttttttttttattttttttttttgtattggygggygggyggygggggyggttggggttttagtttttttattttagttttttagttttttyggtagttygggggyggttttagttttagaaatgtygtyggttttyggtttyggtttttyggttttgtygtygyggtygttggggttgttgttatygtygagtygggygtygtagyggttttttttggggtttatatttgtttygttagttygtgttyggagtttttttygygggttatataattaggttttyggtygagtgggygaagtttagtatatttygggggyggggggtaggggagggtttttagatgtttttttagtgttttygaagatatyggaggggagtatttygygtagagygtagttggattttyggggtgygggtttttttttttgttttgttttttagtatttttggtaattgygtaaagttgtttgggttgtaatggtggggtgtagggggygttyggttgttgtatttgttagtgttgggtttaggttgagaggygatttttagtttttataataatgtttygggttttttggtttgggttttygtagygttygattgatygttagygataygaygagaaygaggatttgtyggaygtggaggagatygttagygttygyggttttagtttggaggagaagtttygtagttagttgtattagggggatttygtgtaygttatggagggtaaaggtgaggygtttttatttygggtygttttttgygttgygggtygagygtaygtggggagggagttgtyggtggttgggttygtatttygygttygygttttttattttaggggattyggtgaygaaaygaggtygagtattgggggggtggggtggggtggtgagggaggagggtaggtagtaaggggggtygggtatgggtttaggttyggttygygtttattattagttttagggtgggtagagttagggggtyggyggatagagggatttggagatggataggyggatygagggagggygggagygtygygtttttttttttttygagtyggtygygttttttgygttgtttgaggtgtygtygtttggttggaattgggtttagggygtttttggggtatyggggtaaggttttttaggttygaagtttttttaatttygttttygtttggggtttgttagtgaggaattggtgatgggggygygtygggtgtttgggaygatgtttttttaggtttggggttygtagagtygt

SEQ ID NO: 7035 - DNA, 1009 bp, synthetic construct
  misc_feature 1..1009: note = Description of Artificial Sequence: Synthetic polynucleotide
  source 1..1009: mol_type = other DNA
ygaagtggygggtygtggttattttttttatttgttgtattttttggagtttyggggygtaaatagtygttgtatttttttttattttygaygggatgatattatagttttttttttagatagygygggtttttgtttygtttttttttagygatygtagygaygattttgttttagggygggggagtagttttttaagtygygggygtttattttttygttyggatttygggyggtgttggtyggggygygyggggaggyggggattagggattttttaggaattagtttgggttgttgtatygttgttagggtygttttgygtttagtygagtttagggygtygtyggttggaygttygttaatttttattgygttyggttttygagygygttyggttggattyggygygttttttygttttaggygtygttaagttttagtattatgygtttttttagatgttygaaagygtttttttagggtagtttatgtttttttgtgtttttttygygaygggtygggtttattattttatatttttygggtttttttatgtttattatygtgtgtttttttagtatttttttttttttttaagttttaatatagtatttttttatatatttttygygtygttttagaggtttttttagttattgtttygtttttttatttttttagtttttttagttttatygaggygygtttttttagtaygtttttatttttttatttttttttygygtttttgtatttttttttygtatttttgtatttttatttygagtttttttgtgattaaatatygygtttttttaagygtttttttttygygtygttttaagatttttttttatattttgtatttttttygtatttatttaygtatttttgygygtttttattyggyggtttttttatttttagattygttttygygatttagygygyggggtattgggtagggatatttttygtttttaygygagtttttygttgtagaygt

SEQ ID NO: 7036 - DNA, 961 bp, synthetic construct
  misc_feature 1..961: note = Description of Artificial Sequence: Synthetic polynucleotide
  source 1..961: mol_type = other DNA
ygtygtygttgtgagygygygaggattyggggttttaagtggtgagaattattygagggatttttyggatgtttttttttttttttgtttttgagttttgtagtatagyggtgtyggtygtyggtagggaaggttgtattttttttgygtygttaaatygtgtttattatygyggtgattgtygtttaggtygtatttttgagtygtattygygygtaggggygtaygggtaygygtatagggaggtygtatatatatatatatatttgtatagggaygagtygggggtttttgaygttygtygtttatttygtttyggtttggagttttttggtttygtaggtgtagygaygtttagttttygtgyggttagygygtygygtyggyggattttgtagtttagagagtttagggagtttagggaggggagyggggygygggyggggtagtgtygtataatygtaggygygtttygygtygttttygtttygggtttattttttttygtygygttttttttagtttatttayggaygagyggattttygattttygyggtagggatattttaagagttttgtttaggtttgygtygtttagtatttygttygtgtygggggttyggyggtttygggygagagayggaggttaygygtagggttgggygtaggggtygtygttygaggattatgggtgggttagygtttygtygggttgttagttggyggggatygtyggygtttgtgtygggtygygttygaggttgygtygttygtgtygtagyggttaatgyggtagtattygygaaygttatygyggygggtttygttggttygggttgyggygtgggggygggggatyggttttgagyggagtttygygggaggaggagyggaygggaggttgggagggattygtaatattaygtaggatyggggtttttaggtgtyggggaaggyga

SEQ ID NO: 7037 - DNA, 961 bp, synthetic construct; identical to SEQ ID NO: 7036
  misc_feature 1..961: note = Description of Artificial Sequence: Synthetic polynucleotide
  source 1..961: mol_type = other DNA

SEQ ID NO: 7038 - DNA, 980 bp, synthetic construct
  misc_feature 1..980: note = Description of Artificial Sequence: Synthetic polynucleotide
  source 1..980: mol_type = other DNA
ygtttttttgtttygttyggtgtaagttyggggtygtyggttggggtggggygygtagygyggtaggtaggtagggttattatgtagtttttagttttttggttttttygtttttygtttygygtttttgggtygttttygtttgttygtattttagagtagttttgattygtgggggygygyggtttygyggggattttgygggygggygggyggtygggygygygyggggygggggyggygygygygyggggagygtgtgggtygggygggygyggyggggaaagttgggygygygagtygaggttgttgtttatttgtagtygygtygtttatttgtygyggagtgygygtttygygttttttyggttygtttyggagttyggtygttttttttttgttatagygggtaattgygtygatatgygataygagtagtttaygygtttyggaagtatyggaggagttttttyggtttgggygagttaaggtgattttttygatgattttttygttttygygggtygtttgttttygtattttgtttgtttttttygygttygattttygttttygtygttagggaatyggtagtagtgtatgggtatttgtttgtttgtttgtttyggtatttttattgtatatatttttttttygtggttttttygattgtttygtgygtayggggggagtttggagtttttttttgtttyggtygggggtgygtttgaggatgtgtaygygygygggggatgygtttggagggtgggagttygatggaaataggygatttaaatattttatygaggatggyggtttttggttygagatttgtygttgtygygtggttttttyggtagtagtttagatgttaaatagttgttygtttttagtatgtaagatgtgattttttaatgtgtatttttagygttgttgtaaatagatygtygygagttygtgtgtgtttgtttygtttaygt

SEQ ID NO: 7039 - DNA, 408 bp, synthetic construct
  misc_feature 1..408: note = Description of Artificial Sequence: Synthetic polynucleotide
  source 1..408: mol_type = other DNA
ygyggygtttttttygaaatatttgagtataagtagtygtaagggygagygtaggaygyggggygtggaygtygggttgggaagagtttygattaaattygygggtggttttgattttttttttygggaggagttttgygtagaggtygtggttygygygggtaagttatttgtggtagtttggtagggtagtttttttyggtaaatagygatatgttttyggtttttgtyggttttggtttggtagagtygtttttygttttttggtttttggtgygttygaggygggagaggagtttyggtygygtggattttagtttgygyggtaattatygygttttgattttaggttyggttgtttagggaaggatagtttagggygygtttagygagttttagggggtaygg

SEQ ID NO: 7040 - DNA, 2190 bp, synthetic construct
  misc_feature 1..2190: note = Description of Artificial Sequence: Synthetic polynucleotide
  source 1..2190: mol_type = other DNA
ygggtgtattaatgyggtygaaaaagatayggataygtttttttgggatttgagttggttygtagtttttttaaaggtgttaagtaagygttagttttttttaggygttttaggtttagtgttttgtgtygagggttttyggtgtttttttagatttttygggatagtttgaaggggttaggagyggygggatagygygggaagagtaggtaaggggagatagtyggattgygttttagtttttygtgttaagaatatygtygyggaggygyggttagttttttttggatyggatttttygtttttagggttaggyggyggagttttagttttgttttttttttagtttygggyggtttttagagttgagtaagtygggtggagggagtttgtaaggattttttgagygygatgggtaggaggaggggtaagggtaagagggygyggagtaaagattttgaatttgtyggggtygygttttygggttygygtygttagtatttttttaygygygttyggtttygggttattygttttygtyggttttygttttttttygtagtygtagggaagygagtttgggaggaagaagagggtaggtggggaggyggatgaggggtgggggattttttgaygttattagaaggaggtgtyggggtaggaagtgggttggggaaaggttataaatygttttygttttyggttgttttttatygaggttygygggaggttyggagygygttaggyggatatttttttyggttttttttyggtagyggyggyggttyggagygggtttyggggttygggtgtagyggttagygggygtttggyggygaggattattyggggaagtggttgttttttggttggagtygygagaygggygtttagggygyggggtyggyggyggygaaygagaggayggattttggyggtygggtygttggtygyggggagygygggtatygggygagtaggtygygtygygtttattatggttagttattgggatatyggggttttgttgtgygygttgtttagttgtttgttttttataggtgaggygyggttgggggtyggggtttgaggygggttgygatggggyggtyggagggtagagttttygaggttagggyggggtgtaygyggggagaygaggttgtagttyggagaagttggttayggygagaatttgggatattagttgtagygggtaygtttggggtygttgygtttttttttygagggagygtttygaggagtggttggtttggattygygagtattagygtttagatygggttygygttggggttgttygtttgygataggatygttgattttttatttagttgtygggttggggttttattgtygaggttttgggtattaggagtagtaygtatygggatttgtttggtatttagagtttatttttagaggatttggggtaggtaygtagggtttttyggagtygggagtagaggtttttgaaagtttgttaggttgttyggggttgggttgaggtygggattttggtgatattgggtattggtygygatttygygttaygagagtgtaggaggggagtygatttggaggggattygtgtttgygggggagtaggaggattttaggagagggttagygtyggtattttatgattygtttgagtttttaagtyggattgtttyggggaaygttyggygagygttygttttttttygtygttttyggatygyggggttttagtgygttgygtttagttattygggtggggtttttgtygggagtaggygtggtgygyggtttagttygtgtygyggatattagtgattttgatttataagggtagtttagggtttaaatatygttaatttattgatttataagtttagtttttaaaattygagygaagagagggygggygattttgattaaaygatgtggtttgaggaatygatgaggttygttygttatttaagttagttttygttgggygtttgggagaygggyggtggaatagttaggggtygggggttttattagtagttagatygtygttattgaggggttaaagtttygaggaatttgagggttyggattygtagtttttgtttagtggggttgagtggyggagatttgtgtttygtttttttgggygtagagagttagatttyggagygt

SEQ ID NO: 7041 - DNA, 2190 bp, synthetic construct; identical to SEQ ID NO: 7040
  misc_feature 1..2190: note = Description of Artificial Sequence: Synthetic polynucleotide
  source 1..2190: mol_type = other DNA

SEQ ID NO: 7042 - DNA, 679 bp, synthetic construct
  misc_feature 1..679: note = Description of Artificial Sequence: Synthetic polynucleotide
  source 1..679: mol_type = other DNA
ygtyggtttaggtttygtgyggtaatttttyggttttgttgtttatttygttttatygttttttattttttagtttttgtttagttyggggaagtygygtygtagygttttagatgttatttatttttttttgygaggggtttgtgatagtttagggtgttgtgtattttgtgygattgtttatygttyggtttatgyggtggtttgagtagtttygygtyggtattttaygtatygaatttygggattaygtgagtyggyggagggyggggaggtggygttygggygtyggygtgaattygygtttttyggagtttagygtygtgtttttaggtttyggttttgattttagggygtttaggtggaatggtttygtagttgygygttgttttygygttttygttttgtttygyggaaatygttttygatagttaattygatygggygygyggygttttyggtyggttttygttygatttygygtagggtatagatyggggygtaygygttattygtattyggttattygygggttaggtyggtygagyggttgggtttagggggtatttttaygtgygtagtygttattyggtttggtygtttagaygttttygggggttygygtyggttagtttagttygagtttggygtygygttgyggtygttgttttttattygg

SEQ ID NO: 7043 - DNA, 2013 bp, synthetic construct
  misc_feature 1..2013: note = Description of Artificial Sequence: Synthetic polynucleotide
  source 1..2013: mol_type = other DNA
ygttaygtagtttagggygtttagtttatatygtygtatatttattgtyggtttagaggtttggtygttgagygttttttggatggygtggtttgatygtttttttttttgatttatttttagtttygagggtygggttttayggyggyggagagggygtygttygtayggtttyggttgtgttatygtttyggattgttttygygtagygaggtttttttttyggggttttygggtggggtyggtygagtygggtgygttatttttttaagttygggygagatgagagttgttagyggtagtygaggttagygygggaygtygttattttagygttaggtyggagttagtagtygyggagtygyggagagyggagggggyggyggggtygggygtggygggttttttygtygtttattgygygttygaattttgggtttygygagyggygggyggtattygttgtaatgyggagaatgtgagaggtagygtagggyggtggggaggaaggggygygggagagggyggyggygagatagayggagagtagyggggagaaygaggatygggttgggtaggtgggataaggtagggaggygtyggagaggtyggattggaagggggggagaagggyggyggygtygyggagggggtyggygtttttygygggagtgygagaagttygagtyggtatttgggtttaggttygggttgggagygyggtygyggttyggttaggtagggtgygggagtygggtygttygyggggtttttayggggagtagyggggtatttaaggtyggygggtttyggaggggtttagggtygygtttygtaggtttyggtygtttyggtagggggtttttgtgagygttttaggagggygagtygggagtgyggagtygggtgtgygygtttgggtgtgygygtgtgtgygygagtgtgggygtygggtagtgggggygygyggtagagattttgtyggtatygtatygtggygagtaggaggtaggagygggaygygtaggggagtygggattttttygygtataygtatatgtataygttgygygtttttaygygtatatataygttttttttgtygygttygtygtygyggttattatygyggagtygagttttgyggagygggaatygaggtyggagyggggatyggaggtagtygagtygggggatgtyggttyggagyggagtygygygyggayggygygttygggayggtgagtgtggtygggtygggaygttgtagyggggttagggtygtaggggygtaggtyggggagtyggtgtgtttgttygtyggyggygyggygygygyggtttttgattgggygggagtttygggggtagyggygggggtggggtgttgggtgygygttygtggggggygtgtaygtttggggttgggagggggygtgttyggtagtttaggtygyggtttygttttatttttatttgtagttgtagtttygaygatttgtagtaagtttgtggagtttttggggygyggygggtygggaggggtggggayggaggygttttgagggtgtaatttyggtttttttttttagagaagagaaygygaggggagtggggygggggygygggtygggtygtttggygggyggaggggtgygtttttagttttttagtygygtagtygttygttttttgggatatttatttaggttygyggygtygygttggagtygtttygggygttagattattatgatttygttagggttaggtaggatygygyggggatagtttttaggtttagggtttgggatgtttttgtaggtaggaggaagatattaaggtttagttgggggagtgyggygaygtgttygggygtgtatgtgtgtgttttygygttttttgttttttaggayggtggttggaagaagggaatttgtygtaaggygygttttattygatttggatttttaggagtttttaagaggtygggggygtttttaggtttgtygg

SEQ ID NO: 7044 - DNA, 1501 bp, synthetic construct
  misc_feature 1..1501: note = Description of Artificial Sequence: Synthetic polynucleotide
  source 1..1501: mol_type = other DNA
ygtggtttttygtttggtttttygtatttattaggaggaggttgtgygttattaggtattygagtygygggttgtttyggatgtygggggttaggygttyggtggygtagtygtgttaggttattaygtaggggttgtygatggtgatttagtatttgatttgatygtygaagtggyggaagtagagtttygygtaatttttgaagtggtyggttagggygyggttggtttagtygtygtaggygttttgtaggygttggggtaggttttagtggtatagggtgattaygggttgtaygtttagttttygtagtygttttagtaggygtyggtagtagygtagtttttygyggttggggaygttygygttgttattggggagtattygygtttaygagatggagaagyggtagtgagtgatttygagttygygtagygttttygtgtygyggaagaygttgttgtagttgtygttggttaygttttyggtggygggttgtagyggygayggggygtttaayggtagattggygtttygggagtttttygggggtgttagggggtggtgggtgaaygtattttagatggaygtatttttgtygtgttgttgttagtygttttyggtttggtaggyggygttgtttayggtttagaggaagtygtyggggaaggtgttttggaagaggttygyggtttygggggtaggaggtygygagaaaygggtttaggtttgygygtygtygttyggtttygtaygtaggyggyggtygtttaggtttagtagtattagtagtagygatagygayggyggyggyggtygygggyggygyggyggggygttggygggtatgttgygygggagttaggtttyggggtttygygtygygtttttttatgttygygtttygtygygttygttygtttatygtyggygygtttattttygtttttyggygggtttygttggtaataattatttgygagtygggattgttttygttttggtattgggggygggggtaggggygtygagggygaggggtgttygggaggggygyggtagygggtaaggtgyggtaggygtygttygyggaygtyggagaaaggtatttgttttttttagttttygggagtygtgtaggaygtttygtggaygtttaggtttattttttttgtttgtygygygttttttgagagtagttttggagyggtttygtyggggagaaaaggygtygattaatttttttygatttgggggygggattttgtygggttttagyggagygygtygttggggaagtatttgtttttattttttttttattyggaggtttaaagaagtttyggttggatattgttggagttaattagggattggtygaaattttagagggattgttaggtgggatagtygagggggaatttygtygtgygttgaaagggatttttttttaggtgagatgttygyggggagaygygtttattygygtttttttttyga

SEQ ID NO: 7045 - DNA, 668 bp, synthetic construct
  misc_feature 1..668: note = Description of Artificial Sequence: Synthetic polynucleotide
  source 1..668: mol_type = other DNA
ygaggttgttgyggtgggaagagggygttgggagggaggaggatttggggygtagtygtggtgggtgygttttgttaagaagggygggggygayggggygygtaygtggaggaggaggaggaggagggagaygggagggygtgtgagygagtgagataagaaaagggagygygttygtygtygtygtygtygtygtttttttttggagagagaggttggagtgaggttgtgygaagygtygtattttaatgaggaygggtygaggtatatttttgtattagtggtygtaatygaggygtygygttttagtagttgttgtygtttagttyggtttygtygtygttttttagttttgtagtttygtagtttyggtygygtttagttyggygaggatagtattaggaggyggtttttagygyggttataaagattttyggyggygttttttygyggatyggtgygtggtttgttttttttggggaygggagttgyggggagggyggtygggggatttygtagagttygtttygttygtagtygyggggygtygagggtagggygggygtttagtttggtttygtygtttygttygtagtttttygaaaggyggtygttttgttttggttagtttggttygattygggggygttgygtgygggyggtttygg

SEQ ID NO: 7046 - DNA, 1006 bp, synthetic construct
  misc_feature 1..1006: note = Description of Artificial Sequence: Synthetic polynucleotide
  source 1..1006: mol_type = other DNA
ygttatagtygtagagtttttatttygagttygygtttttttggtygygtygtgttattttgtttatttattgggygatttgggtaygagtatygygatttttygtttygygtagttttttagtatygtggttttagtatatttgtagagtagttaggygtaggaatygaaattygtygggtggtgggygggaagggaaaggtagatgtttaagtgaaggygtttatttttttttttaygtgaatagaagttgatttttaattttaagtgagaaatgatagggagaaaaagtatgtaattattattagaaaaggtgagaggttagtgttgttttttagygaagggayggggtgagatttaaatttatygttyggttaggggagttygtttttagagtatygagaagttggggtgygtgggyggagagagagtagggtgygttygatagttttgygttaggttgtttttaaatttaatatttttttttttttttttggagttattttttttttyggaatatgtaagttttgggtggtttagttttgtygttagatttagtttttaagtgygggggaaggagatgggygtttttagtygygattttttgggaaggtggttatttatttgygttttgaaatagaagaatagggygaygttgtagataatttggtttagttttagttttaggagggttaygaatatggagygggaggyggtagggggttggtgyggygtaggyggyggyggggygtgtagggggttttygtgyggggtttyggggtygtygtttatttttttygagttaygtaggtatttggtgtagtttttgttggygyggygtatggygttyggttttttygtttyggagtttttttttttttttygtttttttttttttttgtttgyggttaatttyggaggttgyggyggagtttygaygtggggygtygatttggagttyggttttgggttttggggygygygggygagygggtagggygttygg

SEQ ID NO: 7047 - DNA, 867 bp, synthetic construct
  misc_feature 1..867: note = Description of Artificial Sequence: Synthetic polynucleotide
  source 1..867: mol_type = other DNA
yggaagtaaagttygtagtgaggtgggttggaagygggttttgtagtagtygygagttygggtttaggtttttaggygyggttggagtagaagtgtagggatygttaygatttatygtygyggtyggtttygtttygttagaggagatttygtaygygtagtygattggttygggttgatygaggggatttagaygttgttattttttttttttaaggtagttttygtggttttgtatgtaggaagtgtttygattaatttttttttyggttttygtagagattttaaattttgyggtttttatttttygttgtatttttttttygtttttttttttaatgtttttgttagtaaaagtttttatttgtagtatygggtatgttgttygtttaaygygtttyggggatttgttggttygtgtttttaatttaggggtggttataygtttygygtttttgtttttgggtagatttttttatttgtgtattttggtttttttatttagtaaagagatgtgygaagtgtgygtttggagaygagtygtttyggtgatttttattygttygtagyggtggttttggtttttyggattygygttygygttttgygggtttttygygtygtttttgttygtyggattattygggtttagagggtygttygtttttagygtttgygagygtygttttygttygggtttggggagygttagygygttttttttaygtyggattttgtagagtatgtttagtgtattttatggaattyggtttttttggggttaggattagattttygggttttygttgttgtygagggggygyggaggaggggaggttgggagatagttagygttttgtttygygt

SEQ ID NO: 7048 - DNA, 1072 bp, synthetic construct
  misc_feature 1..1072: note = Description of Artificial Sequence: Synthetic polynucleotide
  source 1..1072: mol_type = other DNA
ygyggagaagattgtttggtttygtyggtttygttaaygtgayggttagtttygtygagygttygtattygtttatatttatgattattygtatattygttttaataygtgttaaggygygatygyggggtttttggtagttttygttgtatttttttttttataggggtatttatagttgttatttgtatagggggtaatttttttygatttagttgtggtygtygttttttttagttttttttggtttttygtatttttyggtttgggttygygtyggtyggttttttttttttttttyggttttttttttygtygtttttattatatttttttttggttagtggygtaygtygggggaygagttagagggagygggtygygggggtgtgtatgtatttttygttttttttttgtagygtatattgtatatggtagtgagggggygagtaaaggtggtatyggtttttyggttgttttagygaaggyggyggttgtagtttttgygttgtttttygttttttagygtagyggygattatygygttgggatttygtygaygttgttttygygtygagttygtygtygtygyggtttttaattagtatttgagaggtttttgtatttttttggtagttttatttttayggtgtttgtagggtttttttttgtattttttttttagatgyggygtataatygttattagttggaattttttattatygatattttttggggtttttgggggaaggggggggygggtagtaatygygtygttttatgtttgtggtttgttttggtagttyggtggttttaaaaaaaatttygagaaagttgygtttttttttygggygtygaggaggtggtaaygyggtaagtaatatygggtttttgagatagttgtttyggagygggtgtagggtttagtttagtgtatttgtttattgtygygtttttggtgygagttaagttgtagtagatatgatgggttyggggygaagygggygttyggtggtygatagatggtagtygagggygaaggygtttttgggttagggyggygtaatygg

SEQ ID NO: 7049 - DNA, 1633 bp, synthetic construct
  misc_feature 1..1633: note = Description of Artificial Sequence: Synthetic polynucleotide
  source 1..1633: mol_type = other DNA
ygataygttttatttatagagttttagagaagttyggattyggttggagttaagagtyggaaaataagtatttagattgtygygtaagttgtyggagattaagtgttatatatattggygtygagagaaagggtgggygtttttaagtttttggtggagtaatgttagtggtygggtatgygggggatayggggttttygaattyggattygaatttttagttgagttattygttaaagttggttgttygttggtagaygaggtyggttttagatygggtggtagggtgttttygggttttgagtggttaatagtaattggggaagtattgaggaattttaaygggaaagttygttttatatttgaaataggtagttygtgaagtttttaaattagttttgaaaygtyggygtttagaggttaggttttyggygagggttttttttagttttgttygttttyggttygagygtygggygttttgtygttygaaggayggataggggagagaggggttgggggagtttttygygtttttttatygtttttgtyggygtaagggygggagtggagaaggygttatttagattgtggygttgggtaaattgyggtygtagtttttttaagtttgttygaattagaaygyggagtgagygttyggttyggtttttygtttgygttttgtagtygtttyggagtgattygggttttttggttagtygggtttgagttattaattaaggggtagaagggygygagagtagygggaggygggagttagggtgttttygygtgtgtatataatgaggyggyggagaygtatattttttttygtygaagaagtygtaggagtattygtygtttaatayggagaygyggagttttatagyggtggtagaaagtgagtattaatttagtaatagggggaaggaaggggaygtygggyggttagtgggaygtgyggtagtygagggttgtagtttgtttttgtagygygttygygtttatttgygattttttggtaggggatgttygttaggttgaattttttggtatygtaygtttggyggattttttygtagtttygagtttttatattygtttyggyggggagggagagtagtagttttaagaggggaagaattatagtttygatttaagaaggtatggtgtaatatataaatttagttyggtaaattttayggtyggtgygttttttattttgttttttaagtygaaagttygttagaggtagyggygygtttttygtygttgtttagygttatttttttttgttagtygaggggaygagtagygtagttttttggattgygtttagtaaatttttataagttagatggaygatggtaagttaataagggttggttgggaaggttgttgttttgtttttttagtttttagatggaaayggtgtaattaaaaygaggaagagaaggaaaagaagtgtttaaaaaattattatgggggtttagagttgtaattygagtttygagtygtagaattttggagygttgygggttyggttygtyggagtgtgyggtaaaggtgggagygygygtyggttttttygggagggagatggataagygagagygagtgtgtatgygygygt

SEQ ID NO: 7050 - DNA, 1143 bp, synthetic construct
  misc_feature 1..1143: note = Description of Artificial Sequence: Synthetic polynucleotide
  source 1..1143: mol_type = other DNA
yggtatygtgtatagtttgattttaygttygtaygttgggttttyggttttttggtagtgtatttaagtgtatttygygtgtgttyggyggattttygtgtatatygtygtygtgttgttgagtaygaaagattttygagaggagttygtagatgagagtttagttgttgttgtgagattgattgygggtggtagtyggtaagaaggaattgttagtatygattttggygttttttattaattgyggygtagttttttttgyggtgttygtttttyggtattattgtagtttttgtagtaaagttaattttaaaaatttaaataaaataataattttttaaaggttygaaaatttyggtttttattttttttttagtttgttyggyggyggyggygtttagtgagtgatayggygagygtgagtygyggttttagtygggtygagygygttgtttgagttgagtygtygtaggtgaggggttygygttttygttygttttgggygtygygtttggtattgattttgtyggtygtttattgtygtygtygtygtygttygygggtattatgatagttttgagygttggggttataggttggttatygtygtyggtgttygggaggttgyggygyggtyggtttygtgttttgygttygaggttygygatgygygttygttagttttttggtyggttygggttaggayggtttaggggygttggggttgygagaggggttgttagaggggttgygggygggggtttygygygggggaggggtggggaggggygtttttattygagagyggggyggtggggtttttgtyggtttggtyggggygygggagtygygatgygttttttttatttttgygygtgggtgtygggggygtttgtygygggatgtttttgggttggtttgggaagtttagggtyggygatatttygggtttgtttygtttgggtatttagtaggtgttggggggtaggtggttgaggaygaggttattgggtattattatagygttgtatttgttttttyggtattagggtygttgtttgggtaaatttttgggttaaygygygggtggggaggtgggggtgggtagtttggttttagtaggttttygygggggtttygygg

SEQ ID NO: 7051 - DNA, 1143 bp, synthetic construct; identical to SEQ ID NO: 7050
  misc_feature 1..1143: note = Description of Artificial Sequence: Synthetic polynucleotide
  source 1..1143: mol_type = other DNA

SEQ ID NO: 7052 - DNA, 1371 bp, synthetic construct
  misc_feature 1..1371: note = Description of Artificial Sequence: Synthetic polynucleotide
  source 1..1371: mol_type = other DNA
ygttttttttayggygttygtttagttyggtggttttaattttttgygggagttgtataygtttyggaaatttgggatagaaattgagttttttttttttttggtggtggtgatagtatttgtttagatttggtyggaygtygtyggtyggagtatttagttyggyggagaaggagttygttyggygttggggattgggatttggagtttttttttttatygtaygtaygtttygtttygygtaygttygttygttygttygtgtttggygtagttttatttyggatggtttttgttttttygygggttygagggygttggaaatttagyggyggygaagyggagaggagtttygygygttttygttygtayggttttaggtttggggtttgygttggagtygygyggggagaggtygtttttgygatygtygygttygttttygatygttygggttygyggttagttyggttattagttatgggttttggttygttttygttgtttttggtgttgtygtygtygyggttgttgttgttgttgttgttgtttttgttgttaggtaygygtataggygttagggtttyggagggaygggygttygagaaggggygyggggttyggaggggttgtyggygagaatatygygygggygagyggagagggttggygtygtygtyggggattyggaattygygtagattggttttagttyggyggygatttgggtggggtggttttttttttttyggtttattttttatttttagttattattaaatttgggagttattgagygggygttggtaygygtygggtgatggggaggtygagatygggtttttygttttgggygtaggagttggggattygygttttygygttgttygtygttttgtttygygtattggtttttaaattggygygtttaagtttttygttttatygtttgtatttygtttatttttttatttgayggagatggttgaagatttggttaaggttatttygggaagaggggagtygtttygggattggggttggagttggagygttagtttttttttyggttgtagttttttagygtttttggttgygtygttgagggattttttatygggagagygttttttgtttttttttygttttttagaggagtttgttgggggaagtyggttttggttygtygttgggaggtttttgggtgtttgggagggttggtgggtagygagagtyggggatygggtaaggttgtagggaatttttggagggtttaggtyggyggtttgtygtgyggttgtgagtttagagygtttttygttttyggtgtygaggtttgtattatttagaaygttataygtttttaatyga

SEQ ID NO: 7053 - DNA, 1545 bp, synthetic construct
  misc_feature 1..1545: note = Description of Artificial Sequence: Synthetic polynucleotide
  source 1..1545: mol_type = other DNA
ygygttgtgagagttaggttatttaaatgttaygtttttygtatygtyggygaggggataaatgattattttgatggattyggtagtttaaggaaattatygttttyggagggatggyggtagagtaggtygggtatgttgtatttgtttgagttggatygygtgtgagygagtttaygtttttygygggttaggtttagttttygtgttttttgataggtgaagttgagtatttttattaaattttygggaagaataaygattttattttatattaaygtgattggaaattttaatttaagaattggatgtatyggtyggtttatttggggtttgtttagttttttattttatttygygtttttgatgtgttaggttttttgtatagatagtttatatatttaatttttaaaatatygttttttgaagygatgtttaattaggaaaatttgttttaaattgtatgattatttttygtggttttttttttygaatttttgttttgtttattaggtgyggtttygtttygtattygtatatatttttttygtygttgttttgagygtagygataagggtttttatattttygyggttygtaatgtttyggggttaagtygaggtagggaggygttttygtagtttttgattttataattygygygygtgtgtatygagtygygggtatatygygaatatatatatatatatatatattygtgygttttygtttttygttyggttygggtttttygaatttattttygaggygtttygggygtagggttygtttttttttgygggtttttagyggttgttyggtagtggttygtayggttttygatgtygygttttyggtaggttttagagttagttggttattgttattyggtagttyggatttygygtttagggttgtatttygyggatggagygattttygttttygtygttygagtttaggtttgygtttataygygyggygtttataygygyggygtttatttggttgtagtttyggttagggttagygygtygyggttgaagggggygttyggatttttttggggyggygygtagtygggatagtttygtatgaygttygygttttagyggtttygggaygyggttttatttttaatttttggyggttttagtttyggtttttgtgtttyggtyggygtygttaygttatgggtttgtaggttgggagtagygygggtygggaaygyggttggggagagttgggttgggtttttttatygtygttygttyggggygtttaagttggyggggygtaygggtagtaattgagygtattttgggggatygagggggyggtttyggggaggggygyggygtygygttaagggggtgttttgttagaggttgyggyggaggaaagtgggagttagagygtygtyggagtttygggaaggyggtgttygttyggttttaggtygyggttgtagygtygaggggaaagygagyggaagttgygygttggagggagtttattattyggagttattygyggggttygygt

SEQ ID NO: 7054 - DNA, 1545 bp, synthetic construct; identical to SEQ ID NO: 7053
  misc_feature 1..1545: note = Description of Artificial Sequence: Synthetic polynucleotide
  source 1..1545: mol_type = other DNA

SEQ ID NO: 7055 - DNA, 1027 bp, synthetic construct
  misc_feature 1..1027: note = Description of Artificial Sequence: Synthetic polynucleotide
  source 1..1027: mol_type = other DNA
yggtgygtgtataggggygtttygggaggggtggtgatyggtagtyggttttttatttttygygtttattttttygtttttgttttttttttagttggtggygggtagtgtggtgatggtttttgaggaggtttgttyggagygtatygatttgatttataaaaattatyggaaattttgtaatttgttgatygaygtggaggagtggggttaggtggttattattagtatgtttattygttaygttygtaygtagtttttgagttttatttagaaygtaagtgggtttagtttaggtagagygggtygaagtgtgtttyggggaggygtttatagattygtyggttttttygtttaggaatttttattagaggagaaygyggaaaaagttttttayggtttagaggaggaygaggttaagggygyggggtttgaggagayggtygtygyggtygttttttttygaaagttttatgttatggatttygattatyggttgttgttgygtaatattaaatttttgttgtagagtygtagygtygyggtggtgatggyggtggygtagttttatttttatttggygtttaaggyggaagtgggygttatygttaaggygttggtgygtttgttgygtagttataggtgygtttygtttttagtttygttttttttttygttttttgtttygttttaygggttgttyggtttygtttttttaygtttattagtygtttttatttttgtttattygttttatattgatygtagttttgtttttygtattggtttttttttygtaaygatttgttttattttttttttttattygttgatttttgttttaatygaggggttyggggtgttttgattygtttttttygtagtgaggtgtagtaygttgtgttttagaaygtggttattatgtttattaagygtygggtgagtttgygayggygggttgttttygttgttygagggtygtttttgygggtattggaggygttgtyggggttgggatyggggtygg

SEQ ID NO: 7056 - DNA, 693 bp, synthetic construct
  misc_feature 1..693: note = Description of Artificial Sequence: Synthetic polynucleotide
  source 1..693: mol_type = other DNA
yggattygttttatttgaggatttygggtttatataggygatygtttyggttttagattggaagygatattttagggattaaagtttttagttygygttyggttttagtttttgttttygttttagagtygtagygagtagggttttgyggtatygtttagagattggtttaggaggttttagtttttagygttagtatatatttatyggttgtagtagttttattagttttgttttttttttygggtttyggttatattaagagtttyggaaaygtygagaattttgygggtttagaaygttygygyggaygttttttttayggygtyggaagtyggygtygagtttgttatygggtatttttttgttgttttgaygayggygggygttgtaagagtggagaagttgtaggtgttgaggygyggtgaaagaaattttgggagttaagagtaygaggagttggtgtttgtgttatatttgtatttgygggtaagaaatygttggtgtagyggygggttagggtttgggagtygatttagggtttaggtgtayggagygggtttttygggaattttgagagtggtygtttttyggagatgaagggaygagggygtagygattttygtatttatttygttttaygaatattygtttygtattygtyggttattyggggataaaaygtttgttygt

SEQ ID NO: 7057 - DNA, 1496 bp, synthetic construct
  misc_feature 1..1496: note = Description of Artificial Sequence: Synthetic polynucleotide
  source 1..1496: mol_type = other DNA
ygttttygaattyggagaaagtagttygttygtttttttattyggtagttagtttagtttattygagagttgagttygagaagtyggtttttgayggtgttggygtggygtttgttaaaatatgttttttgtattttaatttttttyggttattttttttgtaygtatagttygttyggggttatttyggttttttagygtagttttttygatttttgtttttttttttttygatttatgtttgtttaaggtygaatgtaaaatttatttttaagaaagygtagygggtayggggggtatttagygtgttatgtttygtagtttttttttagttaagattagagttttagattttagattayggaaatgagtgttatttagattaaggattgygygtttgyggtttyggttttyggttttgggtgtttttttggggtgtttgtgygtttyggtatttttygtygtygttygtgagtttgygttttttatttatttaggtttgggagygttttttatttaaggtttgggagtattttttaattattttygttaygtttattttattttttatygyggttyggattgtagtaaaatygggtagygygagggttaaaaagtggaaaggagagygttttttygtgtygtgtagttagttygttaattttttttttttagtttygattttygtaattttaaatgtaatttttttttttyggtttyggtttttttygggttgyggttagygggygtygygttgygaggygtggagygggygggttgtygygaggttgygggtggyggtgtyggttatagtygygagttggygagtgggtgggtgggtgggtggggaggagggagaggataggyggggagagagaygggtgtggggaggggagggagggggagatttygtttttttgtygtttttagttygggyggggggyggggggaggaggtygygatgagggaggggaggagggagggaggaagggagggagggagtygaggaagaygtttygataattygtgygtttygtaaggttyggagtatttgtatatttttgtagtygygyggygagttattygyggyggttgttgtagtttttattgtatttttttttttttttttttttygggtttygggtgtgtgtatgtgtgagagtgagtgtgtgtgttttgtaggtgygtggtgtgttygttttaattttgtttagtaggtgggatttggtgattttagtattattttttttttttttttttttttttttgtttttttatygtttgttgtaattttgtaaagtttyggagtyggagagygygtttygtttttagagttttyggattyggygagttagygatygtygagtyggttattatgttyggtagatygygttattaggygtttttygyggtttttattyggyggyggyggyggyggyggyggygttygygatggttttagaygttgaaggattttgtatttgatygttyggygt

SEQ ID NO: 7058 - DNA, 5820 bp, synthetic construct; identical to SEQ ID NO: 6811
  misc_feature 1..5820: note = Description of Artificial Sequence: Synthetic polynucleotide
  source 1..5820: mol_type = other DNA

SEQ ID NO: 7059 - DNA, 699 bp, synthetic construct
  misc_feature 1..699: note = Description of Artificial Sequence: Synthetic polynucleotide
  source 1..699: mol_type = other DNA
ygtygyggtttttaaaggtygttgttgtgggtgygtatattygggttggagaaatttyggyggttttgtatygygyggtttygtttgggttttggagggygtattygtttygtttgggttgtttygyggtttatggttaagygttttttgtttagttyggaatygggygttygagttagygaataggtyggttygttttagttggtygagttygattygtygygygttygggttaggygagygyggygyggyggattagttttgagttygtagtttygagggygyggggygggygygtttggggtatgagggyggggygggyggyggtygygtttttaatttyggygttgygtgtgggagyggtyggattagggaattagygttgtaatttyggattagtaaygttygttaaatgagtgtttaatttygattttttatgttttttagygtygyggttgagttttaggaggttttttggttaggtttttttygygttttggttttatttttygggaggttyggtygyggtyggtagagaatttttyggtttgtggagattyggttttaggtygygtygtagttttttttyggtagygtattttattggttygggtagaggtttatgtagttttatagygttyggagttgggagttygtggattagagaaaaggaagtttyggatgtttygtttattaygg

SEQ ID NO: 7060 - DNA, 1845 bp, synthetic construct
  misc_feature 1..1845: note = Description of Artificial Sequence: Synthetic polynucleotide
  source 1..1845: mol_type = other DNA
ygtaygyggygygggattygagaagagygtttggtagagtataaattttatagaagaagagattttttgttttttttgagattttattttttttttgtttagggttaggaagtttttttygggtttttttagaatttyggttgtttttttatttgtygtttatygttttttggaggtttyggagaggggttyggttyggygagtygaaggttgyggggyggggygygagttttagtttttgggatatatagtyggtgygtttygygttttaagtgygtattttaggaagttyggagtygggaggattygggttygyggttttattttatttttggygaggtygggagaaaaaaagygttagatygttygtttgagggtttagaagtttatygggyggyggtatagattttttygaaatgttttygttttygygttgygagygtataggaatttagggtygtyggggttgtygtggtttggttgaaygtttaaagttaggygagggyggggggttttagtttagttatgygagtttttttttagtggtgttagtttttaygtygggttttygggtyggygggaggygygtgtgtttgtttgtgtgtgtaggggatatttygttttttagtagtttatgtagaatttygtttttygtttyggttttaggaattttttttttagtttagagatttttgygygttttttgtttattttgttaaggygagaaagyggtygtgttggagataaagaaatttttgtttttttttattttyggttttttygttygttygagatatttttyggygttttttttygatttyggygatattgygtttggataygttaggtaggggggtagggtgggygagttygtttttygaygygggttagttgggggtttttygtgaatttygttyggggatattttatagtagtygygtttttatttttttttttttaaatygtttygggtttttgtygtygttattttttgttaaatygtttttatttttttagyggagttatagyggggygyggygtatataaagggggtyggagggtggagagtatagaaggagggagagatttygttagggttygtggtaygggtttgggagtagttatttattygatttttttttygatttttgagatgtttgygaagatgaggaagattaygagtagygtgagygyggttagtatttagtttyggaattgtagttgtatggtgggttygygttygtygggatttaygygggtyggygygaggagtaggggtyggagggygtagyggyggaygtyggagttttygygygtygygygtagttgggtagatattttgygtttyggaygagttygggtyggyggyggtagyggtagyggtagyggtagygataggtaggggttgtttaggygyggygagttygttygttttttttyggttttygtttgtttttttttttttttttttttttttttygttttgygttyggtttygygygtagtttgatagttttgtttygygtttttgttygtttttttttattaattttagygtttaggygttagtttttgtttttttygtttggttttatttagttttygagggygyggggatgtagtyggaygttatttttggtttagagagattgggttttggttatygygagygatygggtayggagttgagtttagggaagtgygygtatygttyggygtattttttaggttggtaaaygttttttttygttygttttttgtttagttttttygttttttygtaaagttttttygatataaagattaatatttggggatagtttttagygygyggygagaaggygg

SEQ ID NO: 7061 - DNA, 1844 bp, synthetic construct
  misc_feature 1..1844: note = Description of Artificial Sequence: Synthetic polynucleotide
  source 1..1844: mol_type = other DNA
ygattagagattyggygtayggagyggagtttttggtttttatttgtattaatttagttygyggtygtagtttttgttaaagaagtggggtttygtgtttaaggttygtaygttygggtgtattyggataaattttagtayggttygggtgttttttttttttaygtttataatgagggtttggggtaatygtttggtatttagtttgggtgagtyggagtggttggaatyggagaggygaggggygggtayggyggyggygggygygttgggagygttgggttygttgggygtyggttyggagggattataggggygggatttttggagaagtttttggtygttygygttggggtygyggaggtagygaggygygtygaggaggyggtttygatttaggtygtygtagtagtataggaagttgtaatataggtaagtgtaggagagygagagygtgaaggygaagagtagtttgygygtttttygyggttgaggtggtttygygyggtttaggattttataggttatggttttatgggttygygtygggggttatggttttygagggggtatyggyggttgagttgttgtggttttgyggtygtttagagggttygygtggygttgttayggttaygygggtygggygttgggggygtygtttttttygggggttgttgattagggtgygtatagtgttagggggtttygggggtagyggtttttyggggaataggyggttgtatttttagtatttttyggttttaggygatggggtttygggtagtygggyggttygggygtttttaggtttttaygtgygtygggttyggagygygtttagygttygaagttttatttttgattttyggagygtygtttaygaaaygttyggyggyggygyggttgtgygggttggygggtggatyggayggtggygttggygtyggtygygatttggtttttygggaaatgtygagyggagygygttgtyggttttatttaaggagtggtttgaygttagtygygygggtttttygagttygygtygygtttagggatttggttygttttttgygtttttatttttttattttttttagaaatatagtaygygggttttttttatgtaggttattttttayggagttttaggttagttttggggyggtgaaaygaaggtgttaaggtatagtattttttygggaggttggatatttttattaygttggtttttygatatttagggataygaatttaggtygagatygygtygatatgtagattagatagatttagaygtagaygtaggtattttgttttgatgygyggttttattattttgattygtataygtaygtataggtatagaagtataygygttttagttyggatatatttttatatttaygygggggtggggaggagaagttttttaatttgggtttagatatatygataaggatatttttttygttttygatatttygttaaatggatatatatagttyggaatyggatatygagygtaygtaygttttggattgggataygygttgtagaygggatgggtggaggagtygagygtgagtgagatttygtgattatttatttagttttttagtttttagygygttgatttatatttyggyggttygttttgtttygtatttatgaggtaygygygtattttaatttattgttattttattttttttygggtttgtyggagagygagtttyggagyggtagatttygygttaggagggttttttttttagtagtygtygtttagyggtagattgtttttyggggagttgtttagggtattagagggtygtyga

SEQ ID NO: 7062 - DNA, 1480 bp, synthetic construct
  misc_feature 1..1480: note = Description of Artificial Sequence: Synthetic polynucleotide
  source 1..1480: mol_type = other DNA
ygttttyggygggttttgttgttttaygttygtygtggggatttttttttaggagygttttgtttgggattttttttgygttttagatttttattttggttyggatttttttygggggygtttttttatttttaggttttygttygygttyggygtggyggtttttttttttygtgygggygggtttyggaatagtgtygtyggtygtttgtaggtgtttttttayggaggggygygygtttttgygtygtggtygttgttaggygttagyggtttttagtygaggtgtattygygtttygggtttygggygygtygtagtygtttttttatygtygttygtttygttagttygtttygtaygtttttygygtygygtttttatttyggggttggggggggtatgggttygygtygygttygtygtygtygattttaggtattygagtttyggggygyggygggtagyggtygttgaygyggggygttagttgttaatttygygygyggagtttttyggyggtgtagtttygtttyggyggygygggyggtatgaagattagtygtygyggtygagygtttttggtygtggttttgaatttgttggygttgttgttygttattatygttttttttattaygtattggtgttagggtaygtagygggtttttaagtygggttgyggttagggygggygygttaattgttttaattygggygttaaygttayggttaayggtatygtygttttygtygtygtygtygtygtygttatygtttyggggaayggtttttttggyggygygttttatagttgggagatyggygaygatygttttttttttaggaatttttatatyggtatttggtattygtgygaggaggagtttagygggtttggtgagtgygygygggyggyggttagttyggtttyggttttttyggggyggygyggttatygaggttygagtttyggattygttygtttttttttygtygtttgggtttagtttttagygtttygtttggttaggggygaygtttyggggtagggggygygygtygtttyggggtyggggattagtatggggggaygtgygggaygtttygtygtggagaggtgtaaggtagagtttttattygttgyggaygtttygyggttttggggaygttttygygtttygggaaggygtttattttygttgtyggtyggaggggygygygttgtttttygtttttgaatttatttttaygttygttttttttttttttttttttygyggggtattagatgtttttatttatttyggaaygtttttgggggtgggggtgatgtagggatttttgttattagtygttttttttgtygtagatttatagattygggagttttttatttttatygttaatttaygtygaattttttagaygggagtggggagtgggggagtttygygggttttyggaaagtygtattygt

SEQ ID NO: 7063 - DNA, 5065 bp, synthetic construct
  misc_feature 1..5065: note = Description of Artificial Sequence: Synthetic polynucleotide
  source 1..5065: mol_type = other DNA
ygttaagygtttttttygggtgyggttttttttygttagtgaggtygygatttyggygtagttgtygttttatttygggttatttttattygttattgyggattagtttttaagtattaggttttttggyggaatttgtaagtttaaatttygttattyggattttttagtagttttttttttattttatttttatttagagttaggagggtgttatygtaygtagagygygtaggtttttggggtgagtagggygygtggagggattttaggagtggtattttattttygttygtygtttattttygattygtataaaaataaagaataatttttattttgtttttgtttttattgatgtatttttttgtatygyggtaygyggagtttygttagygttttgatattgtagygttygtattagygaattayggaatttgggatygagataatggttygtaattgatgtattgttattaataataaagattaattttttttttttygttatttygattatttttttttttttattttttttttttttattttttattttttttttyggggttatygagggaaagaaaataaataagaaattagygggggaygttaagygtagatygaaaygttygtttttaygtygtygaggaygtaaaaaaaygaaaaaagttattaaagtttggattttttaatttattygtttttgttygtttatttttaattaagtatygygtagttgtttttygtatgtttatttygtttggttgtttgttgtggtgtttttttggggggggggaattttttttttttttatatttaattttaaattataygtagattaagtaataaataygtgtgaagttattttygggagttttttgttgygtaygyggygygtattaggagaaaagttttgygggatygttagtttygttaggtttttggttgtatgyggtgttygggaggttyggatttttaagaagttaagattgttagagaaggatgygggyggttttaaataygggtatatttygggaaaggagtgtgtaagtgtatataaaygygttygtgtatttgggatagtgtggattggtgggtgtgygaggatttttgtttgtgagatggaggygggtgygggatttataygtgttttygtataygtttttyggggtttgggagatgygagtygtttatattttaggagtgygtagatttatttttgtygagggatttttttaaatatttagtgagaaataatggtatttgaagtattatttatggaaatattattatttttattttttaatattagttttattgatagtttygtttgtttttttattaaaatttattgtatttattaggatttggygagaaygggagagygaggyggagagggtgtgaatgtgtgtgttagggagtgagygagggtagaagataagtaagagaaaaggtggaaaayggaygagtagggagagagaagggagaagttatattaataaaaaaaaataaagttagtagatgaaaaatagaaatatttatyggtatatatatatatttatattttaaaagaaaagatttaagaagttaagagaaagggaagggttttttatyggagygtagtataggttyggagtataygaagtyggttygggagatyggtgtttatttygygygaatygatygtggtatyggttagatttaagggygttygygaattggggygtttttatgagttttttttttttttgatygtgagatagggtagggattgtgtatttgtatttttttttttttttattatttagtygaagtttagtttagtttagtttttygggygtaagatttygagaattttggagygaggagatttygaggygygaggggaaagagttaggttgagtygygtatygagttttaggttygygggygtttgagttyggtagagggatygggtttttggttttgggttttggggygagggtagggaggttgtattttagtttgagggagatggtgatagagygaaaagttygggygtygygttyggtaagtgtttaaaaagtggaggygagtttyggygtygttaggtagtttyggatagaatatttttttatygttttttttttatttygtttttyggttttgygtygttatttygtttyggaaggttggggygyggttttttttttagggyggggtgtttaggggttttagggattggtttagtttagtgtygggttygttygggttgtgtttttttaggtyggtgttygttgttgygtttagtgtgagtygtagtttttttttttttttyggtyggagttgaattyggagtttaggtyggttttygtttttygttygttyggggttttgyggygttatygttgtygtygttttttygyggagtgaygygttttgtagttaatyggggtagtygggggggaggttygggaggggttttgggyggagtygggtygtttttttattttaygggttyggggttgtttttttygaaaattttagttttaattgttttgggaatgttygaggtagagaaagggagygagggagtaagtaagaagttggaggattagtgtttttggyggggaggggatggggtggygggagaattgtttttttttttagttataaatttattaggtttttaaattttttttggattttttttttygygttttygygagttygggatttaggggatggagaattyggggyggaggagygtygagttaggygggagggaggtygagtygtgggygggaggyggatyggygtggggttggtttttttttattygtttatttttttttttaatgggggtgggggtgggttgttttttggtagtttttaaagaaaygaagaaatatttaygaaaygggaygtttttttttttgatttygtygygggatttttttttttygygggtyggygygtttygttttygagttgggaagttygtagygygtyggtagttygggtttttagttttygtygttyggttttattttttattyggggyggtttaatttyggggagggtatgttaatttgggtyggtttagttygggattgtgggggggggygaaggagggagggaagagggaggggagagggagagagyggggggygtttgtyggggygtygggttygtagtggagaggaggtyggttttyggyggtygggtygyggagtttygggyggtygtaaagagggttaatttagtgtygggyggygyggygygtagagttagtttygyggtyggtttattgggttagygygyggagagataggggtttgtagtaaattaygaattaattgattaaggygagygggtttgaatagygttggttyggtgttaatygttttttaaagagtttttttatgattaatygtaatgtattattgataattataattatagtaggatatatgygygttgygttyggggtyggggagtyggggagggggygggygggtyggygggyggggggagtygtygtygtygtygtygttygattttygtaattttgagaagatttttttttagtaattttttattttgttttagttgatgtttgagttagtatgtygyggaggaagtaagygaagttttaatatttttaattygatttygaagtggtttygttttttyggygagatggtgagtgtttyggttygygtygtggatatatatataygtatttatatttaygtatattyggatttatttataygyggttggttttygygttttttattttatygtygtygyggtttygattgttttttttattyggygtaattttttttttttttttaatttttaatgtgtttttgttgggttttttttygttgtttyggggaaagygagtatatttttyggtaggattttttyggagttgttgggttttttygggggaaggagggygggtatgtyggtttggttttttygtttttgttttttyggggattttagtygyggttaagattygggagttttatgaggygtgggtgygggtggaggtygtttyggtttgatygtayggggtttttagygttttyggygtyggttttagggtattyggttyggttttygtygttyggttttgttgttagyggtaaggaagtttatttygggygttgggttgaatttygagygtgggggagttygttgygtttttttgtttttaygtatattttttttyggtttgygaggtagaatygggtgtttttggaggtttagagttgtaagaagatggggattggtgtyggggygttagygtttgattygttggggttgyggtyggggtggagagtgttgttggtygttagttgtttyggagayggtgtaaayggayggggaaagtgtyggggtttggttygtaaaatttattttygtatttttttttataatatttgtattttttgttttttaaaatttttttggtyggtatgygttttttgyggatygtggtgttttttatttttaggggggttagggaagaagttatagaatagttttttaggtttgygggtggttagttagagtggaattttttttgaaataggggtatttgtttttttygatggaggygataattgtgggtttygaaggggttgaataagtttagaataaagtttgtgtgtgggggttatggtagagagtggaagagattygggtagggagttggggtataaagggaggatatttggaatttttttttgtttttaaaggtgttttayggtatyggttttaaagtttttaggtttagygttygaggyggtgtagyggygttyggattygggttttygggtygtttyggtaygatgttggtttttyggttgtgggaggaygtataaggagtaatttyggyggggttttagyggtttyggatgttattygggatgtttaygttttaggyggtattttggggtgtgaaggagggagttgggtttygatagagtttygaagygtgattttgatyggtattttagtttattaagttgyggtygttygggtttttaggttttyggttygt

SEQ ID NO: 7064 - DNA, 2372 bp, synthetic construct
  misc_feature 1..2372: note = Description of Artificial Sequence: Synthetic polynucleotide
  source 1..2372: mol_type = other DNA
ygagggaygtaggatgaaagaagttaagagtgtygttagggtttgygttagygtygttagattttygggatgggggagttttagggtayggygttagyggatttayggagaaggagaaaagttttattgtygtgtagaagtttaggttygggtgagaygtttgygaaggttgttagtagyggaagagaaggggygtttttygtgttgygtagtattygttygyggtaggtgggygyggagtttagagttgggagttaaaygtaaaygttggygagaagttttagtttttttyggtagtttattygttgyggggaggggttttttaygtttttagtttttgggagattgtatyggaggtyggaagtaagtygggygaggatgaattatttygtttaatttttttttttyggttttttagttttygtaygtyggttttttttagagattttgtagtygygagygaagattgttttatttttagattttatygaattttttgtggtttgyggagaygaggagayggaygggtttggtggttaatgagagtttygattttttgtttttygtttaatgggtygttgtttatgggtyggggygggattaggagggtaggtaggggyggttygggttggygygyggygyggyggttaygyggttgyggtttatagagttagygtttttttgggtgttygtgttagtgttgygygggaaggtattattattatagtygtygtygttggttagggtgttggataagaygggttygtyggttatttygttagtttaggtattygttgtagtygtygttgtttttttttagatyggtttttatggaggagatggaagaggagttgaaatgtttygtgtgyggttttttttatygggagtttattattttgttttgtttttataatttgtgttaggygtgygttygtaatattttggtgtagattttagagtttgaatttttttagagttatygggtygygggtttyggggttttygattatgattatttggatttggataagatgagtttatatagygaggyggatagyggttatggtttttayggggggttygttagygtttttattatttygtgttagaagttttttaayggygttygygtgtttttttyggttatgtygttatyggttatttatttgttatyggttttggtttyggtgtttygtaatttttgtattatttgtttttagtgttatygtagttttattttggatgatygggggtttygyggtttttttaagaatygygtattggaaggggtaattgatygttattagtagagtaaagtygyggtttttaagtgttagttttgygagaaggygtttaaggaagttatygttatgtgygaatagtgygatgttttttattgygattygtgtygtttgygttgttattygtttygggggtttttagttaagtatygtttggtgttttyggtttagggtygtgtgagtyggaggttgagtttaygtaaggtttttatttgtatagattaygagttggagaattatagtatgtattgygtgtaatgtaagatgttygtgtgttattagtgtttggaggagggtaaatattttagttaygaagttaaggttttgggggttatgtggaaattatataaggtgagttttaagaaaatttatttttaattttttgygttttygattattyggttttgtagtagayggttttygttttttgygtatagygtattttagtgggggygtaatgtaggtgttttygatgtttatttttttggtttggtgtattgtaggaggtatgggggaattttaatyggygtaygggggagttgaatgtttttatagagttgttgyggggatgttttagagygggtttttyggggygygttgtttgygagygggatttagggygtttttttttygyggygggtttgtagttagtggtygyggttagtgtgtgggaaagtattgtatagttgggtagagtygygttagtgtttagggtygttaggtaygttygagggtagggygggttgygaattttyggggagggattgggatgggggyggtggggtygygyggayggygggagtttgtygttgttggataggyggatttggtgaggtayggyggagggtyggggagaygtygtaggyggaatattgatgagttyggttttgggttagatttggttttygagttggagagaaygyggggttttggtgttaygtgtttaaaagatagagyggagagggtagttagyggtygttatggtaaygygaygtgtaggtttgggtttgaattttttyggagttgggatttgagattagagtgttaggatyggagtttgygtagtygygg

SEQ ID NO: 7065 - DNA, 2372 bp, synthetic construct; identical to SEQ ID NO: 7064
  misc_feature 1..2372: note = Description of Artificial Sequence: Synthetic polynucleotide
  source 1..2372: mol_type = other DNA

SEQ ID NO: 7066 - DNA, 2372 bp, synthetic construct; identical to SEQ ID NO: 7064
  misc_feature 1..2372: note = Description of Artificial Sequence: Synthetic polynucleotide
  source 1..2372: mol_type = other DNA

SEQ ID NO: 7067 - DNA, 2142 bp, synthetic construct
  misc_feature 1..2142: note = Description of Artificial Sequence: Synthetic polynucleotide
  source 1..2142: mol_type = other DNA
ygtagttggtttygaggttgtgyggtttttagttttgyggagtagtttaggttatygttttygtggtygygggggagggtattttygayggtygtagtaatgggtaagagattagggtttttttattttygygattygtttttttttgtttggtaattaagygggatgttttattttattttttaaayggagyggattatatatagtagtattttatggttttttttgttgyggttttttygggggaaggtatttttagagggtggttaagttttttttagyggtyggttttygggagggggatagaatttaggagttagttttttgttttygtataaaggttygtttttttttagggygtttttgggtggagygaagyggtygaggggattaygataatgtttttttgtttttyggatygatggttaggtttttagagttaggagygttygggattttagggtagggagtaaagtttatatygtaatttygttattygttygygttttgttagtttgttggggttatagygygtaggttagtagtygtattygtygttgyggggttttttttgygttgagtttattttttgtaaygtygttgttttaaattttgygggttatttggtttygggggtggggttttttgggggtygyggggtagttyggatgagaggatgattygggagttttttgggggyggagtggaaggggtagttttaggtagttttggttaggagtttttatttygttagtttygttgttttagyggtygttgttttagaaaagttaaygagaattagatgtggtggttattgtygaatttttttagagtyggtgattggtttttagtygagggttttagttaattagtttgttgggtgggtttggagtttygtttygtttaggygttygyggagatttaggttygaggttggygyggygyggagagtgggttggaggtyggggygggaygygttgtgtagygggtaagygtayggtygagygagtatggagggggatygggtggtygggyggtyggtgttgtygtygttattagtgttattgttgttgtygttgttaatgttgygggtygyggygttgtatttagaygagttttttttatayggggagtygtggggggattagtttttgtaggaaggygaygaygaaagtttagtygtggtgaagttggygaattttttgtatttttaygaagttygatttagtaatttttaygtaagtttagtttttttttggtatttttttygtagttttttttttggggtyggttttayggaaattttgtttttagaggggaggaaatagattttatttttggagttttttagtatttttgyggtggtattyggttagagagygatgtygttgtttgtttygttgttgtaggggagtaagaatgatttggaggggagagtaagaattgttygtagttaygtaygygttttaggtagaaaaggtggygttgttagggyggttagygggttttgtagttaggatygygagaaggttgtgttygtttgyggagttggggtgttttttttttagatttggaggtttttttttygaggatatggggtttyggggttgtgaggggagtgagaagataggtgaaygagttttagggtttttggatttattgtagygyggagttgggatagtygtaaaagttgygtttgtttttttgaatttagattttttggttagtggggaaggagagagaggttttttgtttaagttagtttttttttttttttgygygaaagggtagygtttttgggtttgagygattgttatttttttgtttttttttttttttaggtgggtattaayggtattatttttatttaggatttttttagggaaaygtagtatgtggattatgatttttttatygatttttyggttatygttttttttttggyggatatygataygagttayggtagaggtygagttttgtatygagaggatatttttttygtagtgttgggtttggtygttygttatgtgygygttggtttttygygttttgygygttttatttttatttaygtttttttggttatttgggagtaggtaggygtttaygaggaggttaagygyggggygttgttttygg

SEQ ID NO: 7068 - DNA, 544 bp, synthetic construct
  misc_feature 1..544: note = Description of Artificial Sequence: Synthetic polynucleotide
  source 1..544: mol_type = other DNA
yggtttttagtyggttttgtgttgttygttgygaatatagttygtgggttatygggtagtygagttatgtaagttattttgatttttaaaaggtagaygtataaattygatttagaattygaggygaattttgaatttatagygttaaaaaygygtagtgttttygtttgttyggttygttgaaggttggttttgggtttgggggtagtgttygygaagggttgygatggtaggtttygttgttatayggtatygagggttttttygtttyggygttaggygtaygtttttttgttatatttttygyggggygygtygttagggttatttgtttttttaagtttygttaggtagttaagggtgaggagyggagagggattyggtygttgttgtygygagttagtataaaggtagygtttgaaatygaattttttattttgggtatygyggtttttttttatttttggttttygyggtyggagygtatttattgttagtygttatggtyggaygagggggttgttygayggtygtttaggttygg

SEQ ID NO: 7069 - DNA, 2002 bp, synthetic construct
  misc_feature 1..2002: note = Description of Artificial Sequence: Synthetic polynucleotide
  source 1..2002: mol_type = other DNA
ygttttygtttygtgttaagygggtttaaggttygaggttttttygtttataatttyggtgttyggaataygttttygaggggtygtgttgtyggggttattattygygattggatttygygtygtgttgtttttttygggtttygagttygtttagyggtttgtayggtttaggtttgagttgygggttttttttgtggggygygttgggagtgagttttatttttaaagtttattttaaygttttaggtatgattaygayggtagaggtyggtygtttattttygttttttttttyggttagagygtttttgtygggagtygaygatygyggtttgatttygggttttatygtttattttyggttttygttttttttttayggttaggggttatatatagyggaygtttygtttttagtygtttttttgatttttgaatttgggagttagygtgttygttggggtatgtattgttaygggtattgggatttttttgttgttgyggggaggagtttygayggtaggtgggaagatttagtttgttygygttttygttttttagtttttgygattygggtygaggtttttagtttttgggttttttygtttygggtttgagggaggggtygggttttygggtttgtagattygttatygygygtgygtatgygtyggtygygagttttygggtgtaggtttgggyggtttyggttygygtatttgtttaggygttgyggtttagygygttttaatttttagttygggyggagagygggggygggattgaagtatygtgttttttaaagtattttttygtygtyggtagttttggtttygtaaatgttttagygygtttaggygtaygtagagattggygyggtagttttygggttaayggtaygygagtaaagttggttggygatttgggataygtagtagaagttgaggttgtatygattttygtygtttygggggaggtatgggttygggtaggtttaggaggaagttgtatagttygaggttygggygggagtggygggtygygggtaagggaaygtatatttggaaggggttaggatttyggttggagtttggttttttatggygaggaagtygattgggaagggttttttggygaggtttttttgttgtgttattttttttyggtagygtygggygyggggaaygyggggttgtatyggggygggggagggggttttattyggyggtttygaggattygattttggggtygggttyggygggtaggtttgtttaggagttagttggtaaatgtagyggattgttaygttattttattgttattatttattgtaaattattgttttaagttttygggagaattygtygaatttgagaggggggagggggatgggggtgggygygtaggaagttttataggtattagggattggtgatttaggatattagtttttygagttttttttgggaatttttagtatttagattgtttttgattgtagggattayggtggggygttttttttttaagtttttttygggatatygggygygtttttttygtttttgggttagygtatatttttttaygygatgattagtatagttattgtgaggttyggttttggtygygtttgttttttgygagtgataataataaaaattattggaattgtaaggaagtttttggtttyggttttttagtygttgttgttttgggtgtttyggttgyggaaagatttygtagtygggttygatttaygagtggaatatygggttgyggatttagtygggtttataggattggygyggggtttyggggataggtttygtagggtttttttgygtatygtttgggaygtygattttgttaatttggaggataatttttgtttttattttattagtagatttttaaaaatttagtygtygttgaaaygtgttttttattygttyggtttgtttgtagtttttgaygagtttyggtatagttttygg

SEQ ID NO: 7070 - DNA, 983 bp, synthetic construct
  misc_feature 1..983: note = Description of Artificial Sequence: Synthetic polynucleotide
  source 1..983: mol_type = other DNA
yggtgtygygygttygtttgttgtttggagtttttaattyggyggaatttaggttaggaygygtygtygttttgaygtgttgtyggtygggaggygygggygttaggttttaaygattagggtgggtggtygyggggtaggggttggatttgaattygtttttygggggttttggatgygggatgygggatgygggatgygggttygattttttygttgttggtygaggagygttttgagagtttttttttygygygygaggataaatatgygyggtttgttagttagtgyggygttgttttttagttgatagggtgaygtttygtttggaggtttggagattggttttttgatttggtttttttyggtagtttaatgggtaaagtttttygttygtttagaaattagttttttygygygttttttttgygygyggygaggtygagaygtttttygyggtgatagygtgtaaggyggagattyggygygtttttagtttagggaaagtttaggygaygygatygtaagttygagtttaggtttttyggagtygttagggygygtygggttgtttgtttttttgtttttttttgtaggaatttttygtygttygyggtygggatttygggtttttttygggygtagattttagttatygttttgggtyggggtttttttttttttgaaattygtgyggaaggatttttttyggggtttttygttttggttttagatatttttttttttagatttygygttttagatgygttgtttygtagttttttgatagttgygagtttaygaatttyggygggagggyggyggyggyggattgatatgtttyggaygyggttgyggtyggygggtagttygygggggygatgagtygttgygatyggtgaggygtygggyggygggggtatygygtattttttttattttttttttttgtttatttygttygggaggtygagaggaaaygg

SEQ ID NO: 7071 - DNA, 947 bp, synthetic construct
  misc_feature 1..947: note = Description of Artificial Sequence: Synthetic polynucleotide
  source 1..947: mol_type = other DNA
ygttyggtgtttattttygggattttgaatttygttttttttttattttttgttagattygygagggttaggaagggttttgggaggaagygggagygtagyggyggggtatggaagaagagggttgggggygygygttatttgtaaaggttttygaggtttttttttagttttggtggtaatttygtttagygtygygtttttttttagatttaaatttttgttgggtttttygggtggyggyggyggygayggyggyggttgttggagttaagttttgtygttygtagygtyggggygygggggtgyggaggtyggagttttagagyggygygygttttttygtagygggtyggggtyggggygtttagttygtttygtttgttttygtttaygttttttayggagttgyggtatygttttttttygtttttygttattatygtttttagggttygggtatgttatttttttttggtttyggtygtygygattttygtttttttttttttttygttttttttttttygtttygttaagttaaygaattttaaaagaagtatagygagyggggaaggyggtagaaagttgtttygyggygtyggagtttttyggatttggaggatttygggattyggygggagagttaggygggttttttttygaygygtgtgtgyggatagttyggagtygggygtgyggygttgygygggggygggygtagggttygttttaagtgttgygttygttyggygtgggtttggaggttgtttagattatattattgttttaattygaygyggtygggttaatgtaggygtygyggtttttatttttattttttttgatattttyggatatgtttatagtaatgaattygygggatygttttygtagttttygygtttttttttttttttygtttttygygttttggygygtttygt

SEQ ID NO: 7072 - DNA, 1362 bp, synthetic construct
  misc_feature 1..1362: note = Description of Artificial Sequence: Synthetic polynucleotide
  source 1..1362: mol_type = other DNA
yggttttygggttttgygaagggagttttgttygygaggyggagggtttggtttatygagaagygtattyggaggyggttgaggggygygyggggtaygtagtagagtygtagttyggttyggattyggagygtyggagtygtaggaaggygaggagaaggaaaaaaaggaggttgtygtyggtttttgttttattttttygggtagygttgattygttggtygtygtyggatagggttggtygtygggygygggatttygtgygygttgtttatgttttygtttgtygttggttaggtgtgygygtagtttgttggtttttgggyggtattygggggttttttatgtttygygtyggggttyggygggaggatttyggagaggtagygyggagggaaagagagagagatagtatgagaaygygtagagttgtatttygygggggtygggygttagtagtatygygttgttttatttayggygygtttgtttttygygttgygygtttagyggggygtygagttttagaaattttagtatatggtyggttyggyggttayggtggtygtagttgttttgtttttygagygttttttattgttttttgttttaagttttagagygtagtttattagyggygatygygatygtagyggyggggygtttattyggtygtaagtatagtagtgygtatttgygggaaaggaggaaggggttggyggygtyggggtttttataggggaggggtatttyggyggtagtaatyggygtaggttaaggtattttgggtyggggttgygygygagttaggtggtggtaggtygggattggggagggtttttgygtttttygtttygyggygtygttgttgatgaygygygygggttttttyggtttygygtttgyggagttagtttygttatttagygattygtttyggggagttttygttgaygygygttgygagtygggttgyggtagtygaggggyggggagggaggggagggggagttttagtgyggggagggtyggyggttgygggttaagttttttttttygttttttttttygygttggggagggggttygggaaagaygtggttttygtttggttttggaggatgggaggttttygyggggygggggggayggagggaggtattgagtgtttttgttttygtagtggggatgtagtagtaggtggyggttatgtggtttgtggaggttyggtatttagaggygygyggtgagttygtttyggygggagygtggygaatgtggttttgggygygygggtgtgtgggataygtttttatttaygtggygtatatggggatttggggaygygggtgaaagaggygt

SEQ ID NO: 7073 - DNA, 1092 bp, synthetic construct
  misc_feature 1..1092: note = Description of Artificial Sequence: Synthetic polynucleotide
  source 1..1092: mol_type = other DNA
ygatygyggygygtygaygtttggygggttayggttataaagygggttttagagttttttttaggyggyggtaaagggggygttygaggttatyggtaagagatagattattggygtttygggaaaatagagtggggaagggygagattgtgtgtttatttaygttygygygggtttgagttggttyggttttggagggtttygggattttagaagggggatagtagtgggggatgggtagaagggggygattygggttgtttaggtttttygtagtttttttgttaaygagaggggttygggygggaatagttygagtygygggggtgyggggygygtagttygttttatttygggagagtygygatygtygttttygaygygtgtattaagtgggggtgttyggttygggataaaggatygggaygyggatygygggygggygttattgtttagttttagygtggagggygagatygtggtttygaatttttttaaatttggyggttyggggygygtgggggggaygtttygttatttgygyggttataaaggagagatttatggtgtygttgtagttagygttygagttttygttgttgtygttgtygttgygggttagtygtttgtatagttggyggggatygggttgagtagygagygttyggagatygtayggygtattyggttgtttttgggtttttggttttagatttttattaggyggagggtttygagtgygggggygggyggggyggggtggggyggggttyggyggayggggygtttttttaygtgattatttttygttttattttyggggyggggttygttagaaattttaagygttygtaatygttttttttygtgggygggatggggaaattgaggttygaggtygtttygttggttggtgtaagaattagtttgtaatttaagttttgagttgttggygtttygtttygtgtagttgaatttaatttattyggggttgtgggtagygtttttttggggttgataygttatttygagtttgaggattaagatyggagtgatttggttttttaygttaaygttttttttagagttygg

SEQ ID NO: 7074 - DNA, 1092 bp, synthetic construct; identical to SEQ ID NO: 7073
  misc_feature 1..1092: note = Description of Artificial Sequence: Synthetic polynucleotide
  source 1..1092: mol_type = other DNA

SEQ ID NO: 7075 - DNA, 1092 bp, synthetic construct; identical to SEQ ID NO: 7073
  misc_feature 1..1092: note = Description of Artificial Sequence: Synthetic polynucleotide
  source 1..1092: mol_type = other DNA

SEQ ID NO: 7076 - DNA, 580 bp, synthetic construct
  misc_feature 1..580: note = Description of Artificial Sequence: Synthetic polynucleotide
  source 1..580: mol_type = other DNA
ygtgtttaggggagttygatagagtaygygggaaaagtygggtgtttaygttttygygatttaggttgtagagataagagaaggttaggttttgggaggaygygaggtygtttaggaatggtagggaggttygttggggtttgattttggttttaatggattaaagtttygayggagtaaggtygggtgttygtggtggtattttttattagtggaygttggygaatgattatggaaataatatttaatagtagtgttttttatgttaggtatataatygttttggygtgggttgataattatgtttattttatygygtggtattgagtygatygtatatttagggtttyggtttttagggttygtttattygtttattgygtgaagtatttattttygtaggagtyggagtaggaatagggttgggttttggggygygygtatgygtaggtygtgttttaggaagggyggggtattgagtygagggtyggygyggggyggagggtagggggtggtygtattttttagggtatttgtgyggtgattgagaatygattyggtaattygygggttygggygg

SEQ ID NO: 7077 - DNA, 888 bp, synthetic construct
  misc_feature 1..888: note = Description of Artificial Sequence: Synthetic polynucleotide
  source 1..888: mol_type = other DNA
ygattygttttttggtygtttttttygyggttaggygtattttgtagygtttagatygtygygtttttattygygtttttaatygygagygttygtttgggtygggtygggygttygagattygggagagattaggggttygtaaagtagaagagtagatttagaaagaaaaaaaaaaaagygagaagtgygagaaaaatatattgaatttagttaaatatayggtagatgaaaaaaatattttgtttagaagttaaaaaygagttttygagtygtgagatattgttgygttttygttaggygtgtaggtyggatgttaggggggtaatttygaggttygatggtggtttygattttagggyggatttgygtttatttttagtttttgtaattgygggttaggagaaagggatttgttatggygaagaaaatygaattttttttaattaggtttttttttaaagagagaaaaagtaggtagttgggtaatttaatttaatttgggattygggaygtgtgtttgggygtttttygggtagttggtyggagygtgtgggttyggagtttttagygttggtttygygttgtttttygatgttattagtaaattygtagggygttttggygtaggttygygtttgtagagtyggtttgggaagyggaatttttttyggtttygatgattaggtttttttagggttttggtttaggttgtttttgtgggatagagttttatgaagggatatagaaatagagatagtttttgggyggygttttygggatgtggygtttttgtgtttyggggagggggtattatttttgtttatgyggagygattyggaygttgtaggggtgaygtygggtagygttygttttgattttttaygg

SEQ ID NO: 7078 - DNA, 1483 bp, synthetic construct
  misc_feature 1..1483: note = Description of Artificial Sequence: Synthetic polynucleotide
  source 1..1483: mol_type = other DNA
ygyggttttgggygttggtagggggaggtttyggtaaygtttgggggttttaggttagtttttttygggttggaaggtatygtataggggttttygttaatttyggttttygygyggtygggatayggttatatttgttygygggggtttgttttttaggtygtygtaggtttttyggagtttaagaggattttataagtagttaaagttagygtygtttgttttttgtagaatattgttttttataagttttgtagattttttyggttttttagaygtttttayggttttygygaagttattttygygttttgaatgttttygaatttttgtagagttttygyggttttttggaagttttygygttygtggagtttttttttygttttygggggtatygygggtttttagtttagttttttygaygttggtygttgttattttttaygaggygtyggtttygatttattttattgtygttgtyggggaygggygygtygggttaggggygattyggyggyggyggyggyggyggyggggygygggaygygggygttagygggggagtyggtttygggygyggyggtttygygtttgattgggttgyggggggtagygggggtttatttttttygggtgggygtyggggtygttagttgyggggaagggtygyggyggyggygattgatagttgggtttyggtttttgttattttggygggygygtgttygggtyggygtgtgygygggygygtgtttgggggtygtygtygggggatgggggggyggggggygagtyggttggggttygggyggygggaaygygtgygygttygtttgagattyggggyggyggtttttggygagtgygygggyggtttygagttttygagggagaggygygygggygygygggttagttttagtatagtagttaagagttagggtaygygygttgttgttygttttatygtttttygaggggattgygygygygtgygttttttygttygyggtygttgaggtgaatgagygygygyggyggttaaagttygatataaaaggygyggggttttatygttygygttttygggagygttgagtttgaggttgygaggggyggggyggaygagagtggyggggttgaggggyggggttttgagggaagygygaggggygtggtyggggtgggggyggggygtygggygggtaygtggygyggtgygttttttttyggygyggaygtttttttagttttygtttgattttagagtttatagaggttatygggggagttagggttygtgttygatggttttatgatttttattatttggttttgttgagtattttgttygttyggattyggggtatttttgattygagggtygtygaggttatyggygattgattttttttttttgtatataaggagtygtggyggggtyggagagttgtagttttggggygatattagtattyga

SEQ ID NO: 7079 - DNA, 3714 bp, synthetic construct
  misc_feature 1..3714: note = Description of Artificial Sequence: Synthetic polynucleotide
  source 1..3714: mol_type = other DNA
yggygtggttttgttyggaggggtyggtttaaggaagtgttatttattyggagggtggtttygggttygttgattagtttttaygtttgtygtttgagttttattagtttygtgtggtagtggyggtattagtygttttygtyggtygagtggttttgttttgggtyggtttyggygttttygggagtagggyggttgtygtatgggttttggtygggttyggygggtagtttttttyggggggatatttttagtagyggyggyggttygygggtygggtygttttyggttatttgtagggtgtgggggyggaagyggatagtgagtttgggaygttygtyggatttagatttttgygygttttgttttagygtgaygtttttgttaaagttaggagttttgggtaygattttggygtttatttattttttttattttyggaggtttygtttgygggttygttatttttagtaggaggttyggtttttagggatttagygtatatygygagtattttygtygtttygggttttygtygttygtttttttttttaggtygggtygygygtatygygggttgygtagygtatagagggaygtygyggtygattatggtyggggygygggaagagttyggtaggygttttyggttaygttggtttttygggggygtygyggttaygtgattyggtttygaggygtttttatggttyggtttagtygttyggaagttygtagagtttgygagtgtygygaggagygyggtggtttyggtgggygygttygggaggygagggyggggtyggggaagggyggggttygggttttyggggygggyggygaggggygggagtttagagagtgtttygtttttgtttagtgttgggyggygygtggggggggtagggttttygtttttttaygyggtttygygtattttaaggattttaatttgttaggtgagtttttgtttyggggaggggygttgggggyggyggygaggatttagttgygygygygtatgygtttttygtttttttttygggatattagggttgygygttttttaggaggygtygaygtttttttttttataggygggaaaattgaggttgyggaggggaygtttttgtttaaggtttayggygaggtgggtygaggaaggggygggatttyggtttygagatttttaggygtttttttagtaagtttagygtattttgtgtgtygygggttattttaggtttaattgtygygygtgggttagtgtygtygyggtgtgygtttygagtygggtagygatygygtyggygtatttgtgtttyggygygtttgygaayggtaygtgtttttatagtygygygtgtgttygtaagtgggtgtgygygtygtgtygttygggaagygggaggttttgygggygtgygtyggatttgttgttagtaggtttggtagatgggaatttagtttyggaattaattgtttgtttgttttyggttgggaggtygttttttygtttttttttggygattagttgttttgtgtttagtygggttttaaatgtygtyggtattygyggtygtaggtagtttygggttaggtttygggttagttttaaagttygggttaagttaggygggygyggygggygggtttttygtgaygygagtgttttttgtyggtygttgygtatayggtttygagattggggagatagygtygygygttttaggtttgaggygtattyggaaatttygaaggtygtgattyggyggagattaggataygyggttgtyggtatatayggtgaggttttygtagagatttagtaygttaaagtgatttttttygttttgtttatttttttttatttggataagttttttygtttaygtaygtattttttagaaagtggggtgggtgattttttttyggtttttygggtygttgatgattttaggggttygaaaaygtaagggggtatggaataaagtggtaggggttttttattttttttgagattygtaagtttgtagtygttttttatttagtttggggggtyggaagygttttttttattygttttttygtagtttggagaatgaaaaygggygttagtttatatttggatttgggtattgaggataatatttaaattttatttygtattgtyggtagatagtatygtttttygtygttttattgtttygggatatatattttttatatttygtttttttatttatataygtaatatagaagtaygtagyggtygggagtatyggttttgygtttttggttagttatattygtaattttagygtttttatygtygyggygtttygggaagtataagtttatattttatattygtagaatayggggtgtataaggttggagttatttygggggtttaygattagttaggggtttygattttttatttygtttattttagtaaggygtaaggtgagttygagaatttttgygttgygtttttygttttagttatagttttygggtgggttyggttgggatatagttttgaaggtagagggagatttggataaygttaatgggggaaagtgyggtagygagttttagttygggttgygggaygyggtttyggatttgtygtttttttttyggygtagtattttyggtygygygagtygygyggtaaagtaaygggayggygtttaygtygttygtttttttttygatagtttttattttgtttygtygtygtaggaggtggttggtgaagtttaggatgattttygagtttaggtagagygtttttatttttagtaggttgggagttttgyggggygygtygyggggyggttygggyggttggggtagygttatggaagagggaagygyggggagyggtttttagtgtttttygttatygtygtttygttygygygtttattggtygygygttygtygtygtygygtttygtatygygtagggtygttygttaagttttyggtttttygygtttygygttttygagttttgygttygtttygygtygygygttttygygtttyggtttygtttgtttgygtygatagygtttttttygtttyggyggygagttagatattagttaygyggattggaggtgtggggygayggtttygygygttattgggyggaggttggaagttagaatygggtygyggttygygtttatttgtttygttagtttttagaygtyggtgtttattgtygggtattyggtagggagagggtagygyggttgttgtaaaattttttygattggggtataatygtagttttttttttttttaatttgttttgaggatayggygygttggggttttggtttatggaaaygtttagagtttagtgatttgtgtattttatttygtttaygttttagagttttygtttaattttggtttatggatttttaaggtttattttaatyggattayggagygtgygtagygggattygtagtttgygtttttattttaggatttygattgtgtygttattygtggttttttttgtttygatttygattttttgagggttggaagattygggttggttgtygggtaygaygattttatttttagggttygaagttaggggygggggtgggygttttgtttgggtgtaaatttaagttygggtttygygttttttttgtgggttgttttagtttygygygt

SEQ ID NO: 7080 - DNA, 1266 bp, synthetic construct
  misc_feature 1..1266: note = Description of Artificial Sequence: Synthetic polynucleotide
  source 1..1266: mol_type = other DNA
yggttygggygttaggtagaattttagttygatgttgtygtygtygggggagagggaattygttgggagggatagtygggggttggggaaggaagagygggtgttgggagggtttaatattggyggagttttaggtggygaygygggyggygagagttgtttygaggygggggtttygggtaggtygttttttaygtagtatayggagtagaagatttgttttttggygagggaygggygtygttgatttagtaygtttaggattagttygtyggyggtttttaygygggttttgggttttagtttttygtyggggggygttttttgttgtttatttttttttttttttygatttttagttttttttttttttttttttagttttaattgtagtggtaaggtttggggattgagaggttyggtgagtgttagtttygtaggttgygtyggtgttyggtttttattttagttygggggttttaggtttttygygggttttggggygttggtgttygygtagttttagtygttttygtagttatygtygttyggtttygyggaggyggygygtagygggggygttygggygttgtttttttgaggtttygggggtttagggtggttygtagtgttattggttagggtttgygatttttggggttygtygtygtygtttatygtgttttgtttttygtttatygtygttygyggttygygtygtygttgtttatttagtygtygggatttttattyggygttygygggtagygggggtagtggttyggttygattygyggtttygtttttgttttygggtttttttttttgggttgggaygttttaagtttttttyggggagttygtgtttygaggttgyggygygtggggagtttggttyggttygtygttttttttygtattttggygyggyggggtatygtttygggggygtygagggtygttygttttgggttygggygygttygttttatatgtagttyggggyggygtygtagttttagygagttttaggygggatagaggggtttgggaggagayggtygttagtttygygttattatyggtttyggttgtyggaygygyggttygagggyggtggttaaagggtygaggggtttgtggygtygtygyggygygtattaggaggtgtagtyggagygttggttagtygtagggtttttgggggagaggtyggagygggygattttttttttttygygttttatttatagtttttttygtygt

SEQ ID NO: 7081 - DNA, 1316 bp, synthetic construct; identical to SEQ ID NO: 6958
  misc_feature 1..1316: note = Description of Artificial Sequence: Synthetic polynucleotide
  source 1..1316: mol_type = other DNA

SEQ ID NO: 7082 - DNA, 10783 bp, synthetic construct
  misc_feature 1..10783: note = Description of Artificial Sequence: Synthetic polynucleotide
  source 1..10783: mol_type = other DNA
ygagtygggataaaggtttttaaygggagygggatatttgtttatatttygtttattgttygtagtttagtaatyggtttgtatttgtgtttgttygggttygattatttaggaygygtygaygaggggtttgttttaatttgggttattgttatttaygttatatattgggggygaggtagttagggttgtagaaagtygtygagyggttyggggagaggtgtttttatttagygttggtaattygggggtagttggggygyggyggygttygttgtagttgygygygaggaggattyggtgttygygygtttagtttggttygygyggaggagtttaggttgtgggaagattagatttggatttygtaggggtggttttttgtgttttttttygtttttagataaagtttttttttgatatttttttggggygaaygagtattaggtagttaatttatatttttgtattttttttttaaaaaagttttaattagaagaaggggtggtaaatgyggygtggttttttttaattttagygtygaggaggaagtgtaagtttygggaaagtttagtttttagagtygagagtggttggaaattttatattaatttgatttaatttggaaaygtggagygygtatttygaaygtatttaaggygtttaaaaagagattatattaaagaattygygtgggagaagaaaattggggagaaaaygaggtatygtygggttatttagygatttttttttttygtagttttttgggtttttatttaggttggagatataatttttatttttattttygtaatttygtttygtygttttttygttgttttatttttagttagaggttggagagggagggggtyggagagggagggataatagagggtaggaaagagtagggtygtttgtttttttttttattyggggaaagaggttygtagagtttagaggtagtagggttagggttygattttagaygaagttggagttttttatttttatttygtttttttygggatygttygtaaagtagaaagtgaattgygygttttttttggtygtagagaggtggaggyggggggttgggggtgggaggtggggggaggyggagtgaaggaaataaatgagtttttagtaaataaagggyggttggaagggggygggtygtttggtggtggttttggtyggttyggagyggagtttttttttgggttttgggttttttygyggttaattggaattaattatttgttttgttatttttagtatttatttttaagttttaattaaaatattgatttaggaggtttatagaagttgggtttttgttatttgaatyggattttgtttaggtaattattaaygatggaaaggagagattttygtagttyggttttygtttttttttttttttttaaaggygttataaatygttaatttttyggtttgtygggggtgggygygygggggyggggaggtaggaatyggtgaatgttaaagaggattttttttttttttttggtttttgttttgtttttttttttttttttttttatttttattttttttaagatgtaatttgttaaaayggtttttttaagtgtgtggattygygagygaygyggtggttttttgtatgtaaatattgggtttaaaaaaaaaaaggttygtttygtttttgtaattaattgataygttatattttttattttgttttagagggtygttggttgggagygyggagttttttaaaatttataattttatatttgtaaatattgtttttatttatttgatttttaagattygtttataygtggttaatttttgygtttttaatgtttttttttttttttttttatttttttttygttttttttttygtttttttttttttttttttttttttttttttttttttttttttttttttttttttygtttttttaggttygtgagtggagtttagttttatatggattgatygttygggtaatggtttatttttttttygttattagtygttatygygygtygagyggtygtyggagttygagttgaygtygttttggtattttttttggagttagaaattaaggtyggggttygyggygttyggygygtaggtygttyggttttttgygtttattttygygtgtttttaaagaagatagagagaggtattgggttgggttttattttttttttttttatttttagtttttttttttttttaaaaataataattattttaataattaaagttaatttttttttttttttttttagtttttttttttaatttttttttttttygttygttggggtaggggagygttaygaattgattaagtgaagttataattttgygatataaattttggggtttygaattatgtygttgattaatataaagayggggttttyggttaaggatattttagatttgtyggatattaaygatgaggagggttttgtggtygaaggttyggaggaagagaaygaggggttygagttagttaagagggtygggtygttggggtagggygttttggaygyggtgtagagtttgtttttgaagaattttttttaygatagtagygataattygtataygygttggttggttagtatygagggtttttagtattttygtaagtagtaaaatttggttgtygaggtygtggttttttttatttttgtagtygtagttygggttggaygttgggagtgaaaggggaaggggttatgtaagttyggatttttttattyggattygtagaaagatttttaatatttgtataggatgttttttgtttttttttttaagtttttttagtttygggaaagaatttggtttttaaaattttttttaatgygagaagttaaggagaaagagggagaagggttatattttttaggggttggtatatgatgttaattyggatygatggttttagtygtagttttyggatttyggtygttgggagggattggtttggygttttggaggtagttagygagtttygttygggtaygggtggagggtggggaggtttygggtggttygggtataaatagtttattttgttttttgygygattatagaggaygttttgtgtagtgtagggggtgtttagaaggttygaaagtagaaaygaaagtttttaaaaatttgttttaaatggtygagtygattaatgttgggattgtggggtattttttttaaaaatttgtttaygtttygtyggagaggaaatygtttaagggygtyggagtttttaattygygatgatttttagtgttatttttttttttaaatttttatttatattatgtgagttttttgaaaggygagtttttagtttttatttttayggatttttttttttattttgggaggtttygaygttttygttaggygtagaggaaggtaggggttatggtaaaggtagyggggttgggttgttaggygyggaggtttagggtygtayggaggatttagggtgtttygagtttggtgtaggttgygygyggtttttagaygtttgaygygtttttttttttttttttttttagtgtayggtttggttgtyggggygtttttttaggatttaagttttaagttttyggagttttyggtygaygagttatyggataatgataaggagatttygggyggygggggggaygtyggtaagaagygaaagyggygagtgtttttttttaaggygtagatttaygagttggagyggygttttyggtagtagyggtatttgtyggygttygagygygaatatttggttagttttattygttttaygtttaygtaggttaagatttggttttagaattatygttataagatgaagygygttygggtygagaaaggtatggaggtgaygtttttgttttygtygygtygggtggtygtgttygttttggttagggayggtaaattatgttaygygtttaaagtttaggatttggtagtygttattttttaggygggtatttttttttttgtttatagygygtagtygttgtagtatatgtagtataaygtttagtatagttyggttagtattttttagtattygatagtatattttttggtttaggtttagtagtggatttggtgagygtygttttaaygagattygyggttttaggtttaggttttatttyggyggyggtggyggygaggaggtttyggtttttatggtggttattattattattataattattattatggagtygagttgattttyggttttattagggaggygtygggaggttgtttgygtttttttggagtggtagattttatttatttagttttgtttatgtttttttttttgaattttgggagagggttgaattttaygtygtgtttatagaatgtttgygtagtttygtttttttgttttttttyggggggattaaatygttttagygttaatgtygttatttgaaaaygagaaaaagatygattttttatttttgttttygtgtattttgtaaaatatgtttgtgtgagtagygatattgttagtygttttttaaagtaagtggagaatattttaaaaatatagagaatttttttttttttttaaaaaaaaataagaaaatgttaaatatttatggttatgtaaaygttttgataattggtggtagatttygtttttygttgtaaatatyggtggtgattgttgttaaaatgatttttaggatyggtttgtttttygtttgggtttaatttttttttttgtggtttgtttgggtttgttttttgttttgtttttgtttttgygtttttttttgttttttttttttttttttttattttattgtgtaaatattttttaaatatggaaaagaaaattttgtaggtagggagttttttgttttgtttttygggtttttagtttygaatttggagtttagttattyggygyggttttttaatagygtygggygtagaaagttttygattttttaaataagaattttaataaaaattttgtgtttaaaaaagaaaaaaagaaaaaatttttgttttttygtttgttttattgygtygggtyggaggtttgggtttgggagtygggttyggtygttygyggggtttttataggyggtttttttygggyggggaggtygggggtatyggggttttggggygggyggggttttyggtgtaggttttttygattataggttgtatttygygtttaggattggggyggggaggagaaygttyggttttyggtttgygagyggtyggtyggaagtttagggtygtttattttttttygtattttttttggtttygygygttgtttgaatttygggyggtagygttyggttaygggaggaaaagtgatttygggagtygtaaaggygaggagagtaaatttttttygttggtttaaatttatgagtggtttttttagtttgagaagttgttgaagttattatattygatgatttttattttgttatatttgatttattttaygttaagaaagtgggtgggtgggggtttgaggttaagattggttgttttttttttattttttatttttttttaaaatttgygggttggtgttgatttaggagatygttaaggttgggggtgggaayggttagggygygygaggttttggtttagggggtttgggggaagtaygyggggttttgggttygggggagggaggggatattgtagttttttttaggatttttggttttaggaagttagggagygagaatttttggtaattttagtaaattatgtttttttttttttttaygtttttatttttttygggtttttaggttttttttyggggattggatttygggtttttttttttttagygttyggyggttygaattagggtgtgyggtttttttaggttagtttttgagygtggaattgggtggattgttaggaagtagaggtttgggggtggggtgagtttttyggatgggaagtgggtatatagtttygggtaygttygggaagggygtatttattttttyggyggggaayggatttygttttatttttgttgttggaggaagatttttttggtagatgttggygtatatttggttaygygggggagygttttaggaagtttggttaattggaggatgagttttttttttttatttygygggtttttaaaaatatttgggattttagtttagagtttagygggtgttgtagaygttgagggattgaaygtyggygtatttggaaattgtatttttgtttttttygaagttgtattattaaggttggggggttgggtggtagtgaggaggtygggtaaaaggagyggttttagttgattttttygttttttgtagttgatgattaggtttaatttaatatttaaagtaaatatgattattygtgygattaaatttgtgygtygatagtattttgygtagtagtttagggaygygatgatattttattttygygttttatatygtttttggataattgagggttyggaagtttttttaatattttagtaaaggtttttttttattttygggtttattttyggggaaagggtagtttttttaaatgttaaaaggtttttttttgttttttatattagtttggtaatgtttgggggtttatgttttattgtttttaaaggttaaygaattttttttaaatagtttgttgtgtaataattgaaygtttaatttgttttggtattaattatttaatatttatttgtaattttttttaattttaaaatttttttgggaggaaaggtgagggttttaagttttttggagyggagttgttagaaggtttgaggttattttgatttttttaggttttagggtttttagggtgagaatgattataagagatttttaggtttttagagaggaagggggaagygtggaaggtttttattttggtaggtttttattatttgtttattgaggataaatttggagttgtggttaggatygygggtttgtaatttgggtgtgygtttttgtggtyggtygggagttygggaggtggattyggygttygtttttttttgttttygggtttttatggagttaataaaagygtttgyggagttttgtgtggttttaattttagygttttgggagygtattyggygyggggttygttttagtagtttattttygtttaatttatagygggyggtataaaatygtataatgggaaagttgggagtyggagatgttagaggygtgtatattaaaaagggatagagaaaggatygyggggatagagagaggggaagaaggagaaggggttygttttttatttttygttttatttygtattatttagygygtttatygtyggtagtgaatttyggagttaggtagaagtttttttggggttttgttgggtttgttattgggtttttttgttatttaygggttttatgttggattttatatggttagttgggtygagggagygygaggagggattygtataaaatttaaattgtgttyggtttttaaattttgtattgttgtttgtgaaaggaagaygtattaaaaattygtgttatatttattggggaggaggttggaggaggggagaaaaagttatttttgtttttgatggtttyggagggygtttgtttygtttaggtttygtgatattgaaagttggattttttttattttgttttttttttttaaaatttttttttttttttttttttataatttygtttttataatttttttttttatttttataattttttttttttataattttttttttttttttatttttttttttttttttttttgtttttttgattttaaygttgggatgggagttygygaatttgygtttttagggtttggtttatttgtgygtattttgtttattgttgtgtgtgtattaggaaattaatttttgtttgggagttttgtattatyggatygttttggggtttaggaggtaatttagggtatttagggtttgggtgatgttyggttttttaygggtttagyggtttttgggtagatgaaaatttattttttgatttygtaatygatyggtttygaagygttygygygyggagtygtttttttatttatygygagaaaggttttgagaggttaagggtgtygtttagtttygggtttagttagatttgggttgtagtyggttttaaggygatttgygttyggtyggattatttggttattaatttygaagagttaaagaygygygygtttttttgaattatgygyggggatttattttattggttttttggtgygatgggaaattattttagaaattttttttaatagygtttttttttatgttggaggagggagatattttttttttaatttttaatgttttttgtatygygtgtttataaaatttagtattagggagatatagtagggtttttaaggaatttgtttattttttgttttttttaagyggtttaaattggygygaggtagtyggaaataatttgggttatgtttttttttttgtaattgttaggttaaaatttttataagtagtttttaaataaattatatgtattaaataaaaatagtttatgttgagttttgtggaaataaaaattggaatttagatatgttttttataaagttattyggtttttaatgagtagaattgagttggtggaaatttygattaatgggaaatttggatgygtttttttttttatttagtataayggttatatttagtagaattagataatttggtaagagtggaagtttttttttttaatattttttattttagatggggaaataatttatttttttatttattgattgttgggtttagttgagatttggtgtgtatttttygagtttttttaagagtttggttattgaaaagttaatttaatatttatygagtataaggatagtttttagaygtatttattaaggtttatygttaagtgattatttggattgaagataaaggttaggggagggggygtttaggtatattagattttttttatttgggttttttttatttagaattaggaaatygggagygygtttgtgygttgttgaagtttttttttyggtgttaagtggygggyggattagatattgtgttgggyggtattttaggaaatatgtatttgtggttttttgagaggttaagygtagtgatattttaaatygtgtygatatattattttttatttaggatttgtaaataaatttttgattttttyggygtattatagtygtygttatttygttaaggaagygatttgagttttattgtttttattaaygtttygagatatatatatatatatatatatatatatatatatatatttttttttygtattttgatttttaaaggttttattttttttttttygaggtatygttattaataaagaggygaataggttttagygtygttattygagtaagyggggaaatgtgggttagtagtttaggttygygygyggatttygygtaygttttaygygttttttygggtyggagaatygagygtgtgtygygtgttgtygtygttaggaggygttygagtttagygttttygagygtttttgygygygggttygggtagagttygggagtygtyggaggtagttgygtattagyggattygyggttygggtyggagttyggtgagtggtgttaagaggtggyggygagtyggaattttggggagagtygygagttagayggyggygggtgtttgggaggtgygagtygatttgtgttyggttgtggttttttygttatgtttttttttttttaygtgygtattatygttygttttagtttyggtttttatygtgtttgggtatagattatagtygattggtttaggagygttttggttattgggagggttttattaggygttagggygygttgttttygygattttagggtttttggyggygtyggtygygygggtggaygyggagagggyggtgttgygagggttyggagagtgggtgttygygtggggaggyggttygggagygygggagygatgyggaggagggattyggtttggttgtaggttttyggggygggggtttygggaaggagagattttygtttttygttygttttggattygggtttygtyggattttyggtttttgtygttygtygtttggaagyggggtaggygtatagtttagaygttagggagagaygtttygtygatttagatygtggggttagggttygggaggtaagaaygttttatatatagtagggtattttaggtaatttttatttygtgttgaggtttyggttagggtgtaaaggtgttygggaatggaagggataygagggtgtggaygtttygtattttatttaygtttggtgttttttgagaggttgggygtggggtagagggtaggggataagggggtgatattttttaaggttttttttttaataaaagtagggtttgtagttttagtttgattygttgattgttgggtggaatygttttatattaaaggtatygtggttttaaatattgttttttttatttttttaagttttygttttaaaattagttgtyggtgggtyggtgagggygtttgtagtatttaggtttttygyggggyggygyggttggataagaaaaggtttttyggttggggygygtagygtagtttagatatttgygggattygagatgttttygyga

SEQ ID NO: 7083 - DNA, 810 bp, synthetic construct
  misc_feature 1..810: note = Description of Artificial Sequence: Synthetic polynucleotide
  source 1..810: mol_type = other DNA
ygagtgtygattygtttgggygggattttttgagygtatttttttygagygygttagtgtttttgggagaggtttgtttgggtgagggattggaygtyggttttttygtaagtyggtyggttgagggtgggggtygaggyggggtygggaatagttttyggattagggtttagataatttygttyggygtttgttttttygygygtatttgtygggttygggggttgttagaagaggtygtagttygygtttttygggtttttaygtttygtagyggygttttttttttyggyggtayggattggttgyggygtygttttaagttygtttygygttgtyggyggggggygtygyggattagagygygttgygtygttatygtygtygttatygtygtygtygtygtygtygttagtagtatagygygtttygggtttygygygtygttagtttttggttygttygtyggtttygtygygttygttagtttygtagyggagtttyggttyggtttygggtygtygttattaygtygygygtygtatttygygttaagaatggggyggttaagttgtttaagtygttygtygtygtygtygtygtygyggtygaggygttyggygtyggygygggtatggagygttygtagagtygttttagtttgttygtttttttygaggygttygttatttatttttygtgtatgaattttttygaygaygaggaygtaggtaagygygyggttygttttttagattttyggggtgtttygggatttaggttyggtagtttttttttygattygtgygt

SEQ ID NO: 7084 - DNA, 1142 bp, synthetic construct
  misc_feature 1..1142: note = Description of Artificial Sequence: Synthetic polynucleotide
  source 1..1142: mol_type = other DNA
ygygtggagygyggtttyggggtagyggagagtggggttttaatatttagtatatgtagattttggggyggtgttgttaggggygyggattygggattatyggagtatttgtatygyggggaaagttgatagggygygygattttaggaggttgtygygtygtttggtgygtgaagttttagggtagyggagygyggggattttgaaggttgtygygtgtaggygaaggggtygtagggtggtygtttttgggagagtagayggggaagaaggtaaygggagggagggygtagygygagtagtttyggaygygggtttaggaattggtygygaggagygtaatttagtaggygygttagggttttyggatttaaggtgyggggtttygattgggygtttggaygtttygtgayggtggygtygttgttattgtttygaagygaggygaggttaggygttgygttttyggttgttygtttttttttttygtttygygtttagtttttttttttygtttygttttttgtttygttttttttttyggyggttgttgygtygygttttyggygtattyggagttyggyggggatygggaggtagagayggggyggtygtggtttygagggygggagttgagtygggtttygggatygaagtttggyggyggtttygggaggtagagygggtttttygggygatttttaggtttttttygygttttygtttyggattygtgggtagtyggggggaayggaagtygyggtygggttaatttygaggyggggaygtygygaygggaatttgaggtgggaattttgygygttgtagtttygtygggygttattaaagygygaatyggatttygagtttgtaaattygggttygggggyggttgtaygtggtygtggttttgaattttttgygggggtttygaaattygtttgyggggaggttagggygatagaggattygggagttatygttggtgygtggyggygtggagygygtttgttayggttaaggtgygggttyggtttyggtttattttaaggggttatygggatgygaagttygggaygttygtygtygyggtgatttyggygggggygtatttyggttgtgggtygaggtttttttttyga

SEQ ID NO: 7085 - DNA, 2885 bp, synthetic construct
  misc_feature 1..2885: note = Description of Artificial Sequence: Synthetic polynucleotide
  source 1..2885: mol_type = other DNA
yggaggtttygggaaagtttattaagttttaygygtttygttgatagatgtttaggaagyggttggtagggaagaggyggttttgtagtttatagagttttttttttattttyggggagttttaggtygygttgttttttattttttygtttttttyggtttgtaaygttygtggygttttttaataggttttagaaatttttttttattttgttttttaagtttggttatagggygtttygagtagggagtgtgygggtttygggtataygttgygtygyggttgtattagagygtttaygattttgatttygattygaagyggttttttagygggatagggtgttggygttggygttgttgttattgyggygygttttttygttttggtttttgygtgtygttagggatttttgygttagggttagatttaaagayggatygaggygggtgtttatttgggaygygtgygtttggtggyggaattttyggggyggtyggaggyggyggtyggggagtygagaagtaagtattagygttttaggatygygygygtygtttygygtygtttygygtygtttttyggtttagagtttttattttyggtttgtgagtttgyggygttggtggagttyggttttaggaagaggagtttattyggttttttttgattggatagtagygaggttttatygggygttttygyggtttaaaatygaagygggggygagggggaggtagagttygttttttgygygtygyggttgggagggagaggaggtgggagagaaggaagaggyggaggaggtagygggygtygaggttttgggattygtaggtaagttagatygaygygtagagtygggagttttatygtagyggtagyggtagyggygggttygggtyggtttygggggttgtttatttatatgagtattygtttattyggygagttttygagtttaggyggygyggttatggtygagtttaagtygttgtygggggaygygtatttggtattaagttayggttaygyggyggyggttgygggtttygtttayggggyggygygagaattygaagyggttygyggttayggtatttygggttygggyggygattttttygyggygtttgtatttygygttttagtttaggyggyggagagtagyggygaatagagyggggaygaggaygaygttttygagtagyggyggyggyggygygggttagggagygyggyggaygggyggyggyggtygygagagtagyggtttttgyggtttagtattaaygygygygagyggyggygtatgtaygatttaaaygaygygttggaygggttgygagtygttattttttaygygtatagttygtyggtgygtaagttttttaagatygttaygttgttgttygttaagaattatatttttatgtaggygtaggttttggaygagatgyggygtttggtggttttttttaattagggttagggtttggtygygttygtaaaygtygygtttttgaygtttttyggttaggttattgtgtgtttttttttygtaggygtygttttggggttttgttttgataagtgygtygtttttttygggaygtttttygygttttgtaaatattgttaygagaagtygtgatygygygggttttyggttttttygtaygygtttttygatygtttttgtgattgtttttttgttyggataggaaaggtttggagggattttgtagattaggaggagggggttygatttygtttttagtttgtgygyggtggatagtttagygtagygggaagygttaaggtygtyggggygygggattgagttygagagtyggaygttggattttgygttygggaattygyggtatttattgggtattgtygggatttagtaagtttaggaaygggggtgggtagagtatttttygggtattgtygttygtttttaaaagaagattatygyggggttttagggttayggygaggaygggtattggttagatttyggataggyggttttggtttygggygtaygaaaggtggagaygaagaaaagtyggatttattggtttttgatttttttgtagtgggtttygygttttygttttagtyggtttttygtgttaaattgtagggtagtgttttgtttttgaggaygygygtggtyggtattttttatttyggtgatttygagatttygtagttttgyggagagtttaygatggtygtttgtagaggagttggatygygggygtaggaagatttyggggaaggttttttttaagtaggagtttgttttatttatttgggaattggaygtygtygtyggttgtttygaagtttgaggaatttgttttttaaatgttttttggtttttttttttygtygttattygttgtttgggaygttygyggggtggagttggatggagatygttttgygggttttttgtttyggggggttgygtggaggagggtttttatagttygygttttatttaattttgayggttaggggagggtttygtttagttttggtgtttagtaaattttttttttatygattttttttttttttygagggaggaggtygggttaygggtgagtaagttgttgygggtttygtgtttygtygggtgtgaayggagatgygttgygtagtgttygttttgygtagtttttagttttgttattattygggatttagggagtygggtagggtgttttyggggatttatttgttygygtyggtttgygtttygyggtttygtygtagtattyggttttattaatttaattttttyggttgtyggtaatgttaaggggagagggtygtygttttgtaaygygtttgtttatagygt

SEQ ID NO: 7086 - DNA, 1460 bp, synthetic construct
  misc_feature 1..1460: note = Description of Artificial Sequence: Synthetic polynucleotide
  source 1..1460: mol_type = other DNA
ygygtttagttggaatgtagagatygtygttyggttayggygtataggaygattygttygttygtygygattgtgtatgggtttygggatayggggtygtygttgataygygyggtttygtygtyggtttygtygttttygtygygttygtygygttygtttygtygtttagttygtagygtagtttttygygtagtttygagtyggggygttatggttttagttyggtyggtygyggggaaygttaggyggtagaygagtygygtattyggyggtttatgaaygtttttatggtgtgggtaaaggaygagygtaagyggttggtttagtagaattyggatttgtataaygyggtgtttagtaagatgttgggtgagyggygggagggyggtagagaagggggagagggyggggggggttygggtyggggtggggyggggggggtaggggtttygggtygyggggtgygggggttgygttaaattttygyggggygtttygggygtayggagggttyggygtttattygttygayggygttttatttattggygtttayggttygtaggtaaagygtggaaggagttgaaygyggyggagaagyggtttttygtggaggaagtygaayggttgygygtgtagtatttgygygattattttaattataagtatyggtygygtygtaagaagtaggygygtaaggttyggyggttggagttyggttttttgttttygggattagygttttygtagttatygttygagttttttttygyggygtttggttyggttygygtttttygygagttgttttygttgggygtygagttygayggtttggggttgtttaygttygagygttygtttttggayggtttggagttyggygaggttgttttttttttatygttygyggygttygaggattgygygttgyggttttttygygygttttaygygtttatygagttgtygygggatttyggyggttgttayggggtttttttggyggaggygtttaggatygygtttttygyggygtygttygttggtttgtattayggtattttgggtaygttyggttygtatttyggttygttgtygtygtygttygaggtttygtygttggagagygtygagtygttggggttygtygtygatttgtgggtygaygtggattttatygagttygattagtattttaattgtagtyggattyggttygaygttttygggttttygtattaygtggtattggttaaattgggttygygygttatgttttgtttagaggagagtagtttgattttygygttgtyggaygttagtagygyggtttattatagygygtgtattttyggttaggtygtyggygtygttygggtttttgtagygttttttttygtagttttygygatygattygatygygtygttgtygttttgtttttttataygygt

SEQ ID NO: 7087 - DNA, 1560 bp, synthetic construct
  misc_feature 1..1560: note = Description of Artificial Sequence: Synthetic polynucleotide
  source 1..1560: mol_type = other DNA
ygttttttaatygaatttttttttttgggaatygtagtttagygyggtaattgagttatygtaatygggyggtggggaggaagggtggtttaggaaatyggygagggagaaaagyggtggaagggagagttttttttttggagyggttttagtagtataaagtgttggttatagygtttttttygtttttagattgaygagtagtggygtggagttagygyggaggttgttttttttttttttygagttygtagygyggagygyggtttagtattaayggagtygggggyggygtttttgggatggaaaagggttaaaggggaggagtggggtgggggtgggggttttattggtttattataaaaggatygttyggttgttyggtttttgtattygttggaaagyggtttygagttaggggttattgtaaagttagggtgygttatyggayggagaggggagagttttgagtagagtgagtaatatygtagttaaggyggaggtygaagaggggygttaggtattaattttygygttgttttagtttyggaggygttttagagygttttttgttttagtagagttattttgtttgygtttgttttttagtgtttttaattttgygttggaagaaaaatttttygygygtyggtagaattgtagygtttttttttagtgatttygggagtttyggttgtagtyggttttgygygtttttttaaygaataatagaaattgttaattttaataatttagagtaggttaaygaggttttgttttttygattygaattaaaggtttttygtttygtgygttgttaygagyggtgttttttggggttttaatgtagygagttgtgttygaggggttyggaaggygtaagttgggtagygatatggggaaygyggagygggtttyggggtttyggagttttgggttagtatttaygttgttgttgttygtygyggygttattggtygtgtyggaygtattygggygttttttygaggaggaygaggagttagtggtgtyggagttggagygygtttygggataygggattaygygttttygtttgtaygtttttgattagtagttggatttggagttgyggttygatagtagttttttggygttyggttttaygttttagaaygtggggygtaaattygggttygagaygtygttttyggaaatygatttggygtattgtttttatttyggtatygtgaatggygattttagttyggttgtygtttttagtttttgygagggygtgygyggygttttttatttgttgggggaggygtattttatttagtygttgttygtygttagygagygtttygttatygtygttttaggggagaagtygtyggtattattatagttttattttttgyggyggaatyggtagggygaygtyggyggtaygtgyggggtygtggaygaygagtttyggtygattgggaaagyggagatygaagaygaggaygaagggattgagggygaggaygaaggggtttagtggtygtygtaggattyggtattgtaaggygt

SEQ ID NO: 7088 - DNA, 5118 bp, synthetic construct
  misc_feature 1..5118: note = Description of Artificial Sequence: Synthetic polynucleotide
  source 1..5118: mol_type = other DNA
ygttttttttygygatagagttttygagtttagygtaggttagttttygttttttygyggtttttggtttttttgtygttagaaygygtyggygttagtyggtttatttggygtyggaggtgaggygyggtaggttgtyggygtttatagtygataygtggtggtgyggyggyggtatttggtatatgttgtaggggtagggtatgtygttttagtgttggaagttttygttygttttattgtygtygttttygttttttagyggggyggtygyggtagtagayggagatttgagtaggtygtgyggtggayggatggagtygatygayggtagttyggattygggtagagaggygttggatatagtygyggttgtagyggyggtagtagtygttgyggyggygggyggtaggatggggtggtgtatygyggggtgatgtgyggygtgygttgttgttgtygggtgygyggtggyggygggtaggggygyggagtgygttaggtygtygtaggtygaygggtggaagttagygtggtggttttygtagatttygtttattagtygttttattttttttagygagttggtgagtatgaggatgtagttgygygttagtagtagygtggygattttggaaagtttgygtatygaagggtygtgtgygtayggtatgatttygyggaggttatttatggygatgttgaggtygtgtatgygtttgygttygyggttgttgattttgagaygtagttgttgtagtttyggttttgttatttgttttttgttttttttggtggaygaygtagtygtygaygaygtagaygaygaggtgttggaygaggatgatttgaagttattgttttttagtttgtttttaggatgygygttygtagagtttatagygtygygtagttyggygtttagtttyggygggtagttattyggggtggaygaggatayggtgtttttagtgaaggygttgtygttgttgtttttatttygggtyggtagaaaaaggttatygggttttggygaygaygggyggttggatattaggttggygttygagtttatggttttaggggaagatagtygtygtagttttygtagggttttttttttttyggattygaaaatttttaggagaggaggagaaaagagagagaatgagagagagagagagggagagagagagagagtgagttagtgagagatagaaaagttgttttygtttgtatygtagtattatagygyggggtttyggtataggtggttygtggtttttygtttttttygttattatttttggttttttttttagttgtaygygggtatttataattaagttttttttattttttttttgtttttatgtaataggttattttagggagygttggtgattttyggggtgygggtggtattttagaggtttygggtttttagttaggtgtgggaaaattgagttttygggttggaataaaygagtgggaagtgagggtttttttttggggagaatggagatttagatagagaattaatgatttggttttttaaayggatttattttatttttatygatattaygtagtaaatataygtataygtatatgtatttagagtyggygyggggtttagagtttatgtgttgtatttggagattayggggagtttattagttgattggggtttgggtagaaagagttgttgtygtttygatttttygtttttggtgagggagatgtagyggtgagtgtggggaggatagaagagtaaagtygttttggagaaatggttygtagagtagggatttagattttttgtatyggagtattttgggttatagtygagttgaggagagtttgtttttgggatttaggttgyggttgttgtggggyggggatatttattttggatgygatttgaggagttygtttygaaaagttttaggggagaatttggtatygggygttggtgtygygtygatttataataagtattygtatttttaggggttyggtyggtttttatagttyggtggtagyggygayggyggtagyggtggygggggygggggyggggaataatgtgygtgttttggaggggttgtttygttaatgagttgggttygtyggggggttgggaagttgatgttattygggttaatttygtttaatgaaattygttaggtygggtataygttttttttttgygtataattaatgggygttygtggtygggagatttttggggagggattggaggagggattygaggaggygagggggaggagaagggyggtttaagggggatggagggagggttgagygygtttgggattaagggagaaagggaaygtggttaaatttttgtaaaaaatayggttattatagagttaggttgggggatgggatggtttggagattttgtagagtttaataaattaatttgatgttttaygtagtygtattttttgggatgygygyggaaaattttggygatttaggattyggggttggggttttttttttagttttttttttgtttggtttttygtygtttgtttttattttattggttttattaataygtgggtatttggygttttaaatgtaaaygatgtttaggtataaagtttttattattttggtgttttattygygygtttaggagatggtygtggttgtagtttygayggtagtyggtagygtttttagttgggggtagggatttgaggggtagagggygggtaaggagggaggggayggattttagaagagtgttttgaaagaatttataatttttttttaggttgaggatggtgtgggtatagggaygagttattttygtayggtaatygygttagtataagggtagggtygtgtttgtagttaaatatttttttatttattagtaggggagtyggatgatagtaagtatttttagtgtygtttttgtgattattataygttttggggtaggggtaaygttggtatttgtagtttaagtagggtttygttgtaaaaggttagtaaagagtttttygttttagtygtttgttttttggaattgtaaagagaagttttaggtttgggtaaggtttttttaygttgtgggttagatagygagatggaattattygygatygygttgggatatgttttatygattgtaggttggttttgaaatttgaaaatttttgaygatgaggaattaagttygaattggagaagtattttayggaggtagttgaggtayggatgtatttatttattttatagatgggaaaagttagagatygtgtgtagtaagtttatagaaaaaattgttaagtttttatagagtagttttgtttggattatagatgttggygttggyggttttttatagtataggtagttatttgttttttttagtttttaatttttttttygagttgaattttttatatttatatatttygaatttagatatttgtttttgtagatttyggatgttagtatttgatattgtgagygtaygygygggtatataygtatatagttttttagggagtgtgaggaaygtygggttattttygttgttggggaatttttattgtgtaagtayggttttaaaaataagtaaataaattagtatagtaaataattggtttttaagtagtaaagttataaaataaataaatataaagagaaatttaygttattgtttttagttttgagatatgtttttttttgyggttttygttagaagtttagttygttttygttttygttttagtttygtgttttttggagtattattttttaattygygtgttttttagttggttttgtagttattygttaaatatgtatttaaaatatgaagaattgaagygtggtgttatgtygtttaayggttataaggatgatttataatygtttaattagtagaatttgttattyggaygaygtagggagygggggggtggggattagaaagggttygggtatttgtagatgtttttttygggtttatttygttaatagtagygaggttatgtgtggtgygygttgtggggttattagtyggggygyggagttgtgygtttgttagtgtagttaataaatattagtaggygtaaygtgygygttttttggttgtagtygttgaggttagtttagtygtyggtaygtgtttyggaattyggtttttttttttgttgttgtttattggtgtttgttttgygatygatttgyggyggtgagagtaagyggttttaggttttttgygygttyggtttagtggttggagttgggagttaggggtgaaagtygaggggttygttttggtatggygygagtttagagtttggaaggtaaagtyggaagttttgtgttgttgttggttttttttttatttggtaggttttttttaatattttttygtygtyggagtagtttgggaggtyggggaggtttgtgtygtttttgggtttttttggttttggtgttaatyggatgttgagtatttttyggtgtgttttttatgtttttttatttygttttaggaataattagaaattagatttyggtgtttaagtttgttttggtgygttttggaggygtttttaggatttgttygggttttgygttyggygttyggggtgggygatttgggygggttttaggtattgyggtttttattagygygygtagttggggtttttttttggggaatggagtgtttatttgtagaggttaatgggtttyggtttygggagtttttggttggttttygygttttggtgttgttggtttttttygtgttttttttttttttttgtgttttttttttataaaagatygggtgygtgtyggggtyggtttttgttggatygtygggyggttygggaggagttygtgttaaatyggygggttttygyggggttttagggygtagattttttattgtttttygggtttttttygggttttttttttgatttttttttttttttttttygagtttttgtttatatttaggttgygtttyggtttggttgttaaatagaaygaygtttttgygtagagttgattaggggtggyggygggaggtaaggttttyggtatygg

SEQ ID NO: 7089 - DNA, 1423 bp, synthetic construct
  misc_feature 1..1423: note = Description of Artificial Sequence: Synthetic polynucleotide
  source 1..1423: mol_type = other DNA
ygttgygggataggtttttagagatygtttygggayggtygtgayggttttygagggatatgagagaagaggagyggygtttaggtaagttggattttgyggtyggaattygygtagaaaygaaaatttttggaaggggtttagtttygagtttyggaggyggataagttgagttttttggttgtattttttggaggttgttggttgtagaygtygtygttttttaagggyggttgttatygygtgygtyggttagattaggtygyggtgttttyggtattttygygtttyggyggttgtattyggtttttttttaygatygaggtttygggtatygygttttttttttyggaygttttgygygaygtygttttagtttttattagtatygagggtagttygyggttattttataaaygttttagtgtygtaatygtttttatttttattatttttaatgtttgtaayggtttttaatgaggttggaaaaatattatttttygttaaaagygatttygagttaggaggagygygtattttygyggtttttttttttatatttttttttttttgattttttttttttttttttggttttttttttgtttttygtttttttagtagtygygtgttgggttttttttttgttggggtyggattttttttttyggtygttttagtttttgttttttygttttttttttttttttttttttttttygtttttttttttttttttttttttttttttyggagtygttagtygygttttaaattygagtagggygygtagtgtttaaatttgttygygyggttygygtttttggtttygagggygygygtayggataygygagtatatttatatttaygygtatayggataygygygtattygaagattttygygygttygtatttaygygtatttggttaygygygtgtattttygtttaygygtttttgtttygttttyggygygtatttygggttygtaagtygygygtyggggyggtygttttgtttygygattggygggagtyggagtttttttgaattyggygtttatattatgggttgagttygtyggygtygagggagttagtgygattyggttyggygygtayggttaaggtaygygygttggtataygygggygyggataygygyggatatataygtgygggataygttttttttygayggyggygttaatttttyggtaagtttagygttttaygygatttgttyggtttttaygttggttatagyggttgyggggayggggaggaaggtagyggggtggttttaggggtttattttgtagggttttttygayggygtygggataggtggggygtttagygtygggagggayggttygttagtgyggggttttagggaggygygtgtagtygggtgygg

SEQ ID NO: 7090 - DNA, 1384 bp, synthetic construct
  misc_feature 1..1384: note = Description of Artificial Sequence: Synthetic polynucleotide
  source 1..1384: mol_type = other DNA
ygagygttttttgaagtgayggggtygggaygygtagggaggyggtttaagaagygygttttaggttagtttagaatgygttyggtygygattaggataayggygggtggggttgggggyggttgtygggyggggagyggtttygygtttttagttattttttaagagtygttgtttttttaattttagttgttagaggttttgtgattggttgyggtaygatgattygygtayggattggttgtttygggtyggggggtygggttygggggatagaattygttttygaatttttaaagagggtatttttyggtaggagttggtagatttaggaggtgygatagattygyggggtaaayggattggggttaagagtygggagygygggygtaaaggtattagggttygtttagggygtygygtagtayggttttgggggttttgygggttttygggtgygygtttygtttttagttatggggttygtagygttggagattttgggtttggtgttgtgtttggtgggttgggggggtttgattttggygtgygggttgtttatgtggtaggtgatygtttttttggattataatatygtgayggygtagattatttggaaggggttgtggatgtygtgygtggtgtagagtatygggtatatgtagtgtaaagtgtaygattyggtgttggttttgagtatygaggtgtaggyggygygggygtttatygtgagygtygtgttgttggygttygttgygtttttygtgattttggygggygygtagtgtattatttgygtggtttygggttyggttaaggygygtgtggtttttaygggaggygtgttttatttgttttgygggttgttggygttygtgttattttgttggttygttaatattgtygttygygagttttaygattygtttgtgttygtgtygtagaagtaygagttgggygtagygttgtatatyggttgggyggttatygygttgtttatggtaggyggttgttttttgtgttgyggygtttgggtttgtatyggtygtttygattttagttttttygtgaagtatttagygtygyggyggtttayggttatyggygattaygataagaagaattaygtttgagggygttgggtayggtygggttttttttgttagttaygtttgygaggygttggataagtttggggagtttygtatggatygyggttttygtygggtagygyggygygtaggtttttyggaaygttyggttttgygtttygaygyggtttttggattygtttttgtttgygttygtagttgatttttttttgttattagttyggttttgtttttaatagayggaatgaagtttttttttttgtgygyggygt

SEQ ID NO: 7091 - DNA, 1361 bp, synthetic construct
  misc_feature 1..1361: note = Description of Artificial Sequence: Synthetic polynucleotide
  source 1..1361: mol_type = other DNA
ygtygaggatgtggttttygtttttygtagtygtygtaggagtttttgtttttaaagyggtaggtaggggttttagygggtttattttaatttgggaaggtyggtgygtttttttatagatttygtagggygttttttttggggattattgaagttttggtatttttaattttagttttttygygttaygggaaaygaagaygatatttttttgaataatttyggatgtgttattatagaggggtattttatattggtttttattttaatttttatttagtatattgtttgtttattttttaaatttygtgyggattgyggtatttagtttygggggattttttagttttgttttttygattygygtaggtgygttygtttatttaagggtagggaggtatgttttttygggttttttyggtygtatggtttgtttgtttttttggtttttttttttygtattaggaggggygtgagatagttaggtygatttttatttyggtagtttgyggygatyggtygtttygagygtagygttagatatttgggttggggggtgttagtttgaygygtaggaagggygtagyggygggagggggttttattttagatttgggaggtttgtttggygtyggttttygttygtttttygtyggtggaggtygyggttggyggagatygttaagttagaggaggggattygaggtttyggttgggygaaggttttggagggggagaagayggtygaggygtggaggggtagtygyggyggggygatttttatttgtttattgyggggtttgttygtggggtyggggtagatttygtaaaggaygygtagtttgtaagttygyggttygygyggygyggggatggggagygtgtgygtygaggagygygygtygagtygggttttygygtttgtgtggtyggttggyggtyggggttygtgtgtttttgygyggyggygtgtgygtgtgygtaygyggggattaygttygttyggagtygtygtygtygtygttattttttgttyggggtygagygtagygttttttttgttygtttygygyggygyggtagtttagtttggtttygttttgygggagaggygtygttttygtygygaagttaggttgggygttggagggaggygatygattatygtttttttttgtttattttataggttggggagggggtgttgtaggttaatgagygttygggggyggggttagatygagggyggtgyggtggggggygyggtggggggygtygggttgtttaattygattttattygtagtatagattggagtaggagttgyggygggaaattttagyggygggggtygggggygt

SEQ ID NO: 7092 - DNA, 1175 bp, synthetic construct
  misc_feature 1..1175: note = Description of Artificial Sequence: Synthetic polynucleotide
  source 1..1175: mol_type = other DNA
yggagagtygggatttygaagtttttattgtttttgtygaggygtyggygtygttttttgtgtttttgattaygttagttttygtygaggaggygatattttttttygygtttttygatagygagyggtyggygtttagygtggaggggttyggaggggttttgtaygygygygtggttygaygygaggttyggtyggttygggttyggggygagattgggggtttgtygttgtygttatygttygagygtaggaaatygtygttatttgatttygttattaagtttaaggtgttttggatttayggtaagtatagygtygttgtagttggtygtgygtttttattatygtygttaggtttygaggtygygtttagttttagtaagaggaaayggaygtttagygataaatyggygtatayggtygaatayggtagttttyggattygygatttaaygtygygtttttyggggttgttygaggaggygatagttttygttgygttttygtygtttagggttygagygygygtygygtttyggttttttggagtttayggaygtyggyggtttttygygaagygygtygaggttgtttttatgttggtygttgaygtgygyggtaagattygtagtttgggtygygtygaggtggttttgggygygtagggttttagggaaaagtyggygtttttatagaaagttaagygtttygtgtygttagtttygttygttygygygtttttagygatygaaatttyggggtttgagaaggyggygatygatttgttygygtttgagatttttyggaagaagatttttatttagaagtygtygygtaagaagagtygggaggyggygggygagttgggtagggygggygtatttattttgtagtaggttgtggttygttygygygtagtttttttagtttygtagygtygttygttattttatattttttaygttatygggtaygggyggttttttattggtygggtatygygyggttagyggaggttgygttttattggtttaggttttgtagtygtttttggattggagtagtgtgttttggygggaagggtttatttygttggtygaggtttgataggygtttagygggygattttttttttattggtygagttatggagygtttygattagatagygt

SEQ ID NO: 7093 - DNA, 1087 bp, synthetic construct
  misc_feature 1..1087: note = Description of Artificial Sequence: Synthetic polynucleotide
  source 1..1087: mol_type = other DNA
ygtttgtagttyggtygygtggaggtgatygggyggaatttygagggggygyggggagagttgggygggtttatygttttagyggttgttgttaggggtygygaggttttttttgaagatgtagygtagtatattttgtatatgagtttagaggaagaggaagtgtagtyggyggaygygyggyggyggyggygggggygygtyggggttggagtyggagygygtygggygttgggygtagygagygagagygyggyggtygygggtttyggygagggatagaygtatygatygtyggagggatagatataygattaygyggygttatygtttaygtttttatttatyggygtttaagtttttttygygtygttttttttgtatggtataaatttttttttygggayggaataygttgttttagggagttygygatygygttttttttttygtyggttttatayggtaggyggyggggggggygygatagggtttggggtgtygatyggtataggttttttygtttggttttatggatygggtttttggygggtagtgggaatygygygtggygtttttttgtaggttgttttttgtyggggtttyggagttgttagagtagtattttttggttygygtyggatggggatttgggttgatttttgggaygtttggattttgggttaatttttttttgyggggaaygggtgtaggggagttatttttggagygatgtagggagaggtatttyggagtagtttgttgggggtygtaggttttgtaggtttagaagygtttaggaaggaygtagaggtgggggagtttggaggttataggtgggtttaggatatattgtygttggggttttyggaaaagaataggagggagttggtygyggagtttaggttttyggggtgygygyggtttgggtggggtagggtggaggyggtgtttgattgtttttttgygtgtgttttgggaggtgggtttgttttggggatagaggtgttggaygtgtaggagtagatatgtygygygtttygaggaagygtyggaattattagaagtatagggaygygggtgtyga

SEQ ID NO: 7094 - DNA, 693 bp, synthetic construct
  misc_feature 1..693: note = Description of Artificial Sequence: Synthetic polynucleotide
  source 1..693: mol_type = other DNA
yggtttaggtattygggtagagggatgatttygygttttgygaaaagtaataggyggttgtattttattttgygttagtttygggtyggggtggttgttttattttygtggtttagggaggaggygttgggtgygtatgtttaggggtgtgttygttgttagggttgtagyggtygttatttttaattagttgtaagtygagttgtttatttgggatygggtyggttyggygggtttggttttyggygaaggyggyggygttggtgygyggyggttggggygygggaygtaggtagtgygtggygyggttggygttttygggygtygttatygagygagggtgyggtttygggyggtygtgyggggtaygatttggttygygttgttgyggyggtygttgtagattttgttttaggygtygtagttttgtaggaagagtagataaagataggagagaggtaaagygtygtttgtttagagatgtagtyggtttagttaatagagggaaatygtttttaaatttaggttgggaatgagggaggaggggygaggyggttggggattagaaaaagtagtagggaattaaygtgatagttagagtttagttagtgtttygtyggygttgttttttygtttygyggttgyggggttyggaatggagagaggaggygggggttgagygttggttgtygg

SEQ ID NO: 7095 - DNA, 5065 bp, synthetic construct; identical to SEQ ID NO: 7063
  misc_feature 1..5065: note = Description of Artificial Sequence: Synthetic polynucleotide
  source 1..5065: mol_type = other DNA

SEQ ID NO: 7096 - DNA, 307 bp, synthetic construct
  misc_feature 1..307: note = Description of Artificial Sequence: Synthetic polynucleotide
  source 1..307: mol_type = other DNA
ygttttgggggygatatygtyggggaatttgatgatgggygayggygyggyggyggygtggtttagtaggtagtttaggagatagagygtttttaggggattygtgagygygtttygggttattagygtttttatygtagygttttttggtttygygygtygttygggggtygttggttyggtgygtgtggtygtttygtygtttggttggagtttgtttygyggygtagggttgygtttygagggttygttggttyggtggtttggggtttgttyggtttagyggtttatggttyggttttygygt

SEQ ID NO: 7097 - DNA, 1563 bp, synthetic construct
  misc_feature 1..1563: note = Description of Artificial Sequence: Synthetic polynucleotide
  source 1..1563: mol_type = other DNA
yggtgttttygtagttyggaygttagygttagggattygttataattttaagttttttttyggggttgggtttygtatataaataggtagtataaaattaggatttagttggggttygtatttttttttgtttagattygagtygttttagttttyggtygtygygttyggagttygttttaattyggaaagtggyggtyggttgyggggtaggygggyggtatttgtgagtagttttagtyggtgttttagtatttttatttyggygttyggygyggttyggttttgggtggyggygtyggggtagygygttyggtygagtyggggagaggagygygggagattyggagyggagyggtaggagagygyggagygaagyggtaggagtagtttatagttaggagygttttttygtttttaaygtygygtttttttttttaaaayggtttaaaaaaatttattaattgtatggtygygtatttttaaaaaggtattygtygttatttggtttyggtgaattttaggaggyggaggaagggygyggggtgggtgyggtgatatygtgggaggtggtttttygtgttygtygttygaataaagagatttygtygttttygggygtygyggtggggggtygyggayggyggttgggggtttttagygyggtygggaaggygaggaaggagagygggagtygyggggaggagggggygtygttttygyggaggygaaatggggygggagygagtyggtgygggattygyggggttagggtygtgygtggggttggggtygtgttyggggttgggttgggttgggyggggaygygygtagtagtygyggyggygagagaagttggttttgggtttaggggygagggygtygtygatttatygyggagatgyggaygagatagaygygtaggyggggagyggggtttyggygtygtygaygygygggtgtaggtgygggtagttaggagttttttygygtgttygyggttgtaggggyggaggtygggttgggggyggtgygtygygggggygtgttygygtgggtttggygggtgtgggygttyggttygyggggyggtgtygggtttggggttagtttyggayggatygyggtttttygygygtggttttygttttttgygyggttggggtgttyggtgggygggygggagggygagyggggatygygaygyggagtttgggggatatttyggtygattygygttttygtygattttttattygtttygtygygyggattgtgttgggtgygttgygaggttttgttygtttttttaggttttttgtggtygygyggygtygggttttygggggaggggayggygttgtygtagtttttgtttagatttttaaggggaattttagatttgtagagatatttttattttagygtttttgygtttgttgtttygygttattygtygtygtygtttgggaatygagggagaaaagtttttagggtygggaagaattaggggtttaggggtttttggggygtygttttttttttttygttttyggagttyga

SEQ ID NO: 7098 - DNA, 512 bp, synthetic construct
  misc_feature 1..512: note = Description of Artificial Sequence: Synthetic polynucleotide
  source 1..512: mol_type = other DNA
ygattygaggttgtttattyggtttggtatgtttyggygtttttggggtttttgtatttygttggtttttygttgtggtgtttygtagttygattatttttgtgtttttaggagtttattttgggyggtagggaggygttgygtggggtttaygagttttaygttgttatttttattagtttttattttttaggygtttgttttttygtattgttaggttttgttttygtagtatttggtagatttgagttyggtttttgttattttttygygggagttttatagtgattttggaggagaagtagtaggagtttataggttatygygttyggtygygygtgaagtttgtgtagtygtatggtyggttygttggtttyggttttttgtygayggataygttgttgtttatttagaggttgtttygggtyggtttagtygtggatttagtgttttgtttagtttyggagtttggattgggtagggagtyggyggggtgygttgatttgggtygg

SEQ ID NO: 7099 - DNA, 1070 bp, synthetic construct
  misc_feature 1..1070: note = Description of Artificial Sequence: Synthetic polynucleotide
  source 1..1070: mol_type = other DNA
yggygttyggggttygattggtgggaggggttyggtagaggtttygtttygagattttagtaygtttygtttygttttayggtgtagtatagatttygyggagaaygygagtatggtyggaaattatygtttttattttttggygggtttygagggaaggtygggaaygggygggttttgttggtttagagggygttaggggtagttatyggyggttygggatttttttygtygygagygygggggagtttaggttyggtttgtygggggttgggtgaggttgyggattaggtttttaygtttttygygttygttygygtttgttttaggtttttatygyggttttttttgttttyggggtygttttgttttttatagattttattttygggggtygtttttaggattttygttygtttttttttgattyggtttttgttygtttygtttttttttttygggttttttatttttttttygtyggtttygatttygggggygtttyggatttgtttttygaatatttttagtttygtttttagtttgyggagaaggggtygaggagataggaggaagagagygagagtttaggggaygaggaggaagttatygagaygyggagattygaygaygtygagggaggtataggtyggggaagyggtagtygggggyggagygggggatttgggygggttttttttygttttgtttttgtttttttygtttattttttttttttttttttattygttatttatygttatggygttttygattttaggyggygagtgtagtygtygttttatttttygtagtttggygygtattagtttttttgtyggtgggygggygttaggggtagggtygaggttygggtatattttttttttttygtttatttggygygggaggtttatttttygagagtagttgttttttgtttttttttagggtayggatttttygggttagtygttgttttagtatttgygaggataaagaggaggttttttygtttggtygtttttttggttatayggttygtttttttttttttgtgtttttygyga

SEQ ID NO: 7100 - DNA, 766 bp, synthetic construct
  misc_feature 1..766: note = Description of Artificial Sequence: Synthetic polynucleotide
  source 1..766: mol_type = other DNA
ygggaattttaygtttttgtattagttygggggttyggaygagttygggagtygttggtygttaattatygygyggtggagaggygggygttyggtttyggygygttgggggagttagttggygttgttttttttatygttttagaygtttatatygatatagatagaygtatagaygggygggtagatatygatagttttttaatygtttgygttttagtttyggtttagggagtttttygtattttttggggtgtygtaaattgtagttyggtaggttygygtygggagaagggagggygygtaggyggtyggaggaggggaggttttagygygttttygttgygatgtgaayggyggyggtttttatttggagtygtatttggggygtygagtttyggggtygyggaaagaatgygygtygttygtgygtttygtttgtygygtttggttattygtagtygtygygttygtatttgattatggagtgygtttttttgttygygtgtgttttttyggttgygggttygggttygtygaggggtttggygggattggggygygtggttaaggtaggtgtygtygagyggagtttygagagygggtggtagggggygttygaygttagtttygtygygttttttaygygygatgttatttttttttttgtaggygttttagttgtgttgtttttgttgtgygtyggtygtygyggttttagttagtgatagtagtagyggygttagyggattaaatgatggttygt

SEQ ID NO: 7101 - DNA, 363 bp, synthetic construct; identical to SEQ ID NO: 6874
  misc_feature 1..363: note = Description of Artificial Sequence: Synthetic polynucleotide
  source 1..363: mol_type = other DNA

SEQ ID NO: 7102 - DNA, 2919 bp, synthetic construct
  misc_feature 1..2919: note = Description of Artificial Sequence: Synthetic polynucleotide
  source 1..2919: mol_type = other DNA
ygagygygtaatatgagttttaaaggttaaatttyggttagttaggagtyggaaggttgagttyggttgatttgattttgagttttttyggagttatttygtataggygttygttttgtttaagggtaygygaygttagygggtagtyggttttygtgaagaatggtttttaaataatttattttatttygttgtaaagagagggataaaatgggttttttttttttayggatgtttagttttttgggtaggygtatggtygggyggygtttagttygtagtttygattyggatattttattgtattttttttttttyggtttttttttygtaygggygttygagagayggataaagagttggggttaagtttgagygtygggtayggttaggtttagggaaggaaggttttyggtagatatttgggtattagagttggtgygaggaggaaaagttgggaggygaatttataattttgggggtggagggtaggtaggggaggggaattaggttaattttagtygagtgagtttttagygagttggggtttyggatgggaggtttgtttygygttttaaagaaaagtaaatygtttttttaggttygttyggattgtygaagtttttttggaaaaattttttttttttttatattaaattttgygtygggtttygttttttttygggtaggtagyggygtaggaagggttaagttagttygttttagttgatagttagttgattgggttttgattgatagtttygaaaagtttttttgtttttatattattatgttaatygyggtygttttygtygttttttattggttyggagtgttagttaattttttatttggatttgaygttaygagtgttataaaatttagtaattgttttaaattttttttgttggattagaggttttaaaatttttttttattttttagttgtagttygggttgtttgtyggtttggttttttttttttttttttgttttttgtttygtttttttttaggatttygttattttgtttttttaaaaaaaggtaagaaagaattaaattttttttttttttttttttagtygggttgtatttttgttttgtattttgtatagaggtagagagygygygagggagagagaggaaagaaaaaaaataataaagagagttaagtagaagaggaggygagaagtatgaagtgttaattttttygtgttaaggttygygtygttyggatagaygttygtygygtttttagtttygagyggaygtygygygygttttgtttgtagttygggtyggygaggygagtttttttttatgtaaagygygtagyggagyggygagygggggaygtygygtatygggtygggtttttttagtttygtygtygtagttattatygtygttatygtagttygyggaggattttttygagtttgaagtygtyggtttggygygtaaggaggygagygagtaaggaggggtyggggygagygagggagtatattggygtgagtaggggggagggagggygggygyggggggygygggtagggygggggggtgtgtgtgtgagygygttyggaggtttygggttagttatygtygygtaagttagaagygttttagttyggtaagttggtttattygttggttatttagtatagttygttggttttttttttgtagtttatttggyggagyggyggyggyggyggyggyggyggtaggagaatggtattagaattggtaatgagtaatttygatttgtttattagttttttggttatggaatatgttaatgatttygatttgatgaagtttgaagtgaaaaaggaatyggtggagatygatygtattattagttagtgyggtygttttatygtygggggttygttgttttttatttttatgagtaygtygtgtagttyggtgttttttttttttagtttttyggygtttagttygggttygggtagygagtagaaggygtatttggaagattattattggatgatyggttattygtagtagttgaatttygaggygttgggttttagtttygaggaygyggtygaggygtttattagtaatagttattagttttagggyggtttygatggttaygygygyggggygtagtagttggtygyggyggtyggggtyggtgtyggygtttttttgggyggtagyggygaggagatgggtttygtygtygtygtggtgttygtygtgatygtygyggtygtygygtagagyggygygggttygtattattattattattattattaygtygtyggttattattattattygayggtyggygygttyggygtygygggtagygyggtygtttyggtyggtggygttgggggygygggyggyggtggttyggttagygttgggggyggyggyggyggyggyggyggyggaggyggygggggygyggygggggyggggggygttttgtattygtattaygtygtyggyggtttgtatttygaygatygttttttygaygagtagttggtgattatgtttgtgygygagttgaatyggtagttgygyggggttagtaaggaggaggtgattyggttgaagtagaagaggyggattttgaaaaatygyggttatgtttagttttgtygttttaagagggtgtagtagagataygttttggagtyggagaagaattagttgttgtagtaagtygattattttaagtaggagatttttaggttggtgygygagagggaygygtataaggagaaataygagaagttggtgagtagyggttttygagaaaayggttygagtagygataattygttttttttygagttttttatgtgagtttgataygygattttagttagttattttgataagtgtttygygggggttyggttygg

SEQ ID NO: 7103 - DNA, 2267 bp, synthetic construct
  misc_feature 1..2267: note = Description of Artificial Sequence: Synthetic polynucleotide
  source 1..2267: mol_type = other DNA
ygggygggggagggggtttgtyggtagagaaagtgyggagagggtagagtagyggttyggggygtttttgtaggtggatatgaaaygtaygatatgtaaatgaatgtaaagtgtatgtaaatgatttggtttygggattygygggaagygagggtttygtatyggattygttygggaggttgagyggggggagygygatttttgtyggttaygtayggaggtggttttgggtygggttaggygtygygttgggggygagygyggggtagggggygggggyggyggtygaaggagygattttttttttaattttttatttttttattttttttatattttttaattttygtttagtttttygygyggtygttagaagtygyggttttaaagttgygaggttygyggtygtygattgttgygaggtgggtgtgygyggtttgyggagggggagagggtgggygtaggygggggtygttttttagagtygygttttttttayggygttygtattttttaattttttygttygttttygtttgygttttttygygtygtttttygtaggaggyggygygttygtygtttttttttygygttttttttttttttttttgttttyggygtttygtatagtttyggtttttatggttagtttttagggygtygtttyggtggyggaggygttgggggyggttttyggyggyggggagtttttttttaggtyggygtttyggggyggagttgagygttatgggygtygggygggaggtaggtggygtagyggyggyggyggggggtaggaggyggaggyggagygygyggggygggggtygyggggtttygtgagattttygggygagygygyggygttggagttataggygyggyggttggattyggygygggtygyggaggtyggagatygtttygggyggggtgygygttttgttttygygyggggtggtyggagtygagttttyggtatggtttaggyggtygtttygygygttttagtttygtygygygtttgagttyggtgyggygttagaagatagygygtagtygtttttgagtygtggaggyggggattaagttggaaggagtagygattttyggatygagtygygagtgtgygtygttygtygttygtyggatttttyggatttttygatygtaagtgtygtgttygtttygygygtygtygtygttttatttygatttygttygyggttgtygttttyggatttgygtygtagtygygtygagygtaygggtygtttttaaagttggtgtttayggtagggtggagttaattygtttagygtttatttattygggttgagygtagtttttygtgagtagagtttgatttgygggggttgyggygaaatttygaggggaaygaygygttygggygttgggagtttygygggtttttttggggtygttyggtttttttaataaaggtttygyggttygygtgayggagattygggagtggggaggtygagggyggttttgggagaggtagaggtggyggyggtyggtttggggaggggggtttagagtttttttttgttttttttttttttgttygggttttyggygttgtttygtaggttaaaggtggttygygttgggggttttggattttgtttggtatgyggtttttggggttttgayggtygygggtttyggtatagtygggtggtagygatggygygtatagtttttgggaagygtttatttgtgttgggtaggtttygagttaggttgtgggaatagyggggagggaggtgtgagtttttgtggagggatagatggttggaaaygtagttttagayggttgattttatttaygtggagtagaaggyggttaggttggtggyggygatttagagtygttgggtttygaatatattgyggggttggygttttttygtttttgygttygttygtgtgtgttggggtygyggtygggttgtgtttattttttatttattttgtgggttgaggtyggttgattttaggtttattttagggtttaggaagaaaaattttttttttgaaaagagagtaygtygygtgtttttgtgggtgggggtttgtyggtagttgttaggtttgtggttttagttagggtgyggtttttgtgygttyggttygggtgtgygtttttttttttggaygaggaataggaggtttttagggtagttatttyggyggaygggtyggtyggggataaggggygggggtyggtttttygg

SEQ ID NO: 7104 - DNA, 265 bp, synthetic construct
  misc_feature 1..265: note = Description of Artificial Sequence: Synthetic polynucleotide
  source 1..265: mol_type = other DNA
ygtagtttgygatygatggagtaggaggygygggtgttgagagttgygggyggttttggtygggttyggygtttgttggttttygtttygtgggtattttgtatagtgttggggttggtgttgagtttygaggagttgtttatygygtagttygygttttattgtygatyggattttaygttgttgtttttagygttgygygttttgygyggattygygttgttggaygtygttatttygygtttggggtttaygygagtygyga

SEQ ID NO: 7105 - DNA, 374 bp, synthetic construct
  misc_feature 1..374: note = Description of Artificial Sequence: Synthetic polynucleotide
  source 1..374: mol_type = other DNA
ygaatagygttttgaaaygtagaaaygtgtttattygaattgttaaygygagygtagagtttattgataaagtaaaataagataaatygggagttagaaaatttagygatttataggatttatygtgatgttttttataaatgttatygygaaaatagtyggatttgaaaataaaygygatttatttggttttyggaaggggagaaggattygggygaaaggygttagttttttttygttygtttygtagaygtagygtaggtttygagttttygagyggyggttttagaattygygggttattygggagtttttttygtagtattagtygaaagtttttagygtygaggagggygggyggttgtttttttyga

SEQ ID NO: 7106 - DNA, 1133 bp, synthetic construct
  misc_feature 1..1133: note = Description of Artificial Sequence: Synthetic polynucleotide
  source 1..1133: mol_type = other DNA
ygaatagygtttttaaatttagaaaygtgtttattygaattgttaaygygagygtagagtttattgataaagtaaaataagataaatygggagttagaaaatttagygatttataggatttatygtgatgttttttataaatgttatygygaaaatagtyggatttgaaaataaaygygatttatttggttttyggaaggggagaaggattygagygaaaggygttagttttttttygttygtttygtagaygtygygtaggtttygagttttygagyggyggttttagaattygygggttattygggagtttttttygtagtattagtygaaagtttttagtgtygaggagggygggtagttgtttttttygatttygtttygttygygyggaygttttyggttttaygyggggattatttygggattttygtyggatttygygygttygyggttaatttgygtgtatttgygtttygygttaygttttyggygttttaygtttagtttttattgggtttygttttttagtggttttaagtttygttttttygttggttatygtaagtttygtttttygaggtttygtttttgtaaggttygtttttttaygatttaggtttygtttattayggttagttygggtttaggtttygtttygataygatttaggtttygttttyggttagtttygtttttygygygtttygtttagtaattttygttgaattyggygyggtttttttagygttgttttaygtygtagtttagygtttggagttygygygtttygagtttttgttygtttatgygtagttgggttatttaggtgtatttatttttttgttgtttygtygttttttttgtttttatttygtttaggttttgggtgttttttttttattttttttggygtttttgttttaggttatttggtygtttttttgggtttttygttygggggyggtttttggttygayggtgtygtagaygygygygtataggttagtttygyggagaggttgtttttaggggttaggyggggggttgagttagaggttggggtttgttaggagyggggyggtttggggygtagtagtattggagttgaaggygagggyggttygygtygg

SEQ ID NO: 7107 - DNA, 2358 bp, synthetic construct
  misc_feature 1..2358: note = Description of Artificial Sequence: Synthetic polynucleotide
  source 1..2358: mol_type = other DNA
ygggattygttttttaagyggygttttttttatttttygygaatttttyggyggggtttgtgtggattaagggagattagagatttttygtygttattttatttaggyggagayggtttattygaattygtaygggtttttttttttttttggaatttgtagttggtttttttygaatgtttgttttttttttttttttaygaaagaatagtgttttgggattyggggtgyggggtagtygggttygttggagttgtttagtgyggggaagagtygtygagattgggagaaggggygttggttagggaggagayggggtagggagyggattygygattygtattttgggyggyggttttygygttttagtygygtttttygatgatttttagtygygaagggygagygggygggggttgggttgygggttygggttttaggaggtttgyggggtyggggaggggygtggagtggttygaggatyggtttggggattgggggtaggtgtttggayggaygygggtygagtatttttttygggggygggygtagtgaaaatattttgggaggyggygtygygyggttgagygttgttgttttgggaataggayggygttyggtattgygagttgagagtatttttataaattttgtatgggaggygtttygtgagygggggyggggagyggagygagagggagggagttagagagtaagggagggagggaggaggagaggagggggaagtyggggggaggaagggaggygtttygtttygtygatygttyggttttgtaaaygygygtygggygtttttttyggagttyggyggtgygtgygagygtttttttgttgtagtygyggyggyggtggttygagggggyggagaggagggggttgyggtyggtyggttagggggyggygtttttttttaaaatygtttgygaagtgtttygggtggtagaagtaggtygtyggtttygyggagtaagtygttygtttyggggttgagtaagygygyggggttgtygggtagtattayggttgtttgygggygtyggtgttttyggygyggggttggagtttattatgtttttgyggggtygggttatygggtaygagyggattttyggtttgttttygtttygaygygttyggattagttgtagttggygtttagggatttgaatttggatttygggagggagtgygtttaggtygatttyggagyggyggtttygtggttaatatgtttygtaaaggtgagttggagtygtaggggtaagttgaagttgaatgygtttyggaaagagtygygagttygggygtygttyggygtyggggttttyggtttgggaagtagttttyggygggttggtgggttttgtygggygtattygtygaggggttgttgttggggtttagttttygttagyggttagttgtgagatayggggttttttttatggatygagtggttaggtttagagattyggttyggaggggttagtyggagattagagtgagyggtyggtggtggaaggggagtyggttttttgggatttttgttttgttgggataaagttttgtatttgtagtttttattttttgygygggtataygtttttgtttttgtygttttgtggaggtygagttygtayggygttttygtgtagttagyggttagtgatygygyggttygggygtttttygygygttttagttttttagayggggttyggaygyggaygttttttttgtagttttgttttgatygttagggatgggttttgggtatttagyggttgagggtggggagyggttagygtttgatgtttagttttttaaatttttattatgttgggagyggagggaygygaaagtygtgtygttagtgtgygygatyggtgtatagtttaatttgaggatagttggtttygygattatygtagttagaygttttagtagttyggttyggtayggagygyggtaaagttggtgygggtatyggggaagtttygtygygtttttaygtggttgttaygyggggygtygtttttygggttttgggagggtaggtgattaygtygggagtttaygggtttygttattagttgttttagtttttgygtttgtttttttttttttaggttygagtaggttgtggygtttygtygggatttttttygygtttggttyggttaggaggttgagaagtygyggygtttgyggttggttgtttyggttttgygggagyggttgaggygggagtttaggtagtygaggggtttgatttttgygttttaygttttagttttaattygtttttgtttttatggtaatagatygaggtgtygt

SEQ ID NO: 7108 - DNA, 1050 bp, synthetic construct
  misc_feature 1..1050: note = Description of Artificial Sequence: Synthetic polynucleotide
  source 1..1050: mol_type = other DNA
ygggygggtagttgyggttgttgaggttyggtggggtttttttaagaygygtgttygtatttgttygtygggygtttgyggggtgtagygtttattggagygygatagtttttgggatagaggaggatagtggtttygtttttttgtgygatygtttaggagtttygggtyggagagtgygagyggggaaaaggggttttgtatttagagtggggyggaygtggygaggaagttaggggggatygggaagygaggttygyggtgyggagggygyggggygtggggggatatttttyggagagatatyggaggggyggaagtaaggagatggaaaggagagggagatyggggagatagatttgagagatttagaggtttgtagagagttttattygggattttttagagtttaggaaagagtagatgyggaygygggagggygttttaygttaaagygggtagtattagtgattaaaataygtttygtttggtagtttygggaygtatttttgtttyggtagygtaggagaggtttggatagygygagatgttagggtttaggttgtttttagagggttggttygaagygttggagtttaaagaygttttttatygtygtygggtggtagaattgggggtaggygygttttatagatttygaggggtggtttygttttagggtygyggggaggygttttygtgyggggyggagttgttatygttttttttttaattttyggggattgtggtttttttttaagttygyggygtttttagttgttttttattygtttygttygttagtttttttttygygygatggtttyggygttgagttatgtttttaagtttaagtttttygtgattttgttygttatttygtttttgttgttgttattygttattttgatgttygttaaggttagttgtatttttaggtagtttttyggatattyggygttttgtgtttattaaygggtatygatttygggagttttgagttggagygtayggatttygyggggagtatagttttttyggggygygygt

SEQ ID NO: 7109 - DNA, 1731 bp, synthetic construct
  misc_feature 1..1731: note = Description of Artificial Sequence: Synthetic polynucleotide
  source 1..1731: mol_type = other DNA
yggtyggttttagttgttatttaggtaatttyggagtygtygtagatatyggatttattggaagggggygaagtygyggggaggaatgggggatattggggaaggggygtygtttttgtygttttygttttttttagtgttattgggyggttgttgyggagttygygttattttttttttattttatttygttygtttggtttygtttggtygttggttygygtttygttgygttygttygggggttggttyggttygggtttttgaygttattagtaagtttgttgttttyggygttttaygtgtggyggyggttagyggyggtttaggaggtagtyggtgagygtttgygagtagagtggygggggtygttgataggtttygygtagtttagtttagtttagttaygyggtttataggtggggtttaagagtagtttggagtaattyggygttayggagaggggtggayggttttgtaygggttttttgtttttygttygggtagagggattyggggggatttygttttttggttgagagaatttgaattygggyggagagaaygygtttaggygggtaaggggattagagaaagtyggggttggaagttattgtygttygttattgtttggagygtayggagygtagaggttyggtagtygygygtgtttttayggggatygagttagtgatgtaggatygttgagyggagattygygtygagaagtttttyggggtyggggttgagaygtaygttttygatatygttgttaagatttygatttyggygatttttgyggggaatygaggggttaaggttgttttaagtttaggatttgggygagtttaagaygatggttttttaagtayggattygygttttttttttygttttttygattggaggtagggattttgygyggggttttygggatttygttttttygyggagtttyggtygttgtttttygggatagttygtayggttataggggygtayggygatgtggttttygtttagygygttggttygtyggggggatgttttggtatttgtyggggtttaggtttagtatggtyggygygttgttygaygtygttttyggttaggatggttttttygggttyggttagtgttttttttatttyggtygagtygttgtttygtagtatttttyggaagtttttgttgatgttttgttttttgtttaygtttttttaygttttttattgtttggtygagygttgttagattttgttyggtttygtygtggggttgttyggyggyggygaggaggygggggtttttggtggyggygttttggtyggaggttygagggagttggyggtgtggtyggyggyggtatagagaaagygttttttgtaattgtygtagtggyggaggygtyggtygttygygtttygygaygayggygaggaggyggtttgggaagaagagttttttggtttgttagggggttygggyggtttyggggtyggaagtatygtggtygaggtttygtyggggattttggygttgtttttggaygaaggtagtaagtagttgtygtaggttattattatyggagtgaagaagggyggtaygygggygttgttggagtttttgygygtgtatttygaygtgygygtygtgggygtygagttttattttttygatygtagttaygataagggtttygtttggtatyggtgagyggggygggttygg

SEQ ID NO: 7110 - DNA, 3535 bp, synthetic construct
  misc_feature 1..3535: note = Description of Artificial Sequence: Synthetic polynucleotide
  source 1..3535: mol_type = other DNA
yggtygygttaggagttgttggtgtagtttaggaaygtagtgtttggggttagttgyggtatttatagtgggttttttyggtagttygattygtygggttatygtttygggttttgtgttttttggattygggagttttgtttgttagtttagggagatggttygggaggaygaagaatttttygtttttygyggtttagttaagtttttgyggtygttygggtttagtygttatgygtggtygttygtagygtagttttygggygtaagtyggtagtygaatttttygggttgygttgttygttgtaggygygyggygagggtttttaygygatttygttttttatttagygttttttagttaattaaaaagaaygtggtaggtggagggtagtygtttaagagattgygtgagtttttttgtggggatttttatagtttgttttaggtgttttaaaatygtttgatattaagggtttagttttttttttgttagttttttttaattyggtttaagtgtgtttgattttagaaaattttaggttgtttyggggttttggygggttttatttggaagggygttagttatagtttgtygtttggttttggaattattattttaggaggagggggagtggtggtggtagaagttataataatataatyggtgataatagttaaygattagagaggtttttaygtgtttgygaggtattttatygtattagygtatttattttttttatttttgtttagaatttgtattatttttattgtatagatgagagtattaaggtttaygygattagttaggaygtgaatttaggygtyggattttagagattttatttttatttattagtgtttygagaatgggttatagttygggaayggtgggaaagatgattgttayggttggttaaatttygagatttgggtaatttttgataataataaaaaattattaaggataaaggggaaggggtaggaygaggttgggaagggagtygttttaattygyggggttagtttttttttattttttaatttatttaggtttygatagtggggtgggtatagggagaggggtttagttattttttttttttttgtttttttaagttttgagygtttgtgaagttaattgggtttggaggggtgtttgaatgtygtgttggttggggttaygggtggagattttaaygaaaatgtgggggtygttatttgggtttttagtygaagatagttatyggaggtygaaatttagattttttgtttattygygttttattygaagttygggtaatttaatagtttattttaaagattagtagttgyggaaagtagtgggtagaggtagtgattgtgatttyggggttattgtttttttggaatttgattygtaattygattygagaatagaattttyggaagtygygatttygaagtaatttttattttttaattaatgggtttygaatattttttgtttyggaygtgtaaaagtttygyggagataygygtttttgttttttttattttagtatygagggtagggaggyggaaaygggyggyggtgttyggaggttyggaygtttttaaagtttygygtygttttagtyggttgtagtgygygtttttgttygatagggattagtatagttttaygtttygygygtygttygttygttaggyggaggygtygggttattygttyggtttattttttygagtttaggyggttygygagygaggygggtttgatatttttggggtttyggtaattaggyggattgtaataaaaagttaatagattttgyggtttygtygggaygtygyggtttttattttttttttttatttgggaagtagaagttgttttagaagttttttgagggyggagatygattaaaggggtttagaatatttttagygtttygggtttygggaggaaaaaatttaaaaygagttataaaataygattygagtyggatatttttatggttagagggtggttygttttgttgagggyggttttagtygttgttttttttttttgyggygaggtygtttgatgaatttaagggtattagtgtttygygagaattttttgtgggttgtgaygagaattaagyggagygtaatttttatygtattyggataggatgygttgygtaatttgtygtagtttttttgttttatttygggtggttygaagttgtaattttgttaattttttattataygttatgttttttttagtttagggtttgaatygaygatggagattttgtttttggtagggaaatttatyggtattaagygaggtttttgtygtagttgygatygaagaaatggggttyggygtttayggygygtaygtyggggtgtaygygtagaaattttagtagygttygygtgtygtttttttttaygtygatgatgatggtttgyggtagttgtttgtttttagatttattgaaaaagttggagatggggtttggggagttyggtatttygggattttgttttttygggttygtagygttttyggttatttttttgtttgaagttagtggggtggttggyggygttyggaayggtagtttggggggygtttygttyggagttgtggttagggttggygggtygtgtgyggygygggatttagagtttaggagtagtagtttyggygyggyggygtaggagtyggygtaygagtataggaatatatagagttagaygtagagtatggygaagagtagygygagttttttttttatyggyggygggggyggyggyggttgyggtaggagtyggtyggggatatygaggtaagatttgtygttatttaggygttgttttatgygttgttygygggygyggttagggatatggtttagtatatggygtgggtttygtygggtagtgagygtagagagggtttttyggtaygttggaygttygggtggttyggtttattgttttygtgtgttygyggtygtygttgttgttgttgtttttttttaggtggyggyggtagttgtagyggyggyggtttttgatatgttgttyggtaggagttgtaattggaayggaaagtygggayggyggtaattgttgggygagggtttgttttyggggygygaygaygygttyggggttaggaggaygttgtattttygygttttggttattttagattgtgygtatygtygtaygtyggggttgtttttttgtagttttaagaattgagtttygagtagtttyggtattttttygtagaggttgtagaggygaattgygtaggaagagagttgtggatygaggtggagtgggyggtttyggttttttagagtgaygggttgttttatttattaaaaatttygaaygttatgtaaatataggygttttttygagagtttagtagttaattygtttttaggaygagggggtgtggaaaggtttttgggyggtgtagggyggttaggggttgttattggtttyggaataaggggygggtttaaaggggygg

SEQ ID NO: 7111 - DNA, 2896 bp, synthetic construct
  misc_feature 1..2896: note = Description of Artificial Sequence: Synthetic polynucleotide
  source 1..2896: mol_type = other DNA
ygattttyggtygygaatttaagtttgtygttttygtygygtttattttttagttttttttttgtttyggygttattttaggtygaygtttttaattaaaataagttttttttttaggagttttttttttttgttygaggtttagggttagtagttttaggagggattttttttttattttatttttttyggtagaggtgygagattttattgttagtttggttattygatygygygtgagattggggygtagggtaggggggttattgggtaggttttygtgyggggagtggggaggggtttttaggggaagtgtttgaagttatttttgtagttttgtttagattyggaagtygtygaggaagggaggaaggygggggtggggagagygygattttaagygttggygggyggygaggaggggtygtagyggttygaggaagygtttggaggygttaggggygtygagtttttagggaggtygygttttygggaagttttttatyggttgttyggagtaggatyggaygygyggatygtttttttyggttygattagtttyggggygtagattgygaatttgaatagaattttttttttttttggtatttttygtttttttattygtggttattagtttygttattttagttttatgtttttygttaatattatattygttaagatygtttattaatgttttgtggaggaaaggggaggggggaatttttagtataattaaattgtggttaaaagyggttaaaaaaaaaaaaaaaaaaaggaaagaaagaaatttttttttttgagatygatttttttaattagygtggaaaatttttaaatatgtaaattygtaattttagttaagattttggygtygygggaggggtgttygyggygggyggygattttagtttgtagtttyggatttygggtaggtttgygygyggyggygggtygggggttyggggagttttggygtttatagtagttygtygaaaatataaagtttygtygttaataatatttgygggttttttttgggtttttygggygtyggygttgygygtttygtygtttttttttttttygtygttttttttttttygygtaygttttttttttygttttttttagaaygyggtggttagatgagatttttgggagaaataaatgtgagygttygtaygaattttttttttygttagtygtttgtaayggttttaggttygtttttttttttygygttttygygygygtygygtttttygygtttygygttttttttttagtagtttttgygagygtttttagtagttattatttataggtygtygggggttaggaggtaattagagayggtttygtggtygtatttattyggtaagygygatgttggygyggggygygygyggggaggggygygygatgagggggtttggttgygygtagttygygttttagatttgggggaagggaggaggaggagggggtagggaaggaggaggygggygggggggygagagatgagttygggaagggagygggaggagggggygtyggggagaygtttttttggtttttatygyggggtttyggggttattygttgygaggtttygaygygtttagggayggggggtgtgagtgtaagagtgygygygygygtaggygtgtgtatgttaaagatagaggaggggagggagggaaygttttaatatttttttagtgatttaygagtttgygggtgaggttttggttgtgygtttaggttygtgtgtgtattaatgtggttgtatatttttggtttgttttaygagtgaatgttayggggtttgggggggggggtttggatataagttagtgaatgtgtttttgggttttagtttgattgaatgatgtggygttgygtggggttgtgtttgtgygattgtttataggggggttgtgtgatttygtgaggtattgygtgggtgggattgygtttgtgtgyggttgtgtgtatatgggattgtgtttgygtggggttgagtgtttagagggtagttgtgtggttatgtgggtttgtttgygagtgggttggtgggtgtgtggggtygtggggttgygtatgtaggggtagtgygtttgtayggggttttgggttaatttaaagggttgtggtgggtatttgtaggyggttgygtgtgtggttggatttgygtggggtttgaggtttggygggtgggggttagtttttttggygtyggggatygtatygyggtagaagagtygtttaaggygttaataggtagygtyggggtygyggygtagygygaygtgtagtagyggtggggygtagagagaaggyggagaagaggggggtttttatygygygttttttttagtygtattagagaygtagtttggagattttgtygtttgtyggtttygyggttttagaagtatagggtttgggggattttttttagttgggggagaygtttattggtygggaaggtagygagaattgagattygatgattttggygtagtatagaagtatgyggtaaggatygttaggagaggtgggtygyggttyggagatagtygagaattaggtygagataaagaagagygggatyggggattttggggttaaatygygtttttaggtttttyggyggtygaggggagygtatttaaggtyggygygtggagtttggyggaggtggygygggttttttttygttgtagttttagtagtygttttagagttttgggggtaygtaattaggygttatagggtagggttayggtgaggggggttttgagtgtagttggygggygtygagtttyggggttgtgattgagygtttagttggttygtttttttttyggtygtttatygtttaygt

SEQ ID NO: 7112 - DNA, 2567 bp, synthetic construct
  misc_feature 1..2567: note = Description of Artificial Sequence: Synthetic polynucleotide
  source 1..2567: mol_type = other DNA
cgtttttaacgcgggagcgtagtgtattttagtggataaattcgagaatcgtacgttgtttttcgtttttatttttgtttttttcgttcgcggttttaattcgggatttaaatgtacgagttcggtgaatgtttcggtaggagggcgagggtttagaggtagtttgtttagtaaaaacgatagttgtgttttggtgggttttgggttattttaggtagaagttagagaagttcgagaatttcggcgggttggtaaagtttgtcgagaagggtttttttggatatttttattacgggttttaggttcgaatttttttttttatttggttttggagttttagatatagataagtttcgggcgcgtcggcgggcgtatgtgcgtgtgtgtttatagcggggtggtcgtcggagttttttaagaattttagttttttcgttttagttgttcgttagttgtgagcgttcgtcgggttcggaggttattcgtaaatagttgggtcggtagttgggagtttgggaggtttttgtttagtttcggggtttcgagaaaggagaagggggagcggagtggttgtttggttgtggttttttttaatttcgtttgcgaagttttcgttgggagttcggagttttagtttttttcggtagtttcggttttcgcgttcgtcgcgtttagcggtcggcgtttcgtttcgggtttcggggaggaggcgcgtcggggtagtcggttaggatattgcgttgttggtttttagagttgcgggcgcgtttggtcggttttatttttcgggttgttggggcgggcgtcgttgtttcgatttcggacgcgcggaattttggagattcggtcgtttttcgttagggtcgcggtgttgttttaggtttcgggcgggcgttttttttcggttatcggtgtatttcgttgttcgtttgcgggaagcgaagaggggttttttgatttgtaatatagaggaaagcgtcgttttcgtttagtttggtatttacgcgtttatacgtattcggcgtcggtcgggtcgtttatttgagttttaaaagttgttgaatttatatggttacgtttcggggagcggggttttagatttggttcgtttaggttatttgcgcggcgttcgcgttcgttcgttttcgtttcgcggcgtcggttttcggttttcggttcgtcgtttttcgtcgttcgtcggtcgcggggcgtatagcgagttagagcgcggtcgcgcggggttttatgtcggtcggcgcgtcgtcgtcgttggggcgtatggtttaggttgggcggttcgcgggggcgtatatttttcggtcggggcgcggggttcgcggtttttttcgtcggcggtatagcgaaggcggtagcgaggcggggcgtgtttcggcgttgtcgcggcgtagtaaagggttggggagtcgcggtttcgtttttcggggcggcgaggagggaggtcggcggcgttgtcgtttacggtgcgtgtttttcggcgcgcggtttttgtttttagtcggagtttcgcgtcgatggggcggcgttgtttagggtttggggtgacgcgacgcggacggacgcgagtttttttcgcgttgtcgggtcggggggttttgttagaggtttcgtcgtcgatcggcgttatttaagttgttcgggggtttcgtttgagcgttcgttttgtagacggtcgcggttcggagattggtaggaggcgggtacgagaggcgcgcggggcgagggcgtcgtggagcgcggggcgtggggacgcgcggcggcggcgtcgcgcggaggaggcgcgcggggatttcggggtttcgtcgttcgcgtttatcgcgttcgtcgtagagtcgttcgcgttgtttagtcgttttttttttcgcgtttgttttttcgcgcgttcgttttcgtttttcggagtcggttttaatttcgttcgttcggttcggtttacgttattcgtttttttcgtttttcgaacgggagttcgagtttttggtttggtttcggtttttgttcgtcgttttattttgcgggggtcggggtcgtcgcgggtggtggggggcgttgtgtttagtaggggcgatagcgtaggcggggttttttgtagtttttttttttattttcggtcgcgtttcggtttttattttgcgaaaggttcgagagaggtcgtaggttaggattggatcgtcgggcgtcgtcggatggtgttgttagggtaatcggatggtacgcgaagtcgttcgaggtttcgattcggttacgggggcgtttagtggattcggagagttattttggggagggggcggtttcgaagaaggattgggtgggggcgtatggagcgggggttgcgcgaaaagttttttggggcggagttgagttacgcgggtcgcgtaggagcgtttgttcgagggtcgtttacgagggatttttttgttcggttgcgcgggtttttgcgttgatgaagttatcgcgtttcgggtcggagtttcggcgtttttgtttcgaatttagcgaagttcggttttatgtttttaattatttaacggttttttatcgtttagcgt

SEQ ID NO: 7113 - DNA, 573 bp, synthetic construct
  misc_feature 1..573: note = Description of Artificial Sequence: Synthetic polynucleotide
  source 1..573: mol_type = other DNA
cgttgttcgtcgggtcggtggcgtttatttcgtatcgcgttgtttcgttcggggtattatggtttggggttggattatgttttttttattttagtcggcgttttttatttacgcgcgttgagggtgcggtgagttgagtgcggggttaagtatgttttggcgtcgatttcgtttaggggtttaggatttggcgtttaaggggttttttggcgacggagattttcgacgtagtagcgattcgcggttgtttaagttgatttcgttcgcgtttcgagcggttttgggcgcgcggggtttcggggattggaggatttcggggggcggcgtcgcgtggtggtcggaaggggacgttaagttcggggtgggcgtcggacgtttttcgtcgcgtttgttcgttttgtttatcgcgattcggcgggtcgtgcggaagcgggggttgttgcggtttttgttgtcgttttttttgttgtcggtcggcgcgtttcgggaatcggcgtttaggtagttagggtttggagagcgcgagcgttttcggaggcgcgtggttagggaggatttcgattttttgggcgt

SEQ ID NO: 7114 - DNA, 383 bp, synthetic construct
  misc_feature 1..383: note = Description of Artificial Sequence: Synthetic polynucleotide
  source 1..383: mol_type = other DNA
cgttcgtcggtttttataggggcgaaattaggtatttatcgtgacggcgagcgtgatagcgttcggttcgattttgtttagatgtttatagaagatggagttgacgaggttgattataaagattattaattgcgtaagaaattgcggaggcgcggaaagtaaggcgcgtttatagtcgtttttttttttggaagttcgcgtttatttttgcgcggcggtcgtttcggaggcgtcgggttgggcgtgaggacgtcgtatttattattgggttcgcgagcgtcgttagtttagtcgttttttttcgtaggttcgggggtagcgtatttcgtaggttttataagtcgttacgttattcgagggttcggagtcgttatgggggtcgg

SEQ ID NO: 7115 - DNA, 853 bp, synthetic construct
  misc_feature 1..853: note = Description of Artificial Sequence: Synthetic polynucleotide
  source 1..853: mol_type = other DNA
cggcgcggggtgaggttcgggggtcgttttattgttgaggttcggtcggttggggtcgtcgttaggcgcgttggttgggtagtttttgggagatgaagcgacgtaggcgttttaggtattggttgtagagttcgatgtcgttgtgttcggcgttttttatttatagcggttttatcgttttggggtagcgttcgtagagcgttagttcgtgcgagaagtcgattatttcgtttttcgtgtcgtggatgatgagtacgggcgacgtgatttaggatattttttcgatgttgcgggaggggcgtggagcgggtgagatttagcgttcggttcgggtttcgtttcgttttcgttttcgtttcgttttcgttttcgtttgggtcgtttatttagggaaggcgtcgaagtagtaggtcgttttggtgttagggaaggcgacgcgtatgttcgaggtgagcggcgagtgtagtattatcgcggtatattcgtagcgcgaggttaggtttacggtgggtatcgtgtcgatgttttgtcggtataggatgatgttgttcgggttgatgtcgtatttggtagcgtcggagtagggttagtcgcggttttcgacgcgcgtatattttttttattagcgggcgttttcgggtttagtttcggatgcgattttttagtttttttatttagttaagttagtgggttaggtttaggttttatattagtttcgagggttatttttagtttttaatatcgcggcggtgggcgaagttagcggtttcgtttcgttttttgcgttgtcgtttattggcgttttttagttaggatttgtagggatttcgtttacggagtgtttttggggcgg

SEQ ID NO: 7116 - DNA, 1062 bp, synthetic construct
  misc_feature 1..1062: note = Description of Artificial Sequence: Synthetic polynucleotide
  source 1..1062: mol_type = other DNA
cgaggaaggaaggtgggcgtagaagttattttaggcgtgacgcgtgacgttcggggtacgggcgtcggggggcggaaagcgagggttcggttgggttagggatattcggggggggtcgaggttttgggtttcggcggagggaggggattgggagggaggttatcgtttcgggttacgcgggtgattcggcgggggagttgggggaggggcggcggggttgggttggggttttcgggtcgggattggggtcgggttagtttattttttcgttttggtcgaagcgtagttcgagcgtcgcgacgcgttttacgcgtaggaagtcgtcggggtcgcggtcgtatatttcgaatatttcgcgtaggcggcgtacggagcgtagtagagtcgcgggggcgttcgattagttcgcgtcgttcgttattcgggtcggttcgtagtttagttcggatttttcgttcgtcgcgttcgtcgtttgttcgtcgtcgttatcgtcgcgcgtttttcggggtcgttcgtttgggtttgcgtcgcgtagttttcgttcggtggcggtcgcggtcgattcgtgttagtagcggcgtcgtagttttagtcgttttggaggggaagggaggggaggggagggaaggagaagagtggggaggggaaggaggaggggtaatagggggcggggaggggaggggcgggggtcgcggcgaaaatgggagggagagggggaggcggcgggggcggcggcggcggggacgttgtagataaaaggagttcgcgttttttcgagtggggcggtttacgcggggtcggtaggcgtagcgagttgttaacggtcgcgtttttcgcgattttagttttttttcgcgtttttagttttttttcgcgttttcgagtttatttttttttttggatattcggagttatttaaaggttttgttttgtcggaggatttcgcggggtcgcgttttttttcgttattcgtgttcgttgtcgcgtttggcgtttttcgagcgtttaggatgttttgggggttttttgtattggcgcgtttcgtgattgtatttatttcgg

SEQ ID NO: 7117 - DNA, 918 bp, synthetic construct
  misc_feature 1..918: note = Description of Artificial Sequence: Synthetic polynucleotide
  source 1..918: mol_type = other DNA
cgcgaagttttcgcggcggagagcgttgcgcggggagataaagggaagggatagggatcgtagggatagggataggagcggttgtcgggttttgggttttcgatcgttattagatatgttttcgagtagtcgaggtaaagggaacggatgggaaaggaaaatagaggagcggtttagaagggcggttcgttgcggtggtggggcgcggattcgggaattcggggcgggtagggtacgggcgtattttttttttttttttttttcgttcgaggtcggtagcgtttttcgtttcgcgttatgtatatttattgtggtgatgagagttcgcgtttcgtgttcgttacggttattgtgcgtttaataaaaataaatattgtcgaggagtcgtcgcgatgcggggcggacgcgcggttcggaaaggggagggggttttaggaagagttatattcgcgagtcgggtttgggttaggggcgaggggagagcgttaagattgtttcgtcgtcgagggcgtcgatggaggtataggggttttcgtggggcgtttcgagagatatcgtgtttggtcggcgggacgtgggttggttttttattcgacggagagaagcggtatttttattttcgggtatcgggtttgggtttcgagcgggggtttttggaatataaggtagtgggggtagacgggtttgggtttattttaggttgggaaggggtttgagcggggcgttttgattggattcggttttggcggatcgaaggttttaaaagattttgtatttttaaagatttttgtagatcgttatcgtttaaggcgttttaggttcggttttatttatgggaagggtaggaaagaaagttgggagcgttttggggcgcggggtagagatagcggtgttggaggcgcgttgtggaggcggcgg

SEQ ID NO: 7118 - DNA, 865 bp, synthetic construct
  misc_feature 1..865: note = Description of Artificial Sequence: Synthetic polynucleotide
  source 1..865: mol_type = other DNA
cgagttgtgtcggttttcgcgttttttttattttttttttttttcggattttcgttttttcgcggagaggttttgtcgttttaagagtcgggttagcgattgataagtaataaacgttgagcgttcggttgcgttggagtcgttcggagttaggggtttttcggggcgtaggtaggcgtttttcggttttcgggttagtttttattttaagattttcgtttttttttcgttttgatacggtatttaggattttatttattgggtttaaattttataggttttttttatttaggttcgttttttttttgtttattcgttttcgtttttgggttttttttttggggtgttggttgggagaattaagtttcgttgtttattgatattggttttcgtttttgcggtaggggttttaaagtggttttaggtattaaggtggtgagttgtgaggggtttcggtatttgcgcggttttttcgggggttgtgcgggttgggggtatttagaagttcggtattacgtaagaatcgtgttgttagcgttttcgggggttggggagcgagatagaggttgcgttgggtttcggtggttttttggtttttttaggtagttaatattataattttttttgggagggggttcgtagaagggcgcgcgttgtttttttcgttttttaagttgtagcggggcgggtcgggagttagggttagggtttggagatttgggaggggatcggtgttagaagcgaagagttagggttagaaagttaggttaattaaggggggggcggtgcggataaagacggggtgggggttggtcggggtagttatttagtgattttatttttggttttcggcgggcgcgtacgt

SEQ ID NO: 7119 - DNA, 408 bp, synthetic construct
  misc_feature 1..408: note = Description of Artificial Sequence: Synthetic polynucleotide
  source 1..408: mol_type = other DNA
cgaagcggggagaattcggttgggttgacggagacgttatatcgcgttaggggagtaggagttttttcggagcgggaggcggggcgtcgtgtggttgcgagcgcgttttttggatgtttcggtcggcgcgggggtgggtgggcgttttcgttttatttttggtttcgggcggttagtcgcggtgtgttcggagggttttgcgagggttgtgggtggcgggcgagttttagcggcgtagtagaggaggggttttcgagcgagcgtattagggagaagggggttcgtgtaaattttaggttgacgatcgcgtacgcgtttttcgggttattagttttgtcgtttttggtggggtatatcgaggagatcgtcgtggggaatcggggatcggattgtttgatagtcgagcgt

SEQ ID NO: 7120 - DNA, 2245 bp, synthetic construct
  misc_feature 1..2245: note = Description of Artificial Sequence: Synthetic polynucleotide
  source 1..2245: mol_type = other DNA
cggattttgcggagtttcgagtttcgggtgaggcgatgtttagattggcgcgaagcggggtgtttcggtagtagcgtagaggtttattcgttttttcggtcggttgtagcgggcgcgtttatattttgtaaaattaaaacgttttggaaagcgtttggggttgtaagtgacgtttgatacgagcggcgggtcggattgtcggtttttcggtttttttttggtttatataattcgcgggtcgtttttatcgtttacgaattttagcgggtagacgttggacgtgcggtttggttatttttttaaattttagcgttcgattcgcgtcgtagggtcggtcgcgtagcgcggggatcgcgggtgtttaggttcggagaacgagcgtcgcgtttttagtcgcggtcggggaataggaattgtcgttagaggtatcgttttttttttcgagattgcgatattgattaagggttcgtaggcgcgggcggtatttattttttcggattcgtagttcgtcgcggaggggaaggggtaggacgcgtttttaagattagggcgggggcgtgcggagtcggggagttgtttgggggcgttggggcgaggtgggaatttcgttttagagtttttagtttcggggtcgaggtttgtaggaagggcgtgggaggtggaatttttttttttttaggcgtttgttcgagagtttagagcgatttttggcgcggagtcggttattcgggtgggcggattttttttttcgttaatatttcggcggtttcgttacgatttttttttttatttgagtttttttttgtttatttaattttggttttaaaggtttagagagttaggttgtttcggagtttagtttttttcgatttaagtacggtttttttagcgttttcgtttttattatatttatagtttagtttcgtttcgcgttcgttaggggtcgggggcgttagcgttcgagggatggtcggcgggttgttattttgacgagacggagttgcgggtgtttttttattttcgggttcgttcggttatcgttttgaatgttcgggttttacggatattttagagggatcggcgggcggttgcgggttcgggcggtacggggtgggcggtcgggtttttcggtcgttgtttggtgaggagatgttcggttcggcgtttttcggtttcgcggttcggttcggttcggttcggttttcgttcgttttttttcggggaagtttggtcgtcgtttttcgacgtagttcggttcgcggtcgttttttgtcggtttcgttttcgttattttttttacggttcgcgtcgtttttcgtttcggtttttcgttttttcgtttagttcgtttttttttttttttttttttttttttttttttcgttttttttcggtttttttttcgcgtttcgtttttcggtttttttttagttttttttcgtttttttcgttttttttttttttttcggttcgttttttgtgtttcgtcgttaggattttttttttttgcgttcggggtttgcggtagttttcggggcgcgttggtagtagtggcggtcgtcgtagttcggggagaagtcgggaatgggggaagggggtcgcggtaaaggattagtttttcgttcggtcgaggtcggggtttgggaagttttagggatttggggtgatttgggttagggtgtttaggtgaatttatgagggcgaggttattgggggttagggaatagggcggtttttattgagcggagtcgtcgcggaatttagtgaggttgcgatttgcgtttgggtagttttcgttttgcggttggttaggaggagtttttcgtcgtttttattttagtcgcgtcgggcgttgggttcgatttttagtatttttggtattgatgtgtttggtgcgcgttgagacgcgaacgttttgtaagatgagtttttatttattcgtttttttttttttttatttgtttattttataaattgagtgtttggttattttggtttaggtaagaggttggatttgggaattttttggatttgggagttttaggatgaaagggagacggcggtgttttgtaggataagcgggtattgaacgttgtttaggggaaagtcgggcgcgtattgcgttgtagcgcggcgaacgttgttaggagttcgcgggtagggcgtggggaggatatagcgttttttttcggtcggtcgagttttttgggtagcggtgggttttttcgttagatttcggggtcgt

SEQ ID NO: 7121 - DNA, 2972 bp, synthetic construct
  misc_feature 1..2972: note = Description of Artificial Sequence: Synthetic polynucleotide
  source 1..2972: mol_type = other DNA
cgattattttcgtttttttacgcggttttttagggaagaagcgaggcgtttgagttagattgggttggaatagtgcggtaggggttcgtttttcgcggagttgtttttttatttattatttatttagtttagttcggtcgtttacgtacgtttatttgttgttttcgttttatttttattaggcgtattagttagttcggcggttttggttatagacgtttgaatgataaagtgtttttattatcggcgcggttcgttagtcgattcgtcgggacgcgttttggttttagtttttttttttttatcgcggtttaggaagaaattcggatcgcgtatagttattttagatcgagtagtcgcgcgtcgaggcggaggcgggagtcgtaggggttgtagacggtaggtttttgtcggggtatatttttttaagcgtttaggttttttacgtttagtttttttttttttttgggttttcgcgcggggattttcgtttttgtttagattcggagtttaagtcgttgtttttttgggattcggtttttttttttcgtttttttggtttacgttcgtttattcgcgtttgagtagcgtttttaattagcggcgttagttagtagacgtgttcgcggtcgtttttaaattttcggacgtagttataggttttgatagttttagggaattggggttgagttttcgggttggggttcgtattcggatagaatttttgtttattttattcgtaggttttatcgtcgacggattttggggatagtgttaatttttttcgttttgttgggaaacgtagtcgtgatttcgagttgggatagcggttgttttttgaaaaggtgggggagtatcgagttgggaattaggtcggggagtttagttacgattttggtttaatttgttgtgagattttggttaagtcgtttaaatttttagagttttagttttcgtatttgtaaagtcggaatttggggcgtagtgttttgatgaaagatgttggcggggagagtgaagacgtttttttcgttgttagattttttagggtattcggtttatggttataaagtaggttatatttgataatttcgtcggattattcggaggattcgtcgatttttgtcgagtcggtggttcgggatatcgcgttatagaattcgaggcgttcgggcgttttcgtttcgttaggtgtttagcggtttgtatcgagagttaggagaggtttagatcggatttcgatttttcgaggcgcgggagtttacggagcgcggtgggcgcggcgttcgggtcgcgtagttaggtggggagcggcgcgtagttttagattcgtaggtaggtagcggcggattgtatttgtttcgtttcgtagcgttttttgtttgtcgtttttcgtttgcgtagttagagttgcgcgcggttaggaagggttttcgtttagtgcgtttcggcgttttgtatttcgagacgtagttatcgttagttcgggtaggggtatattcgtttcgtttttcgcgattcgttgcgttgttttaagtcgtgagaatacgcgcgtcggaggagttcgtcggtcgtgggggaatttcgggagcgggttcgtttcggcgaagtgggtattttttttttagttttagattcgtagttttaatttcgggattgggagaggtcgcgagtaggagcgcggggataggcgttggaaatgtttaagtttttgtttttttttttcgttttattgttttttagcgggtaggcgggatttcgattattttagggttcgcgtttcgttttgttttttttttttttgtttttatttttttgtcgttttcgtcgtcgttttttttttgttttttttaatttattttttaatttttttttcgttttttaattttttttttcgacgttttttttttttattgtttggtcggtttttattgtttttgtcgggttttttttgtttttagttttttcgattttttttattgttttatttcgtcgtttcgggtttttcgttttagtttagttcgttttttttatttttagttttcgtttagttttttttttttttttcgttttggttttgttttacgattttttagagatcgagatgttgaggggaaagttttttcgggatttcggtattcgagtgttttttttcgaagaatttgggtatcggagagttttatgtttttttttgaaagattttttttagtttttttatcgttttttgcggtatttgaggatcggtattcgtgtttcggttttgtttttatttttattttggagagtcgtttttgcgtttcgggaattttagattttttttcgtggtttcggtattagaggtttttttttattatttatttttagtatttgggattttaatgttttgttttgtttttttggtggcggcgttcggtttttttcggagttttgatttcgggaaagggagcgggtttttttcggttaatatttatttttagaagtagtaatagtagtaggcgcggttcgtttatggcgcggtcggtggtatttgtttttatcgttcgtttttcgcggtagcgttcgatttttagttcggttcgttttgcggattgatggggttgcgttgcgttgcgttttagcgttttttttgttcgtcggagttggtcgcggttcggttcgttttggttgcgggcgggagaggttgggtgaagttagtgttgcggtttcgttttcgtttcgtttagttcgtttattttcggaatcgcgttcgttcgttttgtcgtttcggggtgggaagtagaggtaaagggagggcgtgcggtttttcgtatttcgttgcgtttttttttgttttgttttttagagttttttatttatttcgttttggtatttagttttcggttcgcgttattgcgcgttcgtttcggatgttgtgggttcggggattagggcgtttttattgcggtttttgttttttttcggttgcggttcgt

SEQ ID NO: 7122 - DNA, 1026 bp, synthetic construct
  misc_feature 1..1026: note = Description of Artificial Sequence: Synthetic polynucleotide
  source 1..1026: mol_type = other DNA
cgatcgttcgggttcgagtagcgggggcgtttttagcggcggtaggcgcgggtgcgggggagaggagtagaaaagagagtagtttgaggggtcgagggagtcgcgttcgaggtcggcgcggtggggatcgcgggtttattattagttaagtttagttatttaattatttgtagagttgttgtaggtataggtttaggttttcgttttttattttttcgcgggtgatgcgttttgatagcggtcgcgggagcgggggtaaaggcggtagttggggcggcggcggcggtacggtcgagtgtttcggggttgtcgtcgtcgtcgtcgcgtttttttttttttttttatttttaatcgtcgtttttttttcgggtttcgggttttgtttttggttttttttttttgtcgcggttatcgtggtcgtttttttttcgggtttttttatcgaagtttcggtcgttttagtttttattagtttaggttcgggttcgggttcggattcgggttcgggttcgggttcgggttcgggtttcggtttcggttcgtcgtcgtcgtacggttcgcgaaattcgtttaggaatagttttaggaagcgtcggtaagttttttttttagggatgtagtcggttatcgttgtttatgttttagggtagatcgggaaaggggttgggggaagtttaggaagggtaaggggttgtttttgagtttagggtttcggtaagggcggttaacggtcgtatcggtacgagcgattagtattaggttgtttggagagggttttcgtaggcgtgcgcgtcgtcgagtatcgacgtgcgcggttcgggggcggagcgcgtcgtttttttcggatttggagggaaagttggtggcgggcgcgcgtagggtttagcggcggtttattttttatttttacggagagtttagtttacgttgtttagagattgtcgttatggtaatcggttttaattaagtattgtagggtttttttcgtcgagttcgcggagtttaaaggatattttattcgttcgt

SEQ ID NO: 7123 - DNA, 10207 bp, synthetic construct
  misc_feature 1..10207: note = Description of Artificial Sequence: Synthetic polynucleotide
  source 1..10207: mol_type = other DNA
cgttggtttcgtcgttagttttttgggttttttttttcgttggcgttgtcgcggggttataggttttatttgagatgttagtatgtgttgggagaggtggaacgggaagggcgcggcggtgtttgttgcgttggtcgcgggatttagttcgtttgcgtttagtttcgcggcggttttaggttcgttattttcgtcgttgtcgtcgtttgttatcgaggttagtaggtgatttatgtttatggcggagaaggcgttagggtttatggtgaattgtttagggtgtaggaagagcggttggtcggtttttagcggtttaaagaattgttgttcgtgtaagtggttggaaaaggttaggtcgggtaggtgttcggcgtttaggggggacgtattgtttgtttgtattattagcggcgttaggttttgttttttgttttcggtcgtttttttgcgtttttcgtttttttttcgagtttcggcgcgttttttttttaggttttttaggtcgaacgggtcgttttcgtcgttttcggtcggttttttgtttttttcgggattacgtcgttttcgggcgcgttcgggttcggttaagcgagtggggttggcgttgtttggagtcgggttgcggtttagcggcgttttcgtacgtttttcgtttaatcgtttaggtttcgggtcgttgttcgcggcgtacgatttttttttagttgcggggagagggcgcgcggattataggggtttgggcggaggtcgacgagtaggattagggatattcgggaagggttgttttcggggaggttgagtcggaggagttgttggagtcgggtaaagggtagttgtaggttatttaatttaagattttagatttatagtggaaggaatttagttttggagaggaaattttatagttatagaattatacggcgtttaaggggttaggttcggagttcggtcggattttttggttatcggggatcgttttcgtaggggagtttcgggacggaaattttattttagatattcgtcgacgttttttttttggttttttaggttagcgggtggtttagtaaaagattagtttagcgatttgaggatttttcgtcgttatttttttgtttttttttcggttcgatttttatttcgggttcggtgtaggcgtagcggattgggcgttgcgttcggggaggtgggtggttttcgcgcggggggagggtcgtacgacgaggcgtttgatttcgcgttatcgcgttcgggtttgtagtgtttttcgtataagcgtagagacggtagcgttagttgttttttggggatgagcggatgaattaggttagcggggagtttatttttttattttttttgttcgttgttttcgcgggtattcgttatagggttgttgttttcggttttttattttttttttcgtcggtcgttttcggtgtttcggaagtttttggtaaacgggttgttgtcgatttttagttgtgtgatttgcggggattaagggggcggcgttaagttaggtcgtggtttttttagcgtggtcggtggtatttcgaggttagcgggtgttggtcgtagagggaagattcggggagcgtttatttggtatttattcgtttgggatgggacgtttcgagttgaggtcggtgggagggtttcgcggaaagcgacggggtttgttttttaaaagttttattcgaggaattatttttagataggtttagatagttttatataggtttaaagtagtgttatagtgtcggaattagtttaagtatgtatattcgttcgcgggtttgcgtaagttaaacgatttcgtattcgagtaggcgcgaatagagattgtagtttatacgtaaggttgtaggtatatataaagttaaattatatttacgggttcgtatatacgtaagtgtgtatagatataataaacgtttacggaattaaacgaatttatatgtttttataggtatttaatatattttaaacggggtacgtatagtttagcgtatattttggtttataaagttataacgatcggtacggatattcgtatttttttttttattcgatagtggcgtataagggtataggtttagaggggtgatgttttgttttattagaataagggtggagaagtcgtaagtagaaaaagttttttgattggaaggtaattttttaagcgttttttaaggggtttggggtttagattgatttagagtagtagttaggagtgttttggggggttgtgttatttgttttattttttggtttttttcgagagagtgaaaattgggtttcgggttttgagtatcggtagagtttgggtagattgtttcgggcgttttttttttatttatatttttatttttgagttaagaaataaacgaataaaatgtaaaaatgttagcgcgggttcggagttttagttaattgttaagtaaatatttttattagaacgacggtttagttgttcgttcgttttaggggagtttgtgtgtgcgcgcggtgggattgagagggcgttttgaggattttcgtgagtgttgcgcgtatggatgcgaggttcggtgttcgggggcgggtcgtaagagcgcggatttcgtgtagggggtttcgaggggcgatgaacggacggttgggtttgtacgtgttgaggggcgttagtgtaggggtttagtttatcgttcgtcgcgcgtattttgttattttggtaggtagtgacggcgatgaagtcggttttcgggaatacgtaggtgcggaaggtgttgtaaggtagttttaggatgtcgttggttcgtattatgtggaagcgcggttggtatttgtgtatggagtttaggatggtttgcggggagggtgggggttagtcggtagttattagtttcggttcgagtttttttattttttgggtatttgatttttttttttttattttttttttttttttttttttttttttttttttttttttttttatcggtttttttttttttttatttttttttgtttttgttttttttttatttttattttttttttttttattttttttttcgtttttttttttttatagttttttttttttttgttattaaaaaaaattttttagttggaaatagaaatgagatagagtaaaaataaaataaaataaaaaataaaataaaaaaattaattaaaaaataatttttttttataaaagaaatttaaataaaataaaataaaatagagttttataattttatttttaatattttttttttttttggtattggtaaattttttaattttataaagaggagattttaattttcgggggtttattaattgttttattttagaatgggtagttttttttattttatgaaatattattttcgttcgttggggttttgtttaggtataaatggagagaatttttaaattttttttttttagttgggtatttgtttgtgggaggagggaaaggttttagggaggttgggggggtgggtggggagggtggtttaatttttaaattttttagttttgggggagggttagggacgcgggttttggtagaagggtgatggataagttgaggttatgggtaggttttttaagttcggtatttataggttaagagtagggtgattttcgtggtttagtattgtagatttagttttggtagtatttgtttttttattgacggtataagggattttttacggtttgaggaattgagattgtgagttgttagttattgattttattattttttaggtttgtaaaggagagcgttggggtttaggtttaggtttagtttacgtagattatagggtagtgattcgggtaggggtattttgggggtttgtttagcgtttttttttgggagattttgtcgttttgtttttttgtttagttgtagtgttgggttaataagtttttgtatcgtttttattttgttttaatatttacgaagtcgtgtttgttagagatgttgttggttagttttagtttgtggaaggttataggtttagttatttattgttttttcgtggttgggttgtttgggtggatgtatatgcgtttgggtattttagggtcggttttgttcgttattatttagcgcgagttgtggaatttatagcggtaatcgttagcggttataatgtttattagtaggatatatttggtttttttgtttaggtcgttgattcgtattttgaagggggggaatattcgtttgggagggagggaagggaggagattttattggaatcggttgttttaggttttaggattttattttttttttatttattttttttcgttgcgtatatcgttgtcgtttggttgttttttttgtggtcggttgttttgtttttttattattgttcggacgattttatttgtggttgttgtttttaggagattttatttttgtttgttagatttttttttaaatagttttttttaggttttgtgtttagatttggggattttttttttttttgatttgagatgaaagttgatgtttaggagagaagtttaggttttttagaaatattttcgtttttttttaattttttcgaaattcgtttaggggaaatatttatttgggacggaagtttttagaaataaatttggagggtgtttgtattgggaattgggttatagagtttgataagatattttggtcgtgtagttcgggggaagagggtgaattcgaggtttggattttcggtggttgagtcgaagggtggaggggtcggggttgtggttttttttaggttttaaggtttggggcggcggatgcgtttagggttcggatgttcgcggtggagaaagggtttttagttcggtgaggcggagggttcggttgattcggggttcgttgttaggaatcgagtaattagcgtggggttagttgggtttaggttttattaggggtttcggggtcggagtagagtttgagagaggttgaatttttttcgagttcggagacggattcggacgtagaagagcgagagcgcggggcggaggagatcgttagggttaagtcgcggggttttttttgcgttgggatttagaacggttggggttattttttagtagtatgttttcgttttattttattcggaggattttagcgtttttgttttaaaaaaaaatcgtttcggtgttaaacgagaaaagttaatttggttgttcgtgggagcgaagcgtggcgttagggttagaatttggagtcgggagtcgggagtcgggagtttttagttttgttttgattcgtgtagtttcgtgttttagttcgttcgttcgttcgcgcgttttttagtcggtcggtagttttatttttcggatttggtgatgattattttcgtgtttagtttgtggaattggttttatagttttttggtttttagcgttattttggggtcgttttttatttcgttttcgggttttaggtttttgagggagcgtagatgcgcggcgggcgggtgcgggtttagtgtcgagacgtgtagtttcgtttcggtcgttgttgtcgtcgtcgtcgtcgcggtcgtcgttttcgttaggttcgggtcgggtagcggtttggttagcgcgtcgggcggtagcgcgagtgtcgggaagaaggagggttgcgtcgtcgttagaaaggcggatatggggaagtcggcgggtcgtggcgcgtggaacgggtggtaagttatggcgttggtcgttagcgtcggtttttttatcgggatattcggtttaggcgttcgggggtcggggtcggggtcgggggcgcgcggttcggattttcggttcgggcggcggcgcgcgcggtggacggacgattcgggtggcgggcgtagtagttgtttttcggggtttttcgttcggcgtatcgtaaggggtattcggttttgtgcgcgggggcggcgggggttttgcgcggggtcgggttgggtcgggttgagttggttcgtttcggcgtcggggattacgcgcgattggttagattttgtcgtgatttttggaaaattgtgattattttatatgttttgtttagttcggattttttgcgttaacgagttaggttttttttgattgttgattttacgttttttggattaattgtgggttttcgggggcggggttttgatagtttaggttaagtttcggtcgggagggggggtttgggagaaggtgtcggaagttttagtagtaagaaaatatgttaatagaataaaatattaattaatgacgggtcgtcgggtttcgagatttttttttttgtttcggtttttatcgttcgttcgcgtttgcggttgtttgcgtcggattggagagcgcggagggtcgatttgattcgtcgaaagggtttgaggcgaggggagttcgggtttcggggttttggggaaggattcgtagtcgtacgtcggttttaagtgtaaagtattgatacgatttcgagcggagagggggcgttttttttttttcgcgtttagaggttcggtcgttttggttcgagttttagtttggttttcgatttagtttcgggtcgtggcgtcgtttgggggtttttgcgtttcggaaagagatagtaggtattggaaagcgaggtcggtgggcgggcgagtcgggaggttcgggcggtcgaggttcgggagcggattttaggtggcgggagttggtgagtggagttatggtcgagttttgttggggtcggcgcgggcgggagcgggacgcggttttgcgttggggaaacgcggggattttttattcgcgttcgtttttatcggaagattcggaaggaatttggagtttttcgtaggttcgggtttcgttttgagttttttagcggtcgggaggagcggattttcggggttaggaaggtgagcgtatttttcgttgagtatagggcggtatcgcgcgggcggatttcggattttttattcgcgatttaacgaattttcgttttattcggtatcggagacgaaagtttttttttttcgaaatatcggtttttttttttcgttttgttaattatttttttagtttttttttatttttcggaagcgtacgttttttaagttaaggagtgttgagtaacgcgtgagggagttggggtgtttgcgagtatttgtgattgaagtttttttttttgtgattagttttcgttttttgtttttcggtagttttagttttttttttatgaagtgatggtgtgtgtgtgtgtgtgtgtgtgtgtgtgtgtgtgtgtgtgtgtgtcgggtttcgtgtggtgttttttgtgcgtagcgagagttataatttaaggtgtgtacggggagagtgaagcgattacgtatttgtttttaatcgggttcgggcgcgaatatttaggttgatttttgaaggtcgttttttgaaggaaaagatagagtatgtattagttacgggtgatatttttattcgtataatcgcgtggtgggcgcgtatatttaatattgatttatgtaggcgttcgtttattgcgtatatcggtcgtagggtatttcgttgttgaacgttgggagtagcgtttgaaggtcggattttttttggtagtgcggattcgggatcggcggaagtagtatggtttttgcgatcgttatttttatttttcggggtcgattttagggtttttataattttttattatcgtatatgtgagcgtcgtttttatagggttttttttacgatttcgtttttggttaggtcgtattttttttagtattttttttttggttagaacgaatttttgatttcgagttgcgtagtttacgtagacggggtaggatttattgtagttttttataggtaaatatttgttggttttattttaggcgagatgtggtttttcggggagggattcgttgtggatacgtttgcgtagtcggtgaggtgattagataataattagggtagttttttttagtcgggaatttaggtatcggtttaggaattcgtgaatatattcgtaaagtcgcgcgcgcgcgcgcgcgcgtgtgtgtgtgtgtgtgtgtgtgtgtgtgtgtagatatatatttttgtttttgtaagagtatgtgtatatttaaatgtgtgcgttttagatattagtttattttattagtttatttatagttggtttaggggttcgaggtttgaagagtttgaaatatttaggtttgggttatttgatcgagaaatttggcggcgatagtgtagcggttgtatttggggacggcgattttatttatagtggtatcgattttttttttggtttttcggggttttgttcgggttaggattttattattcgtttcgtttcgcggtttcgcgattattttgaggttttgttgtagtcgttttgaagagtttgtagcgatttttagttaaattttttagttaggaatgttcgaggtttatcgaaagttggcgttggggaggtttgggaggttttggagcggcgtcgtgaggttttcgttgggttttttttttatttaggtcggttttttttttttttttaggaatttttttttttggcggagtttcgggggtcgagtgtgcgtgtttttttaagaggtttcggggggcgtttcgcgggtcgttcggggttggagggggagggcgcgggcgggggcggttggcgttaggcggtcgaggttttataataaagtttcggtttttgttatttcgtatcggttaggtttcgtagataggcgggggacgcgcgttcggtcgtttttttttttcgtaggcggttttcggttagggcgtcgggcgggtttgggttggtggcgcgcggtttgtgcgtttcgcgtttttcgtaatagtgaaatggggcgggagcggggacggtttgggtcgggtggggtcgcggttttgagtttggcgtggttgttttttcgtttttcggtttcgttatttttcgtagggttaaggggtattgttgggatttttttcgggttgagtttttaggtggtagggggttttcgtcgtttttttttttgtgtgtagggtcggggttgcgtgatttcgcgggtagtgggtagtaggaagttcgggttgtgcggtcgcgtggtagagcggacgacggatttgcgttcgagtgacggggcgcgggttgtagattggtttaagttttcggtggtagacgaatgtgtttaggttaagtttaggggacgtgtgtggtttcgtgttatgggttcgttgtgagggtgtcgttaggtcgtcgattattgtttggacgtgaggagtgtggtggtgaaggatattttttggatagagtcgttttttattacggttttttcgtcggatcgtatttttcggagttttggcgttagttagttcggtttagcggtcggatcgggttttttcgcggttttaggtttggttggggtgggggtcgcggtttcggtgattttagttcgtagcggttcggttcgtttcgtttatttaaataaattgtcgttgataggcgcgtagtttttttggagtcgtcgttttttcgtcgtttttttttcgttttaattatttcgcgtagggtggggttaattggttgggatggggcgggggacgcggggagagcgggcggttcgatttttttttggtcgcggggtggttcggggaagcgttttcgtagttacggtttgtgtggtttcgtttttggttttttcgggggatgcgagggtaaggtttagtttggtagttgtgggttttggaagggcgtcgttttgtatttaagggcgagattacgcggtcgagaattaaggtcgtatttcggatggatttcgggtgattttttcggagttttggggaattttttaattcggggagttgtagacgatttattggtttcgggtcgcggtttcgcgggtggtcgttgtacgtttgagatatttggttcgtagaagttaggtgtacgtttgtgtatcgtcgtgcgttggatgtgtatggaggcgagatcgtggttatggatgtttgggattacgggagcgtgaacggggcgatcgattgagtgatttgagagacggggtagagcgtaggaaggatttttaggacgggtttatttgcgacgggcggcggtgggggagtggggggtttgtcggcgcgtttataggttttgggttcgcgttcggaaacgttttcgtagggagcgggtcgggatttttcggagtagtacggtgacggcgtgttataattcgggttttagttgtgtcgttttcgt

SEQ ID NO: 7124 - DNA, 2392 bp, synthetic construct
  misc_feature 1..2392: note = Description of Artificial Sequence: Synthetic polynucleotide
  source 1..2392: mol_type = other DNA
cgaggcgtatttgtttcgagtgttaggtttggggacgcggtttcggagaggggagaggggttcgggaatgcggcgggaggggtttcgaggggtagcgggtcgggtcgggtcggggcggaggtggcgggtttcggcggggcgggttttcgcgggcggcggtgagagttttcgtatagtcggttgcgagttttgggagtaggaggcgcggtgcgtagtttagttcgggacggagtcgggcgtcgtgcgagtttcgggagggtcgcggggcgtaggggcgggtcggggttagcggattaggtcgcgttattcgttttcgttttcgttttgtcgcgttcgggtttcggcgttcgcggagttgagattgagcgcgttagtttttcggggtcgaggttttgggatagatatcgcgagggaggcggtcggcgcgggttttcgtcgcgggcgtagcgtttttttttttcggtaagtggcgagcggcgggcgaggggtattaatttcgtcgttaatttggggttgggttttcgcggcgcgcgagtaaggacggcggagatagaggcgggatattcggggggttggatttacgtaggattttcggggtttaaggagggggcggttggaggattcggatttttaagaatttggttttgggttttgattcgggcggtcggagagaaggcgaagaagaggtcgagtagataggcgcgcggcggacgcgagagaaggacgcgggcgaagcgtttaagacgttcgtttttagggtcgtcgagttttttttttttttcgtttggcgcggtagtatcgcgggattaggggagtttgggttgtcgcggatttaaattgttgttgttggaagtcgtcggggcggagagcggggaatagggtcgggagtgggggtcggggttgggatttattagagcgaggggttggaaaggagtcgagaaggtgaaagggggttgtgcggttttttagtttagtgttttagtttttttaggtttgttgggtatttgttgcgtattcgtttcggcgtttagattttttttttcgtcgcgagtttcgttttttttttttttagttttgttttattttttttgttttagtttagtttttttttttttgcgatttgggagaatcggagtgggtttttagagtagtggtattttgtagatgttggttcgtgttcggttttcgggtttttagagcgtaaagggaagggtaggtagagagggtattgggcgagtaagatttggcgttgggttttggttgcgtattagtcgtttgcgtcggtttttgggggtttcgtttaggattttcgacggcggggaggggaagtttcgagttttttgttttttgtttacgcgggtagggcggggatacgcggagtaaaggtattcggtaatttgaatttttaggtgcgtttcgcgattttgtaaggagttgttgggtgagtaagacgggaattttcgttaggttttgatgtttattttattcgtttattcggttttttagttttggtcgtttaaggggatttttggttcggttttttagttttcggatggtggcgttattttagtttagtttttgatttcgggttataggaaaatcgaggaaagatatttatttggggagggtattatttcgttggttgtattttagagttcgtttaggttttggcggtgttagtgattttgagtttgtttttaaattttcgaagaataagagcgtgttaggggtaggtaggtaggttcgggatatttgggttcgtttagggttttcgggcgggtttgggatggtattggggtcgtttgttaggttggtttggtttttttattgcgggattcggggttacgatttagtttgggggagtgggggtgggggtttcggagtcgcggacgtcggcggggggtagcgtggggcggggggcgtcgggtgcgtggtgtttagtttggtcgttaggaggcgtggcgcgggttttcgttcggagtcgtcgtcgtcgtcgtcgtcgtcgtatcgcgagtgtttttgagtcgcgggtgacggtggttttcgttgttcgcgtttttttttttcgcggggggagtttgatgttacgttttttatgaattatttatcgtcggtttaaaaatatttcgaattttatagttcgagtgtaagagattgttgcggaggggagggggcggggcgtttcggtggttagggggagttcgggcggggttcgcggagacgggggtcgtagttttggaggagtaagaatttcgtgtttttagtagtggggtaagttagaacggcggtttttttttttggcgtttgggttcgggttttggttgggtaaaagggagggagggaaattcgacggtaaaggaggggcggtttatcggaagggtagggggttcgg

SEQ ID NO: 7125 - DNA, 564 bp, synthetic construct
  misc_feature 1..564: note = Description of Artificial Sequence: Synthetic polynucleotide
  source 1..564: mol_type = other DNA
cgtttttaaatcgtttatttgcgacggtttcgcgagcgtgcgtagtttagtttttttcggacgttttcgttttcgttcgggtatatcgtgtttcgtatcgaggtagagaggggtacgcggattttagtttttgcgagtttttttgttcgtcgttattttatatttcgtattgttttagttgtcgttttagaagatgtatcgtttggcgcgtaaagcggtgtacggtttttagttcgcgcgtagtagtttggaggggcgttagagttttcgttttattttttggcggtattgttttcgggtagttttttttttttttttttttttttatgtttttattttattttgggacgtttttaggatcgaagaggtaggagggggatcgcgaggggaaggcgcggagttggggaaggaggagtagcgtcgggcgtagtagtttagggcggttcgggaggttgcgcggcgttcgcggatttacgttttaggatagaggacgtagtttcgagtatcgtacgtggtttttagattttttttatttttattttggcgattacgagagggggtcgg

SEQ ID NO: 7126 - DNA, 3277 bp, synthetic construct
  misc_feature 1..3277: note = Description of Artificial Sequence: Synthetic polynucleotide
  source 1..3277: mol_type = other DNA
cgcggtatggtggttttcgcgtgtgtgtgtagcgtttgtaggtgtttcgtttagcgttttttgtataatagttgtaggttggattcgagggtttttttttttggggttttatagtgtttagaggtttcgttagttttagatatcgttttaggtttttttttttttttgacgtcgtttattttttttttttgcggaagggggatacgtttttttgtgtcgaggtgttaggtcgttgagatttgttgttttggaggaaaagttaggtagggtttttggttttgggcggttaggaaggttttacggttgttggggatagagacgcggggttaggttaagggttttcgtttcgtttaaatagtttgttttgggtagggtagggtttttttttcgcgttcgcgcgttttcggttgggtacggttcggttttaggtttgacgggcgcggtttttttattggacgcgtgcgggagggcggcgaggttaaagcgttggggttaggagggtattcgtttagcggttttttacgggagttggggtagaagacgtcgcgatttcgcgcgggtaatttttttcgaggcgcgttttagttcgtggcgttgtcggcgtagatttcgcgtggggatcggcgaggttaattttttttgcggttcggggtcggtagagtacgtaaggggtcgcgggtcgcgtgggtttgggcgcgtcgtggtgggtaagcggggttagcggagcgggaattcgtatatttttcgagcggagtcgaggataggttcgtgcgggtcgcggggtttttttggcgttaggaagcggcggtcgaaggagataacgagaacgtagtttcggtttagggaggtttaaaagttgagatgttgaacgtagacggcgggcgttcgggggttggggggcgggtagaggtcgttattttttaaaaaggtttttatcgagtcggtttttgttttcgttcgaggggcggacgttcgatttcggtattcgggattgttcgtgggtttttgttggttggggatttttagttttcggttgcgcgtagggaaaggttgtagaacgtagagattagagaagtcgggggcggcggggaggggtcggggggttacggttgtagttcggtttcgtagtttcggagttttagtttttttttttgtattacgggagcgtggacggagggattttcgaggttttgatcgttttgatagtttcggggcggggcggggcggggcggttgcgttagttttggttttgagtttttagttcggcgtcggaattcggatcgcgatttcgggagtcgagtttcgcggtttagatgaaggcgcgagtgcgcgggtgtcgggtggggtgtttgagcgagagcggagttttttaggtggacgtttttagttattttcgggattttttttgttggtttttgggtttgagaagtgggcgcggttggatagacgggaaatagttttttacgtataggtggatattcggggatatcgggcgcgcgcggcgtttggtaaggggaagttgttggagacgcgggcggttgttttcgcggggttttttttcgaagcgtcgttgcgaacgtttagtttcggcgacgtcgtttgttcgcgatcgggtcggcgtcgcggataggaaaggttcgattagttaggtttgttttcgagaagtttttagcgtttcgttcgtacggggtggggattgatagtttttcggggacggggtcgggtttatagagttcgggagttgggggaggggaggcgtcgggggtttcgattcgtgggaagtttttgtatttaggttgttcggcggttttttaatagtatacggatatttaagaaacgcggggcggttcggtgattttcgttttggatttagtggcgtcgcgaggttttatttcgagtcgttgattatcgggtattcgggtgttgacgatttgggtttttgggtatttagttcggttttaaacgatttcggtttaagggtgtttagtgtagttaggagggtcgaatcgaattttatttttcggacgcggtggtttttcgttcgtttggagtttcgtcggaggttcggggatattacgtaggtggtttattttcgagttcggggtcggagttcgatttttttttttttgagttttcggagttttcggggtagtagcgtcggtttaggcgggggcgggggaggagggggtcgcggtagtttttagaagggcgggggggacgcgagcggaggtagtttcggtggcgcgttcgtgagattttcgtcgcgtcgcgggttcgggtcgcggataattaaagcgggatttttttttcgttgacgtcggcggttcgaggtttttttcgcggcggtataaaaggcgcgggtttcgtagcgtaggcggtagtgggggtttgatagcgcggcggtgtggatcgcgcggtcgaagagcgcggcgtttagagcgcgggtcgttcgcggagttatagttcgagtcgggttttagtcggagtcgagttttagtcgagtcgagtcgggttcggagcgttcggtgttcgtagttatgtcggtcggtcgcgtcgcgcgtatttgtgcgttgttcgttttttgttttttgggcgtcggggtttaggatttcgggtcgacgcgttttatttgtatttcggtgttcgtggacgtcgatatgtgcgtcgcgttcgtggtcgtcggcggcgtcgaggagtttcggagtagcgtgttgtagtttcgcgagacggtgttgtagtagaaggagattattttgagttagaaggagattattcgcgagttgatcgttaagttgggtcgttgcgagagttagagtacgttggatttcggagtcggcgaggttcgggcgggcggcggtcgtaagtagttcggttcgggtaagaatattatgggcgatttgtttcggatatcggtcgtcgagacgtttagttaattcgggtaaattttgtaatcgtttaaaattcgtttggagaatttcgaggttcgcgcgcgttttcggtttcggtttttttttcggttcgttcgtttttttgtttttttttatttcgttttttattcggttaggtatttttcgttttcgttttagtcgcgcgggtgttcggtcggtgttttttcgcgtttgcgaggtttcgcggcggttattcgttttagttttttgttaggtcgttttcgtagtcgtttagaggggatcgcgtcgcgggttttttagtacggttttcgcgtttcgtttaacggtgtggtttttttcgtttttgtatttcgtagtagtatagtcgt

SEQ ID NO: 7127 - DNA, 5692 bp, synthetic construct
  misc_feature 1..5692: note = Description of Artificial Sequence: Synthetic polynucleotide
  source 1..5692: mol_type = other DNA
cggacgttaattttacgaattttgttcgggttgggggtttgggacgttttttttggattttaggattcgtttgtacggagttatagaatatagcgttatcgttcgttcgagtttaggtattttttttttttttcggggtttgcgtcgtttgtacgttttttcgtagattttcgcggaaacgtgtatagtagggttttgaatagaatttaggttgttttgagtcgaatttttttcggttcggggttgatcgtgtttatttaagtcgtcgtttcgtttttcgtattttcgacgcggggttatttttttttatttttttttttatttaggcgtttttttcgatagcggagggagagttaaaaatttataattcggcggcgggattttgtcggttttagttgggcgatttgggcgtattcgtcggcgacgtagtttcgggttttagcgtatagaattcggtcgttcgtagtttttttcgttagttacgttttttgggttttttattggttaagtcgttcgcgttttcgcgtgattttattggtttgcgtcgggggtttagataaagggagtagtcgcggagggcggtgattgggcggggttgggggcgggtcgggcgggcgcgcgggtcgggcgggagtcgcgcgttggagaggcggggagtacggcgttgggggaggggcgcggtgtttcgggttcgggatcgggaggcgcgggtgtgcggcgaggttcgggtgttttttttcgtgggggcggggcggcgggggcggggcggttttacgtgggtggggttgggcgtttcggagggcggcggtcgcggggcgcggggcgttgggatttcgttcgttttttcgttttgtatttttttcgtttcggggtttttgttcggacggcggtcgtcgtcgtttcgtttttttcgagggtttcgcgttcgttttcgtagttcggtcgggaatttgggaattcggacgtagaaggacgcgttcgagttaggattcgtcgcggggtttttttggtgggtcgtggtcggggagaggacgcgggttttggcggtcgaagacggacgtagcgttcggaaaggcgagttaggttttcggtttttggcgttttttgtgagttggttcggcggggtgcgtcgtcggggagggagggattggtcgtggggcgagtagtcgggcggggagtggtttttgggggttttcgttagcggagggttcgcgaggtcgttttcggagcgtcgttaggtacgtgcgttttttttgtttttcgcgtttttagagcgtattttcggtagggaacgaataaaatttcggttggtgtgtaagagtttttcgttgtaaacgtgtttttttgcgggattcggggagtcgtcgaacgcggggtagatttcggtttaaagtgtttttgtagtttttattagggatttttttttatttttattttgggttcggagcgggtgttagtttggaaatgtttgttttttttgtagtttcgattgaattcgtttaggaggaggtgcgttttgtttcggttttagagttgggaggatcgggttttgtttttcgaagtttttttatttcgtttttttggaaaatgcggattttttttagtagggatgtttagttttgagggggttgttttcggaggaagtttgggttgggaaagttcgatattggttttaatttggcgggtagttttttttgttttggagtagttttttttagttttcggagtttcggatttatacggttaggagacgtttatgggttttgggggtattttgcggggttcgaggaggtcgggtggtttgggcggggttcgaggaggtcgggtggtttgagcggggttcgaggaggtcgggtggtttgagcggggttcgaggaggtcgggtggtttgagcgggttttttttttttttttatgtgtacgttaaataaaagaattttcgaatagttttggggatagaatttttcggaatgtgagtttgtttttttcgtttttttttttaggaaggataggggttttttaataaaggtaaggttgcggttggagcgggttgaagggaaggagcgttgttattttggggtatttgatgaaagagaaatttattttttttttttttttttaaaattagaggtagttgagttagagttttttttatttttttatttgattaatggggttttatacgatgtttgtatttggggtgattgggtttgaagatttttagaagtgggaaaggattttgtttgtgtgggagattggaaagttggtttttattcggtgggggatagaatttttatggagtgaaatggattttaggttattttgcggaagattggaaatttaaggatttgacgggggggcggtgattttgtgtttttttttttttttttttttttttttttagtttagaataaagggcggaggcgaaggaggtaagatgggtggtgggttcggaagtcggagtcgaaagaagaatgttataaaagttttttattttttagttttcgcgtatttttaaatagtttattagagtttgggtggggataaagtgaatgatcgtttagagtcgggtttggtatttatggttcggttttcggcgcgggcgttcggagttcgggggaagtttttttagttcgttttaagtcgcggttggttagggcgagagaggtcggggtatagcgcgcggttttttttgtcgttttcgaggatcgagattcggggttcgcggttttttgattgcgtaagttttttcgttttttttgtttttttttttttttcgtcgaaagacgttcggagcgtatattcgtttgtattaaagttagggattttattttttttaaaataaaataataagttataaaggtttttgattttagtggaaaaggcgtcgtagatttatggtttttttaaatttttatattttaattatttttgtttttagtttatttatgggtggtgattaataaaatgattttttattttgaattttttttttaatataaaaaatgtaagtttcgttttttttttattcgtttggatggatttttttcgtgcgggaagtaaagaaatttcgtttttttcggttttatcggtttagggttgagttgttgttttcggttgagcgaattcggtttgtcgtagtattttttaagtattttcgtttcgtatatttttaattgtaatttaagggagaatatttttttcgtttttttttcgtttaagggtatttgtagggatttttttttagaagttttgtcgtgggtttagcggttagaagggttatttcgtagagcgggttttcgatagttttagttcggttattttttaaattgcgtttttttgggtttcgtattgggcgcgagtttggggcgtttaagggtttttattgaggaggaaggttgtcggatcgagttttcgttatcgtttggcgtttttattttttatttttttttttttgttcgttttttcggacgtcgatttggagatggtaggaaaaaaaaaataattagatggaaattaaagattagtttgggtgcgcgggcggttttcgtcgggtcgggttatgttcggttcgcgttttataaatttttttcgcgacgtgataatagtcgcggtttcgtttttttgggaatttaggaacgtatcgatttttttcgtcgttcgcgtaagtttttttttcgggagcgagaacggagagtttttggtgattttgatttttggttagcgtaggacgttttaggttttagttagggtattatgtataggagtggaggaaggtggaagggaaggggtttaatttttatttaagaaagcgtagtaaatatttatatttcgtaggttaaattaaatatattattaggggtcgtattttttttttttcgcgtcgtttgagaagggggcggaaggaaggacggagaagggtgaggggcggattaatttttttttggcgatttttttgtttggttcggatattgttgagtcgagtggggcgtttaggagttagcgaggggttttcgaggcggtttcggttcggtttaggtgtgcgggtcgcggtggggcgtaggttcgtagcggagttacgagattttcgcgttttcggttgacgttcgggcgtttagggtttgcggttttacgtgcgatttattcgggagttgcgttttagacgtttcgtggagcgggggagaatttgaaggaagtcgtggcgcgtttagatattttaaaaattcgaattaattgggaaaataggaagggcgtttttaaacgcggagaagatatttcggggtggggaaggatgttttttaaaaattatatttttttgttgtggcggttgtttttgattttttttattattaaaagaaatgttgttacgtttaatttttgttgttatgagatatggagggggtagtttagtattttgaagtaatttgataagtttttaagtagtaaattcgaaagggaggtcggcggtttaggtatagtttttttgtaatttgaatttataatgaaagtatttttttttatggatataatagattagattttataatttaatttatcggaatggtttcgtttaagggagtttcggttgattttattacgttaagttaaattggatgtttgtggttttaacgaaaagcgatcgtgatataaaatatataatttttaaagtaaaaaattagcgggttggattttgtttttttttttatttttgttttttatttttaattttttagtgtgggaaatacggataattatttgtgtgtgttggtttttatcggggagataggcgttttgggtttttttttcggcgggttagaggtttcgtcggttagtgcgtacgcggcgtcggttttcgattaaggtttcggttcgttttgttggttcgtttgaaacgtcgatatttttagcgtacgattcggggtttcgggggtatttatggggttcgaagtttttgtttgtcggcggcgatcggatagttttttcgggcgcgtagggtagaggaagcgttttcgaaagttttcgtacgtatttacgagtcggttttgcgcgggtatagcggtagtcgcggcgggatattcggtagggttttcggcgttattttgtgttaaaaattgcgttttcggagattcgggtatcgtcggcgtcggtagttagagcgggatttagtttttatcgcgttttttattggagtttttttcggtttttcggcgagtgcggttcgtggggagtgggcgtcggcgcgaggaagtttttcggttcgggcgatttcggtttttgagcggtttttttttacgtcgtcgttcgttaggtcgacggaggatcggggcggggacgggggttttagcggtttattttgttgttatttttgatttattttttagtaacggcgcgtttttttttcggttttttcgcgaggtttgttgaagacggatttagttttcgtagagttggggaaggacggatggacggaaggtttagcgcggtttatttttttttttcgtcgtttttcggttggtaggagtcgtagcgatagtttcggggagcggggtttgttttaagatttttttcgcggtatcgggagttaggcgtggtcggaggtatcgcggttgttttacgtggttttcgtcggtcgttatttcgcgcggggaggacgcgtgcgtgcggtgcgtggtcggcgggttgcggggacgcgt

SEQ ID NO: 7128 - DNA, 7937 bp, synthetic construct
  misc_feature 1..7937: note = Description of Artificial Sequence: Synthetic polynucleotide
  source 1..7937: mol_type = other DNA
cggcgggtttttagcgtagttttgcgcgtttttttcgaatttattcgcgtcgtttggtgatttttagggttttaggcgtggtagttgtttttattttgatttttttcgatatttatattaaagttatcgggaagagggttgttttggaggtttgggttcgttttgttaaggattgattttttcgggtagggagttagaggggatcgttcgagaggattcgtttttgcgaggtttagtacggcgttttacgttttttttttggagtaaattcgtttcgttttttttttggagtaaattcgtcgtattttcgtttgtatcgaaattttgagcgtcgtttcgcgttatttttagttcgcgttcgcgttgttttttttttcgggtcgtaggttgagaggttgggtcgtattttggttacgttttgttcggttttagcgggatattagaggtattcgttaaggtaaatgtatttttgtaaatttattttcgttttgatattttaaggttttatatagaaataggatttgttcgttttatattagtagtttttattaacgttcgttcggcgtatatattattttaattcgcgaggtcgcggcgtattttggtttttttttttcgttataatagtcgttttgttttcgtagaaagcgtttcgttgttttagtttcggaacgttttagggaggtgaatgtagaatgtagaaaagaggttttcgtggaatttagatttgtaggagggggcgggggagggtggcgaggcgcggaaaggttttaattttagtcggtttcggggttgttttttcgagattttcgggggagggtggttagggaagggtttttttaagtcgcggcgacgtagtttggggggttggcgggacgcgcggtttcgtttagcgtttaggtagttatcgcggtcggggtcgggaaatgaaattaaagtttttttgttttcgggagcggaggggtgggcgttttgtttcgttttcgaacgttttcgtttcgcgttcgtttcggtcgagtattgatttgtgtgcgaagttatgggtaacggcgacgggaagtattttttcggttggaagtgtgcggggggttgcgcggcgggtttagtcggggcgagacgcgcggcggtagcggcgttgcggtggtttaggttttcgcgtttcgatagtagatgcggcggcggcgtaaagtcgcggttatttatgtcgggtttcggtttcggttcgtcgtcgttttttcggagtagcgcggtcggggttcgggggcggttcggcgcgcgggcggcgtagaggcggcggcgttcggggttataggcggtggtggcggcggggtcggttagtacgcgggaggattgggtttttcggcgggcggtcgcgtatcgagttagcggtcgttgtgcgggtttatggtttgtggaggtaaaagtagaggagatacgggtgattggggggttcggttcgttcgggggttttcgtttcgttcgtttatttattttttttattttttattttcgtcggttcgagcgagcggcggttaggtcgggtggcggggtcggggcgttcggtgttttttcgtcgtacgcgcgcgtagtttagtattcggggtttcgcgcgcgtacgtatcgtttcggttacgtttggttcggggtagtcgggggaatttagtcgtattgttcgtcgtttttcgttttcgttttcgcgggtttttgtagttagggcgtcgcggcgaagaggttgttggttttgttgggtgataaaaatttaaatttgcgaagttattacgtatattcgtatatatatatatatatatatatatttatacgtatatttttttttttttttcgttgtttaaaggtgtttcggaggaaaaggtttggggtttatattagttttttttttttttttattttatgtcgaggtttagtttttattgtatttcgtttaatcgaataattatgttaattaagcgagtaattttattgattgtaatttaagagttttttttttttttaataattttttttttttttttatttttattttttttatgtatttttcggtttatttttttgaatttatcgtggttttttttttttagttttagcgggattagtttttgtttttagtatcgcgttaggattttaggtcggttttttagagtttcggaggttcgtaatcgttatcggtattatttgggtcgttacgtcgtagtgttcggtttgttgtttcggagtcgggagttttttgttgaggttgtaataattatttcgttttttaattaaattcgtttaggatttttttttgcggattgggggtttgggggtgtgtgtggggggggtgtttttagagttagaatgtttttttttaacggtttaaatcggttttgggatttttttttttagcgtttgtcggggatcgcgagtagaggtcggttttcgtttcgggtagtatcgggcggtttgggtacgcggggtttgcggcgtttagttcggttttttagtcggggaaggtgggttcggtttagtataattttttgttagtagattttgttcggatttcggttatttaaaataatttttatttttatttttttttatttttatttaacgcggagtatttatttaggcgaaattggggataattttagattttgggtgcggagggtcggagttagtgatagaagttgcgtgtattatcgtgtttttaggcgttttttcgaaggcgttttttggacgtattttatatattattttttattttttaaatacgtattgttttaatgtttattatttttaataaaagggagatggataggtttgatatttttaattaggaattttgcggaaaattttgtgtttttgtagttattttattatgataataaagcgattaagatgttttttatttattgaatatttttttaaattgcgatattttatggttcgggttttaaaacgttttatttgtagattattttgtgtttgatttaatttataatcgaaaatataatgtattaagtgaatatatatttgtttagttgataagtttttttaatatttattcggagagtttttgtattgtaaataaatgggtttatataaagagttttttttgtttggtaattatatataaaggcgtttggggtttttttttttttggggatcgttagtttttttttcgggtttaataaatagttcggtttttaagtttcgatttcggtttgtaaagcgagcgttcggtcgttagggttcggagagtgttttggcgagggggttgcgagcgtaggggttaggggaggggttgttcgggttggattagggacgtgggggtttttagtttcggtcggcgtttttcgagtttcggagggcgtcgggcgggataaagggaaagaaggaaagggagggaggttagaaatttgtagttttaaaggcgtcgaaggtcggagaggggtcgggggttgcgtacgcgggggtgttaggttttttggcggtttttagggagtcgtgtgtgttgtgtttttgttttgtggttgtttttttttttttttttttttttaataagaaattttaaagttgagaaagcgcgagttgtcggcgattttcgggacgcgggttcggttacgaagtaataattttaattttttattttttgcgggcggatcgtaggttcgattgttttttttttattagtttgttcgattttttaagtaaataggaggtggattattgtcgtttgtttgcgtcgttacggttttgatcggattggagagagtttttttttgtgtttttttttttcggggagaggtcgcgtcgcgttttcgcgtttgttcgcgtcgggtttcgggggtttggggagtttgaggcggttaggaagtggggcgaggaagggcggttatacggttcgagttgggagttttatagtttcgtagcggcgacgtcgttattcgtcgagtgtcgaggttcggggtttatttttagtttagttttaggagaggtcgcgtcggaggatcgcgaggacggcgtcgtagcgttaggtcgggttgaggtaagggaggaaatggagcgaaaagtggcggcgggtagagggtttcgggcgggcggagaatcgttgacgagggtatttcggaaggaattgaatttaggagtatagggttttttttcgggaaggtagggcgtgattttggagtcgtcggttttttttgtcgcggttttaggcgtggttggcgcgttttaggatttggagtttttataagtttgttttgttttttgtttttgtatttaaaaattcgtttttttttcgttcgtttgtcggagattaggattttggttcgtttgttttttttcggcgtcgttttcgggagcgcgggcgcggtggggtttgtaggtcgggttgggattaggcgcgttttggggcgcgagtggttcggtcgtcgtcgtagaattcgttttttgcgaaatagtcgtattcgttttttgggagagttatgagaattggggtcgcgtttgattttcgcgttcgaagaaaattagttcgcggatttcgttatacgggtcgtgattcgagtttcgcgcgtcgtttcgaacgcgcgcggtgaaaacgtttcgttgcgtcggttttgttcggttttttttttttatttttattttttcggaaaaaaaaaattttgaattgggaacgaagattcgaaaaattcgttatgattattttttttttcggtttttagtttcggttcggaaggttttttagggtagcggtcgtgggtattacgattcggttagtttttttcgtcgcggatcgatcgggtagggttaatttaggattgtttcggggaggggagtagggtaggggagcgaatgttggggttcgttcgtgggttatttagaattgggcgtacgttggcggcgttcggatttcgtttattgttcgttcggtgttattcgcgcggttcgcgttagacgtagtttggcggtttttgttttgttttcgagtatttgtttttaatgttgggtgtcgatcgagataataagcgtttagagtaaagtaaggatgtattacgggggtaattttaaatcgatcgataagattttttagagaaaaaaaaatcgtttatagtttatattttttaagaaaaaaaaaagttttaatattttaacggattttgttaaaagggaagatatatattttttaatattataattttgaattttttttgttaaaaaaaatgtaaaattttaaagttagaataaaaaataaaataataataaaaatataaaaataaaaaaaaaatgaaagtaattttagttatttattggaggttgttttttggatataattgaatgtaatataattaaattagtaaatgtgattttgttttgtatttttattggtatttttaatgtgttgattgttgtattgtaaatgtatcgtttttataataacgattttagcgagtttatttagagcggtttttaaatttgtagtttggcgcggcgagttacgggttttgtatattaataagttcgtgttatttagttcggaatagttagcgcgttgattggtcgcgtagttttttacggtcgggagttcgtgttatttattcggcgtaaataggttttttaataggttggcgtcgggttagggaattgttaattaggaagtagcggggttattattaagttcgatggcgtttaatttaagttcggcgattgcgtagtttttttgcgtagattattgttgttgaatgggaatgtggtggcgtagggcgggagagggagttggagcgagcgagtgcgcgtgtttcggcggagggggaggcgtagatatagatatagatatatatatatatatatatgtttaatttagtaggtttaacgtttggtttttgtcgtatagaaggttaagggaagaaatattattattttttaaaagtagttgttttttttttttggaatttgtttggtaggtggtaggtaggttagatttttaagtttagaggtttttttaggttgtttggtttatttatcgttttgaagttgttgtttgttcggattcgagttcgcggatgtacgtacgtacgttcgttgtttgggtagtaaaagttttgaatagttcgttcggtttttttttttttatgatttggggattagattttgggaagtgagttttgagtttttagtcgtttatattattggtttttaattttatttttttttgttatattttgtaatagagtagttattaaaatgaaaattagggatttattgagaagataaggattgttttttttttatttatatttagatttagaaaatatttttagtttggtaatgggggaagcgggtatggtgtggtaaattatgtatagtattttttaatgttgttttttgtttgtttatttgttaaatttttattttaattaaagtaagttattgaataatttttatcgtaattagatgtaaattatttttaaaatatttcgtaaataaatatttttgttagaatttggttttttatttaaatgttatttatttttagggagtcgaggtgatgttttagtggcgatggatatatttatttttgtttttttttttttatgtgaatttttgtttttttttttgggggaaaaaaggatatttaaattaggagttaattgatagatttatacgtattcgaaattttttatcgttttatttcggtagggatacgaaagagttaaatttaaagtttgttgtttttttgttttttcgtttttattttcgttttcgcgggatcgttgggattggttggtatttcgttagtggattgtttattatcgagtgtaaataaggcgttgattggttgttgtttagttcgtattgggttttttgaaaaaagtaattattggtttcgcggttttaaggcggtttaaggtcgtttgatgaaaggagataagttggggatcgtttttaggattttcgcgggtcgatcggggtagttcgggagtcgaggtgcggcggagagttcgcggattaaaggaatttggagagaaaggggaagcgggcggtcggtttcggtcggttttttttttcgtaggttacgtcgatttggggtggggggttgcgggtcgcgggcggggatttcgggatttttcgtttgtttgagtcggggtttacgtcggcgttcgtttcgggcggttcggttcggaggggagtttcggagagttcggggttcgtaggtaagtatcggcgtttcgcgggtcgggtcggggacgtaggataaggcgcggggtttatttcggttggttcgggagtggcggtcgcgcgggttcggttttcgttttcggcgtttttcggtttcggcggtcgggatttttcgcggtcgagtttttggttaggttttaggtcggcgttttcggaagcgacgtttggcgggtcgcggggtacgagggggagagtcgggaagcgtaaattttcgaagcgcgcggagattcgattagcgcgcggttatttattaggttgggggcgattgaattaggtttttgggcgcggtcgtcggttgggggtgtgtggcgtcgattttcgggtttttgtcgtggtttcgggaggttggagtagcgagtagcggttttagcgagtgtgtcggggaagcgggtgttttcgggtttcggtttcgcgggtgtaggcggaggttgttcgtttttcgcgtatatcgaggacggtcggttcggtttcggagaaatggcgtttgagaaaggaggggaggggaaggttttcggattttgggtagggattcgtcgtcggggattcgcggagtttttcggggatggaggaggcgcgagttggaagcggcgcgcgagttcgagcgcggggttaatatcgtggggtttagttttttttggttcgggtaagtggacgcgtttcgaggtttcgggtttacgtagggcgtttttcgtagacggcgt

SEQ ID NO: 7129 - DNA, 1408 bp, synthetic construct
  misc_feature 1..1408: note = Description of Artificial Sequence: Synthetic polynucleotide
  source 1..1408: mol_type = other DNA
cgcgcgcggtagtttcgaggtagtagagcgcggagtcgggagcgcggggagcgcgggtcggcggcggcgagggaggacgggggcgtagacggtcggcgcgcggcgcggttattatgggcgtgcggtgagtagtcgttcgggacgattttttcggttgcgcggcgttcgcgcggagtttttcggtcggcggtgcgtttttacggttattatgaaaggtagggcggcggtagtttcgcggggttttgggcggggggaacgggtttcggggcgcgcgggaggttacggaggtgtttttcgcgcgaatttttttttgggttgcgggttcggggagtcggggttgttagggcgtcgggttcgtgcgcggatattgggggcgtattcggttttcgggttaggcgcggttggagatttcgaggttggggttttgaagcgcgtaagtatttttttttttatcgcgtttttgtaagtagtttgaagttttaagtcgttgtttacggattttcgtttttaattttttaattgaaaaaatttgtcgaggagagtggaggtatcgttatttttttcggtcgtttttttacgtcgtagcgttttttacgttcgtttagtttttttttttttcgtttttagtcgtttttcggttcgagcggttttcgcgttggcggtcgggtgtttttttcgggattggggatgtttttcgtgcgttttcgttatatttggtaatgattaggtgttcgaggagtttagttggttcgggaagtgtatttggtatttttttttattagatttatcgattggaaaatagttgttttcggtttcgcgttttttttacgtgttcgttttggggtgtgtttattggtgttttggggtgatatattttagttggttagtcgttttttgcgcggtgttttttgtaggtcggtttatggaagtgttagatgttatcgtattttagaaagaagtacgagaaggattgtagggtagttttttgtttagtggaaatacggagatttgttagcggaattttgatttatgtatgagataagtaatcgtagcggaggtattaaagagtcgtttaggaatgggttcgcgtggtgtttatataaggtttcgtgtgagagttgttggttttgtgttaggataatatagttttgcgtgggtgcgaaatgttatttgatcgcggttatttcgtttttagtcgttatagatttggcgatgtaatcgttttgatttttagggttgtcgttcgagggaggcgttcgggaagttttaaggcgtttggaaagtaatttttggttttggaaagttttttttttgaagggtagttttcgcggaattaatcggagcgatgatattttattaatttattttttttttaagggcgttaggtgtttacgtcgggagatttcgg

SEQ ID NO: 7130 - DNA, 208 bp, synthetic construct
  misc_feature 1..208: note = Description of Artificial Sequence: Synthetic polynucleotide
  source 1..208: mol_type = other DNA
cgttttcggggtcgcgatttttttcgggaggtgtttgcgaaggcggttttgtcgcggtgggggtggggaggttagggtttcggatcgttggagttggggtcgtagttagtttttggcgagtgttttttggttgttgtcgtaggggtttgttttttcggattttttttttaatttcgtcggatttttttttttttttttttacgttcgt

SEQ ID NO: 7131 - DNA, 805 bp, synthetic construct
  misc_feature 1..805: note = Description of Artificial Sequence: Synthetic polynucleotide
  source 1..805: mol_type = other DNA
cgtcgttcgcggagtttgattttgcgttaggacggaggaggttgtgtttatgtaattgttttgaagtattgcggtggttttttttttcgcggttgggagggtaggtaggacgaggttggtttttttcgtacggtttttgggcgtgggttttcgtcgtagtttcgcggagtttcggtgttttttgtaatagggggcggggggaatagcggcgagtagttttgggttgcggttttttttttacgttcgagttttttgcgtatcgtcgtcgaggacgcgcgttcgagtttagtttttacgtcgcggcgcgttcgggttttttgttgattttaggtaattttttcgtttttcggagtgggggattgcgagggggtttcggttttacgaggtgcggaggaagagttcgaggtttggggcgaggcgcgcgggatagtggggttgacgcgtggtttcggcgtcgcgcggtttttcgaatttcgagtttcgcgttcggcgcggtcggggtttttaatcgttttttcgttcgtcgggatttttatcgggtcgagtttgcgcgtcgcgtttttcgttcgtttcgttcgttgcggcgtagtagtggttgggtcggcgcgtagagtttgagtttcggttttcggtttgggggtttttttgggatttttggtcgaaggggcgattcggttttcgcgtttttttttcgttaatttgtataaatttttcgttcggggcgttatgttttaagttgtttttcgggttgggggcgagcgcgggtcggtttttttttcggggaggtgcgggggatagggggcga

SEQ ID NO: 7132 - DNA, 2462 bp, synthetic construct
  misc_feature 1..2462: note = Description of Artificial Sequence: Synthetic polynucleotide
  source 1..2462: mol_type = other DNA
cgagcgcgcggttgggaggcgggtttagggcggggtagagcgcggggatcgttcgggtatcgggcgtagttaacgagcggacggggagggcgggttcgcgagggttgagcggcgcgggttgttataggcgttcgaagcgcgttgtaggtggtaatttggaggtgtcgttatcgtagttgcgggaggagttcgggtttggcggttttttttagtttttaggagttttttttcgtcgtcgagttcgagattggatttcggagaattcgaaggaaagagtttttgcggagggatttgtgagtagttttatttttttttgtttttgcgttattttttttttttaaggaaggttgtgtttgcgggttgcgaataagtttcgggaggggttttaaaggaaggtttcggtgatttaggtgagcgtttttttttttttggtagtcgggcgtaggtcgggagcgtcgtttagtttcgtgggtaggggcgcgggtgcgggtcgtttgtttttggttcgaggtcgatgggggagaaagcgaggaaggggcgaggttggttcgatcgggggttgtttggtcgggttcgttcggaggcgatagggatttttagacgggtatttggagattagggacgagtagagaggtgttttgagggggatagagggtttgcgttcggtttaagttgatcgggatcgatcgtttgcgcgttgtgttggagttgtcgcggaagtcgggcgcggcgtttttgcgaattttagagttagtgcgcggggttcggcgagcgtattagttttcggtttttcggagtttaaggttttggaggacgttattttttttcgttcgggtaatttttttttcgtttttttttgtttttattttttcgcgtcggtcgtttagtttatttcgagattttgtgtttttgttagcgcgcgttagttgttgttgttattttttttttcgttttcgtcggagttggagcgatttggggtttggtttttcggtttcggtagtttagttgtgggttggacgcgagtggggttggttagttttttgcgaggagggtaggagtgagcgcgggttttttttttagtgtttttttcgaattcgttttcgtttttttgtagttcgaatcgttagtttagagagcggagttttagaagttagattttgttcgttttggggaaacgcgggggaggggggggtttttcgggaaggtgcgaatttcgtagatgaggttagagttttcgtttttattttagcgttttagtttttgtttttttgtttttaagtggatagtggttttgattttcgtatttcggtttgtggcgtggggggcgttagcggtagtgtgtgtgtgtgtgtgtgtgtgtgtgtgtgtgtggtgtgtaaggatgagcgagtgcgatttttcgggaggtagaggcgtaggagttagtttttttagttcggcggagtcgtagggatcgttttttttcgtcgttagttgcgcgtagttgtatttcggtaatttcgcgttgtcggttttttttttttagttttagttttcggtatttttacgattaacgcggaattttaggattaaaattatttggttaaagggtgcgggtgggggatcgaggcgttttcgaggcgaatgaggttgttttttaaaattcgggaggcgtttttcgttcggcgttgtattttttcgtggttcggttgtaaggatttgcggtggaggtttggcggaggcgggttcgcgttttagagagagcgttacgttattcgagaaggcgacgttgggggttgttgagttttttaattttttttggcgcgttttgtttagaagtcggggagtttttggtcggcggttggcggggaagcgcggcgcgggaggtggggtggtttggttggtgttgcgggagggcgtttcgggcgcgttaggggttgcgtgtcgcggttggagggcgcgtcgggagttgcggcgggttcggggtattcgagtggcgttggaagttgagtcggggttcgtagggttcggtgatcgttttggcgtcgtcgttgcggattcgggagtagtaattacgcggcgcgttcggtcgttttttcggttcgtcggtcgcgtttttcgttttttttttgtagaagtgaagtcgtcgtttgggttcgttcgggttggcgatttttgcgttagaaaagtttgaggtgttggaggcgaaattttttcgggagcgaagggcggcgtttataagataaggaaagggaagacgtcgggttttggcgggtagcgtagtagcgggagggcggcgttgagcgttaaggatttcggaggcgaggcgaggttaggcggatttaatttagttaggaggtgttgttttcgtttttggggtttttttataggtatttggtgttagttatagattttcgttttcgttagttcgtaattttttcgtaattttttttgaagtgcgatggattaagattgggtcgcga

SEQ ID NO: 7133 - DNA, 990 bp, synthetic construct
  misc_feature 1..990: note = Description of Artificial Sequence: Synthetic polynucleotide
  source 1..990: mol_type = other DNA
cgtatattttgtgcggttcgagtggttcggatggtatagtttaggtgttcgggttaaagttggtatttttaaagtttagaacgtaatttgggcgcgttagtataaattcggttttcggtttttttgaagttagttaagttcgtatagggtttttagcgtttggaaatttgagaggcgtggaagggtggggagtttcgcgaagtttttagtttttgggtgtttttcggtttcgcgggggagcgggtttggagttaaatcggtcggtcgtaggttggagtagcgggcgtcggagcgcgcggtggggatgttcgaaaaggagttagaggtttagtcggagagttcgagaatacgagggatgtttattttgtaatatggttttaagtttttttttgtttacgcggaagcgtttttcgttttatttcgggttgtgtagggtcgtttcggcgattaagtcgttttcggagtcgggtattggggagtcggtgttgcgttcgttgttggagtcggggttcgattgcgtcgttaggtagtcgggttttttttgggcggttatggtgggcgcgtagcgttcgggttttcgttgtcgtcgtcgttttgtttgcgttgtcgttttcgttcgtcggtcgggtttaattggtttttagcgtcgcggcgttagttcgtttttttgtagtcgtcgacgttatcgttaacgtcgtcgtcgttattgagttttcggcgtattttagtttcgggcgtcgtttacgttattcgttatttcgggtcgcggtttcggttcgggtttagtggttgcgtcgtttttcgttagtaacgttcgcgcggaatgagcgcgtcgcgttgttcgcgtttttattcgtagggttcggcgtttttttttcgttcgtcgtttttatagtcgcgcgtttattggttcggttagtttacggggagtcgcggcgggcgggcggtttttggcgtttatatattcgcgcgcgtatatatatattacgt

SEQ ID NO: 7134 - DNA, 2274 bp, synthetic construct
  misc_feature 1..2274: note = Description of Artificial Sequence: Synthetic polynucleotide
  source 1..2274: mol_type = other DNA
cgtgtcgggttcgtttttacgtcggattttcgatttcgatttatagatttttttcgtgaggggtttttttgggtttagaacgttttcgcgcgcgcgtgtaggtatatacgcgtatatatttatacgtttgttcgtatatcgttagtgttttttttttttatttgggattttcgggtagtcgggttggatgaataagttgtagttggtcgcggcgtttcgttagggggacgagggtggggagggggagtttagcggggcgtagggtcgtggttagggtttggggatttgttcgttttttttcgcggtcgttaagttttatcgttgggatcggcgaggaattttttttagttttttcgtagacgttgtacgatcgcggggatttttcggggtcgttagtcgcgtcgggtagggggcgatagggagggtagggtatcgggagatcgtcgtcgtcggagcggtcgttagttttcggcgatcgttgcgggcgtagtcgaatattagcggtttgggttcggtcgttgttcggggtcggcggggatcgcgtagcgtttacgttaggcggttcggcggttgtaattgggaattttaagtaaagttttttgttgttttttttgtagtcggttagggatttaagagtgtaagtcgtttaattttgagtattagtttaggtcgcggaaggacggcggtcgagttggtagtttcggttggggagttcgttttcggggttcgttcgtttcgttcgttcgaggattgggtgtttgttagttttacggtttttcgtttagcgttcggtttataggtagaagcggtgttcggttcgtcgcgtttttcgttcggtttcgacgttagttttagggttttattattagggagttgtcggcgtttcgggcgtttcgcgtcggttcgcgcgtttcgggggcggtagaggcggtttcgtttatttgagaacgtttcgttcgtcgtagttagtaaaagttcggttaaagtcgttaggtaagttttaagtttttttatggtgttgagtgcgggtcgggtcgtttttcggcggcggtgggtgggcgcgcgagggcggagggggtcgggagttttggtttcgaggtagcgaggagagacgggtaaatagtagagcgttaagttaagtttttaaagtgttaatagttgtagaagttcgaattttagcggttttaggggcgcgggtatagggttttgggttttttttttttgtttttggttttattcggcgtttggcgtcgttggtagagggagcggagggcgagttcgcggagttaaaattttttttcggtttcggttgttgagttcgtcgttttttttttttttttgttcgggattcgggattcgagttgttggtcgtggtcgtggcggtggtcgtggtcgtggtcgcgcgcgtttcgttcgtcgtttttttataggtagttttaagtttagtttcgggcggcggcgcgtcgatgatcgagttcgcgtcggttgcgcgcggggtttttgtttttcgattgattggcggtgtttcgtaggtcggttgaagggagcgtttacgttacggtcgttcggcgtcgtcgcggttcgttagagggcgtgagcgttcgtgtttcgtcggttcgcgttcgagcgttttcgggagttcggttgggggcggtttcgcggttatagttattatcgtcgtcgaagcgggcgttagtcgcgcggggaggagcggttatcgggtttttttcgtttattttttcgtttcggtcgcgttttttattttggtagttggttttggggagggtgattgtggaagaggttgcgtcgtcgttagaagtttgtttcgggttacgagtcgcgagtagtttgtgagcgcggtcgggcgggattagcggtttgcgatttcgcgggcgcggttaggcggtttcgagtttggcgtcggacggcgatgttatcgtatagggttagttgtattcggagtcgtcgggtttgcgttgttcggcggttgcgggaaaagcgagttaggagatcgttgaggtttcggagggttgcgagtttttttacgtcgcgggcggagcgaagttggcgggcgtcgggagatggcgcgggagtcgggagcgtcgagtttcgcgatcgttagttcgttttcggtcgggttcgtcgggtatacgtcgttggtttcgagtattggcgttcgggaagtagggcgcgtttttgttgttttgcgtttttattatgtttcggtgtttcgtgtgggttcgaagcgagtcgtaggtagtatacggaaggcgg

SEQ ID NO: 7135 - DNA, 882 bp, synthetic construct
  misc_feature 1..882: note = Description of Artificial Sequence: Synthetic polynucleotide
  source 1..882: mol_type = other DNA
cgaaggttgtggtcgcgttttcgtcggttagtttttagtagtagtttatcgtttttgtttcgcgttttcgttttaggttcgtacggttttagtttcgcggggattagtattgagtcggtttcgtcgtcgttttagtgacgggttgttgttgcgggaagttaatcgtttagcgtttggaggagggcgacgaggtttttcgcgcgagcgagtattagaaagtagtcgggttttttcgttttatgttggttcggttggcgtagttcgatcgcggtcggtgtttgaggttgggggacgttttgattcgcgtcggtcgtttttcggtggttttgggcgcgtttcgtgtagtcgggaggttggaggcgttgcggtcggaggagttgggggagttggcgggcggtttggtgtgtttcggtttgcgcgaacggttattgttggcgaggaagtcgggcggcgagtttaaggttagggagggtcggttttggcgttcggcgcgtttcgcgatttgtttggttgttcggggttgttgtataagtcggtgatattgttttgcgggtttacggtttgtgagcgttgcgtggagttggggttcgcgcggttacgggcgcgggcgcgggcgcgggcgcgtgaacgtagtgttgagtcgtttgttggagaggtttttttcggtcgagtgttcgttgcgtaggttggagggttaggcgcggagtttgtagcgttagtagtagttcgaggtcgcgttgtttaggtgcgattaggttttggagttgtgatttggttgtggggtcggttcgtttttttgatttttgttaagtttagcggttggagttaattcgcgggtttgggttttcgagcgttttgtttaggcgtagggggttatttcgt

SEQ ID NO: 7136 - DNA, 4359 bp, synthetic construct
  misc_feature 1..4359: note = Description of Artificial Sequence: Synthetic polynucleotide
  source 1..4359: mol_type = other DNA
cggagcgtttaatttagtatatcgttttcggtaaattgcgagtaatttaaagtagttcgtttagtagggaggggagttggtgggaggggggtggatttcgtcgttcgtagaggtggggagatttggggggcggtttcgtttttaggttgtagcgtgggtttggttttttgttaagttaggagcgtagttcggagttagcgcggttttcgggtttttgcgtttatggcgagggtcgcgggggaatagtttttggtaggtaatttgtcgggtatttatttgagtttttcgtatcgcggttcgaaaatttgggagcgttttaggataaagggttagttttttggaattagtcgtgtgtgattagtgtgtgttagttcgtatgtgggggttttagtgtgtaattaatttagttgtttatcgtagtttcggagaaacgagtacgtttttttgtacgtgtttagggcgggtgcggcgggtagtgtattgtgaataaagtcggttatttttcgcgtcgtatttcggggacgattttcggacggtttttcgcggagagtcgggcggatgagagcgtggtgtgtgtgtgtgtgtgtgtgtgtgtgtgtgtgtgtgtgtttgtgtgttttgtgtttttttaaggagtcggaggcggttcgcgaggtagggatttgttttaatttgttttatatttggcgcggttttttcgaagttcgggtggcgtttagggtcgggtaggtacgcggaggattagtagcgttcgttgtagaaaaagatatcgttaatttttatttagaagtttatattgttttgagatttggttttttatttttttttaaaaaaaaaaaatgtaaattgatggatgggttttaattgatgcgtaaaatgttttttttgagagtaagataggagggttagggaagggggaaataggtagttgatataatttttatagtttaattgtcgagaattcggatttggaggtaaattcgaggacgtattcgaggagtaggcgaggttgttttttagtaggacggtttggtatcggggcgtattgttggggatttgattttttcgtgtttttttattttagggattcgtagttggttcgcgcgttagggtatatacgggttgcgggagaaggtgaaagttaggatgtagtacgagtttcgagagtggtttgggttgtgttttttaagagaatagtcgaggttttcggcggttttgggaagttgtttttgggtcgggagagcgggaggcggcgacgtaaggacgcgttcggagtttgggcgcgtcgggggcgggcgtttggttggaagtggggtagtgttttttatgggaaagcgagattcggcgagttttttggttgtttttttagttttcgaggtgttcgttttcgcgcgtttgaggtagcgtagttcggagggcgaacgaatggcggttggtaaattttgagtgagagtgcgtttcggattcgaattgtcgaattgtggttgcggtagggtcggtcgagatataagttcgtttttttcgtttgttcgatgggttttagggagattttagttttagtttggtggagcgtttcgttcgagggagttgtgttattttgtttaggggtagggagggcggcgttttgggcgggtggggaagggtttttgtggtttttggggttttaagcgttttttttttcgtttttttttttatcggttttttttagttttttttgtttcgttttttttcggggttggttggatcggcgcggatttgttttagatttacggggagcgttttaggtttttaatgatagtttaaatgtggttgttggaaaagtcgaaagggatgtggttgacgtggggcgtgtttcgtttttttgtaagagtcggaaagggagttgggagtcgcgcggttggttttaggttttcgcgtttcgtcgttagtaagtaggtgggggagtcgtcgtcgtcgttagttttatttcgtttttaagtttcgttcgttgcgttttggtcgcgggcgtcgagagggtgcggggtttcgtcgtgttttttttattttgtttattaatttgtttgtttcgtttcgtttcgggcggttttagatacgggtttttcgcggtagtattcgcggttcgttcggcgtagtcgtcgtttcgatttttcggtttcggggggtaatgagggggtagtggaaggggtattgtttttcgggtattatttagagaaacgagatcgtttcgttttttcgtcggttttttttttttttcgttcgggttcgcgtaatttttcgttagagggtaagttgggagtgtttcgtttttatcgatagtttttttttttttttttttttttttttttttaaagtttttttagaagtgggagtcgggtgggggaggaagaaggtttggttagttttcgttttttattttattttttcggtttaatttgtttttttttttttttttttttttattttttgcgcgtcgttgttttttcggagttgcgttcgggaatgataattggagcgcggtttttttaagagttcggttttgtttttcggtagttgaaggttattaaatataaaagtttttagcgttgcggtttaatatagcgtatgcgttttgttcgaggattggtagagagacggtaatatggcgagaatgtttggtagcggggattgtaatattagcgcgggcggtagcgttagcgttgtcgtcgtcgtcgtcgagaataatggggagcggggcgagggcgagcgcggcgcggggggtcgcggtcgtcgttatagtcgttcgtattattgtagcgcgggtgaggaggaggaggaagaggaggaggaggacgagatttaggaggtgtagataacgggggacgaggaggaggaggaggacggaggtggggggttggaggaggacgaggaggaggaggaagaggaggagatggggttggattgggacgagtttttggagttcgaggattcggtcggggaggagttggagttcgagtcggtttatatgattaatatggattagagcgtcgcgttggagttcgaggcgtcgtcgcgattgttggcgtttcgggttcgcggtgggtcgttcggggacggtttcgagttggatttcgacgtgttgtagcgtttcgagcgggttcggttgagcgagaatattcggttggttattcgttacgtcgtgcgtatttttcgggagtatttgagcgagaaggcgtagagttcggatttcgagattatggataagggggcgttgtgtcgcgtgttgcgttttttttatgtcgaggttcgttttaaaagcggttagttttatagtaagtcgtcgtttattagtattcgtagtttttttaatcgttattttaatgagttttcgtattgtcgtacgttcgattttattaaggatttcgagttgcgtagcgttaatttgacgttggtcgcggttattcgtaagttcgaggagtagggcgtcgggtcggtggtgtagaagtaagttattacgcgcgtcgatttgcgtaagttgtatatttttagcgtttttagtattaatacgtttttcgggttgtttaataaggtttggttcgagacgtgtatgtatttttgtattcgcggtcgcgagaattagcgtgagttggaggaggatttttttgggttggttatggacgaggacggtcgtaagttcgtttattttaagtttttcgggttttattataagtcgcgttcgtcgtcgtggagtaagaagcgcgtcgagagtagcgacgaggagaatttgtttcgtatgtatgagacgggtatcgagttttgtttttacgttagtttcgttaagtatttgtcgaaacgtaattttttttgtaaggcgtttttttagcggtttcgggattattgtagcgagggcgatgtgatttggtacgagaataaagttatcggtaagaatttgttaggtattcggatgtagatgttttttaaggcggttaagttttttaagatttatattaattattgtatcggcgtcgtttttatcgttacgtttaatagtatcgcgggtattggtattaagttgggttcgttcgtttcgtagggttgttacgtcgaggttttgaacggggcggtacggtattatttttattatttttttatttattttttttattattatcgtttttagtcgttttcgttggggaatatttatattttttttaaagatagttaggtcgggttcgacgtgaaattcgaggttgcgtttaagcgcgttttgtacgagtttgtgttcgggtcgggggaaatttgcggttttattttttttaaaagattttgtattcgtttttcggagtttgtggatgcggtggtggtggttttcgtgaaatacga

SEQ ID NO: 7137 - DNA, 2762 bp, synthetic construct
  misc_feature 1..2762: note = Description of Artificial Sequence: Synthetic polynucleotide
  source 1..2762: mol_type = other DNA
cggggcggtgttcggcgtattttaggttttttttcggcgatttttcgcgggttgtagtaaaatacggggcgtttcggcggggcgggggcgggcggttgtcgcggattcggtcggttatagtcgtagtttggtggttttcgattggttacgacgcgggcggggaggtttggcggaggagggaggcgggggcgagggcggcggcggcggcgggaggaataggagaggggagcgggtcgcgtagttaggtagcgcgtggggcgagcgcggggagagcggcggcggttcgtttaggtcgcgtagcggaggtcgagcggggtgcgcggtcggcgacggagggcggcgcgcgcgagtgagcggcgtagggcgaggatcggcgggcgggtgtcggtgcgcgggtagtaggggcggttgcggtagtagttgcgcgggacggagtcgcggcgggagagatcgcgtcggtttttcgttttatttttttgcggtcgaggtcggagaatagtttttaattcgtcgggggatcggaaagaggagtcgagaagcgtttttcggtttttacgtagcggaggcgcggagtggcgggattgttgttttttgtgggtgtagtacgtacgattcggagcgtttttttcgcggcgttgttttcggcgttttcgtcgcgtcgagcggttttggagcggggattcggaggaagtaaaattacgagttcgaaatttcgcgtggcggagtttttggggagcgttattcgttttatttttatttttatattttttatcggttaaggttttcgtcgttgtatttttcgcggttttcgttgcgtttcgggtcggagtcgagtcgtttgcgttgttatagtagtcgtttttatatattcgtagacgtttatacgttttttttttttgttttttcgttttttttttagttttttgatttttgggtttgttttattatttttggtgcgagtttcgcggatttcgcggttcgttatttgttattagttcgttttttattggcggggagcggagagtagcgaagaagggggtggggaggggaggggaagggaagggggtggaaattgtttggagtcgttttttcgcgtcgttgttggtgttgtcgttgtttttttttttttcgtcgtcgtcgtcgtcgtcgtcgtttttttcggtttttcgttcggttttttttcgtttttatgtgtcggatagcgggagcgttgcggattttgttgtcgttgttggcggttttgttttaggtacgcggcggttttcgcgggtcgggttacgggcggggtggggcgggcggcgtcgggtttttttgtttttcgcgtcgttgcggggtcgggttgcgtattcgggaagggaggtgttacgtcgcgtcgcgtcgcgtcgcgtggtcggtagttgcgtaggtatcgggtttcgttcgggcgtcggggtagggttgtcggggttagtaggtttttcgcgttttttttggcggggttttaggggttggattgcgggttttttttgtttttttttcggggtcgagtaagttcgcggggggtgtttttaggtagtaggagggtgaggtaggataatttttaggttttgtagttttttgtgtttttcgtttttcgtatagtattttgttttaatttttttgtttatttttgtagggatgggtcgcgagtttatagtaggaatttttattttggtgttttagttacgggatttgtttttattttattttattttgtattcgtgcgtttttcggtgtttaagggttttattgttttattgtttttattttagtttggagttgttttttttttttttttttttgtttttataatattttgtgttcgttttatttggaaagaaaatttggtttttttgttcggaggagtttttgtcggttagcgtttgtttgtagaacgagtttggttttttacgtttagtatttttttcgggcgagaagtttcgttacgcggttgtttttttttttgttcggttgtttgtgttttatatgcgtttcgggggcgtttttgtttggagtttttcgtattttttatattttcgggagagagttagcgagtttttttatttaatttttattaagaggttttttcgcggtaggaagtatttgttttagttcgggcgtaggttttttcgttattgtacgttgcgggtttttagttcgggggtagtttaatttttcgtcgtttttaattcgaggatgtttttaggtttttttcgattagttagtttaggtttggaggttattttatatagtttcggtcgggattttttagttgggcgggtgtagtgttttggttttaagtcggttttcgtttgtcgtggggtttttcgaaggttgcgggaaaggggcgtgtttattttcgtcgcggggtaggaaaatttacggagggtttttttgtttgtcgttttcggggtaaggggagaggtgttttattgttagttggtagtttcgaaaagtgcggacgtagttcggaagtgtttgtttcgggggtggagataggtggtgtggattatttcgtttcgtggtttttacgggttagggtttggcgcgtttcggttcgtcggggggtgagtgttgttggggcgggggtaggggttggacggggttggttttcgtagtttttcgcgttttttttcgtaatttttagacggtcgtgggtcgtcgtcgcgcggagttttgtttatggtgcgttatggtgcggtacgtttgtttttgttcggttttacgtttttttttcgggtcgt

SEQ ID NO: 7138 - DNA, 338 bp, synthetic construct
  misc_feature 1..338: note = Description of Artificial Sequence: Synthetic polynucleotide
  source 1..338: mol_type = other DNA
cggagcgggggcggtttggagcgttgatcgggcgtcgaaacgtcgggagtcgggggttaagggttcgagttaggaggtttcggagtagtagtcgttcgttttttacgtcgtcgtcgtcgttttcgcggttgtttggatacgggataatcgatttggggtttcgatcgtagtagagtcggaggggtgggtaggcgcgggttcgggagacgcgcggggaaacgcgcggagtcggtgagtcgggggcgtttgtgtttcggcgcgggcgtttgtgtttcggcgcggggcgttgtcgggcggcgtttattttttttggtcgttcgtttgcgcgattttcgcgg

SEQ ID NO: 7139 - DNA, 1435 bp, synthetic construct
  misc_feature 1..1435: note = Description of Artificial Sequence: Synthetic polynucleotide
  source 1..1435: mol_type = other DNA
cgggattcgtgtgtttttcggggtttaaaggcgttgggcgggcggttgttttcgggagaggcgtagtttttatttttggattacggggttagtggttggggaagtttttggggcgcgcgcggggaggcggcgttgcgttttatttgtttagtttcggacgtagttcgggggcgaggcgtttagggattattttaatttaatattgggatttttaataaattaaggaatgggattttaattattgaaaatttagtttttttgggttagaatggtgttgggatggttttggttataaaatattaaagagatcgatcgttaagggaataggaaaaacgttcgagatagtcgttgtaattacgaatggattagatttggtagtacggggtattgattgttggtgtttaatcggattttttttttttttttttatttttttttttatttaaagtaggttttcgttgcggtcgggatttcgtatttttgtaacgtggtcggggttgtattttttatgagtttagggtgaataggtgcgaagtgcgttgggagtattcggttagcggtcgagcgcggggaatatggagagcgagcgcgatatgtatcgttagttttaggattggtgttttaggatttacggggatttaggtaagattaagacggtgattcgtaaaaaatacgaacggatcgtttagttttttaatggtttcgagtcgagttttacggataacgttaaatttaaattttgggttaaatcgaagggtttttagttgggttagtcggacgaggttcgcgggggaggcggcggcgttaagtaagtgttttacgtgtttgttaagattacggtgagtgattcgtttttttttgttatttgtttgtcggagtagttcggcggggagggaggaaggagagaggcgggagagagggggagtcgtgagtcgtcgttggttcgtgtgttttttattttttttaattttttttttaagtcgtttttattcgtattagttaggcgcgttttttttattgtatagtttttgtggttttttattttaaagcggtagcgtatttttagagttggttttttttttcgtttcgggttttcggatcggttgtaggagttttttttttcgggtcgggcggcggcgtttggcgttttcgggttgggttattgttttatgtttttttttgggcgtttggcgcgtgttttatcgtcgttatcgcgtttaaaggttaggttggaagttcggtcgtacgttttgagagtagacgagtttgatcgatagtttatagtgtttttttattggtataaagttcgaatgtagcgttagcggtggatgtggggttttttttaggatattgttaggttttatcgttagatcgttgttcgggaggtacggggtagttcgaatgtttcgattatttttagagatcgttgtcgcga

SEQ ID NO: 7140 - DNA, 510 bp, synthetic construct
  misc_feature 1..510: note = Description of Artificial Sequence: Synthetic polynucleotide
  source 1..510: mol_type = other DNA
cgagcgtgagttagcgttgaaggtttagagcgcgttgtacgagtagaagattttgttcggggtaagtggcgttcgtcgtggcgtaagcggtcgacgcgtcgatagggggcgatttcgggaggtcgggcggcggcgcggcgcgcggggagaggacggtagggcgttcgtcgtttcgtttgagttcgggagttcgcgcgtttttttaaatttttgggttttcggtcgttcgggtttaacgggattcgggataggggttttatttggtcgtggtcgtgaagtttttgcgcgggtagtttggggcgggggagcggcgcgtttcgggttttcggagcgggagttgttttcgtcgggttcgcgggtcgcgtgcgcgatcgagttcgtttatcgagtcgacgcgggtcgttttagtgggggaggagggggtcggcgtgggagggggcgtcgtaagtgagattatcgcggtttatttaaggagttagttttcgtttttgataaattatcgcgtttcgg

SEQ ID NO: 7141 - DNA, 2722 bp, synthetic construct
  misc_feature 1..2722: note = Description of Artificial Sequence: Synthetic polynucleotide
  source 1..2722: mol_type = other DNA
cgaaagtggttagtcgagggtcggcgggggttaggttagtcgtttagtttcgtcgttttagttttttagtttcgtagttcgcgggggagcgggcgcgttattttaatttgttaggtttttgaagcgaagaggttgttttgaaaaagtaaatatgagagaggacggggtgtaggtaaatattattaacgtgaaaatttgttattttagttaagtttattattagtatttatttttataggcggggtcgttcggattttgttttcggtttcgcgtttgttattttttttttcgcgtagtcgagatgttagttttagtgggtttggcggggagttcggcggggttcggatcgggcggttcgattttcggtttttacggtaggaacgatttagtttcgtatttcgggagttgtaggtgtcgaaaacgaaattcgcgggggtagcgtacgtcgcgcgagtttcggttcggcggtaatttagatagcgatttaggggttttatttttttgatggtgattaaaaaaatatattttatttgaattcgtaaagtagacgagggtaaattaagttatttttcgcgttggtttatcggttatcgcgtttagcgttttttttttttttcggcgggcgagcgggtaggggcgttcgatttttatttttttttcgttagttatcgggggattagtcgcgtttttcggggcgggggaggtcgttcgggacggggatttttatttttcgttttcggaagcgggttggggcgggggtcggatttcgagtttttatttttcgtttttttgtttttcggcgcggttcgatagtttttagttttattttggtaggtggtttgggtggcggtagatgtcgggcgggaggaagatgtggggttgttttggtaggttgggggtgtgaggaggaaaaaaaaatagagaaagatatatatagagagatagggagagagcgcgcgcgagagagtttttgtttatagatttatttatataatatatatttatgtagttttttttttttcgatattgatgaatgcgcgttcggattttcgggcggattttttttaagtcggttcgtttttttagtttaaataaataaataaagttagatggaagaaaaaagcgtttattttattttcgtcgtcgtttcgttcgttatttttgtttttgtttcgttcgtttggcgttttaatagagtatagtttggtggataaagtttttttatatatttatacgaaaataaaaattattatttttaaaatataaaaagttgtatttgttgttattataaaaagaatttttaaaaggtaaagagaggaggtcggttgttcggttttttacggatattcgtttttcgcggtcgtcgggttcggaattttagcgtttttcgaagagttatgcgtttggcgttatttatagtcgggggtcgtttcggattgtattatcgttacggcgcggggtcgtcgacgggggaggcgcggtggtcgtcgttttacgtcgttttgttttcggtcgtcgttcgtcgtggcgcgggtttttatagcgcgtttattttcggtttttcgcgttttttttcgcgcgcgtatattcgttatttttatttttggtttggttgggaatttgaatcggtttagtttgtttaaacggaaaggatagagattttgtttgtttaatgtaaaaaaaaaaaaaaaaaaaaaaaaaagaaaaaaagaaaaaaaaaattagattagattgagagagagaggagagagggagagagagagggagagagagagggagagagagaggagagggagggagggagagagagaggggggagagtagagagagagcgcgagcgcgagcgagcgagagaagaggagaaagagagagagtagagagcgagcggagagcgaggtgtagagaaatcgagggggagagaattcgagtgtgtgtatgcgtgtgcgtgtgtgagcgcgagcgagcgagagagaggagcgagagagtgtgagcgagaaagaataaaaggaaagaagattttttttatgtatataaagatggttacgttagtaaacggataggttgataacgtaagttttagtattaacgggttcggtagtagttcgggtagtgtcgggtatatgaacggattaagttatagttcggggaattcgtcgattatttttatgaaggattacgatgttattaagttgtttattgggtagatttttcgtaatttggatgagaaggattttaagttttttttcgaggagtttggtaaaatttacgagtttacggttttgaaggataggtttataggtatgtataaaggtgagtatattttttttttttaattttgtcggggagtaggagcgggttggcgggtcgatcggtcggtcggcgattgacgagcggcggattaagcgagaggaagtttcgggcgggcgcggtggagggaggcgttcgggtagcggagattagagttggggtgcgtggggagttgttcgttggggtaagattgggttttgggcgaggtgttgataggaacgatgttatggagagagtagcgggcgtcgatgaagagaaagagagaggggatcgaggagacggggtttggatttttgggtatagcgatttgaaagatggggatggggaaggttgtatcggtcgagtttaggacgttgagcggacggattcgcgggtttttggtcggtcgaggatcgagggtgttgtttatcgtcgt

SEQ ID NO: 7142 - DNA, 1133 bp, synthetic construct
  misc_feature 1..1133: note = Description of Artificial Sequence: Synthetic polynucleotide
  source 1..1133: mol_type = other DNA
cgagggcggtcgtttttattttcgggggtttttttaaaatggggtggggggaagttatcgttcgttttgcgttttcgcgggtgtgttttgagttttcggtcgttcgcggcgttcgttttcgtttcggtgtttgcggcgatttacgtttcgaagtagatttcgaaaggaaaaagcgatatttttgtttcgtatagagttaaatattggaagtacgagatagtcgacgtggattaggattattttggtttttcgtgcggcggcggcggcggcggttgcgcgcgggttttttgtggcgcggttttggggcgcgggcgcgggcggcggcggggttgcgggagtcgtcggggcgggaggcggagcgcggggcgcgggcggcggtggggcggcggttggcggggagatagatggtttatggaaaggtttttttttcggtttttttcgatatttaaaggcgttggggtcgtagttgtcgttatataaaggcgcgcgtagttaatgggagcggagcgtagcgcggcgcggtttcgtcggaatcgcgggggatagcggggatcgcgggcgcgcgggtggcggagggagggaggggtgacggttggaagggggtcggcggttaatcgttgcggttcgttgcggggcgcgagggaggggttagttttacgggaagcgtggagtttagcgcgggtttttggtcgttcgcgggtcggagagggcgcgcgtgaagcgtttttgtatagatatgggcggcgtgaatacggaacgtgtatatatggagagggacgtgtatttagatatgtggaggtgcgttttttagtgtagagagacgggtacgagcgtttttagtgtatacgattttgaggtttttgtatatcgcgtacgggttattcggggacgtgcgttcggaggttggcgtacgtgtagagtttgattgcgggtataagggaagttggaatgcgaataagtagtcgtaaataggatttaggtattgttatatagatatgtatatattaaacgttttgttaacgtaggacgcgtgttaagaacgtatttttagagatatatagagggaatatacgatgtagatataggtaagatacgtatattttttaggttttttgtttggcgtatcgcgtcgt

SEQ ID NO: 7143 - DNA, 2401 bp, synthetic construct
  misc_feature 1..2401: note = Description of Artificial Sequence: Synthetic polynucleotide
  source 1..2401: mol_type = other DNA
cggtttgatcggggcgtttcgtcgtttttttagtgtattttatcgttttcggttgggggcgtagtattttggagagaggcgtttggtttcgcgtttgggttgggggcgttttattttgcgttttgggggttaggggcgtttgtcgggtcgttgtcgaggggttttgtttatttttgtttagttcggagtttaggcgagttagcgcggcgagtttttttttttttcgtttgggtcgttttgagttcgcgttcgttttagttgttgtagttgttgttgttggcggttgcggggagcgcggggcgcgcgtcgaagaggtttgggcggcgaggacggggacgaggaggagtcggaggcggtaaggaggaagagcgagcggaggtcgaggggtttagcggcgtggcgataggattagggggtttcgagaatatgggttagtaggcggttacgggtcggcggtcggacgcggtgaatttgtcgcggtcgggcgcgtattggcgcggcgagtcggagtcgagcgtagtcgggggaggagggttggcgtaggggcgttcgggcggagggggtcgattatttattattaacgagttattatttaataagcggagagcggttcgttagtcgcgcgggaggcgttcggggaagggggttatcggtcgagcgtagcgtatattcgtggcgtacggcgggcggcgcggcgtcgaggatattcgggatcgcgcgcggagtcggggcgggttcgggggcggcgtagatttcgggcgcgggcggttcgcggcgttttttggttttcggcgttcggggttagcgtagttcggggcgagcggggcgcgggtcggggagggggagttgttcgcgtattttatttttttttttttcgggcgggcggcggcggttcgttgtatatatttcggcgtatttcgttaggtcgcgtatagcgtttcgagtttaggcgttttttcgtttttttttcgcgttttgcggcggcggcggcggcggtagtagtagtagtaatatggttgttgatgggtgtttggggtggcgttggcggcgggaggagttttttcgagtttttgcgtcggttgttcgttgttagttatggtaaatggtggcggcggcggcggcggtagtagcggcggcggcggcggcggcggaggtagtagttttagaatgagtagtaatatttacgcgaattattttagtttagacgcgttttttttttttttttttttttttttttttttttttttttttttttttttttttttttcgtttttggtttacgagtttaagatggatgcgtttattatttcggtgattatggaggtgtcgtgcgatagtcggggttaacgtatgtggtgggtttttttggttttttttatggtgatttttttcgggggtttttttattattttgttttggcggacgtttaagtatttgtggatcgtgtgttgttattgcgggggtaagacgaaggtaacgcgcgtttcgggcgttcgttttttgcgttagttttatcgtttttcggcgttttttgtagtttattttttcgtttcgcgtcgcgtcgtgtttttttttattttcgtttgtttttttttcgtcgtttttttttttttcggttttttcggtgttttcggatcggggtagcgggcggcgcgtcgggggtgaggagttgtttttagttagtgcgtttcgggacgcggacgtttaattttgtttttttgtttattgtagggttgttggcggttgcggttggggtcggggtcggggatttataggttcgggtgtcgtggtgcggggtggggatagttaatttagcggggacggaggaagttgggggtagttgggtgcgtgttttgtatcgtttatttgtcggggttcggtttttggcggtgggcgagagggagtatattcgtttatattttaggaatttgttggggagatgagttcgtggggttagaaagaagggaaaaattttttgggtaagggagagaataattttgtataagggaatttcgggggaggagtatggttcgagataatagggggatttcgaggggcgagagaagttggggagatttattttattattgggggtagtttacggggttgttatttttggaatgtgtcgaggtcgtatatttgatgtaattttttatttcgttttttaggtgttttagtggaatatattttaagtttttcggtttttgtttttttgtttttaggttatttattttgggttttcggaaatgttattagtagcgcggagttggagcgggagttcgtttgaggtcgcggttttacgcggagcgttttttttggcgttcgaggtggttagatgtcgtcggttttagttatttttggtgtagacgtttatcggtattgaggttggcgatattttcga

SEQ ID NO: 7144 - DNA, 769 bp, synthetic construct
  misc_feature 1..769: note = Description of Artificial Sequence: Synthetic polynucleotide
  source 1..769: mol_type = other DNA
cgttgagtcgtagggaagttgcggggttagttgagtagtcggcggtttgttgggtttttagtgtcgcgcgatagtacgattcgagataaggtatttggggttggtgttaggtagaggtttcgcgttgcgtggtcggcggtaatagcgtttggcggtcggtttcgggcggggttgtaggcgtcgggttttcgcggtcgcgaggcggggttggagggcgttgcgggttgcgcggaggttgcgggaagcgcggggagtacgcggagttcgattagtagggagatcgcgtcgcgtcgggtataggtacgggattcgcgttttaggagggcgtagcgagaggcgtattgcgtatttaggggttgcggtttcggtcgtcgtgcggtgataagttgatttttcgtcgtcgtttagttaagttcgcgcggggtgttggcggagatgtcgtatgggaggtttttttaacgaggtgtaaatttaagttatttcgtttgagtgaatgaagggacggcgcggggcgcgggtggggtttatcgtgataaaagtttagtatttggtttaaattttttttttttttttgttcgtaggattagaatattcgatattaaaatgttttagtgtagtagaattttttagcgatttcggtggcgggagagtagtattttttaggtatagttgtgcgtatttttcgggttttatcgatcgtattatttgatcgcgggaaacgaaatttgagtttaggaatttgaattgttttacgtacgttcgttttcgg

SEQ ID NO: 7145 - DNA, 1169 bp, synthetic construct
  misc_feature 1..1169: note = Description of Artificial Sequence: Synthetic polynucleotide
  source 1..1169: mol_type = other DNA
cgggagttaggcgcgcgggcgggggttttatcggttatttcgaaatcgtagaatgttttagggttttcgggatttgtgggtttaggggaacgttcgggacgcggagcgggtttagtttatttgtcggacgtttttttcgtttattcgaattcgggagtttcgtaggagggatttttttcgtttttagtgattatagttcggattcgggttgcgttcggcgggtaaggttgggagtttttcgggtcggaggacggggcgtatgggtttcgggtttgtagaattcgcggttgcgggagttgggtttttttttttttaattcgggtcgcgtttcggttggtcggaggaggtagagtaggggtgcggtcgtgtgttcgagcgggagtggggcgtttattttcggggagaagggggatcgggaaaggcgtagcgcgtcgagtattcgtttatatttcgttcgtttttcgcgcgagtcgggtgcgtttttaatcgaatcggggcgggcgtcgggagagtcgggttttttcgagattcgcgtttttttttcgttttcggtttattcgggttttcgtaggattagcgcgaatagacggggcgattcgcggtcgagatttttatttacgcgcgcggcgcggttagatcggcgagcgttttcggttcgacgtttttttcgattttcggattttgggcgttgagcgggagggggaggtattagtttcgttcggtttcgagtcgttttcgtttttttggttcgaatagggggattttaaggtttttttcgattttttcgcgttcgcgcgtatcgcgtattcggagaagaagttgcgcgcggaattattagataggagttcgcgtttttcgttttatcgtttattgcggtttcggttttttcgtcgcggattttttattttcggttttacggcgcgtttaattttatttgcggtttagatttcgcgagtttcgggtttcgtttattcggtcggcggttttttcggggcggagcgcggcgtttttggagtcggtatttcggatttcggcgtcgtttcgcgtatcgttttcgttttagtttttagtggcgcggcgttttttcgcgatattcgcgggtttttaggagcgagtcgattttcggttgggtttggagtcggggttaagtttattcggagggagtacgg

SEQ ID NO: 7146 - DNA, 6036 bp, synthetic construct
  misc_feature 1..6036: note = Description of Artificial Sequence: Synthetic polynucleotide
  source 1..6036: mol_type = other DNA
cggtgcggttttgggtattgattacgtttatatgtgatggttttcgtaacgtgtaggtttcgttggggagaggttagcgcgggttttaggttttagggtttcgggtttattgtcgggattttttttagttttttttttattggtttcgttcgtcgcggttgcgtcgggtcgatattgattttagcgatttttggggtcgttttagttggtagttagtattttttttgggatggggtttaaatgttagtcggttcggcgtttgtattagggttttatcgtacgtagttcgttgttttttcgtttttcgttaaggggtgcgataggtagggggattcgttggtttttgttttttttatttttatttttttgggtttcgtcggagcgtttgggtttcgggttttttgaatatcgtttgggcggggttttttgtcggggttcggttatatttttattcgtatttttatagttggggttgagaatgaaaataatttttgtaaagtttttattagcgaattatcggcggttgtagtgattataggtttcgtttttgcgcgtcgtaaaggtttttagttggtaggttcgtcgcggcgtcgtttttttttagtttcgttttatttgcggcgggcgtcgttatttttttagcgttgtttttgcgaagtagcggatttagatttagattcggattcggaggttatcgtttttttcgttcggggttaagtaacggttttcgataggggaagggtcgcgcgtttagggttgggttaggacgtttttgttagcgttttacggtcgggatttgaggtttagcggtcgtttcgtttttttttggattttcgcggtatagaggtaaggtttttcggtgaggcgcgaggtcgtcgtgcgttgggcgggggttttgagagtggtggggttcgggtgggtagaggttttggggcgatttatgggggacgtttatagcgtaggtttatggggtagttagatcgcgtcgtagggtcgggagagaacgttttagaaggtcggtttaggttattattttaggagggtggcggaggtagtggtcggggtttttttcgcggtcgagtcggtggtggttgcgattattatggggttgggtatatagttgaaggggggtattcgggtcgagcggttgggggagtcgtgtcggttggcggggaagttttttacggcgatttttaggttttcgtgtacgaagggtgcggagatgggagttttggcgaggttgggatcgtttacgtcgttgtcgaggagggagagttggtcgtcggcgggggtttcggggggttttttggtttttaggttcggggacgtgttggagttggttttgggggcggcgattttttcggtttggattacggcgtcgttggttttgcgcggcgggggttcggtcggggcgttttcgggcgtggagtttcgtagtggtagggtcgtggcgggaagcgtgttgcgtaggatgtggggtacgtttttatttcggatgcgtcgttaggtcgtgttcggcgcggttattttggggagcggtcggggtttttcgtcgttgttgcggcgcgcggcgtcggttgaggtaggggtcgcggggacggcgtcgtcgggtttgcgggttacgttgatgtgcggtagcgacgcgtagcgtttgatagttttcggtcgggcggcgggcgcgcgtataggtaggcgggacgggttttcggaggtggtgtgtcgggtagggcgttcgttagggttgggtcgggtcgcggggggtcgttgtcgggtcggggtcgggttttgtcggggtgtcgttcggagtttttcgtagcgcgaggagtagaggaagacggcgggtagcgcgggtcggtcgcggcggggcgaggcgttttggggggtagaggtcgcggattcggtcgaggatagttcggagcggcggcgtcgtaagttcggcgattttttgatgaaggttagttgtcgtcggaagttcgagcggtcggaggattcgttgtcgttggagagggttgaggttatacgtattaggtttaggcggttttcgcgcgttttcgggttcgtttcggttttcgttcggtttttggggttcggtttcgggattgttcgagttagcggtggcggtttacgtcgggtcggtttttgtatgaacgggattcgtacgggcgatttttgcgttttgtgttgtttcgttagaagggtgcgcgtcggcgttttgggtatcggggaggtttcggggtcgggtagggttttagtagtttgggtgatcggggggcgttttttgggtaggggttgggaggcgggcgaggtttgggaggagttggaggagggggttttggcgaggcgggcgggcggtgtggcgtttttggggggttggtttagcgtcgttagtttcgaggttttggtaggtcggtgtaggtttcgcgatcgttgttgttcggggttcgggattttggttggagtcgcgggttgtgttaggtaagggggcgttatttttcgcggtgtggcgcgggggtcgggggtttttttgggttgggtacggggtgtcgggttggggacgtagattattgttcgttttcggagtatagttggtatttcgggcgtggttttttgtgtgttacgtggtttttcggggtttgtaggggaacgggggttttcgttggttttgattgaggttgcgttttttttttttggtcgtcgggtattgtttattttttttttcgtttgtcgtttttttttgtgtttggggggttgtagggtggattttattgatagttcggatacgaaggataggatggagtcggattcggacgaggtttttcgcgtggtagttgttgtttggtgtagttacgtgataattgaattggcgtttttttggatggcgcgttattttacgttatttaggtcggaggttcggttcgagttcgttgttttttcgtcgcgttttcgggatttttttgcgggtcgtttatttagtcgggtggttcggggtttgcggcgtcgtaggttagatacggggggtcggcgtttgggtagggtcgagttgatgtatcgttgtagaagttttttcgcggttcgcgggttgggcgagttgtcgcgttcgttttttgggttcgggtttttggtgatcgcgggttttcggtttcgtggatggacggtcggcggtttcgagggttcgggttcgttgagggagttggcggaggagtttagggagtagtagggcggggtttcgttagtaatgaggttgggttgggttcgggcgggcggcggggtagttggtgtagttttggacggggtaggggttttttttcggttttgcggacgttttcgcgtaaaagcgcgagggatggtcgatgtgcgtcggtgggttggcgtgggcgcggtcgtcgggggtttttcgttcgagtcgttgtcgtagaagtagtatacggtttttttagtgggcgtcgtgaggtatagcgattggagcgtttcgttttcgcgggttcggtcgggttttgagtcgtttttgtttgcgggggcgttcgggggtcggtttaggggtagttttagttttgttttgtttttgttcgcgtttcgagattgtttcgcgttgcggtcggcgtttttcgttttgtgtcggtgttttatggtttgtttggtagaggtggggcggtcggtgggtttttgtttgttcgttggtttttcgggttggtttttggggggtttttgtagcgtttcgtcgttgagcgaggcggcgttagagaagttgatcggcgtgtttttcgcggagttagtgtaggagtcgtttttttgggtcggggtcggggcgggtattaatatgtagacgggtacggggagtgcgcggcgatttggtattagcgcggaggttattttgcgtagtcgggtaggtacggcggtttttaggtattttcgtagtagttttagtttttggttcgcggcgtcgcgagggcgagaattcgtgggcgtcggttttttttttcgtcgtcggtgttttgtaaagtggaggtcggcgttttcggcgttttcgtcgcgttcggggtaggtcgagggtagtagtcgtagttttacgttttgttgtacgtagtgttcgtgtaaggttagcgcgttgaggttggaggcgtacgagaagttttcgtttggtttttttacggtaaagcgtacgttgtttgcgtttagtttagatggtagtcggtagcgttttcggtagtcggcgatgtttaggaagcgttttacgtagtttttttattgtaggttgaattgggtggtttcggggggattttgtggcgcgggcgttagcggtggcgttttgtttcggttgggaggtatggtttgttcggggttgtcgggtagttcgttagggttgatggtgtcgttgttttgttcgttgtaaggtttattggggatggagttggcgatggacgggttttcgaagttgtttagcgagtttatagagttgtagcggtttagtataagcggtgttttttgtacgtagtttttcgacgagttggacggcgtggcgttttttatttttaggtttcggtttcggttacgtcggggagtcggaatggttacgggtagcgaggtggtttcgggcgttcgttacgtgttgtttagtttagtttcgttggggtcggttttttttagtttttttagggaggagttattgttatttaggttattattttcgttggggtttgggcggtcggtcgaggatagcgaggaaagggagttgtatcgggatagcgagagtggttttttttgcgtcgttagtttttgtagtgttttgttggttatagatagcggggtagtcgttagtttttcgggaattttgtttaggtggtttgtcggtagttaggtttgttttcgggtttttggagagattttaggtttcgcgaggggttttgtattcgtttttgaggtatttttaagtagtggtacgtgttgataggtaggcgatagtttgatggtgcgtacgcgggcgtcggcggaggtggtttcgcgggtcgggggttcggtttggtagtcgggtaggttaaggttaagtcggttgggtcgaggttgtttatatttggggttttcgcggcgcgaagttagtgcggttagcgggtagggtagtatatgttcgcgtgggtagtattcgtcgttggtattgtcgttgttgaggttgtcgttggagaggttggcgtgggtcgttttgagtcgtagtagcgggtgcgttcggttttttgtttttcgtcgttcgtttttcgggtcgcggtatggcgagtaggattgggcgcggttttttcgtggcgttttttgtttcgggtttttagagttgaggttgaagttatcgtcggacgaggtgtgtagggcggagatgttttttattagttggtcgatgcgcgttattgtaagcgttagtttggttttggttttggtcgttacggttgtttttttattggtgtttttttttgtttttttgtcgtttcggcgggtgggcggggtgcgagttagcgtttgtttttgtaggaaggggttgtttaggaagagggatagcgcggtagggttggttggtttttcggtggtcgcggtcgtagttagggatgacggtgtatcgtcgtcgttaaagtagttcgaatcggaagtatagttttgggttaggtcgtttaggtgtcgtaggggcggtagcggttttttagtggcggtttcggttgtcggcgggttttgtttttttaggtgttttagcgtttgcgcgaggtgtcgtgcgtttagttcggtttttagcgttcgttgtttgcgtacgtataggttgggtacgtagttgtttggggatacggcggtggcggtcgtttggtgtttggcgggtcgatgggttagtaggttgcgtagggcggcggcgttgtttatggcgattattttgtgtttggagtgtattagattacgtagtatgtttacggcgtttaggttttatagtagtttttggttacgggcgttgcgggtcgataggttttagagcgtgtcgtacgcgttgtttacgatggttaggttgtgcga

SEQ ID NO: 7147 - DNA, 3400 bp, synthetic construct
  misc_feature 1..3400: note = Description of Artificial Sequence: Synthetic polynucleotide
  source 1..3400: mol_type = other DNA
cgtgtagttgcggggtattcggggttgggtttatttgcgttcggggtcgtataggtaggtagagagagtcgggtttagggtataggtttgttttttgttttttgcgttcggggaagggggcggtatagagttagtgattatagcgtagcgcgtatttgttttcgtaggttttcggagcgttttcgcgcgtaagaaggcgtagatcgcgtcgtttttgtagtcgtcgtcgtcgttttcggttttgagcgaggagttgttttggggagatttgtcgtttaataagtgtttggtgttcgtttcgttggtggcgttgttgggttcggttttttagttgtgtcgcggtgagcgtaggttttttagaggtggggcgaggttggggtttatttgtgcgtttatttttttaaggaaaggcgttgtgtcgttagggtggggtttgggagttttttttttagggttgggttttgtacgtttttaaagttggtttgtgtatttttttttaagtgacgggttttgcgcgttttttttattcggtgtggattttttgcggggtttatttttttcgtcgcgagtaggttttggttttcggatgaattttgtgtaattttttttgtttcgtagcgttttgtcgttttttttttgcgttttttttggggatcgtttagttcgtgagcgtttttcgggggtatttttgcgattttttttttgttaggggttttttatagttcgtggtcggggggaagaatgattaattgaaagagcgaggttcggagaaggggcgtcgcggtagcggagtttcggagtttttttttacggttcgggggtatttttagttttagtcgtatcgggggagttttattttaattgtttagggaggggggttttaggggtgagggagggatggatagtgtggatcgtgtttcggtttagttgattcgggtttcgattttgtcgttgtagacgtcgtttttggggaggtagtattttaagtacgtgtgttcgagttttgggtttcgttaagtttagtttcgagggagttatcgtcgtttttggtaagagtttttttttattgatcgcgggtattgggatttttatttttaaggaaagaaggagttcgggtcggggggaaggtgggcgtttattttaggattttattttgttttgtagtttaagttcgaggtttaggcgtttttattagcgtcgtttgcgtttcgggtcgaggtagaggttagatttaagattttcgggagtcgggaggttgtagagaacgacgaagaggagttcggcgaggttatcggagaggtcgttcgggaggatcgtgtgattttcgtagatcggggatttaaggagaggtttcggagagaggggaagtcgcggaaggagaagtcgcggaaggaggagagatttaagaaagagaggtcgcggaaagaggagaggttacgggtcgttagggagtttcgggaagttttattttagcgttgggagttacgcgaagggggttatcggtcgtgggtacgggattttagggacgtcgagtttaggaagaagtaggtttgggtgttttcgaggcgtttcgacgaggagtagcggtttgggagtcgttagaagtttcgcgtaggtaaggggcgggattgagtcggtttcgcgtcggagtttaggggttttttttggacgtttcgcgattttggcgaaataaagcgagtgttgcggtcgtagagttatttgtttttttacgtttggattcggtattaagttcggggtttgaaagacggtggtggggcgttttaggtaggggagagatagcgagcgttatagggcggattcgggtcgtgcgcgaggagagacggtaagggaggttttacgggttttttaatacgtacggatattttagtcggttgtttgttggtttttattggggcgatgtttggggttcgaataaatatgggaaggggcgcgagttggggcgcgttcggattttcggggtaggagttcgcgcggcgtaggggttatcggtagttatattcggtggttattatgttgggtacgtggtgcgcgttgatgcgttttttcgataggttgatgagtagtttgttcgcgtaggcggtgggtacgtagtagggtgggcgcgttagggcggttttacggatttgtatttttagtagtagtattacgtggttgtcgtagcgcgggttgcggtcggattgaggttagtcgtatacgttttggtaattgttggtttggtaggtttcggggatgagtacggagcgttcggcgcggaggtttacgttgagttcgcgtagcgcgtacggttcgtcggcggcggtggttttcgcgttgcgttgtgttcgattcggttcgcgcggatttcgttcgcgttattttacgcgtaggttttgtagcgtttttaggagtagtagcgttcgtaggggatcgtcgaggtcgtcggggttatttgggtagagcgcgagtaggcgcgttagtagcggggttgtggtcggaggtagattcgggaggtttcgtagttcggtagtcgtcgtttgtagtttagtagttacgcggcgcgttagggtcgtggtttacggcgtcgacgtggggtcgtgtaggggcgtaggattttcggtggtggtcgtagtgggttttagtagtagtagtagcggtttttcgtcgtcgagtaggcgttttagcgtcgcggggttcgataggttgattaggttttgcgggaagtcggttagcgcgttcggatttagggttaggcgcggcgcggaggttcgggtcggggggattcgtagcgttcgtattaggcgcgtgagcgtttttaggaaggggtttgcgttgggtggcgatttttcgagtttcgcggatggtttggaattcgtaattggaggagttgagagcggttacgaggttacgtcgttttcgttcgtttttgtttcgtgtttcggtgtttgcgcgtatttgggcggcgggaagggtacggtgtttagttggtcgtgcgtaggtagcggcgcgggttcggatcgcggtagtaggagtagggtcggggttattcgtgtgaagtagcggtggtcgtcgtcgaatagtagtgtttgtagtcgggcggtatttagtcgggagtttgcggtgggtgggtacgcggttggtttaggggttgggggttcgggggtagtcgattcggtttttcgtttttttttacgcggatttatttttttcgcggggttgtagggttaaggttagttcggagtcgcgttaggttttcgtagggcggtttatcgttaatattaggtagcgggtgtttcgggaggggtagaggttttgcggagattagggtttagttcggttggatggaggtttatttagtttcgttttatcggtttttttttttttatcgttattggttttacgt

SEQ ID NO: 7148 - DNA, 1143 bp, synthetic construct
  misc_feature 1..1143: note = Description of Artificial Sequence: Synthetic polynucleotide
  source 1..1143: mol_type = other DNA
cgggtttggcgttttgtttattttttcggacgggtagtttatttttttttattttcggttttcgtcgcgcgtattggcggcgttcgttttacgttttaagaatttcgttttttagggtgggtggggggtgtacgttcgatagggttaggttagggttaggcgtggagttcgcgtgcgtttcgggatttcgttcggggcgcgcgggaggcgtcgggggtcgcggaggcggggcggggaggggtcggcggcggcggcggcgcgcggaggagatcgtagtgcggtcggcgttaggattcgcgggggttttttaggtcgcggcgtttttcgtttttttttatttttcgattttttttcgtttttaaaatgaggaaacggagtaattcgttttaagttgtgtagtcgggatcgtttcggggtgtgtagtcggttcgcggaggtttttttgggggcgggcgcggggcgcggttcgggggcgttttttgagtaggtgagtacgtcggcggggagacgtggagagatttcgaggtcggggtggggggaaatttcgagggttttaggcgggggtgggttcgggacgtgcgtaggaagggtcggtgtgtgcgcgagtgtgcgcgtttcgggcgcgtagcgggtgcgcggttggggcggagggtgtttagaggcgatcggatttcgcgtggtggtggttggggttttttgggtgcgggtgtgcgcggttacgagtttcgggcgtgtgtattcgcgcgtttacgtggagggttgtgcgcgtgtggtcgaaaagcgtgtgcgcggttttgcgtagcgttttgcgtgttcgagtggttcggcgttggcgtttaggtgttttagtgtggggcggttgtgtgtgtgtcgggggcgggggataggtgcgtacgtttttaggtgtggagcgtttgtgcgcgcggatgcgcggggacgtgtgcgtatatttgtttttacgtggacgtggttttttgtttgtttgcgcgtagttgtgttcgagttttgtgtgtttttgtgcgtgtgtatgtattcgtatgcgtgtgagtatacgtgggattggaggattttatgggaggcgtattttggaggggtcgagatttattttttagtatcgtttattttttagttattagcggtcgg

SEQ ID NO: 7149 - DNA, 220 bp, synthetic construct
  misc_feature 1..220: note = Description of Artificial Sequence: Synthetic polynucleotide
  source 1..220: mol_type = other DNA
cgtggtaaattcgggtttcgacgatagaggtagcgtagaagttcgtttttaaatgagataattttattaaaattataattttttgtatttttatagcgtttttttagtggcggagattttaggtgttttacgttagggtttattagagaatcggggcgatcgtaagtttagtcgcgggataggcgaggttcgttagttttacgaagcgttatcggtacgt

SEQ ID NO: 7150 - DNA, 1860 bp, synthetic construct
  misc_feature 1..1860: note = Description of Artificial Sequence: Synthetic polynucleotide
  source 1..1860: mol_type = other DNA
cgtacggaagtttttgtttagttgttagcgcgcgtcgttaggggttgtattgaagttgtggattcgggatggggaggaggttggcggttttcgaagtagggtttatagcgggggagggttagcgtcgtttggcggtggttgcgcgtggttagtgcggatttaggttcggttcggtcggcgttgtttgcgtgtggttcgggcggagcgagggtttttggagttcggttcgttttgggttttaggaagttcggcgtgtagcgttagaggtcgcgtgtgttgggggagggaggagtatagattgtgtttgggggtatttaggacgaatttatagaggggtggttttgttttatttagggggtgtcgtgggtaaaggttttggggttatttgtttggtgttttggagggcgtagggtaggagtcgtcgaggttcgcgggttattgtggggcgcggaattttagattaggtattcgcggtttaattttcgggttaggggattcgcgggggttttacgaatttgtttggtttatttgtgtaatagaaattcgttcgcgtttagtagcgttcggggtcgtttgcgtcggattcgtagtttagtatttttcgcgttttggatttcgaggaggttaggtagagagcggttcgcgcggttttcgtttgcgtttttagtttcgcgttgggtagcgggatatgtttggtttcggcgtcgttatttcggttttcgtttgtttttgagtgcggagttcggagtttttttcgcggtgcgttgggttttagagggttagaggttattagggggtcggtatcggcgggagtttagtcgggcgcgttttcggtttttttttatttacgtttttcgcggtcgttcgggtttaggggcgtagcggggaggagatttcggttagggtcggggagcgcgagggcggggcggggttcggcggggaggggcgcgggcgggcggggatcggggcgggggtcgggttcgggggcggcggcggcgcgggcgggaggaggaggagtttttcgcgcggggtaggggcggagcgagcggtcgcgtcgcggagttaagtgagttcgtttcggagtcgcgtcgtcgtcggtttagtatttcgggcgttcgtcgttttcgtcgtcgtcgttagcgcggggatgtaggatgtaggcgggcgttaggttttagcggcggcggcggtagttgtagtagtagtagtttcggcggcggtagttttttttttggtcgatggacgtagagtcgtcgtcgtcgtcgttttgggtttggatggtgtcgggttcggtcgggttgtttcggtttagcgcgggggtcgtggttttttcggtgttgttcgtttcggtttcgtcgttcgcggtttcgttgtttttcggttttttcggttggtcggtttcgagcgagtcggtgttttcgttgttgtcgttgttttttgcgttagatttcgtcgtcgtcgtcgtcgcgtatttttttttcgcgttttacgggtaggtaacgtgttttcgtttcgtttcggttcgggtcgtcgttttttttgtttttgggcgcgttttgttcggttcggttttggttttcggttcgcgcgttttttttttcggcggttttcgtcgttttaaatttttaggacggagttcggtagtcgtgtttcggcgagaaagttcgtgtttggacgttcggtcgtttattttcgtagttttggtaggtgttttcgggtgtttggacggagtcgtggagggattcgtcgtttaggttcgcgtggggatcgtagggaattcgcgttacgtcgggggttattgtttatcgcgaggtgttgaagtggtttcgtgatcgtcgcgggtcgtggttgatatcgcgg

SEQ ID NO: 7151 - DNA, 441 bp, synthetic construct
  misc_feature 1..441: note = Description of Artificial Sequence: Synthetic polynucleotide
  source 1..441: mol_type = other DNA
cgtcggggtttcggttgttagcgcggtcgttatcgtatggttgaaggggattgaggtcgagttgggtaagaattttgggcgtagattgtgaagttgattgcggggaggtttgggtttcgttatagtcgttttttatcggttttaattagtttcgttttttttttcgggatgtcggatcggtatttttattatttttaggtttttagggggttttggcgttttagttgtggattttttaatattcgtaggtcgtagggttatataggttgggtttttacgtgtagaggatataaagtagatagacgaaaattggagtttcggcggtagcgagaaataaaggtcgcgttaaatttcggaagtcgttttgtttgttttagttgcgggtttgattggacggtttttcgtttagtgttttcgattggataacgtttaaggtttcgt

SEQ ID NO: 7152 - DNA, 5587 bp, synthetic construct
  misc_feature 1..5587: note = Description of Artificial Sequence: Synthetic polynucleotide
  source 1..5587: mol_type = other DNA
cgcgggaagaaggttttggggggggcgttttcgatttaattaggaaggagtatgtatatgtaaatgcgtttagggggcgggttttgggttcggagtttttcggggcgtttcggcgtagttttagttttgcgttattttcgcgcgtgcgtttttttttcgcgattttttattcgagtcgtgtttttggcgtagtaggatcgtttgtttcgatggcggcgacgttgacgaggtagtagtagttgtcgcgattgtggtggtgggcgtgtgggtcgtcgaggttgtcgcggtttcggggattgcgggatcgatggcggcgggagggttttcgggcggcgggtttttgtcgtcgcggtcgggttcggaggtggtacggttcgcggcgttcgcgttgttggcgttggcggcgttggttgggtcgtggcgacgcgggtcgttgttttggatgtgggatacggtttcggcggtttgtatgttgggcggcgcgaagcgcgagagtacgcgtagtatcgtttgggttttgtgtttttgcgtgtcgtcgtcgttgtagttcgatacgcggtattcgtatacgttttcgttttgtagtcgtacggtagatagtcgaagtcggtgtgagatgttattgttttggacgcgtacggtttgtaagagagtagggttagaggtcgggttgggtagtttttaaatttatttttttggttattttggtcgtcgcgtttttttattcgcgtattttaatatttttcggattttggtttgtttattattacgattcggttttttttttattcgcgtttatttagtggtatagggtttttaattttgcgtggacgttaggtagttagttttttggattgtgtttttacgtttttattacgttaattaaacgtttattttgtatttgtttcgtttatataaattaatattgtttgttttttcgtagttggcgttttagaagggtagagtttatttttttttttttttttttgtatttttaggaaattttaggttggattttttgttttttaatttttttacgtttttttcgtttcgacgcgttttaatcgatagtttcgttttagtcggttttttttatttttcggagtacggagggtttgttcgaatcgttttttaaggaaagttattttgttatcggatttcgttttttatagttaatattgtgtttttttaagaaggtaagtaacgttgaggttgttgtttggttttttggttatttgttattaattcgttttttcgcgggatttttagaagttttttagcgaagtgttttttttttgcgtttcggtggggatttcgggaagtattgttttacggtttttaataaatatttagggagtttttatttttgaatcgagtttacgaggaggtttcgttatttttaggtttttttacgttttaggtgggaagtttgggcgtatttttttttagagttagtaattttatgattcgggtttttcgtagtttggtataattattttttatttcgttttttgtaagtttgtaatatttcgtatttagattcgtaatttaggcggaggataaagggttgtagcggagggcgtagagtagatgtttagggcggggtagagggggcgggaagttggcgttacggtcgcggcgagggcgagtagtcgcgcgttttcggtgttaggaggaatgttcgtagagcggaggttggtaggcgcgagaggttttaagcgcgtagttcgattaaggggagttttataggttagcgtcgagtcgaattaggggatttaagttttggatttttgatttatataaaagagaattcgattttgtaatcggcgatagatggcgttcggatacgtcgagtagttatcgatgtaaggttgcgatcgttgttttatttgcgcggttttatatgcgcggtcgtcgcggtttgttaagggagggagttgcgggattcgaggcggttagaaggggtttttcgcggttcgcgttgggttttatatttacgttgattttagttgtatttttatttgttatttaaaatgtaaagagggagagagagacgtgaggttcgcggttttttggttaggggaattcggattcgtttttaggtaagggtattttttttcggtaggttaggatcgaaatcgttcgggggatgggggttgagggtataaaggacgttcggttttttaagagttttttaggaggaagcgggttttggagttagtatggtgtttgattaacgggtggttgttttggtgtatatttgtcggttgaattggggagattggatggatattagggtgggaaggaaagtttttttttttttttttgggtatttttaggttttgtcgcgtggtttaaaatttttttttagtttattgggagtcgtgaagaattggagggagggtcgttgtgtttggatagtatttagcgggaggtttagtgggagtaattttgggtgggattttgggagaatgtaggtgtgtgtaggtgtaggtgtgtgtgtaggtgtgtgtgtacgcgagtatattagagtgtgtaagagagtgtgggttttgaggtagataggtagcgtgggtttgttttcggttatagagaagtggtttttttgtgtttttgagggttggaggttttgtcggtttttcggtattcggttttttggtggtttttggaacgtagtcgtgggagttttggggtttttaaagtggtagagggcggggagagtttgatgggattaagggggttttttttattatttagtatttattagagggtcgtagttagcgagtacgagtaagcgattaggttgaggtgtggttttttaggggttgggcgtgaatggagttttgggaggtggtgggaatagcgatgttgttaaaataattgataggtttgggggtaattattgttgattttgaagatgttttgggatgcgaaggtggaagatgggttgcgttatagggcggcgttttgcgcgagtgaagttcgttgtttttttttttgggttagttttcgtcgtttcgggcgcgagtcgggcgcgcgtcggtatcgcgtgggcggcgggttattttgtttcgggcgttcggtacgttgagcgttagttcgtgtagtagttttcggggtggttttttgaggtattattattgaatttttagcgaatacgaggtggtttcgttggttcggaacgcgtagggtatttcgatgtcgtttttttttcgtattgttatatttttggggatttttgtgaatgtagttgggggtggggagagagagagaggcgtgattagttgtaggtcgggggtttggggtaatttaaagcgaggtagtcggtttttggttggttggttttgtgttttttatttcgtagttgttttttggcgtacggtcggaggggttagtaaagttcggggaagcggttgtagggtcgaggtagggatcggttatcggttgtttattgttttttttcggatggggcggggcggtaggggcgattcgtgtttttttttcgtttttggtcgtatcgttagagtttggttggggcgcgtttattttcgtttttcgtaggtatttttttcgtagtcggggtttcggcgggattgggaacgattcgggcgcggcgttgttgttgcggcgatttttcgtcgttcgtttttttttattttttcgggtttaggttgtatagcgggattgttggagatcgcgaagtttttcggttcgtttttttttttttttttttcggtggcggttttagtaaagattttttcgagtttatagcggtagtaaagttttcgcgtttatcgtcggttacgaagagtagtagggtatgtagtagtagaggcggtaggtattcgagggtatcgagtcggtttcgttgttttatttttcgcggggggcgcggtggcggcgggggttcgggagcggagaggcggcggtcgcgtgggttcggatcggtttcggttcgggttaggacgttttcgagtttgttatggtttcgcgcggcgtttttttttttggtcgtcggcggtcgttaattagtttcgttttttcgtcggtttgttcggtgcggtttcggcggggggcgttgcgcggggtgtgtaggagacgcggttttatcgggaggttgttggcgatcggttagtgtttttttttgttcggtcgtttataggacggtggggattcgcggtttagtttttgttcggcgggtcgggtaggggttgggtcgcgtcgggatttatttttggtcgagggagtgcgtgttacggagtcgcgagtttttgtttttttgtttttttttggttttgttttcgattgttatttttttcggttttcgtagtcgttttcgtcggttttttcgcggtttttttcgtagggcgagtgggcgtttagtcgcggcgcgtagatttggcgttcgatttagcgtagcgcggggagagcgggttcggcgtggcggattcggagtcggagagaggcggggagagggggaggggaggggaagggagggggcggttagtggttgggcgttaagtcgtttttatcgttgtatcgttttcgttttttttttttttgttatagttcgtttcgttttcgttttagagcgtttttttttttttttcgggggtcgttcggagggattatcgtttttttggttggagtatagtttcgtttcgtattcgtttgggttgggagtttttttatttaaattttttttggtttttttttagtttgtacggttcgagacggtcgtttatttttgtttttcgtgtgtttttcggttttttttgtagtttttagtttttaattttttattttagtttgggtaattagttgtttcgttgtttggtttaggtttgggttatgacggatgggtgggcgttcggggtcgcgagaagggcggaacgttgtgtttagtcggagattacgttgggtggcggcggtagcgtcgggagtttgtagtgcgcgagggagaagtgagcgtatagcgtttagcgagtaggtgtttgcggcgcggagagcgtatacgttagttagttcgtagcggtcgtgagtgacggtaggggcggcgggggtggggtggggtggggagcgtcgggtacgatttagggttcgggaggttttcgggagggggcggggtttttgtttttggatcgcgggtttttgtgtttttacgcgtttttcgtcggtcgtggttttttttttgttcggtgtaaagcgagatgtcgaggcggtaggaagtcggaatttatttttcgtttgttttggcgtattcggtatttcggtattttttttagtttttattcggagtttgttttttttttagttatttgagggagcgcggtttggttttcgaaggtaaatgcggggtggatatgtggttcggacgtagcgcgtagttatagttataggggcgagttttaaggttcgttttgggttttttttatttttttttttcgggagtttttagttagtgcgtttcggtatttttgtttttatttcggtttttacgttttagttttgattttaggttggggtggggtagttcggtggatttacgtgtttgttttttcggttattagtttttcggaggtatcgt

SEQ ID NO: 7153 - DNA, 3643 bp, synthetic construct
  misc_feature 1..3643: note = Description of Artificial Sequence: Synthetic polynucleotide
  source 1..3643: mol_type = other DNA
cggcgcggcgcgattagtagtcggtttcgttcgttcgtagttttgtttttagcggcggttattgggatcgattgttcgttttcgatttaggtaagatgtttaattgcgatcgcgcgttttttaagatcgtttttcgagtttcgttataggtatacgcgtggtttaaatattttatttggttcgaaaagttagtagacgggggaaaaaaaaaaagttgtgcgagtagttagtcgggtagtttcggagttcgcggaggtcgttttttcgtcgtttagtcgtttagtcgtttatacgcgaggtcggttcggggcggcgcgtagttcgcggtatttcgttttcggttttgcgcgtttatttcggggcgcgtcgaggttatcgtagggtatttatttggtatttgtttttgagtgtgtagatcgtcgcggtttttatttgggtttttaaataagttttagggagaaagaaggaggtaaaaaaaaaaaatttaattatgtaaatggatttcggattgggaggcgcgggatggatttgacgtcgttattgtacgagttttcggagtagtttcgggtcgggtagatttatgggggcgcgttacggttacgttaggtttcgtcgtcggagtatttcgaagttaattaaagcggtaatgtttatttttttggcgatttttcgtgcgtgggtttattattttattattaaattcgatttcggcgggggcgggggttttgtttttacgttttttttttttttttttggtcgtttttttttttttttttttttcgttttttattttttttttttttttttcgtttttttaagtcgtttgttttttatttagtgaataatgaataaagatgtgagtgatgggaaaagatcgtttttttttttaattttagtagagagtaaagtcggttttaaagtaaaaatttagttgttagtattaaattgggaaagaaaatagcgcgtttttagttttattattttttttatatatatatacgtacgtatatatatacgtacgtacgtatattttattttaagtttatttaagttttggttggagattggggcgttaaggttagggcgcgcggggttgtttaattcgtcggggatattagggttggggaacggcgcgtgttttggttaggcgtgtttttcgcgtttattttcgtcggtttttttcgtcggtttttttcgcgtttttatatcggtcgattaggttcggcggttcgttcgggttgttcggtcgtcggatgcgtttagtaaacgcggtttttgtcggatttttgttaaattgtatagcggcggcggcggcggcggcggttgtcgggagaaggcgtaggaggaatcggagggtcgtatcgcgcgttcgtttatttcgtttttttcgttcgtttttcgtttcggtttcgtcggtcgtcggtttttattcgcgtatacgatttagtttttaggacgtatcgggtgttcgagtttcgtaggtcgggatatttcgtagttgtcgtattttttgttaaagtgaaaacgaaggcggttgataaattacgttttcggcgaggtattcgttagatataataatatttggtaaataaaattcggtcgtcgttgttattcgtacgcggggttgagatttcgttttgttttttttcggtttttagtttttggttattgcgtttttaattttaacgtttttcgttttttaatattttaattttttatttaattcgggaacggtggatatgttttttaataggtatatagtaggaattatttataatatagaagtgaaaagggggggatttaattttttatttgtttttaaagaaagttttgtcggagtttatttcgtagagtgaagagtgagtaatataggtttttttttgtttagttttttttttttttttttttttaattttttcgcgtttcgatttttttttattttatatatattcgtttatatggagatatttatattttaaattatttgtaaaattgtaatagatgggcgcgtcgagatttggatatttttttatttattaaaggaaagtttttttttaattttaatttttttttttttgtttaaaatatatttcgagtttcgtttacgattgttttttttaatttattttcgaaaaataatgttttgaagtaaatagaaaaaggtttattagtaaagattatttttattttagttatgtatttgcgttggggggacgggaggcgtttttttagattgtattttttttagacgtcgcgtaagttttgttttttttttgttttttagagtttttacgttcgtattttttcgttttgattggttttatttttttagtttgggattggtcggtttttttttttttataatttgttatttatttatttatttattttttttttggttttcggttgggtttttaggtcgaggttcggttggggtaggtgttgcgggcgtcgtttgcgtttgtaggcgttacggttttttttggggtcgcgggttcggattttggtattttagttttgaaattaatttttcggttttagtttggttaggttttcggggtataggaggtcgatgtaattataaaatggtagattttagcggttttcggcgttcgtaagtttgatatattgtaagtattagttaattttaattgaaaaaaaaaaaaggttgtaaattattttttttttacgggcggaggggtcggaatttcgtagtgagcgcggattagagaaagagcgtaaggcgaattttcgttttaggtagaggagaaaatggggaaagttatttgagtagaagttttcgcggttttagtttatttttttttttttttattttttttattttttagatttttttgaaagtttttcggggtttgagagtggttcgcgggtcgttcgcgggtggggggcgtcggtcgggttttcggagttggacgcggggtttcgatcgcgcgtcgggcgttaggtttcgggatttttttttaaagtaacggtttcgggatcgcgggcggggaggcggcggtttaggcgtaggtttcgttcgtcgtcgaagttttttagcgttatacgatgttcggtcgtagtcgtcggttcggttttttttttttttttttttattttttattcgttgatagtttttttcgttaacgttatagttacggatatttaattagatcgtattttttaatcgcgatggggcgagaaggaatcgggcggtaggtttcgtcgagatggggagggggaggggacgggggggtcgcgttaagagtttaaatttattttgttatttttcggacgtcgaagttgtttttttattcgtcgtcgttttttcgcgtcgcgtttttcgtatcgcgtcgcgtttcgtgattttttttttatttttgttttttttattttaaatattgaaacgcgggcgttaggagtaaattcgggtacgtaaacggagcgttgtaaaagattgtgtttaatgaataatgaaatatgtttatacgattgatttgattatttttcggggttgaggggggacgggcgttttgttcgcgcgttttattcgtttattcggtagagttttgcgaattgtttttagtttagtcggggtagggcgggttcgatttttattagtttttttttagaatcgtttcgt

SEQ ID NO: 7154 - DNA, 808 bp, synthetic construct
  misc_feature 1..808: note = Description of Artificial Sequence: Synthetic polynucleotide
  source 1..808: mol_type = other DNA
cgggattttttatatttcgggtcgtagcgtattgtgcgagtggagggggtgagttttttagtagaggcgtaaggagggtgtagggtgcgcggtgtggttgtgggttgcggataggggtcgggggcgcgttcgggtcggtgtcgcgtggtgggagtagtaggcgcgtaggtagcggggagttttcgcgtatttagttcgcgggtgattattatgcggcggtagttgttttcggcgcggtgacggcgtttttaattgattttattatttttttttcgtaaggtgaagtgcggtcgttcgcggggttcgggcgcgggtagggtcggttggtagtcgcgggtcggcgggggtagcgttcggtttcggggtggtattatcgtcgggcgtcgcgttaacgaacgtaggcggcgggaggttcggcggcggggttcgcgtttttgtatcgcgatcgcgttagaaaatatttcggggttgggcggcgtttcggagacgtatttttttgttatttttatcgtttttggtaacgattattaatgttattatgttttatttttttttattttttttcgtttttagagtcgcgttcgcgcgttcgatttttaggcgtttcgttttttttggaattaataataatgatttttaattaattttttgttagggttgtttgttcgtgaatggggcgttttttcggttcgcgggcggtaggcgttttagttcgggcggggggttagttttcgttttttcggtcggattcgcgggggttcgtaattcgttcgggcgtcggttgggggtggtttcgtagttttttcgg

SEQ ID NO: 7155 - DNA, 3415 bp, synthetic construct
  misc_feature 1..3415: note = Description of Artificial Sequence: Synthetic polynucleotide
  source 1..3415: mol_type = other DNA
cgggggtttttttgcgtgtttcgatatggtagtatggttgttgcgtgtatttcgtatagttcgtgttgtgcgtggcgggttgtcgttgtaatgtgtagtttattgatattgatggatgcgttaatggttggacggatagatgttagggcggatcgtatagcgttcggcgtttgagcgggggagggttaggtagcgatttagcggcggcggtcggttacgcggagattcgagtttaggtcgcggttcgtagtgggagggggtcgaaggaatagaggtttgtaagaatagcgaggggatggaaaggaggagaaaagcgcgattagggagaattatacgttttcgtgtgcggcgtttcgcgttgtgtatacgtcgtatcgggcgcgtttaagtgggagtttcgaaggtgagttgggagtcggcgggagttgatttcgtgcggcgtaattcgtttttaggcgataggagtttagcgcggttattagaatggtgaggtcgtcggcggtgtcggttaatttatcgttttttcgtttgtaagaagcgttttacgttttacggtcgcgttttttcggtttggaggagtagcggttttggtttttgcggtcgcgggtatttaacgcgtacggcgttttagttttcgagttcgttagttcgagagtttcgtcgtagttcgtttcggattttttgtttcgtttggggttcgtattttataatttcgagcgtttttgcgcgcggaaaggcgttggaggcggttttatagtcggggaggttagcggcggcgtatttgtattttgggagacgtttggatttagtttaagttcgtaggttgggcgagcggagatttttgattttatcgtgtgggtgagattattgtttttcggtttaaaagaaaagaaagtatgttgtgaatttttgaaataaatttgtaaaaatagtcgtagagaaaaaataaaaaggatatagggtagaaaaagagggagaaagagattaaaaaaagaaaaagataaggggagggggaaggaaggaaggagagaaggaggaagaagtttggggtttgttgttttaggagcgtttaggtagtcggtgttggagcgcggggcgttcgttttcgtcgggattgtcggtttcggggtttgcgagagcgttagagttttagtcggcgcgttcgggcgtagggtcgtttcggggatagtgggttcggaggtcgttttcgcgttttagtagtcgtcgttcggtagcgttcggagtcggtttcggcgcggtcgttttattttcggtttgagagttggtttagggagacgtaatcgagttcgtagcgtatcgatgcgtcgtcgttcgcgtcgttcgggtttcggttttcgtttagtcgtcgtcgttcgggggtcgttcgtatgagtttcggtttattcgcgtttttatcgtcgttcgtaagtgagttcgcgtcgtttcgtcgtttacgtcgtttagttagtttttttttgtcgcggttagtcggtcgggtcggttcggagttttagcgatttcgattattaattaataattaatttttttagtttagtagtttcggtaggtcgggcgcgggatacggcgcggcggttttttaggttttcggggggagtttttggcgggggatgggtaggggagttcggtttttttttttcgttttcgtttcgttttaggatcggttcgcgtcgtggatggggggcgcggttcggttttcgggggcgaggggcggggtggagggattttgattattttaaagttaggagaggaaatttgaaggaatttttttttatatcgattttcgggacgggtttaggaaagtttgttcggggaaaaaaaattgggggaagtggttacggcgggttttgggggaggagttgggtggcgcggggtttgagggttgtttttattcgtttcggttcgcgttcgttttttttttggagggggtttgttcgtgggttttggttttttcgggggacgttagtttcggttcggggattacgttgggggtttcggagtcggcgggtggagaggagtgcgagtcgggtggggtagttggggggtggttggggacgaacgttgggtgggaataggggtggggggtaacgagcgtttcgggacgggttcggcggggttggcgtcgcgttttcgcgtgtgcgtacggggcggaggcggaggggcggtatttttttcgttggcggggcgggggttttacgcgggtttggggtcgggggcgggggcgcggcgttttcgcgggcgggcgattgatacgattattttttttttttttaagtttgtttgttgtcgacgtcgtcgttttagtcgcgttacgggtagaagattggatcgtcgagtttcgggtcgcggcggcggttgcgcgttttttcggatgtcgtgattttcggtttaggggcgggggtcggggtagtatcggttcgggtcgttttcgcgtttttttttttatcgttttgttcgtttttttttcgttttttagtttcgaatttcgcgtatttcgtttggggacggggcgggggggggtagggtcgtcgttttttttcgttttttttttttttggtttttggagcgatttgttaaattttttatttcgtcggtagcgcggttttttttttttttttttattttttttttttttgtttttttttttttttcgtgttttttttttttcgagtttttttcgttcgttttttttttttttttcgtacgttcggggttcgcggcggagcgcggcgcgggggggacgcggagagtttgggcgtagtagtattttgcgggcggtcgtttttcgggggggaggttgagagtaggttcgtttcgttttttcgcgggttcgtcgttttttttttttttgtttttagttcggtagcggcggcggcggcggtagtggtagtcgtcggagaagtattatgtcgaggaggaagtagtaggcgtttcggcgcgtagtaggtacgagtcgtttttttttttttttgtttttttttttttttttttttgttcgtttcgcgtttttagcgggcgcgatttcgtttttcgtttcgtttttttgttcgtattgagtaatttcgggcgtcgtttttttgtttgggtgcgtgcgttcgtttcgggtatcgggcgtttttcggacgtttcgtcgcgttttgtttttttttttttcgtatttatttggggagtcgttcgcggagcgcgttgagtcgcgttaggtttttatttttttagtttttcggttgtagagggaatgggaagtaatttcggtttggttttttttgtgggtggcgggcggggttatttgagtttttcgggatatttttcgcgtttttcgagcggtcgatcgtcgggggattgtttggtgttcgtcgagttagggagcgcgaacgagtgagcgagtcggttttttcgg

SEQ ID NO: 7156 - DNA, 3415 bp, synthetic construct; identical to SEQ ID NO: 7155
  misc_feature 1..3415: note = Description of Artificial Sequence: Synthetic polynucleotide
  source 1..3415: mol_type = other DNA

SEQ ID NO: 7157 - DNA, 1592 bp, synthetic construct
  misc_feature 1..1592: note = Description of Artificial Sequence: Synthetic polynucleotide
  source 1..1592: mol_type = other DNA
cgtgttttttttcgttgattcggtcgtttattcgaggtagtttcggaatttcggattttagttatgcgcgtagggaattgtcgggtcgagcgagtttatcgaagtagtttcgcgtcgtgcgcgtttcgagcgttcgttttagttttcgggtgagcgtttttagtcgtcgttcggtcgcgtttgggtcgttttttcggttagggggtagcgggagtgtaggtagcgggaagggagtcggtttcgtaggtttcggggagcgagcgggcgcggggtaggcgtcgggcgggaggaagttagcgtaggcgtcggtcgagtttcgggagtcgaggttggaaacgttggagcgggcgttgtttatcgaaggcggttcgggatcgggacgcgggttcgagcgatcggagcgcgggttgtcgtggcgttggtcgtagtttaggttgatgtcgttggatcgggcgttgtcgttatcgtcgtcgtcgtcggatttcgttaggttggttcgtgggttgttcgtaggttgcgcgttgagtttcggaatcgtcgcgcgtcggggatttcgtttttcgcggtttagttcgttcgtttcggtttcggggtcgtcgttgtttttttttttgcggtttagcgcgggcgtcgtttcgtttttaggtttaggtcgcggttttcgtcgttttcgatcgggagagtcgtattcgggttttagttttcgtagggttagttcggttaggagtagggtcgtttcgttcgcgttcgttttggagcgttgtatggttcggttcgtcggttttggcgcgttattttcgttttcgtttttcgtcgtcgtttcggtcgggtcgtcgtatcgttcgttcgaagttcggagttcgtttcgggatttttgggcgcggggcggggcggggtcggcgtcgggtcggggtcgtttcggcggttacgcgcgggtcgggggacgcggcgttttgttcggcggcgcgcgcggcggaggaatgtaagtttttaggcgtcgggtcgcgtttttttttcgtcgcggtttcgcgcggggcggagggatttttttgcgggggtaggaatgcgaggaaggagacggcgttgcggtttttggaatgtggggggagtggcggcggtcgcgttgcgtcgggatttcggaggggcgtggaggtcgggttaggacgtaggggcgggcggcggaggtatcgcggggagagtttagggtttgcggggcgttcgggtcgtcgggtcgttgggaagagttcggattttcgtaggttgagttggaggtagttggcgttattcgggtcggagagatttaagtagtcgatagttttttttatatttcgttttattttttttttttgcgtcgttttgtttttcggcgttgtagggtcgatttagtttagtttggaatttacggcgtttcgttcgtttcgcgtttaggaatattgtgcgtttagcgtagatgcgtttttacgattttttgtttggttcggggttatgtggtcgcgtatcggtttttgaagtttttatttgattgttggggaaggcgtttagaattaggagcgggttggttggggattggttttcgcgttgggtcgtttcgt

SEQ ID NO: 7158 - DNA, 903 bp, synthetic construct
  misc_feature 1..903: note = Description of Artificial Sequence: Synthetic polynucleotide
  source 1..903: mol_type = other DNA
cgggttcggttggtttttagtaggtttgtcggggtttttgtattttgtgttcgggatttttaatttgcgaatagtttggggaggttgagcgcgagttaggagcggattcgggggtgggggtaagcgttacgtgcgcgttaggtttttggtgtgttcggtaggcggcgttgcgtggttgcggttggtttcgagggtgcggggggcggcgattcgggagggaaaatttttgttttttttcggggtttgttttgttcgttttttaaattcgttttatatttttttcgattttcgtttttgtaagcgttatttgtagttttatcggttttcgtaacggtggtggtggttggtggggggtttcgaagtttgtttttggttagtcggatttcggtgggagatggaggtagaaatttcggttttttaggagaagggcgtttgtttatttttttatttttcggggtttggggagggggttgggtaggggcggaagcgagttggagtcgtgtttgtcgcggcgttgcggagtggaatagatggttggggaggggagagggtgcgtggcggggaggaggaggggtgcgggggtcggaggatagggaacgaggaatttcgaagtttggagttttttaggagaagttttttttttcgtttttttttagaaaggggggtatatatgcgtttgtttttttttcggagagttttggtttttgttttgtggtagattttgtcgcgtaattttttgttttagggcgcgttttttatttttaaattttcgtcgcgggacggggtggcggggttaggatcgttaggagcggttcgggtcgcgagggttaatggggtcgtttttttaggggcgaggaggcggcgggaaacgggttcggggtggggaacgagttttgggatcgt

SEQ ID NO: 7159 - DNA, 1592 bp, synthetic construct; identical to SEQ ID NO: 7157
  misc_feature 1..1592: note = Description of Artificial Sequence: Synthetic polynucleotide
  source 1..1592: mol_type = other DNA

SEQ ID NO: 7160 - DNA, 382 bp, synthetic construct
  misc_feature 1..382: note = Description of Artificial Sequence: Synthetic polynucleotide
  source 1..382: mol_type = other DNA
cgttttttatttttaatcgcgagataatacgggttagaggttaggaaattatgttagtattaatgcgggcgtttacgagtgcggtggatcgatgtggaagggtcgggacgtagttcgagttttagttttcgtcgtagcgatggtcgattttttagtcgcggacgttgaaagcgaggattttacgtcgatgatttttcggcgtattatgttcggcgggcgtttggttaaatagtttaagattgcggaattatattcgttattgtgtatttggacgttatttgtagatttagcgtttgcggggatttcggaaacgggagagcgggttttcggaaacggtgattaatgggaaacgtgattagatgttattaggcgaatagttcgt

SEQ ID NO: 7161 - DNA, 665 bp, synthetic construct
  misc_feature 1..665: note = Description of Artificial Sequence: Synthetic polynucleotide
  source 1..665: mol_type = other DNA
cggggaagtagggtcgcgaaggtttttgggaaatgtagttcggcgtaggaagtagcggaacgattcgattttttttagtattaagttgcgtttttaattttttagagttgggttcgcgggaggtcgttcgtgtaaaatttaggttgagtttttttgcgcggagttgtgagttttggaatatcgtggtttgttttttaggacgcgtaaatagtgaagttagtttcgttcgggtgagtcgcgggggtttttgggaagcgtcgtttttggtgtaacggatcgagatttgtggcgtttttagttatcgatagcgtcggttttagtgtcgtttttgttttagttcgcgtcggttttgttattttggtagcgttaagtgtggaatcggggtttgtgttcgcgggtttggtggtgagttttcgggaaatcgttagttttgagcgtcggattttttgtgttgggtgggagtgggggttcgcggttttggtgttttaatttttggaggaggacgtcgggcggggcgatgtttgtgtttgtggttttttgaggtagtgggagtggcgtgtgaaggattgtgagagtttggcgtgaagtgattgttatttgttagatattcgtttggttgagtgtggtttcgggatcgtgttcgtaagcggatttcgtggaggcgt

SEQ ID NO: 7162 - DNA, 764 bp, synthetic construct
  misc_feature 1..764: note = Description of Artificial Sequence: Synthetic polynucleotide
  source 1..764: mol_type = other DNA
cgcgggtatcggtttaataaggtgtagcgaatagtcgttcgttttcgttttaatttatagttttatattttacggtgttattgattttttcgtatttagttatataggacgtggataggtatacggggtgatagtttcgtattgaacggtattaatttttattcgtatcggagttatatagatggtttgcgacgagttttcggagatttatacgttattttttagtttattttcgatttgtagaatagaattggtggaagattttttttttgtttcgaaggttcggggaatttgtattcgggttttatcgttatttttagttggatggaatttagtttttacgggttcggaaagaagcgttttagttgttttcgttttcggaggatataaaggggtcgtcggtttaattttcgcggggttcgttgggaaacgtagttcggagtagaaaaggtcgcggcgtcgtagtgtttggtagtagcggtgtagtttcgcgtagggtttgtaatacggttttttttttattaggtttttttatattggttttttttcggttttttagagagttcgaaagttcggattttttgtagtttcgagtttggttcggttatagggacggggtttagcgttatattatacgggttggtgtggaagtgcgtaggtataagcgttttgcgcgttttttttagtaattagggcggggagttgagaatcgtaggttggtcgtagggaaaaggtttgtgcgtgggaacgcgttagtggcgcgt

SEQ ID NO: 7163 - DNA, 1394 bp, synthetic construct
  misc_feature 1..1394: note = Description of Artificial Sequence: Synthetic polynucleotide
  source 1..1394: mol_type = other DNA
cgatgttaggtacgttataaacgtagatataaatcgtaaagattttagagattcgttatagttagcgttagagttaggtattatcgcgtagttttttttgcggtattattttaatttttcgttagagaacggtatacgcgtacgtagtagtttcgtgtacggaaatattatttcgttagcggttaggtattcggtttaggtacgcgggggcgcggcggtcgttatttagtaaatattataggtagtacgcgtcgcgttttggtttaggttcgcgatattggggttttttttatttaatttacgttagggttacggttataggtttagatttgaatattttatttttatcgggattttgtagttaatttttatttttttttaaatttttcgatttttcggtaggtgcggttttatattttttttttgttttttgaagggttttagcgttcgtttttcgcgcgtttgcgtattcgaggtagaagtcgatttttaaaggtttcggtgaggcgtcgttgggggcggggcggggttcgtagttttcgtttgttttcgagtcgagaattaaatgaaaaataaaaaggcggaatattgtttttttaaattttggatcgtagtgtttataggggagtaggtttggattatttttaatggtattggttagttacggggcggttattataggtagaggtttgaggcgagggatattgcggtttttttggtttcgttttttcggttcgattattttcgtcgagattcggttttacgcgtttttttcggttcggagtagttgcgggatttgttttcgttttttcgcgcgttagcgtattcgcgacggagataggcgttttttcgtattttggcgtcgttgatttttagggttgggttattttttgagtcgggtgaggttggggttgggagtcgggcgttattgtggtcgttgtttttttgagggaaaagagcgcggagtgggttaggttttgtaggtcgggttaaggtggagaaaaggtttttgtggagttttaggtcggtgtgttttttttttcgggattgagtttttgtagttttgaggtttggaggttcgggcggtagtaattgtgtcggattaggttcgtgggtgcggtttgtggtgtagttggagatcgaggtttcgcgtattttcgttcgcgttttagttatttaggttcggtcgtagcgaaaaggtttaagagggaagttagaggtgaacgttttaggatgaaggttttttgtaaaacgttgggatttagatttggggtgggtgtttggggtttaggaggatacgttggatagtttcgaaaagatatagtgggtggtttcgggcgtgggtaatcgggtgcggaattatagcgtattcggagttgcgaatttagacgcgg

SEQ ID NO: 7164 - DNA, 949 bp, synthetic construct
  misc_feature 1..949: note = Description of Artificial Sequence: Synthetic polynucleotide
  source 1..949: mol_type = other DNA
cgttttagcgttttcgagttatatttgtgcggtttatttaacgcgatgtttggacgtagtttttagagaggaggtcgggattggaatacgtagtcggggaatggttgtaggtggtttagttttcgttttcgtttcgttttcgtttgggtttcgtgcggtttcgggtgcgtaggtgaaagttcggttttagcggtttcggttttgttatggatttcgcgttcggcgttttagattttcgcgtcgcgtcgttcgcgtttttgggtatttcgtaagtcgaggtgttggaggacgtgttgcgggagtagttcgggtcgttgttttagttggtcgttgtttgtcggtttaagcggttgttttcgggcggttattcgtttattgaaaatttttagttggtgttggagcggcggcgtgtggttaacgttaaggagcgtgagcgggtgagggatttttagggtcgacgttcgttttttttttttttgttttattattaaatatttggttaatattcgggggttcgtttatcgtttattttcgttcgaggcgatttcgagttttcgaggttttttacgtttttagtttgttaggagaatggtagtggttttttttttttgtattttcgtgtagttgttcgttggcggtcgttgcggtggtcgtttcgttcgttaattttttaggatttgtgtaggattcgggtttgggaggggatagaggaggggttttgataattttaaaaatgtttttttgggtaggtgttttaaaagtttcgcgtttagggggtgcgtttttattttatatcgtaggcgttggtgggtgtttgggacgcgtagggatttttttcgttttttttttttgttttttgtatttcggtttcgaagtatatacgagggtgaggagaaaggggggtttgacggaagtgattttttttttttaaagtaacgaaatacgacgt

SEQ ID NO: 7165 - DNA, 1365 bp, synthetic construct
  misc_feature 1..1365: note = Description of Artificial Sequence: Synthetic polynucleotide
  source 1..1365: mol_type = other DNA
cgtttaatagtatcgttcggagcgtttatttttttttatttcgtaaaaaaaaaaaatagggttattggttcgggtcgagagtcgttttgggaagcgtttttgttattaagcgttatttcggggtgtgcgagggagttaagggacgcggagatcgggagtagggttgggtttttttgtagttttagcgttggttttttgtttatcgtatttaggcgttgcgtcgtttttatatttatttttttttattttagtagcgtgcgggggaagtttcgcgtcggggttttttttagtaagattgtcgcggttttcggttttaattgtaaggtaaacggtggtagagtttttttttattttagtcgtgtgtgatttttatatttagtgtttttttttgtattggggcgtcggtagtggcgatttaggttttttagttttcgtttagtttttcgcgtgcgggcgtcgggatcgtagtatttgtgacgtcgaagtttagtaggtcgtagacgggagttacgcgcggttttggtatagggtaaaaatttacgtttaggtaggcgggtagttacgatgtcgggtaagtttagggtagattttcggtggcgtatagggaagtagcggtttagaaggtcgggtggacgtaggcggagttcgacggttgggaggtcgtcggcgcgtaggggtcgggtttcgttaggatggtttcgatcgagaaaggggattcgaagcgttcgggagcgcggggcgtgttcgggttagtaggggatttgggcgtcggagagcggttagagcgcggaggtcggattcgagagttcgagggagcgggtggcgggttgtttcgcggtttggggttaggtatgacgcggtcgttgttcggacggacgtaaggaagggagttcgggagaagtgagaagattttgtaaaaggtagcgagtaagatcggttgtttgggaattttttggcgttcggcgaaggtttttaaatttggcggggcggggtatggggcggtttttttttattgcggttcgggcggggtttttaaagtttgtgagcgttcgttttgtgcgaggtaaggtgggtatagtattaaagagtgtgtttttttttttttttcgtttttaaaaatgtttattttggggcggtcgtggggaggattttgagttcgttggtgattttgggcgaaatatttagttatcgggtttcgttttttttttttgtttattgaagaagggatgttcgttttttcggggttttgtagaggcggagttgtgatttggagagcggtagggtagtgtttgcggttttggttttagttgattcgcgtcgtttttgacgtagaagtttcggttagatttatttaggatcgcgcgg

SEQ ID NO: 7166 - DNA, 2638 bp, synthetic construct
  misc_feature 1..2638: note = Description of Artificial Sequence: Synthetic polynucleotide
  source 1..2638: mol_type = other DNA
cgtcgatagcgaagtggtaggtaatgggaatttgggcgggaagtaaagaattattacgatttatatcgcgtttaagtagtagtacgcgggaatttggtatatagtaggtaggcgtttatttaatatttgttatcggatttagtatttgggtagggagtttaggggtggagtggcggtttgggggatataaaggtttcgttagtttttagttgcgtttttcgtaacgcggggggcgggagtttagagttagagagagggggcgaaggaattcgtttttatttgtacgtcgtttggggttcggttaatttgtttaattatcgttttaaatgttagcgggtagtatataatacgcgtttattaataggtttaaagtgtcgtagcgttcgttttaaatgagaaaagtaggcgataaaagggggaaaaagttaagttttttaatttgaagaatgttttgggtcgtttcgaaattatttacgcgagtttaaaattcggagttagtttcgtagaaaagttgaggtttcggtgcgagggttgggggtgggaacgggggttgtgaataattcgttacgaaaattgggttttttaggaattagtttgtagtcgtttagtgaattcggagtcggaggataacgtcgttaatttagttttttaggttttttgttttattgttagagaaagttgatcgatttttaagaaggaaagcgagatttttttaaagcgggtataaatttaagtttttttcggtgtaggcgaagaattttggaggttaaggaagattttagaggtggattttaaaattttaattcgtaagaggggaaaagttaaagtaattttatttttatttaggtattggttagcgtagtttcgcgttcggtcgttagagagtagtttaatttcgtaaataagttttgtttgggatcggcgtagaaggttttattttttattttatggttaagttcgggggcgtattttgcgggtcgcggttttttatttttttcggcgcgttcgacgggtatttacggtgcgcgttttttcgggagataggggttcgttggagaggtacgggttgtttaggttcgggattattaggaaggggtatttagggtacgggggttttttaaagaacgcgttgttttgaggtttttttattgcgaataagattaaggcgaggtgaggtttaggttttcgggattgatagcgtcgcggtagggggttcgaggcgggagttggggattttagcgttttttacgcgcgttttacgggggttgtcgttaataaaggcggagggtaagggtgcgtttatttaagtaagggggacggtgggtcgttcgggttgagtagcggagcgtagcgggaatcgagagtggggggttgttttagcgggtatatattttcggcgaaatagtttcgcggtttttggaaagtgtttcggacgggttgcgggcgttttttcgtttgcggaggagatataaaggtaagagcgggtgagcggacgtagggtcgggatttttcgggggtggtcgcggtgtttttttattttcgagttcgagttgttgttttggtttttcgattcgttgattagggacgatttgatttcgtttaggtttcgttgcgtcgaggcgttatcgttgttcggtttttgtttttcgtttttttcgttttggaaggggattagttcgtcgttcgtttcgaggtcgtttttttcgtcggtcgtttcggcgttggagtcgtcgtttttttcgttgtcgtcgtcgtcgtcgtcgttttcgtcgtcgagttggggtatggtggggtcgcgggtcggggtcgtcgttttcggagtttttagtcgttcgcgttttgttcggttcggttcggcgtttttttcgttcgtttgcgggttcgttgcgttagtcgtcgtaataaagtttgatagggcgtggtttcgcgggaagcgggttcggcgttgttcggtcggggcgtaggcggttcggttcgggttttttcggtagcgtcgagtttagggttttttaattcgttatcgtcgtcgtttgtttcgtcggggcgttttagtttttggttcgtcggggaggggcgagcggggagggagggaggagggatcgtcgggttgggtaggggggtcggagggaggagtttcggttgtaagttgatattcgcgcgtttcgcggaattcggagagttgcggtgcgcgcgtatatatatatatatatacgtatttatatttatatgtttatattcgtattttttaggggttgcgtttttttgtaacgtgtatcgtttttaatttttttttgcgttttatattgtattttcggcggttttttttacggtttttttggagttttggaagttttgcgtttattttttcgtattttttaatttttttttaaagaatttttagaatttcgcgtaggtttttatttttttttatcgtatcggcgcgcgggcgggcggtattgttttttgcgggaaagtttcggacgtatatattggtcgcggggttttttttttgtttagagttttttcgagtgcgcgagttgatgtacggattaggatattggggatatttatggaatttcggaaaatgttcggcggtttttcgcgttttttttttgtggggttttaacgcgattttcgg

SEQ ID NO: 7167 - DNA, 1531 bp, synthetic construct
  misc_feature 1..1531: note = Description of Artificial Sequence: Synthetic polynucleotide
  source 1..1531: mol_type = other DNA
cgaaagttcgtataaatcgtatagaaaacgaataaatgtttttcgaatgtgagcgaatttatagtttggttagaaaaatttaatattgattttcgtttttttaattatagaattttcgaggagaaggggatacgttaagcgggtttgttaataatttttatcgtatattttaaagcgttgtaaattatatcgattattttcgattggaagtcgatcggttgagattggacgtgaatttcgcgattcgattataaaaggttaggaggaaagaggtagaaaagttaaaaggatgattaggtaggtggttcgagcggttattttaagttaattttttagaaattattcgtattgttcgggttattttttttttaatattcgtggttttatttattatgatgttaagaaacgtgggttaggaatggggtgttgttttttgttcgaaatttggaggcgtcggttttttagacgttttcgggttcgggtagaggggcggtaggggcggggcgggcgggtttcgggtttgggcgcgcgggtaggtggggcgtggcgggggcgtggagagtttaggttcgcggttatcgtttcgtttcgggtcggtttaggaggagtcgcgtcgggttcggttataagaggtcggttagtaggcgtttcgttagtattcgttcgatttcggttcggagtatcgggcgtttagcgcgggtgaaggcggagtcgtagggttggtttttaaagggatgttttcgttcgagcggcgagattagtttcgttcgtttttcgtcgcggtcgcgtcgtagtcgtttacggtcgtcgatatggttttttattgcggcgataatttcggagtgtattcgtagttcggtttgttttcgttcgtcgttatcgtcgtcgtttcgggcgttttttcggtagttagggcgttttacgggttggtcgattacgtcgcgtcgtcggtcgtcgtcgttaatttttatttgtggtttaacgggttcggcgtgggaggttcgtttttcgtcgtcgtcgtagtcgtcgtcgcgtatttgggcgtttcgtcgtcgtcgtcgtttttcggggtcgcggtcgggttttttttgtagttatcgtttgtcgtcggtatttcggttgtttttagcggtttttcgcgtagttcgcgttcgtcgcgttcgtttcgttcgtcgcgttcgcggggttcggggagttgggttggttgtttatggttagtcgcgaggatttgatgaagatggtgcggtcgttttattcgtattcggcgtttatcgttatggttatttagagcgcgttcgagcgtaaatttatttttagttatatttattagttcgtcgtcgatagtttttttttttattagcgtagtaaggtcggttggtagaattttattcgttataatttgtcgtttaacgattgttttaagaaggtgtttcgcgacgaggacgatttaggtgagggtcgttggtaggtgttttttagtcggggagggcggacgcgggtcgtaagggtcggcgtaggggtcggtgtgcgg

SEQ ID NO: 7168 - DNA, 2045 bp, synthetic construct
  misc_feature 1..2045: note = Description of Artificial Sequence: Synthetic polynucleotide
  source 1..2045: mol_type = other DNA
cggcgttttcgttttgtttgtatttttttttattgtttttttacgtttggaatgttttcgtttttgtagtttgtagatagcggaaatcgcgggtgtaaatgtgtaggggtcgttgatatgatcggttgtagaagtttatttagggttattcgaataggttagcgttcgggattgtataagaggttaggcgatgttgtgggtttttaaatttgtatagttgcgatattttgcgacgtgttattttatttttagtggggtggggtgggggatttttttcgtagttcgttgaaagcgaggtaggaattattgtaatttttttgtttaggttgaggtcgttatcgtttcgcggatgtacgcgttgtaggggcgtttttcgtcgcgggtacggcgcgggaagggatggggtttggtgggagtgggtaggtggcgggagaggcgcgtgttcgtgtattagaggttttcgtgcgtgatataggtcgatgagtttttgcgggttgtatttacgcggagttatagatcgaaaaggttagtcggtggtcggtgtgttaatatatatagagagacgttcgttaggcgcgttgtaggttgggacgaggttaggagggtttaggttggaggagggttgaggagggttgcgggggcgggtttcggcgtagggcgttcggagcggagggggcgggttcgaggcggggcgggtcgcggcgttgacgggttgtcgtcgttgtattcgtttttagttcgcggtgtcgagcgtaggcggaggtatatggtttcgacgggaggcgcgcggcgagtattcggagttcggttttttgtttgagtacggtagtcgcgttttcgttcgcgcgttttcgttttttcggtcggtagttcgcggatatgatcgtgtagtttttttttgggttgggatttgtttgaagattttttttatggaagcgatgtttttttagtaggagattttagggggatagtcggggcgttttttttttttgataggagtgtttcggttcgcgggaggtagttgtattaagaaggtgaggacgttgagcgggggttcgtgtttttcgtcgtcgtagtttttattgtcggcgcgcgtttttcgcgttcgttatagtagcgcgttaggcggacgtcgcgggaatttgacgttcgaggttcgcggtttttaatgagagttttagaatatttttcgtttttgacggttagcggtagcgtcgtcgtttttcgtagagcgttcgttttttcgtttttagagttttagttttttttcgagcgatttcgtagtttttttttcgtttttattcgtcgtcggttttgtagttcggttttttttttagtttaggcgcgcgggttgtagtgggcgatcgttttttttcgatttttcgtcgtgtttttgggtttttcgaagtggtttgggcgagtattgattgttttttggcggtgttagttttaaagttagggtcggcgatgtttgttcgggagcggtagtcggcgttgaagaaggtaggtagcggggttgcggcgttggtgggttcggtttttttatttgttcgtcgaggcgcggttgttttatagtagttttcggggggtagatatggggagtattgttttttatattagggttttggatgatttcgggttttttaggtgggggttatagtttgaggggcgattgtggatgataacgttcgatattacggggatatgtaggttcggttgggtttagaatcgagtagggtgggggcgggtgggttgtggttgggggttttgagggttgaggtgggggattttttttttgtattggtttttggtttttgggattttggtcgggttggatagggattcgggtgtcggtgtgggcgtgggggtagcgcgtgttttttgttaaagttgggagagggatgtaggtgataatttgtagcgttttatttcgataaatacggtcgttgtgttgcgggaggatttcgattcgggttaggtttcgttggaacggttttttgagtaagtgtacgtgggtcgcgggttgtcggtttttgtcgtttcgt

SEQ ID NO: 7169 - DNA, 476 bp, synthetic construct
  misc_feature 1..476: note = Description of Artificial Sequence: Synthetic polynucleotide
  source 1..476: mol_type = other DNA
cgggcgatacgttttgggagggcgggttggcggtttttttagttcggagcgcgtggaggttgcgcgtaggggttcgggacgcgggatagggatttcgcgtagtttaggcgtcggggaatcggggttggagtcggggatttgagtttagcggacgtttttttcgtttggaggttcggtacggatcgggatattagggcgttcgtggtcgtggttcggtttttggttgttgcgggtcgcggtttttagtgggtttttaggatttttttttacggcgggtatttatcgaggttgagaggttacgtcgtgttgttggggtttttcgtcgattatatttttgggcgttagttcgggtagagatcgcggggattggttaggtcgggttaggtcgggtcgggggagggtcgcgttttcgggtttttgattttcggcggcgagaggaagcggtatttgggttatatttttttcgcgcgggtcga

SEQ ID NO: 7170 - DNA, 455 bp, synthetic construct
  misc_feature 1..455: note = Description of Artificial Sequence: Synthetic polynucleotide
  source 1..455: mol_type = other DNA
cgtttttgtttagcgaggatcgtgtagaagcgggaatcgggtattggagggcgcgcgcggtacgcgtatttcggttggtattttttggtttcgcggggtcggaaagaatttcgaatattcggttttaaaaggtttttagttatttcgttttttttattttttatagtatagatggggaaattgaggtttggagaataagcgtggtatatttagggttatcggaagagtaatgagttgaattagagaggaggaacgggaagcgagatttttaagtaatgcggggtggttttcgggttatcggaggaggtatggtcgggtacgtttttaagtttcggtattcgtggtggttgtgttagtcgatatgagtttttttttttttaggaaggcgtaggattcggggaagttttcgcggttaggtcgtttgtttattcgtagatttcgggcgtcgttcgcgt

SEQ ID NO: 7171 - DNA, 749 bp, synthetic construct
  misc_feature 1..749: note = Description of Artificial Sequence: Synthetic polynucleotide
  source 1..749: mol_type = other DNA
cggggattcgagttttcgggttgaggatcgcgggggattttaggtcgggacggagttttttttggttcgttgtgcgcgtacgtttggaaaggcgggatttaaggtagcgatgttgcgggaggttttgtagtgttaacgagttttcgaacggtttcgttttattttttttttgtgtgtttcgtaagtttttgtttagtaaatcgttatagtttcggcgcgcgagagtggcgttggtacgtttaaatttcggggtttttggttaggttaggggggcgggcgtgcggcggggtcgggtcgggtcgggtgcgtttagcgggtttcgggtatacgttttttatttgggcgaggttcggtgcgtaggcgtttagcgcgggggtagcggtcgggcgtttaagttcggcgcgggtaagagttggatagtttaggggtcgcgtcgggtcgagttgtcgttcgcgttatttttatcgtcgtcgttgttatcgttatcgttatcgtttgggttgtagtagatcgcgggagaacgtttgcgcgaagtttcggtgtagttttggcgggatcgtagtaattatcggagcgtgagtaatagtttttcggttggaggagttattgttttacgcgttcgcggttcgcgcgtcgaggtaagttttgggcgtttagtttagatcggcgttttcggattgggcgttttttgtttgttcggttttcgttttttttcgtagagcgagtttgtatttgggcgcgtcgttcga

SEQ ID NO: 7172 - DNA, 1134 bp, synthetic construct
  misc_feature 1..1134: note = Description of Artificial Sequence: Synthetic polynucleotide
  source 1..1134: mol_type = other DNA
cgaggagggcggggcgttcggtttttagtcgcgcggttatcgtttgtttagtttggttggatttgagttcggttcgtcgatcgttggtcgaggcgtagttgaagtagttttttagtcgcggcgtttttattttttaattttacggtttttgcggcgcgggcgcgatgtagttggttcggggtgaaggtaaggcgcggggcgcggggcgcggggtattgggagcgaggtattggcgcgggatgttcggcgtaaggtgtagggcgcgggtcgtttttttttcgcgtttttttatttcgttaaagtttttttacgatggtttttatttcggttgggttagtttcgtaattttcgtttgttttttgttttttttttttttttcgagtcgcggggttttcggggcgcgcggattttcgttaggggtcgtgtaggcgcggagttttagtcggtttgttttgggttcgaagaaagttgtggtttggagttagttttttttttacgatttttgggggcgtttttttttttttttgagttcgcgatgggaaggcgtttttattttattttcggggtttttgagattttttggcgaggtggggcggcgcggtaggtgtagggttggggagggtttgatagttttggagagtgttcgattttagttcgtcgtcgttttttaggcggattttttagaggtaggttttagttttcggcgcggggaggcggcgcgttttagaggggcgtagggtgcgcgggggtcgttggtttttcgggtattttttttttgcggttttttcgttttttttcggagttggtgtttgaggtcgttgggattttagtttggcgttttttttcgtttcgagcgaggtaggtgtcgtgggcggtttcggttatttttgtatttcgagcgtttattttgtatttagttttaagtcggagagttttggggatagtcgagagtgttagtggttttatagggagattgagggttttgttttatttcgggcgtcgtgtgggtttgggttgtttatagtatttttgcgttttagtgataggagaagttaagcgcgaggttttttaatagttgcgtgtattttattttttaggtatttggaatttcggcgtttagaacgtgtttttcgg

SEQ ID NO: 7173 - DNA, 1645 bp, synthetic construct
  misc_feature 1..1645: note = Description of Artificial Sequence: Synthetic polynucleotide
  source 1..1645: mol_type = other DNA
cggcgtttttttttcggaaaggacgttggatttagggcgcgttagtacgcgtagtagcggttcgcgagtcggtaggtgggtagtttcggcgcgggaggaaggggaagttatttttttttcggaagagggcgttggtttttttattttgtttttataataaggttatcggaggagaggaagtagttagttgtcgtttgcgttttgtaaagtatgtagttaggggagtagtttttggtgagtttagtgaatttgtttggcgcgtatttttattcgttggagagtgcgcgaggcggtagcggcgggagcgttggttatttttttagcgcggttttttttttttagaagttggatttagataaagcgtttaagaagtttttcggtagttttttttgcgaggcggtgagcggggagttcgtagtcgttagcgtaggggttttcgcggttatgtttagtgatatcgacgtcggggacgtatttgttagcgttgcggtagtggttaagtcggggttttcggacggtcgtaagggttttttttgcggggaggaggagttgtttttcgtcgttgtagtcgtcgtcgtcgtcgtcgtcgcggttgcggttattgtgcgttattttatggatagtttgagtttcgagcggtattatttttagtttttcggtttttaggggtcggagttggttgcgttttgtttatttttttcgtattaggcggcggttggggcgttttacggatttgtgtattcggtttttaacggggcgcgttatttttacggttttatgttgtttttcggcggttttttcgcggttgtgtgtttattcgggagggcgtagttcggtttaggagtcggtgcgggtagtggcgcgggcggtagtagcggcgggggcggcggttcgggtatttattagtatagttagggggtttcgttttacgggtcgtattttggagtcgtagcggcgggattttgcggaggattggggggtttgggggttttaggttttggttttcgtgtttacgtttatttgtgtaatcggtttttgtggtttaaattttatcgttattaaattgagatgattattacgaaatagggtaggtgagcgtagcgtggaggggtttttgggttcggggataaagggtgacgtgtggttttggggaaggttcgggatgagggagttgaatttagttgtttcgcgcggtgtttagagtgttttatcgcgcgtaataaattttcgtagatatcgtatttttaatgcggtgtttttttgtgttagtgtttcggcggtttttgtagggtgttaatgttacggttgtatatcgttttttttttttattatttttatttgaatagatttggaggaggcggaaatggaaattagggtatgtttataagttggattcgttagatttttttgttcggcggtatgtttgtgtatgtttgtatgtcggtaaggagttacggatagggaaggtttaagagttggttatttgagcgtagtagatgggttttcgtagttttaggcgttagggtttttacggggcgttttcgggaggtgggtatgaaggttagagcgtcggtttcggaagttcggtcggagtaggtggttagatttgttttggagttagatttggttcgggttcggtgcgcga

SEQ ID NO: 7174 - DNA, 4698 bp, synthetic construct
  misc_feature 1..4698: note = Description of Artificial Sequence: Synthetic polynucleotide
  source 1..4698: mol_type = other DNA
cgtacggattcgcgttcgtattcgaagattttatacgtttttcgtattgtttttatagtattttacgttcgcggtgtacgtttatttgtcggtagacgagttatacgtttcggcggtttagattttcgtgtcgattttcgtgggcgagtttacgcgttgggtgttcggcgcgtttttaggagtggttgggatcgcgggttggcgtcgggtagggcggtgggacgtttggagtcggcgggaggagtacgtttaggcgggttcgcgtcgagttcgagcgagcgggcgagtcgggcgggaggggttatttgtaatcgagtagacgttattatcgttttttattcgcggggggcgggggcgggcggttaggtgacggcggtttatttttcgtcgtcgagtcgggtggtttttgttcgggaggagttttttggcgcgttttgattggaattttcgtcgtagtggcgggggaggggggatacgtgatcgttcggttaggcggttcggcgcgttttattcgcgatgggtattttattttttttttggaaaagtcgggggatatagagaaggcggaggagtacgcggggtgtaggagagtttattagtttttttagtcgtagtgttggtgatttcggtcgttgaattcggagaggaaaggtttttacgcggttagtcggttttgattgttttttcgttttgtttttggtcgtagtatttttttttcggttgtagtaatcgttttttatatttttaggtaagggtacgtttagtgtagattattgttattttatagatgttagtgttatttaagagtggtgttgggtttttttttttttttttttttttttttgtatattagtatattgtattcgagagaaatttacggcggtgtattgtagatatcgtttagttttagggttcgaagatttttcgattaggtttcgggatgtttgaggttttttaggttattacgtggaggaatttaggtttgttttttgcgtaggaggaggaggcgtcgcgggagttgtagttttcgattttttttaggaagtcggtcgggtggaaggggagagggtcgttatcgtggtgcgaatttaattcgtagtttttgggagtacgttgttaataaaggttaaattaaaataattaagtggtgtcggtagggacgcgtcgtatggttaggagaagttcggttattaattatttataaggagtattgtttttttggtgtgggagaatggggttgtgcgatagtttttcggagttgcgttttgttttgaattttaagtttttttagagtaagtggattgcgtagtttattattttatttttttacggtttttttttggggcggtattattttagatggtaggaattcggagaaaatgcggtgttacgttcgtcgttatgttcgtatacgcgtttgcgttaattttagtaatacgtggggatcgtgaatttgggcgtttgttttttatttaggtggttatgtgggtatatttatatgattattgattaaaattaaattggacggagaagtttgtttttatattggatttttttaaatttttgtttaagggagttttgcgttcgatttgggcggggacgtagtttttagttaagatcgtcgtagcgtttagtagagttcggggatcggtggtggtggtggcgggatggggaggaatagaggtttttgattttttggtattttattttttttttttatttagattagtcgggtaatacgtttttcgtttaagatggtttttttaattggaacgtgatttagataatgtggaagttaggggtttttgatttatcgtatttgggtttcgttgggtataggataagggttgggtaggtttatttggaaagggagtttattcgtaaagtttcgggtataaacgttagatagcgaaattttgaggaagtttaaagtttatttattgtaaattggtggggggtgggggagtattttatgtaaaaaggaacggttttattaaattagtaagtattttattttcgtagtggacgttttgttgtttttggttttttttttttttattttatttttttaaattattaaggttggagaaattttataaataaagtataagttcgtggggggggggggggggggttatttggtgttttaaaaaaataataataataaacgatttttgtaataagaaaggtgggtacgtttttatttttaggttttaattttaacgttacggttacgttaaaattgaagttgattgagataagagaattttagagtatagtacgtagatagataattttataattaaaaaatatgtattttttttttttcgttttcgttattttttttttttttcgttattatttattttcgtttggattaggggttgggagaggaggaggatgtagttttttcgagtgtataagggaggcggcggggttatttgttgttgtatcgttagaagagttaatttcgagcggatttggtagggagttaaaattttttttttggatgcgacgttttagagatcgaggtagacggcgagaatagatttagcgtttcgagatgtgttttttaatttgaattttggattatttttgtttgaaatgttttgttttgtacgtttgggaattattttgtgcgattaaacgcgtgatatatatacgtatacgcggggtcgtttcgtaggggggagggtgcgtggtataggagtttcggatttttaggggttttgtatttggggagtggtgcgagggggatcgtttcggtgtggttgttgacgtgagataggtaattcggaaaggttttttttcggttgttttggtaatgggaagttgtgggtaaaggtgtaggggcggtttcggagcgtatacggcgtagttcgtagtgaagggtagtggtgtggtggggtagagagattagataagggtaggcgggttttgtcgatttcgagtttattcgtttacggggttacgttttgttgagaaaatgcgcgatattcggtagggagagagtgatattgattaagtgtttttggagggtcgagtcgtttgttttcgggagggggtcgcgaggttcgttagtattcggttttcgcggaagttgtgttagcgcggtagtttcgtcggcgtttggttttattagtttttgtttttagcgtttttcggtggtatcgttcgagatttgcggagtagaagtcgaggatacgagtaattcgttgtgggtttgaagtgattacgttttagggttgtgaaaagttgtttcgtggtgatttgggtacgaggaggttaataaagtgtagaattagttttgatttttatttaaaatgaagttggtagtattgagcgtttaaatgatttcgttaggattttggaggttgtgggagcggggtgggagagggtaaatgttaggtttaggataatataggatatgtttaatttaaggaagttttttttttcgggttacgttttttgtagttttatttaattggaatcgtttttgtattcggggttattttcggtattatgatatttagcgttgttttttaaattttaagttttcgcggttatattttttcgtgtttgttggtattagtaagagtttttgtttgtttttttttttttatatggatttttttttttttatttttagatcgtagtgcgattggtaggtattttttcgtttttttcgcgtttcgcgtcgacggtgggaatagtagcgatagcgcgatcgtagttttttagtgttttcgttttttttttcgcggttatattttatttattttattcgttaaatttcgtatttcgtcgtcgttttttttttgcgcgttttcggcgttaatttagttagaagcgggtggaagttcgggtttatgtgtaggtgtttttgtgcgggagtaggggagtttataggttagcgattcgcgattttattttgtttttagttcggggtttatttacgtggaattcgtcggttttcgcgggtatttaatattagtttttcgggttcggttgtcgttttttcgaagttttagggcgtttttacgggttaatgattattttagtttttttttaagttagggtttggttagttgggaaattttttcgttttttgtttatattttttggtattttcggataaagttattcggtttttcgtttcggtatcgggaaagatgcgcgtggagagcgtttttaggcgttgggttacggtttcggtttttggtcgtgtttgttgtgtgcggagttggggcggcgggtatcgtttgcgcggggtaggtattttattcgtcgtttttttagtacgggtattcgatcgtcgcggcgttgtaggaaggaggtttcgtcgcgtcggtttttttatatttacgtgtttttcgtgtgcgcgttttcggtttgtagatgttataaggttggcgtcgtttggattttcgggcggttttatttttcgcggtcgttacgtttcgttttttgtatttagtttttttggcgttttcgttgtagtatttaagattaggcgtcgtttttgttagtcgtgttgtttagtacgtttgagggtcgttgtcggtaggttttatttttcgttcgggttttttatttatttttttttttggacggtggggtttaagttttgtattggggttgttaagttatcgtttacgattttttgtagggtgtagcgggagggcgttttcgaggcgt

SEQ ID NO: 7175 - DNA, 462 bp, synthetic construct
  misc_feature 1..462: note = Description of Artificial Sequence: Synthetic polynucleotide
  source 1..462: mol_type = other DNA
cggttcgtaaattgattatgaaatatacgatgttaattcggagttgtattttttagttgggtattttcgcgcgttggttttcggggtttcgttttttattttttgtttttttttttcgcgttttgtttttattttttatttttcgcgttggttatttcgtttttttggtagtttttggcggtagcgcgttttattcgttttcgtgtttttttcgtttatggaattaattttggttttatttgttgttcggtttaggttggggagaggacggagggtggtcgtagcgggtttttgagtgaattatttaggagggattgagtatagtattaattagaggggggttagggggtgcgggattcgagcgagtaggaaggaggtagcgtttggtattagggttttgatttaatagaattgagatacgtttgtaatcgttggcgtgtttcgcgtataggattttagcga

SEQ ID NO: 7176 - DNA, 300 bp, synthetic construct
  misc_feature 1..300: note = Description of Artificial Sequence: Synthetic polynucleotide
  source 1..300: mol_type = other DNA
cgttgtaaaatagtcgtcgggtgtagtgggtcgggcgttcggttattttggttgcgattatcgtagttttttaaaggatgcgggtagatgtagacggttttggtttatttgtttttaaaggtttgggattgtgtttgcgtgtttcgggagggtattcgaaatttgggagtttttcggcgtttttagtttcgggtatttggggttttttgttttttaatagtattaattttgagaataacgcgtatcgaaggcggaggtttttgtgttttggataagttcgttacgggtaagttagttcga

SEQ ID NO: 7177 - DNA, 554 bp, synthetic construct
  misc_feature 1..554: note = Description of Artificial Sequence: Synthetic polynucleotide
  source 1..554: mol_type = other DNA
cgtcggggcggggattattttgtagtaggagttcgtagatattgtagaagcggagaacggcgttgcgtttttaaattatggttttttttttaaagggttggggaaggaacgagggggtaagtagatgttggtgagcggggtacgagagtgtagggtttcgttggtgtttttttttcggcgttcgtcggatttatcgtttttatcgttgcggtgttcgaattcgcggattcggatcggcggtagtagaagcggtagcggtaaagtattcgtagaatggggtatcgcgaaatagttttttttttttttttttttgttggtggtgtagtcgcgatagttcgttttttaggtaggggtttggagtttgtttttttttcggcgcgtatagtaagttttagagttcgtcggggttgttcgagtaggtggtgtagggatgtcggggtgttggagaaggtgcgggcgagggttgtaaggagtgggtaggttacggaggggaagggttgggggagaggaggagtaagtaagtagtattgtcgttcgcgttcggggtgtttcgg

SEQ ID NO: 7178 - DNA, 1153 bp, synthetic construct
  misc_feature 1..1153: note = Description of Artificial Sequence: Synthetic polynucleotide
  source 1..1153: mol_type = other DNA
cggcgtatataagttgaggattgtcgaggcgttttttgcgaggtaaatacgaagtcgtttggttagtgagaagaaattcgaggtggtttttggggtagatagagtaggatttgtttttgttttttgtttttttcgtttttttttttttagcggcggcgatcgtagtaatagcggtagtggcggttgttgttattgttttgtcgttgtcgagtcggttatttgggtattcgcggagtcgcgtcgttgttatcgtttcggcggtttttcggagtgcgcggagggggcggcggaggagcgagatatttatagtaatcgaggatgcgaggggcgtttagtagtagcgagtgtttgggagttaggaggaggttttcgcgcgtcggtaatttttagtgttaggcgttttgtagttttcgcgcgtcgcgtttgggttcgtatcgttttcgtagtgagggttcgttcgagcggtaagtttttttcggcggttaagtcgatatttttttttcgtttcgtcgtttatttcgggtagtagtcgcggaataatggagagcgtagttagtagttttggagacggcgttcgggggaggacgcgtcgtcgtcgtcgtcgttgtcgttagggtaggcgcgcgtcgcgtggagtcgggcgggtgcgagggcgcgcggcggggggtggggggtacgcgtcgcgcggggggcgggggtagtggggggcgcgcgcgcgggttcggggagttcgcggggagagttcggcgttcggcgtagcgcggcgcggttaagtttcgcgtttttttcgttttttttcggcgcgttcgttttcgtttcgtcgttcgtattcgttgggggcgtttagaaagatgtatagaggtaacggttaggggagcggaggtttaagttatatgtttgcgttttcgggggttagagttcgttagttttcgcggatttcggttcgcggttagttcgagcggttcgggtgagtagcggtatagcggttttttcgtttcgcggttttcgttcgtcgagacgtggttttaagaagtggtgtcgtagtcggggtagaggcggaggaagtcgagtcgggtaagtcgggaaggttgcggagacgttttgtcggggtaggtgttgtagttttagttagcggtttttacggagggggcgg

SEQ ID NO: 7179 - DNA, 1603 bp, synthetic construct
  misc_feature 1..1603: note = Description of Artificial Sequence: Synthetic polynucleotide
  source 1..1603: mol_type = other DNA
cggttcgtagggggtgtttcggggcgttttttgcgcgaggtttcgggaatagggtacgagggtttaggttgtttagttgtaggtgtagttgtttcggaggaggacgttgtttgcggcgtcggggagtttttcgcggttggaggcgaggggaattgtatttattatagtgtttcgtttgcgcgaggattatttatttgggtcggagagagcgcgcgcgcgtaagagcgagttcgggttgtggtttgggggaggggagcgagggggcggggagcgttttatcgcgaggacgggggcggggacggattgttaggtggggcgggtagttggggcggttcgaggatttttttcgatttaagtgggtatttgcggagttaaaagtaggggaggcgttgtagttgtgaagaggcgtgggggtcgcgggaatttttttttggtcggtgcgatgaaagtcgggcggacgaggtggtttaacggggttgagagtggttcggtcgaggcgcgggttgagtttttagtatttggtttgagcggcgtgggtagtagtttgtatcgcggatatttttaattttgtcgcgtttgcgtcgtattttggtcgtggtagcgatttttcgggtatttttgaggtcgtttttagttttataagtatttagtcgtttattttagagtagcggcgtcgatcgttttaagaggagttagttttcgatatcgttttttatttatttttttatatttttatcgttggagggggtgagtgtcgtggataggcgttttcgttcggggatagtttagcggcggtagttagttcgattttttttcgcgcgggtcgtttaaatttgattagtagagcgagcggtttagcgtagtagtcgttttcgcggtttttagttgtagaaaagtaaagcgtcgggaggaagtagtagagggggggttatatgaggttggaaagtggcgggtgtacggcgttcgggatcgtcgaggtttttgcgtcgttttgcggaggtgatttcgcggtggaggttacgagtatcgtcgtagttttgacgttgggatttaggggttttcgagcgtttacggcgtggtggcgtcgggtcgcgtttttttagtagtttaagggtcgagtggcgcgtggttatatttatagtagcgtaggggcgtcgtgggttgacggtttttttcgcgcgagtcgttttttcgcggtatttatttttttttcgcgttcgggtttttcggaagtcgaggcgcgggttatttggtgggatttcgcggttttcgttttagggtcggggtaacgcggcgtgttgattgggaggattttcggcgttcgcggtttttattatttcgtttcgcggcggaggcgggcgtttagggtagggacggagttcggagcgttgtagagttcggttaagtttagttttttttcggtttggtagtcgcggttcggatgtcgttagttcggcgttagagggggttagtcgataataaaaatgtttgtatcgttcgtaggtggaggcggtttattaggttaggaatcgaaaggagggagggatgttgttaggttaaatttaacgttttggttaagggcgcgttaaggaaatcgtatcgt

SEQ ID NO: 7180 - DNA, 1411 bp, synthetic construct
  misc_feature 1..1411: note = Description of Artificial Sequence: Synthetic polynucleotide
  source 1..1411: mol_type = other DNA
cggttttcgttattcgggtggattttgtttatcgcgagcggggaggcggttgtttttcgtgtaggattttcgttgagggtttataataagcggttttaagcgggggtatatttttcgttattttcgcggttttttaaataaataaagaagttaaagtcggttgttttaagattaatgtaagcgtttaggaagttttgaggcgtttgagggcgaggtaggttgtcgtgggtaggtgtgaatattttagttttcgcggcgggtttggagtcgtttagcgtaggaagagggtagaagtgggttcgcgtttatgcgggtattcgaaatgaaaaagagttgtaaacggtataaaagttcgggggttaggcgtaggaaaatagagtaagggagttgttttagtttttaaatattgtatatggatgggtgtttcgcggaagattattttagattttgtgaaagaagtttttattgggcgtcggttacggtattggggtgcgcgtttgttttgcgagaagggttttttaggtcgcgcgggggaacgtaggagacgtttgttttcgggggaattagcggaggattgttttattttaaagtgaaaatttgtaggttttgggaaacgatatttaaaaaagtatataatttttatatgtcgtttaatggaggatttttataatttatagcggtagataaggttagagggtgtaataaaaaatttgaagttttttttttttttttcgtcgttttttcggaattgtattttgggtagcggagtagaattcggaatgtgaatttttttcgatatatgtttttcgtagataagtaaataatttggacgtgaaatggaaatggtaattaatgtagtaatgttgttatatttcgagtgtgtaaattttattgattcgtcgcgttacggggggtgtcgggcgtacggggatcggtggcgtgcgtttaggttgtttattttttttttttttttttttttttttttaggttttcgggcggggcgtttagaaatttcgtagggatgtggacgggttgcgggaagtaaggagttgtttaagcggcgttcgggattttcggttttcggtttttggaggattgggcgggtgttttgcgtttgtttcgatagtcgtattttttatttatttttttcggttattatcgtcgcgttagcgttagtagggttttttcggggttcgagtgtagttcggttttgaagtatttaggagagtttgagttcgggcgatagaggtttggaggtagagggaatttttaaatttagtgcggcgggtggttttgagtgcggcggttaggttttttttttttttttgtttcggggttaagtgttgtcgggttgtttggcgagagtttttttgaagtttttttttattttcgtatcgaaagcgttgatcgt

SEQ ID NO: 7181 - DNA, 2629 bp, synthetic construct
  misc_feature 1..2629: note = Description of Artificial Sequence: Synthetic polynucleotide
  source 1..2629: mol_type = other DNA
cggtagtaaacggtagagtaaaggagtcgtttttttttatttgaaagtcgcgaggaggtttggagcgttttttttcgttggggttcgagttttttgggttttggtcgggtgcgggtagattttatcggggttttcgttattttttagtttagttcgtagagcgagtatcggtagattttaagggcgcgtgagtttggttgtcggttgggtttttgaggttcgttgggcgggggtaggtcggtttaggttgtgcggggcgtttataaaaagtgatttggagatgaattcgttcgtgcgcggttggtcgtttcgttataggggcgaaggcgtttgacgtaagcggaattcggtggagtttatacgaattagaatagagcgaggtttttggcgtattagggattttaggaggtagtttcgttagagacgcgggtcgtgtttcgggaaatcggggggcggggggaggggaagagcgtagaaaagaaaatttattaaggcggggattggtttgagcggggaggggcggcgaggtcggagtttttttttgttgggcggattttttatggttagaggttgagttttattttcgtcggtcgttttttaggggaaggggaaggagaggggagagtagcgataggtttttagtaagtaagcgcgggcggtattcgtagtttttagaagtttgagatttggtcgtaagcggattcgtgcgttttaattttttgtcgcgttagcgtttggagcggagagtagaggcggttcggtcgcggcgcgtcggttttgttatgatggttagttatttcgagttcgaggacgcggcgggggttttgttggttttagagatcggtcgtatagttaaggagttagaagggtcgtcgtcgagtttaggtaagggcggtgggggtggcggcgggatagtttcggagaagtcggattcggcgtagaagttttcgtattcgtacgtggcgtttatcgttatggcgattcgcgagagcgcggagaagaggtttacgttgttcggtatttattagtatattatcgcgaagttttcgttttacgagaagaataagaagggttggtaaaatagtattcgttataattttagttttaacgagtgttttattaaggtgtcgcgcgagggcggcggcgagcgtaagggtaattattggacgttggattcggtttgcgaagatatgttcgagaagggtaattatcggcgtcgtcgtcgtatgaagaggttttttcggtcgtcgttcgcgtatttttagttcggtaaggggtttttcggggtcggaggcgtcgtaggcgggtgcggcgtggcgggcgtcggggtcgacggttacggttatttggcgttttttaagtatttgtagtttggtttttttaataattcgtggtcgttatcgtagttttttttatttatgttttatgttttttgttagatggcggtagtcgtagcggttgtagtagttgcggttgtagtcgcgggtttcggtagttttggcgcggtcgttgtggttaaggggttggcgggttcggtcgtttcgtacgggtcgtatatacgcgtgtagagtatggcgttgtttttcggcgtagtgaattcgtataatggtttgggaggttcgtcggtcgtattttcgttttcgtcgtatttttattcgtattcgtacgtatattatttgtacgcggtcgtcgtatcgtcgtttgttttatcgtattacggggtcgtcgcgtcgtcgtcgggttagtttagttttgttagtttagttatcgtcgcgttttcggcgttcgcgtttattagtgcgtcgggtttgtagttcgtttgtgttcggtagttcgagttcgttatgatgtattgtttttattgggattacgatagtaagatcggcgcgttgtattcgcgtttcgatttttgagagtttatcgtatgtcggtgtagacggatgcgaggatgtagggacgcgcgacgtcggtttcggtcgtagtcgacgacgtcgtcgttagtttgattttatattttttgggttcgtttttggagttagcgtttagggtttttttgtgttttttcgtttttttaagtttttgtcgtttttttttgtttttttagtttatgtttttttgtgtttatttttttgatttttgtgattttgtatttttttggtttgaagttgtttttttgcgcgttttttattgggttcgttttttttcggagttttagcgttttttgtttaaatttatcgcggaaagggttcggggcggaggtgcgatcgggcgtcggtagcgtagattttttggtttttttttataggtcggtgcgttcgtttttcgcgtttttcgttcgattgtcgtgtagtttatggttagacgcgtcggataggattgatggcgggatcgcgttgttcgagaaagggacggattaatacgtgtgtttgtttcgcgaatttttttgaagttgtttagaagtcgtttgtcgcggggtttattaggcggggcgggggttgggatttagcgggagtcggggtagtttggttttacggtttgtattcggtttatatcgcgggcgggcgcggagggaggttgcgtttttttcgttattagtttcgtcgtttcgggtattttcgggtttcggcgg

SEQ ID NO: 7182 - DNA, 1686 bp, synthetic construct
  misc_feature 1..1686: note = Description of Artificial Sequence: Synthetic polynucleotide
  source 1..1686: mol_type = other DNA
cgacgtttttaggtagttgttaaagttcggggttcgtcggtttttaggttcgtttgatagagttaggcgttcgtttggatttagttttttttcgggcgggaggcgcggggaggttaagttttttaaaggaatagggtgggtaggggagtggtgttaggttaggtttttcggttttcggtagttagagcggagtaggaaaggtagcggggagttttatatttcgcgtttttttcggatttcgtcgtttattcggagggtatacgtttttcggggagttagagacgttttgggggagtttgaggagtgttagcggggttttttttggagtttataagtttttattttattttcgagttgggagataagttatagttcggttttttttttgaaagtatcgtcgttgattttttttttaggtaggagtagatatttgtttgtttttacggcgcgttagcgttttgttttagtcgtttttgggttagagttcgaaatttatttattgcgtttttatttcggtatagatagtttttaaagttgttcgtattttttagatttcgttttttgtttagttttcggatttcgtttaggggttgagttgacgttcgcgggtggatttttttggttcgttgcgtagggaattgatttcgggaatttagggcgtatagaggttaaagaagttgcggtaagggagggtgggtaaatttagtttgagtttaggtttttgtcgtttttatttttaagtttgttttgttttttttttgggagaagagtaaatttttttagtatttatttttagtcgcgaggaggcggcgttgtcggttgttttcgttatcgtcgttgtcgttttttacgtttagcgttagtaggagcggtatttagtatagtcgtttaggtagtattttcgtagtagtcgttaacgagttgtagtcgtcgtttattgttcgcgtcggttttcgtttttcggtgtttgtcgtatcgtgggtcgtttcgtcgtgttcgatgggtgcgtttttagcgttgtcgtcgcggcgttcggtttcgggttttcgtcgttgcgtcgttagttcgtcggtagtagtcgcgtttattggcgcggattcggagcggtttaggcgtttatttcgggacggttcgtgacgttacggagggagggaggtggttcgtgtatatttatgaacgcgggtatcggcgtcgggtttcgcgtttttcgttttaaggtttcgatttttaattttttttagtcgtttttacgtttcggggttttgtttaggtttttttgtttagtcgggatcgggtttttagaggattttggtgggcggtttcggagagttttttagtttcgcgtttttatttcgattttcggaaaagttgtcgtaagggatggagggtttttttagaaagtggttattcgaggtttgagggttatttggggtggcgcgagggattttgatttgttatgttttttgaattgatatttgggcggagaggattgacgggcgtcgttaagggttttgtttttggttgggtttttgggcgttttgcgtcgattggtttggggagggcgttaggcgtatattagagtagcgtttagtggtgttaggggttgtcgggtagagtagatagttttggatttggatggtaatggtagggtttcgcgttattttcgagaagtaggggtagtcgcgg

SEQ ID NO: 7183 - DNA, 1686 bp, synthetic construct; identical to SEQ ID NO: 7182
  misc_feature 1..1686: note = Description of Artificial Sequence: Synthetic polynucleotide
  source 1..1686: mol_type = other DNA

SEQ ID NO: 7184 - DNA, 2132 bp, synthetic construct
  misc_feature 1..2132: note = Description of Artificial Sequence: Synthetic polynucleotide
  source 1..2132: mol_type = other DNA
cggttcgaagagttggtgagcgcgattatagggtagtttgcggacggttttttcggataggataagggcgagggaaacggtagaatggtgacgtatttgagtgcgtttattagacgaaagaagattaattaagttttcgtgtagtgcgtagataggtcgatatatatatatatatatatatatatatattaatatatacgtaaagatagtgagggagcgagaggcgtatttttaggtagttgataatgatacggtttcgattcggacgcgggtttaaagtttttcgattttcggagtgttttttttttcggcgattttcggagattatcgttggcgtattttttcgttttgttcggtttcggcgttttttttttttttcgtagtcgtagtttttcgtttttcgcgaacgcggttttttagtgttttttagaacgttcgcgtggttgtcgggtttcgaattttagggtcgattttagtattcggcgcgcgcgtcgtcgcgtcgtcgattagtttgcggttttcgtattaattattaacggggcggttcgggttgcggcggttcgaggagggggatggtacggaattcgagataggggataattttatttttcgaagcggtcgcgaaattttagtttgggaggttttcgttttttttcggtgcgttcgttttttttttcgcgtttcggttcgtatatttttatttttcgtttcgggggcggcggcggcggaggtattcgtatcgcgcgatgtttagttatcgttgtcgcgttgtcgtcgtagttagtcgcgtcgtcgtcgttgtcgtagcgcgggcggtcgcgcgtcggtagtaggggtttggcgaggaagtcgttgagtttcgcgcgtttcgcgtttttggcggtcgtagcgttgtttattaattgatttttttattgatttatttaatttttaggagcggttgttcggaggtacgggtttttttttaaatttgtagcgacgttttcggcgtgggtataaaggtttcgacggcggtcggcgggggttgtttagcgttcgggagtcggcgttagaggtcgtttgcgcgcgttttagtcgagtttcgggtattatgtcgcggcgtttgtagtttcggggcgcgggtataaaaggtttttcggtttcggtttcggtagtttcgggggtcgttcggaatttttattttgtcgtttttcgggattttttagcgtttgttaagtcgttgttgcgttgggacgaggtgttcgacgatttcgtggagtgttttattttgtcgggttatcggcgtttgtcgtgtacggtttaggagtgtttagtttcggtgttgaagtttattaacgagacgtttaatttttggacgtattttatttcgttgttgttgtttttgagtaagttttgtcgtttgttttttttgagcggcggcgacgtgtttttttattattcgtggttgttatcgttgtggtgttacgcgtcgggagtgttgttgattttcgttatgagttgtacggcgtacgtgtttagttgtttgtcgttgcgtttgcgcgtcgtttttttttatttggattacgcgtttattagttattacggtttcggtagtacggtggtttattattattatttgttgttaggttttagtttgttggatgttagagttatgattttatatttgtagtagcgtttgggttggtacgtggattgtacgcgttttatcgtcgtttatcgcgttttggtgttgtttgtggttttcgtgttggcggtggtttgtattgtggtttgttgtaagagtcgtatcgattggtgtatttattcgttcgcgttgcgtattttcgttttcgttatgtcgtttagtatggtttgttttattatgttcgagagttggtttttcgatttgcgtggggagaattttatatttttcgtgtatttttatcgtcgttatttttggttggtggtggtcgttttttttaacgtgagtaagattttcgagcgtatttagtcgggttttttcgatattatcggttatagttattagtttttttatatttttattttttttagtatttacgattaggtgtattacgtagaagagggtttgcgttagtttttttaggcgtcgtttgtcgtatttattttttcgg

SEQ ID NO: 7185 - DNA, 2954 bp, synthetic construct
  misc_feature 1..2954: note = Description of Artificial Sequence: Synthetic polynucleotide
  source 1..2954: mol_type = other DNA
cgtttagagcgtggtagtttgcggggtcgtttacgtttttttttttggcgttaagtttgtggttcgcggtttttaagaagggtatgcggtgagttcgcgggtttcggttgcgtattatttgtaggtttttacggatgaggtcgtggcgcgagcggattcgtgaattcgttatcgcgcggggattacgtattaagtggatgattttgaggtttagggtcgggtttcgtagtagtggcgttaagatcgttacgtcgaagacgcgtatattttttatgattagtgtgcggtatttgcggtattttttttcgaaacgcgttaggcgttgtggcgggtattttttgtatacgcggtcgtttattaattttacgatttttttgcggtaggcggggtagagtggtgacgagtatattattttgttggtggttgcgtcgaagatgtttagcgtggtgaggttgcgtttttcgttgttcgcggggttatataattggaagatagagaggtcgtagcggtaaagagcgtttagtatgtttcgcgttgttttttgtagggaaacggcgtttttcggatatagtttttgttatatatgttatattggttcgtagagaaagaatatttcgggattttggttgaatagttcgtcgaagaacgacgagttagagcgttacgtggtgaatacgtatattagttgtcgtttgttttcgacgttttcggtgtttcgagtgttattgtttggaggggtcgtaattttcgttatttttgtcgcggttgtaggagtcgtttcgacggcggtagcgggagggcggtaaggagtgcggaggtttaaacgggtatgagtacggggcggttcggtcggaggcggttttgggcgtttttagttgttttcggttgttttcgttgcggtatttagcggtttatcggggttgtattgttgtagcggttttttgtgttatttgtagtttaggaggttgagtatagtgagtattagtagtagtgtatagttcgcgtataatattagcgtttttttacggaatatttttatttcgagaggggacgcgggttagcggcgttttgggcgtcggggttattgcgggagtagggtacgcggcgcggttgtaggcgtagtttggagtagtcgagggagcgcgttcgggggtagagttcgttgcgggttgcggtttattataggtataattcgggtcggcggcgcggcggaggtagttttgtagttcgggaaggggacgtagcgggttggttgttggcgtcgggattcgggtcgcgatttcgaggcgggcgcggcggttggtttttagcgtttaaggttggtttttttatggtagcggtttcgggtaggatttgcgaggggaagcggagtgagcggatgcgttttaattttttttttagttttttttttttaagtaacgtttattttcggttttgttcggttttttcgtttatttggagtcgagggcgcgttcgggagcggtttcggattatcgttcggcggattgttcggttgttattcgtttttcgatttcgttttttttcgttttcgttgggggttttcgtattttcgaggggtttggggagtcggtcgatttatttttgggtagttttcgggtagcgggcgttttgcggttcgggaagaaaaatttttacgcggtttagagtttcgtttcgcgtttcgtcgaattcggcgtttttcggttttagcgacgtttttttcgttttttcgggatcgtagttttttgtttcgtttaggggaacgaagtcggttgggggcgatggttgggggcggtttatatgggatttagttttcggtatagcggcgtagtttttttcgttttcggttttcgtgcggcgaatttttttatttttttggtagcggtggatggggtatagcgcgatttcgtagcggcggcggcggttgtttttattatcgggaggatgttcgggcggatagcgtaggtaattttcgtcgtttcgtagttttcgattggattaaaggatttcgaatatatagttttaggtaaggaaatttaggtgtgtagtattgttcgattcgatttaattcgttttcggtattagcgtttttggttaacgaggtatttaagtaaagaaagatttcgtcgtagtcgtcgtcgtcgcgcgaaagcggcgtttaggaggatgttgttattcgattttttttacgtcgggcgttcgtaacgcgttcggattagtttttgcgcggtttttgttagtcggcgttcggttggtgcgcgtcgtcgtttgtcgtcgcggtttttttttttcgtcgcgtagtttttttttttcgtcggtttcgttttcgtttttaacgtcgagtcggtttttatcgtcgttgcgtttcgggggttggagacgcgattcgttttatcgcgacgcgcgggggttgtagtttacgggttcgaaggtttagttttgcgcgtaaagcgtcgggatgcgaacgcgggatttggagttcgtcggtgtcgagagttgttagagagttggattttgcgtgtagttgtcggattcggttttatgtttttgtttttagaaagagttggtgatgaagtttgggtagaaattttttgtcggtcgttcgttttacgtttttttcggggtcgatattgttaattttttcgggtattgaggatatttttgcgttttggagcggtgggaggacgcggagcgtcgttttttggttttcgatattttgttcgttttttttagtgggtttgtggttgcgttttttcgaaggaagtaataaatttttttgattttgggggttagaggagacgttttagtttttcggaggggtgtgcgggcgggatcgttttttcgttttattggatttttggtcggggttgtttttgttttattgtgttttatatgcggagtttcgatgtttttcgtattttcgttcgcggtgttgcgtttattgtgattgacgt

SEQ ID NO: 7186 - DNA, 2954 bp, synthetic construct; identical to SEQ ID NO: 7185
  misc_feature 1..2954: note = Description of Artificial Sequence: Synthetic polynucleotide
  source 1..2954: mol_type = other DNA

SEQ ID NO: 7187 - DNA, 885 bp, synthetic construct
  misc_feature 1..885: note = Description of Artificial Sequence: Synthetic polynucleotide
  source 1..885: mol_type = other DNA
cgttcgtcgtttttttgaggttacggcgtaggagagaaggagggcgcggaaacgtcggtatcggttgggaagtttcggtgtttcgggttttttttggcgagggcggagaagtcggcggtttttgtttagaattttgtgattgtagggatcgagatattaagggcgggggtgtagaggattataagttttttagcgcgttttatttgtatataaatgtgttttgttttttaattttgtttttgttatttgtgtatttgttttttattaaattaattaattattcgtggtttaggaagaaattagaattggggggattgtttttttaagggggatatagttgaacgtggtcggtagtttttggtttttcgggtttgggtttagacggatttcggcgttgtttttaagatcgatatcgggtatttggtcgtcggcgtatttaggagtacgattttatgcgtgtgtacgttttttgttcgggttaggagttttgttttagttttatttcgggttataaatttttggtttcgtttagcgtagtttcggttcggagggtagtttgttagttaggttttgggttagggatggtttacggtgcgcgcggggatcgttatattttttagcgttacgttggggtcgcgcgggtcggagtagggggagggggttcgatgacgttatggaatagttggaggatttagttcgggaattcgtcggggagcgggtttcggggtcggcgttttatttaggtcgatagcgtttcgggttcggttttatttttttagacggtacggttgttttttacgtttagagcgggtttggggttttgaaggaaattagtgtacgatcgcgaggttaggaattttggagaatgggtacgtaggcgtgcgt

SEQ ID NO: 7188 - DNA, 2174 bp, synthetic construct
  misc_feature 1..2174: note = Description of Artificial Sequence: Synthetic polynucleotide
  source 1..2174: mol_type = other DNA
cgcgttgtgttttttagcgttttaggggttcggtttttagttcggttttatttgggcgttttttcgttttttcgtgggtcggcgggtcgtgcgggaggaattttggttgtcgcgggttttgcgttttatttgttatttcggtggttttcgttcgggtttcgagttttttgcggagttagtattttagttgagttagtcggaggggcggcggcggtttcgcgcgtttagagttttagtttatgaatgggattttattttgagcgttttttttcgggtttggggaggcggcggcgcggcggcggggggcgtttcgtaagttcgcggttttgagcggttattcgcgtagtaagttgggcgagttggtagtcgtttgtatttgttttttggtttcggtttttgatttcgttttcggttttaagcgttcgggttgcgttttcggttgtttcgcgaggtagttttaggaggtttaggggtttcgtttgcgtttttggcgttagattatggtgggtagtttcggttaggagttttagtcgtcgcgagttaatatcgtttgtagttagttttcgttttattcgagcggacgcgcgggtattcgtagcgcgcgggttattttttttttcggtcgggatgggcggcgcgggattgagtgatcggttttgcgttcggcgggtaatttttatttgatttgttgtttgtgagttgttgattgtcggggcgcgcgagtttagggggtacgggtagtagcgcggcgatgatttgatttcgagttcgttagggcgtttttttttttttttttttttttcgttttttttgagtttgtgcggagattagttcggtgcggcggtttcgggtggattatggcggggagttttagttaaaggcgtgtgggcgtcgagttggagaggatattttcggtatcgttgttttttgagggggtttatttaaattattgagttattttagatttaggattttttaaataattattaattgtgttcgtttcgtgtcggaaagtaagcggaaagagaaagagcgtttatttttgggatttcgtagatcgtttttcgttggttttttttcgaggggtgtttggttttcgaggatttttttttttttttcgcgtttttttttttttttcgttttttgttttttttgtagtgttgttggtcgggagttgtttttatcgtagttggaaatagttgttttcgtttcgcgtttttatttagatttcgggtaatcgtttttatttcgcgtttttcggaattttagaattcgggtggtcggtttttggaaagtcgtagtcggcgcgatgtattttgtagattttattttgttgggacggattttttaatttttagaatcgcgggtcgtagggagttaaattgttgtttttttttttttttttcgtgcggttggtggtttgttttttaaaggaacgttttatttattttttagtattttttatcgggggcgcgttattcgtttgggtttagattttgttttgtaaacgggttttttatgtatgtatgtgtaggtatattttggatattttataacgtttgcgtttttttaatagaggtacgttttgttattttgggtatcgtttttttttttttatttggtatttcgaacgtagtgtgattaaattttttattgttttttggacgtcgatcgttttggggtgtaagtttggggtgtaaacgtttatttcgtaagagggtttgggatcgtttcgtttcgtttttcggtcgttagaggttggggaagtttatatttggatttttatatattttgtcgttattgtttagattttgattaattttgtgagcgtcgggttttcgatattgtagtttttttaaattttagtattgttttttcgcgattgttttttttttggtcgtttaggttttgttttcgtttcggcggagcgtaagtcggagggcgtagtagaggttggggtttgaggttttcgttgagtagttatggttgcggcgatagttagttttttgattcggtagaagcggtaggcgagggagtttaatagcgatcgagtgtcggtttttaagcgtcgttttagttttagtaaagacgggcgttttttgtgcgagaggtacgttttcggggtgtttagtaaagtgcgtttttgtagcggtcgtaagaggtcggtgaggcgg

SEQ ID NO: 7189 - DNA, 873 bp, synthetic construct
  misc_feature 1..873: note = Description of Artificial Sequence: Synthetic polynucleotide
  source 1..873: mol_type = other DNA
cggtcgggtttagcgatgcggttgagttgtttattcgcgtttgttgaatcggttaattagcggcgttttcggatttagcgggagcgtttttatgtcgatcgcggtaggcgtgcgtttttcggggtcgtatcgttatggcgatttgtttatttgattcgtttcgggtggattcgtcgcgatttttgggcgtttaggtttttgagggtttaacgggcgacggttttttagttttagttgtgcgttttcgttcgggcgaggtggggttgatcgcggtcgtttgtatacgttttttttggttcgcgttttcggtttgggagggcggattcgtttattttacgatggtttcggttttggaagggattgttttcgtgattcgtttttttaatagtcgttaataattttttttaacgttttttgcgcggttcgtttttgagaattttggttcgggagagcgacgcggggttttcggggttgcgtaggttgcggcgttttgtttacgttggttcgagggcgcggttcgtttcgggtcggtttatatatttacgttttttgtcgggaggcggttgggacgcggcggggttgttttaagtgtagtcgcggtagtgttgcgtttttatcgcgggggtttttgcgggtcgcgtttgtttcgttcggttttcggtgtatgtggtttgcgaggcggtagaggagatgtggggatttagggtcgtacgtcgtgttcgaggtttttacgagaggttttttttcgcgggtttttgcgtaattgcgtgaagtcggttcgggaaagttaagattgtggtttaggaagaggaaggaacgcgggcgatagagttggggtttgggacgttgagggggtcggtggtagtttttcgg

SEQ ID NO: 7190 - DNA, 2174 bp, synthetic construct; identical to SEQ ID NO: 7188
  misc_feature 1..2174: note = Description of Artificial Sequence: Synthetic polynucleotide
  source 1..2174: mol_type = other DNA

SEQ ID NO: 7191 - DNA, 510 bp, synthetic construct
  misc_feature 1..510: note = Description of Artificial Sequence: Synthetic polynucleotide
  source 1..510: mol_type = other DNA
cgcgtagtcggagaggagggggcggtattcgggatttggcgcggtttttgttttttgcgttagcgtgagttcggttagggtttttacggtcgtgtttttattttttagggaggcgtcggtgattcggttatagttttagttttcgtcgttttgtgatttgcgggtattggatgattcgtagttgagatttcgttatatttttgaagtggggaaatggtgagtgtgggggtagggcgttttaaggttggggaggttttattcgaatcggcgggaaatggcggcggcgggacggagtttgcgaacggagttttcgttgtcgtcgtttagtttttagtttttggtttttttcggtgagggattcgggtttatgtcggttttcgtaaggcggttttggtttagtttgtagttttatttgtgtagttttgcgttcgtagtttcgtattttttttgggttgtggggtgaggaggagtttatcgggaaaacgtttgcgtggcgtgcgaggtgttcgt

SEQ ID NO: 7192 - DNA, 511 bp, synthetic construct
  misc_feature 1..511: note = Description of Artificial Sequence: Synthetic polynucleotide
  source 1..511: mol_type = other DNA
cgttttgattcggtttgggcgtaagtaaatttaggtttggtcgtcgggcgtttgggtcgcgttaattcgtttttttttttttacgttcgttcggtattttttggttcgttaagttttagatgcgggtgtttgttttagaaaattttcggcggcggttcgtattgagtatgttcggcggcggggcgggtttggggttcggaagttttagcgattcggcggtattcgtcgttttgaggtagcgggtttcgataggcgatggatttttcgggttttcgggggcgttttacgtgggtgttggtcgggggttttttggtagtggttttggcgttggggggtcgaggttgtttcggcgttagtttacgttttcgttggcgttttttcggcgcgtagttatttcgggatttttaggtggtttttaggtttgggttcggtttgaggattttttcggggcggagcggggcggggttcgagagtagtacgtaggtaaggagggttcgattttaggtttcgg

SEQ ID NO: 7193 - DNA, 417 bp, synthetic construct
  misc_feature 1..417: note = Description of Artificial Sequence: Synthetic polynucleotide
  source 1..417: mol_type = other DNA
cgtcgttattttttttttggagtagaaggggaattcgacgtttaagcggttgcgtgcgaagtttttaattaggtttaaggagtcgtagagtcggggtttcgggttcgtaggatttagaagttacgcgtttcgcgtttttcgtttcgtcgttgtttgttcggtcgatttatttggtgtcgcgtgcgttggcggttcgcgcggtagttaagttaaaggtcgaggtcgaggtcgagcgcggcgtttagtagtacggcgggggttagtagggcgggcgtcggtcgtagcgcgtttcgttttagtagtagtcgcgcgtcgtttttgtaggtcgtttcgtcgcgggttattcggggcgtttaggttgtcgtttcgtcgtatttcgtcgtttgttgtatcgttttcgttagggcggcgacgcgg

SEQ ID NO: 7194 - DNA, 1748 bp, synthetic construct
  misc_feature 1..1748: note = Description of Artificial Sequence: Synthetic polynucleotide
  source 1..1748: mol_type = other DNA
cgcgggtcggggagttgtattttttgtaggttcggttttcggtttcgttttttagcgtcggagttcgggagtcgcggttgtagtttatttttttaaatgatagttgaggttcgggttttagttcggggtttgacgttagtgttttttttcgtgttgttaggagtagttagcgttatcgtcggcgtttcggtttcgcggtacgtttgtaagttgtcggggcggcgagttttttttgtttcggttttttttttcgttttttttacggagagtcgagtagtagttttagagtttttcgtaagttttttttatattttttcgttttcgttttaaaggagtagtagtttttttttgtttttttattgtcgtcgtcgtatcggcggagtttttttttcgcgcgtttttttttcgatggagttcgggcgtcgtcgacgtcgtcgttgtttcgaattttgagcggggtcgtttcggtcggaggaacgcgtcgtttagttcgagggcgtagagcgttaggagtacgcggagggttggggcgcgggtttcgggaacgagaaagtgtagttttttcgggttattgggtcggcggcggggggattatggttttgaaggatacgggtagcggcggtagtattattttgtttattagcgagatggttttttcgtttagttcgttcggcgcgtcggtcgtcgtcgtttcggggttttgcgtattttcgtttttttttgaagtagtggagttgaacgtaggcggttaggtttatgtgattaagtattcgacgttgtttagcgtttcggatagtattttggttagtatgttttcgttttttagttttcgtggcggcgttcggcgtcggggcgagttgtttagggatagtcgggcgcgtttttttatcgatcgggacggttttttttttaggtacgtgttggattatttgcgggataagtaattcgcgttgtcggagtattttttcgagaaggagcggttgttgcgcgaggtcgagtatttttagtttatcgatttggttaagttgttgtcgtttaaggttattaagtagaatttttttaacgacgagggttgttagagcgatttggaggataacgtttcgtagggtagtagcgacgcgttgttgttgcgcggggcggcggtcgtcgtgttttcgggttcgggagcgtacggtggtggcggcggcggcggcgcgtaggataagcgttcgggtttttttacgttgggttatcggggtttttatattatcgtgcgcgataattaggtcgacgttaaatttcggcgtgtggcgcgtattatggtgtgcgggcgtatcgcgttggttaaggaggttttcggggatacgtttaacgagagtcgcgatttcgatcggtagtcggagaagtatacgtttcgtttttattttaagtttatttatttggagtaggtttttgatcgtttgttcgaggtcggtttttatatggtggcgtgtaatttttcgggtatcgtcgttttcgttaattagtatcgcgacgataagatttggagtagttatatcgagtatattttttttcgtaagttcgtagtttcggcgttttttagtatttttcgttttttgttgagtcgtcgttagtttgagtttcgttggaggtttcgcgggggtgttcggggtaggcgttggttaattttttatagagagcggttttttttgtacgatttttttatgtagtagatacgatttatattttatcgattcggatattttcgt

SEQ ID NO: 7195 - DNA, 1748 bp, synthetic construct; identical to SEQ ID NO: 7194
  misc_feature 1..1748: note = Description of Artificial Sequence: Synthetic polynucleotide
  source 1..1748: mol_type = other DNA

SEQ ID NO: 7196 - DNA, 648 bp, synthetic construct
  misc_feature 1..648: note = Description of Artificial Sequence: Synthetic polynucleotide
  source 1..648: mol_type = other DNA
cggttgtgtcgggagtaaaggttcgggttagtgtgcgtgcgggcgcgggtgattttatttttagggaagtcggcgtttaattatttaggtagtagtttcggttgatttttttttttttttttttttttttttttttttttttttttgcgtgttttttttgtatcggttttcgtcgcggagttaggcggtagtatcgacgtcgtcgtagtttttgttcgtatcgcgttaattcgcgttttcggtttatacgtagtcggagcgattgagtcggtagtttcgggtttacgttgcgtatcgtgtgtacggcggggttggttgagttgatttgcgttgggtttcggcgtcgtaggcggttggggagggcggcgtgggagaggacgttgagacgtaggggcggtcgcgtcgaggtgataagttgcgtatttggaaagttattcggttgtttggtgaggttcgtgggtcgggggttttgggcgtcggggtgtgagggcgcgcggggagggacggggtcggggtgcgcgcgtgtgtatgttgtgaatgcgttgcgcgatgtgcgtttttattttatatttagtcggttttttgtttgtgttgttcgagtgtggacgtgtgtacgcgttgtattcgttcggtgtggtagcgtttcgt

SEQ ID NO: 7197 - DNA, 863 bp, synthetic construct
  misc_feature 1..863: note = Description of Artificial Sequence: Synthetic polynucleotide
  source 1..863: mol_type = other DNA
cgatttttaacgttgtaatttgtgatcgtgattaaattttagcgatgcgagggtaaagcgttttcggcggtgcggtgtgagttatttttcggcgttgtttgttttttttagtagttttttaagggataggttttgtttttggtggtcgatttttaggttttcggtttttttagggcgattttgacgaggggtagggggtggttttcgggaggatttagaggaaaggcggggataagaagggaggggaaggggaaagaggaagaggtattatttttagtttaatcgttttcgatttttataagagtgttcgtgattttaaatttaacgtgaggcgtaaaagcgtttttattttttcgttttgcgcggttaggtaggcggttggagttgatggtttatttcgcgttttttgttttatttttattcgagatagggacgaggagtacgttgtagggaaagtagcgagcgtcgggagaggggcgggtagaagcgttgataaattagcggtgggggcggagagttgaggagaaggagaaggaggaggattaggaggaggaggacggcgacgattagaaggggtttaagagagggggcgagcgatcgagcgtcgcgacgcggaagtgaggtgcgtgcgggttgtagcgtagatttcggttcggttttttcgagagcgttttgggcgtttttttacgttttgtttttaagttttttgtttttttattttcgtgagcggagaattgggagtggttattcgacgataggttagcgggtttgttttttatttttttagtttcgcgtcgtcggtttatagcggttttttttggggatagtttttttcgggtgtcgttttcgttttttttgtgcgt

SEQ ID NO: 7198 - DNA, 1288 bp, synthetic construct
  misc_feature 1..1288: note = Description of Artificial Sequence: Synthetic polynucleotide
  source 1..1288: mol_type = other DNA
cgttttttgcgtagtcgatttcgtttcggtttcggtttaggttagagaggtggttttcggagatgttgaagttatttcgcgtagggggaggggtcgttaggtttttttttaattacggtggtcgttttagttatttgtatatattatgttaataatagattttttgtttcgtttttatttaagtttttcgttttttttgggggtttttcgggtcggttcgcgggttgggttaaggtgaatatattatgataataaggcgggtttttgttttgttttcggaaggggggcgcgtagtagcgggagcggtaggtcggacgtcgggcgtcgggagggggtcgggggagggacgtcgtgttcggagcgcgcgcgtatttatatatttatatatatatttacgcgagtatcgcgaagggtatttaaggatcgcgtacgcggggttgcggagatttttcgggtagtcgcgatttcggtttcgcgagtagtattggttttttgggtttatttcgttttttttttttttttttattttagtcgtttttttcgcgttgcgttgtagcgtgtttttatagtttttttgttttgaattgaatgtaggtgggaaataggtcggcgtgtcgaaagatatcgagtaggtagaaataaggtaaatttatagaggcgtaataggttcggtttttcgtggttagggcgagtcgcggtttcgcgtggcgtttcggtcgttgttttcggattttgagcggttattgttggggttttcgaaagaggtgtcggttttttgggagtcggaagagttgtttgggtgggtttcgttttgttttttattttatcgttatttagttttcggacggagggtgttttttatttttagttgggaggagagaagaaagcggggatggtgtacgtttgcgggtttggacgttgagtaaggtaggggttcgtattcgttcgtgggtttgattttattaattagttgtgtagttatagggattgaattttggaggaatcgatttttttttttttttttaggattatttgaggtgtagagggtgggaagcgaagtcgagacggtcgatttcgttacgatgttgttgaagaagtacgtagggaaaggagggggtcgggagtttagattcgaggattcgatttttgtcgaatagtattgtgttcggattatgttttcgtgtgtcgttttggcggtttttttgttagtggtggtcgtggtgttttgtttgtatttgggtgtgaaaattaacgatttttaggcgaggatcgtcgttttcgaattcgt

SEQ ID NO: 7199 - DNA, 1275 bp, synthetic construct
  misc_feature 1..1275: note = Description of Artificial Sequence: Synthetic polynucleotide
  source 1..1275: mol_type = other DNA
cgtttatttcgttttgtttgttcgtttttattgtttttaagttcgtttcgttcgcggtaagtgcgtgtttaggcgtagttatcggcgagattaggagcgtagcgttcgtagtttgagggaatcggcgtagggtagtagcggttgtagttggattcgcgcgttttagcgtttagtggcggcggtcgggatattttgggtagtatttcgtatcgtagtattttagattacgagtaatcgtgttcgttttcgtcggggttggagggcgtagggtcgttattttgtaagttcgtgggttttcggttatttttatgagagaaggcgaagtcgggcgaaggagtaggacgttcggtagtaggattttttcgtaagtttcgcgggttttttgttttcgcgtttttcgggcgtttaagaagtaaaatgtaattatcgcgttatagttgagaggggaaggggttagcgttattcgttcgttcggaattcggttttcgcggcggttgcgcgtttcggtcgcggttttttcggttcgggagtgagtagtagtaggaggagaggtagcggttcggggttggtcggggttggggaggagggacgggacggagggagggcgcgggggcggggagggggtttcggcggataaagatggtaatgttttttatttaagcgtgttgtagtttggtttttttaatatggttgttttttttttgtttcgtgtatttgttttgtttggattttatcgtggtcgagaaggaggaatggtatatcgttttcgtgaatattatttacgtcgagttcgcgtcggatttcggggtcggggcggcgggcggcggcggcgcggagttgtatacggagaagacggagtgcgggcgttacggagagtattcgtttaagtaggacgttcgcggggaggtggttatggttagttcggtttacgatcgtttggtttgcgattttaatattaagttcgtcgtttcgattcgcggtaagaattggatagtttttatttttaagggtaattgtacgtatagggataagattcggaacgcgtttttgtagaacgttttagtcgtggttatttttaacgtgggttttaatattaacgagattattattatgttttacgcgggtgagtggtttagcgggcgcgggggaggggagtcggcggggacggaggtgtttagagggatttagcgtttgtttttaggttttttttgggaagttcgtgcggcgcggaagacgtgtttgggttttttggatcgattaagttttgtttcgcgt

SEQ ID NO: 7200 - DNA, 1071 bp, synthetic construct
  misc_feature 1..1071: note = Description of Artificial Sequence: Synthetic polynucleotide
  source 1..1071: mol_type = other DNA
cggcgttgagttttgtttagcgcgattcggatcgacggacgcgtagagattttgtcgggattcgttttttagtcggcgttcggggagtcgtcggtcggttttatttttcgttcgggagtcgggtagggcgagaaggtagcgcgagtggcggtggcgattttcgtcggggtttttgcgacgagcggtgattagtagcgttcgtagtcgcggtttcgttttttattcggacgtggttaagcggcggcggttacgacgttcggtttttcgggatcgttcggttgcgttttgggcgtatttgcgcgtttggtttcgcgtttcgcggagagggcgatgggtttcggttaggattgagtttttttttttttttttttagtttcgtttggtatttttttttttgtttcgagggcgagttacggtttgcgtcgtcgttttttttttcggtgttttcggttcgtcgttttttcgcgtttttttttttcggattcgttttcggggttattatggtcgcggttatcgttagcggtttgattcgttagaagcggtaggcgcgggagtagtattgggatcggtcgtttgttagtaggaggcggagtagttttagtaagaatcgcgggttttgtaacggtaatttggtggatattttttttaaagtgcgtattttcggttttaagaagcgtaggttgcggcgttaaggtttgtgggggttatggtcgggagatgcgtttcgggtcgtttttttttcgtttaaacggagtttttttaggttttttttttttttcggttttttcggtttatttcggtttcggttttttttttgagtattttgggtgtcgtcgcggggattttggagttcgttgtcgggtaatttgtagtcgtcgagaagtgtagtcgttagagatggtaagttggttgtttttcgtcggcggtttttgtttttcgcgtttttgtaggttgggttttgggaaatttgttttttttgagtttcggtttttcgggaggatagggattggtattggttttggaacgcggggtatttttttttgttatattcggggtcgagttatcgttcgt

SEQ ID NO: 7201 - DNA, 694 bp, synthetic construct
  misc_feature 1..694: note = Description of Artificial Sequence: Synthetic polynucleotide
  source 1..694: mol_type = other DNA
cgttagggttgtcggatagttcgatgattaggagttttcggttttcgaagttgcgttttatcgtgtaaattttgttgatggcggtgtattgtagttatacggatacgagcgtttcgcgtagttcggggtagcggtggtattcgaaggagatgtcgtttttttgttgtagtcgtcggcgtcgttttatgttcgtcgcgggcgtttcgggtttttgggtttcggcgtttaggagttattcgtaggtagttagtgtttcgtatagagttagtagcgcgttgttttttcgttcggttatcgttgcgtttcgtcgtcgtcggtcgtgtttttttacgcgggcggttttttttgtttgttcggttttgggtttagttcgtcggcgttgttgggggcggtaagtttcgtattagtttttattcgttttatttttttcggttgaatgagtgttagttcgcgtattggggttatttagaggagacgggtaaagtcgcggttttacgggttgtattattggtcgcggagtttaggggagttgtaggagaaattattgcgaggagggggtcggcggagagacgggtcggcgtggatttgggagggttgttggcgttatttgttggttcggaattacgttaatagttaaatggcgttcgggacgacgtaggtgaaatgatagttaaggttcggggttcgggaacgt

SEQ ID NO: 7202 - DNA, 694 bp, synthetic construct; identical to SEQ ID NO: 7201
  misc_feature 1..694: note = Description of Artificial Sequence: Synthetic polynucleotide
  source 1..694: mol_type = other DNA

SEQ ID NO: 7203 - DNA, 1424 bp, synthetic construct
  misc_feature 1..1424: note = Description of Artificial Sequence: Synthetic polynucleotide
  source 1..1424: mol_type = other DNA
cgagagttcgaggcgtcgtttttgtcgtttcgggattggcgtgaggagtttttgacgatatatattaattcgagcggttttaaagatgtagttgtatatggagattttgttgggaaaattcgtttgttttttttacgtcgtttagtttaggagaattatcgtcgttatttcggagttttttcggttatcgcgtagagtttttcgagagttcgagtcgcggttttcgagttttaaggtttatttagggttttagatttttgtttcgaaaggagaggatttgagaaaatggatgtattgagatttttttgaaaatttttcgagagagcgcgagaggagcgaggatacgttattcgtagttaaaattatatttaaggattaaaataataataattaaaaattttattaaaataataagcgtttaagaatttagatcgggttggtggggggaggggaagaggcgggaaggggagggtcgtacggaggtagttttgtagtgagtagtcgatttcgtcgtttttcggtatagttggatcggtttttttagtcgcggtttagattcgtttttggatttcgggttagtttcggtgttaggatcgcggttcgggtttggattttcgagatttcgcgtattagtttcgcgggagtttcggtatttttgtatgagtacgagaggattttgttttcgcgtagtagttcgggaagtaggagtcgaagcgcgggtcgtggagtaaggcgggaatcggaggcggcggcggcggcggttaggggcgtacggtgttaggattagttcgtcgcgttttatggggagtcggcggtcgtagcgttgttgaggcgggttcggttggttaggcggggggacggggttcgggttgtagtagttttttttgcggttgtcgggcgggttcgggcgttcgggggttggggggtggggggtgggggaggacgtcgagcgttgaggtaggggttcgggtcgagggcgcggcggggttgcgcgtacgttggggcgcgtggaggggcgcggagggcgaaatgagtttggtaggtggttttttttattattcggtggtgtattacgagggttattcgtttgtcgtcgtcgtcgtcgtagttgtcgtcgtcgtcgttagtcgttgtagttatgaggagaatttttatttttatggttggtttatcggttatttcgagatgtcgtttttcgattatagtatggttttgttttatagtttcgagtatgttagcggcgtcgtcggtttggattatttttattacgggggggtgtcgtcgggcgtcgggttttcgggtttgggggggtcgcgttcggtgaagcgtcgaggtatcgttaatcgtaaggagcggcgtaggatttagagtattaatagcgttttcgtcgaattgcgcgagtgtatttttaacgtattcgtcga

SEQ ID NO: 7204 - DNA, 1215 bp, synthetic construct
  misc_feature 1..1215: note = Description of Artificial Sequence: Synthetic polynucleotide
  source 1..1215: mol_type = other DNA
cgtgcgggagggaggataagaattcgggagtggtcgaggataaagcgggggttttttttattttacggtgtttagttttttttcgttgtacgtggtttagggtggtcgtattatttttaaagtcggtttcgttaatcgttagtttcgggattgaatttgttttttcggtcgttcgtttttcgtaggggataggggcggggagggagagatttagaggggggtcgggggaggtggggtcgtcggggaggaggcgagggaaacggggagttttagggagacggttttcgagggagagtgagaggggagggtagttcgggttcggtacgttttttttttcggtcgtttttttttatataagcgtaggtagagggcgcgttagttatgttttgtttttgcgttcgtcgtcgtcgtcgtcgtcgtttagttcggcgcgttttggaggattttgcgtcgcggcgttttcgggtttcgtcgtcgttagtcgtttcgtcgtttttttttcgttttcggtatcgtcgttagcgttttcgtcgtagcgttcgcggttcggttttttttatttcggggaaggggagggaggagggggacgagggttttggcgggtttggaggggttgaatatcgcggggtgttttggtgtttttcgtttcgtttttttaaaaagttatatcgacgcggatcgcggcggcgttttttttcgttttcgttttatttcgcgggtttcgaatgcggggagttcggatgttcggttttttgtgaggtttttatttgatattcgtcgttttttttcggtattggttgggagggcgttttgtaaagttgggaacgcggagtttcggattcgttttcgtcgttttcggttcgtttagggggggtcgtcgggaggagttcgggggagagggattaggaggggttcgcggtttcgtaggggcgttcgcgtttttatttttgttttcgttagcggatcggttttttattttcggtttttttattatgtatttgttgggttttttttttgtggcgtgttttttgttcgtcgttgcgttgttttcgggttttcgcgaggcgttcgtcgtcgtcgtcgttttcgagttcggattcgatttttcggacgcggagttcgacgcgggcgaggttacggtaggtttgcgttagggtttgcggagaattcgagagtttgcgttagggtttgcggcggattcgagaatttgcgcgg

SEQ ID NO: 7205 - DNA, 1184 bp, synthetic construct
  misc_feature 1..1184: note = Description of Artificial Sequence: Synthetic polynucleotide
  source 1..1184: mol_type = other DNA
cgaatgttgttttcgtatcgatttaaattcgcgtcgagtttttttttatttcgatattataagggagaagagcggagtcgtcgtcgtcgtcgtcgttattatcgttatcgttatcgtcgtggttttcggagcgagcgagcgattttgtcgcgcggggagttttatcgggagtcgcgtttcgttagttcgttttaggtcgtcgtcgtcgtcgtcgtttatttattttgtcgcggcgcgttttcgttgtggtcgtgaggaatcgagtttagcgttgttaagttgtttgggtttggagcgtatcgtgttatagcgtttggtttcgggttcgggttgcgcgcggcggttagatatgataggttgaggtttttttgtttatattcggtcgtcgagggggcggtgcgtcgtttaattttttcgcgtcgggtcgttatcgtcgtttttcgttagtttcgcgtttagcgtttcggttcggtcgtcgttttattttttcgttttattttttcgtttcgttttatatacgcgggtcggggtttgtgagtagtcgtgtttttagcgaagacgggggaattgtattgagaattcgttttcggtatttttcgaagatttcgcggggcggtatttttttttttatatacgtacgttcgcgagtcgtttcgggtagcggtcgtgtttttcggcggggtttcgtcggcggtttttgatttcgttttagagttgtttttcggtagcgttattttttcgtgtttataaaagtattttttttttaatttatgaacggatttcgatttttgttttgttattatttatgcgtttcgtattcgaggtgtcgtttttatttatacgttttacggtttcgcgaaattcggttttttagttcgcgggacgcgttgtttgttaggcgggttcggcggtatttcgggggcgggaggggtcggtcgtagggtttttagtttggcgttcgcggggcgttcgtagcgaaggggtgggtgtcgttcgtgaacgtagtagggattagtttagttcgcgttcgtttttgggtttcggttatcgttttttcgttattttttcggtttttgcgtggatcggttcgtggcgggggttgttttgcgttttcgttttcgtagtagtcgcggatttttattaacgttgacgagttagtgtcgcgattcggggagagaagacgg

SEQ ID NO: 7206 - DNA, 5820 bp, synthetic construct
  misc_feature 1..5820: note = Description of Artificial Sequence: Synthetic polynucleotide
  source 1..5820: mol_type = other DNA
cggagggaaatcgggtcgacgataagggtggttattttcgggtttttcgcgttcggtttaagcgtttttgggtggggtagtttaaacggggagaggggtttcgtgggtcgagggttcgaggtcgtagcgagtttagcgtttggttaaatttggttcgcgcgtttttttattgttttgttagggttgtgtgatttttcggagttttacgttttcgtttaaatagtttttagcgtttttgttggtattcggggcgtttttattttagtttttgtattcggcgcgtcgcgcgtagatcggacggaggggaaagttggtaagagcgcggcgttcgcgggagaaagcgttaatgggcggtcgggtgggagtagcgcgttcgttcgtttacgttacgtcggtgcgggttcggttgacgatcgcggcgtttggggacgtcggcgcgtttcgttcgttaggtgtttcgtttggaaatgtttttattagttgtcgtcggtttttcgttggagcgcgcgcgtcgagttttcgcgcggagttttcgcgggttgtcgggagcggtttagcgttatcgtaggtaggtgaggtttttcgttttcgttttcgtttcggggtttcgagattttttttttttttcgaggaggcggaggtttcgcgcggtcgtcgaggggagcgggcggcggcggttgcggcgatttttcggtgcgtttcgggttgcgagttgtttttcgcggtttcggtagttatacggcgcgggcgggagtttttttagtttaggtagggagtgggtttcgtcgtataaattttgcgaggattgtttttgcgtttaaggggataaagtttgttattcgtcgttaggttttttagaggtcgttgcgtttgttgtaagttgcgggaagtagggtgcgcgggtcggcgcggggcggggggtggggggttcggagtggttaggtttgagttttggacgttcggacggcgtttcgtttagttttaggtcgtatttagggagtaagcggcgggggcgtagcgggagagaggagggagagggtcgcgggtttttatggagggcggttgggaatttagagatttatcgtttgtttttgtggtttttttttttattattggtttcgagggggtttcggggttgtgaggaaatgatttgttaatttcgaggttcgttagtgcggcgttagcgatcgtgaggttttttaaatttatattttagtcgggtgtttcgagcggtgggcgggtataggcgtttttaaggtttttggttttaggttttagaaagaaaggtttttgtttggtgtttcgggttttcggtttcgtttttggttggagttaatttttttgggttggaaggagtttttttcggacgagtttttggtgcggggaattggtggtttttagggtaatttttgaagtattagggttaggttggtcgaagaagggttagggttcggtttgttttttcggaggttttttatggtttcgacggttaacggtaatttcgttaaaataggcgattcgtttgcgtttcgcgttaggggttgattattttttgttttttttgcggtttgtttcggttttggtttttcgtttttcggagcgttttaggttagcgggagtattttattttttcgaagttgagtcggtgttgtgtatttcgggagtcggttgatttttggtttatttgtttacgggtgtatttagtatcgggggtttttagagggaggaaggtttagtatttcgagtttatgtagacgcgtttagttgatatttgagatgttgagcgttttatcgttggtgaaagggatattgggtgttttcgttttaggtttggttttttggtgaaggtatttggaaaatattttagtattatttatgggagaagggtggtttagtgagaattttcggtttgggtaggcgggtttaggttaggttatagggttttagtgagatgtttcggtggtcgttaatttataggttggattgattttgtgttttggaatgagtagtggggtttgggtgaggtcgggcgggttaggaggttttttgggtagttgcgagtttttcgaggtagggtgattgtgattgggttcggattttaggcgttggggtttgttggcgggtaggaagtggagcgtgtgtgtgcggcggtttgggaaagtcgatttagaggttaggtttttgggttacggagaaagggtcgttcgttggtggggattggagcgtcgatttatgtatataggttggaaaggtaaaagagaataggagaaggtggcggtggtggttaaaggaagttttcgaaagggtttttacgtattggttgttttgggaagtggaggttgttttttttagattttgtttagaagatgaatggtcgtttgttttggggtttcggttttagttaagtttcgtcgggtttggaaggaaggaaatgtattagttttaggtttgggtgggttgagttgttgtattagagtttagaggtgtagggtataggtggttgggtttttgggttttggtttttttttttagtcggcggagtgtttatagtcgtcgaggttaggttttcgagtataggtgaggaaaggataagttatagttgaatgttttttttttgggggtttttattttttattttagtttttggttcggttgggtttatattttttttttagtcgggttttattatttggagagagcgagtagtttgtaaataataaataatgggaagtagaaggatgttcgggaaaaattagaaaattgtaaggagtggggaggagggagggtgggagaggggaggaaggagggtgggggaggggaggagtaggaggagagggaaaggggttgagagatttatttttagcgagaaatttcggtggttagttttttattatttataggaaggtgatattagcgatttaggtgagaaagaaagaaacgcggtttgtcgcgaaattaatatagaatttagaaataattattaatgttatttgattcgtgttttttatatatttttcgcggttatcgacgttaaattgtttgaataatttgtatggagcggttatttattattttcgatggtttttttttgtaagtagttcggacgtggttcgtttcggtttaacgcgatcggagaattcgtatttttatttgtaaattaaagtaattacgtagtagatattatatgatgtgtattgtggtttttagatagttattaattatttttaatcgagttgttaaaagagtaggtagatttcgtttttgggaggtaggtttgtagttggggagagggcgaggacgttattattaattagagggtgattttggggcgatttataggtttgaatttaggaatttttttgagtaagtttgtataacgttgttttgtacggttttttttttaatttattacgggaggtcggtttagggggcgagggtaatcggggcgagtttcggtttcggagggcgatggcgtagaaggcggggaacgggttcgggatggttcgggcgtttttttgtcgtttttttgtcgtttgtttattggttttcgttttgaatttgggtaaggttttagggagggtattggtcgagggagttttggggtgggcgttcggttttttttttcgattgtttcgtgcgttttagatagaaagttgggtaaaatggataggggagggcgttttcgttaggtatttaacgttttttttttcgtagttagttttgcggggcgtcgggagggacgagtttagcgggaggggtcggggtttgggttgaggaatttgttttttcgagcgcgtagggtcgttcggtagttttcggtttagtcgcgaggggtagggggaagtcggcggagtacggtcggcggaaaggggatcggggaggaaagtcggggaggcgaggtgggggcggtgggttgagcgggaatttaaaagatcgcggtggagaagatggggcgtttttcgcgatattcggttgtttagaggtgtaaagtcggtgggcgtacgttcggggcggttttatagttttcgggtcgttagttttagggtgtcgggttttaattaaggtttcgaagtttttacgtatttgagggtattttgattagtttttgcgggttgttttgcggtcgtagtgggttttgaaagtttatttcggcgtagggtggaaatcggcgggaggcgttgttgattttcgattaaataatagtgacgagacgcgtgcggggcgtttgcgagtttttttttgttattcggagtagagcgcgttagcgcgaggtcgggtcggtcgtttgcgtagcgtcgggttaattttaattgttgattatatttttagcgtgtttttttataggttttatttgtaattgagacgaatgattatagtggggcgggaaggagtagttgtttattaattaatttttaattaaaagtgtttttcgttttcgggtgattaaagagaaatatcgttcgttgggcgatattgattcggatggaatttatttgttaacgttcggaggaatggttttttcgtttatcgcgcggtcgggattgttttggtttttttcggtttgagtcgtcggcgagtgatcggcgagtttgcggttaggtcgggttgcgcgaggtggggttgacgttagagtttttttcgttttaagtcgcgtatatttgatttgacgggttcgcgcgattcgtttttttttttttttttttcgtaaaatatgtatttttgtcgtcgttgcgaggtcgttcggttttagagttttttcgagttttcggaatgcgaagttaaaggaatcgcggcggttatcgttgtttattttgttattcggttagaaaagtttgcggagcgcggggatggattaatcggtttttttgtttcgtttttttagcgtttagaagtttgtagtttcggagtagtggtcgcgttacgtcggttttagcgcgtagaattttgtaggtttcgttcgttcgtttcgggtcgcgttcgttatgttttattcgtagtttggatatttttatttttcggttttttaggtaagcggagtttcgtttcgtttaggttatcgtaggtgtcggtagggcggatggggcggggacggggggtggggagtgttcgatttacgattgtttgcggttttcgagttagtaaggtttgggtcgcgcgttttttacgtttaatttttgttttttaaattttcggggaaaggtcgaggcgttaagaaaattcgacgggtcgggttcgggttttttgatgtttgaattataaggtttaggttgtgttttaggggagttttaggattttaaggaatttttggggaaggaggtttggcgcgtaaatggcgttagaggttttggaaatttttcggggaagggtgtaggtgttcggttgggttttacgtggcggaggaggttagacgcgtataagttagtggaaaggggcgagtattttggtgtggacggcgggaggttcgggggtattcggggtacgttttcgtgggcggcgcgcgggattggtaaggtttagggttttagtttttagttcggtttttcgttagttttcgcggtttttttttgtagtttttgatggttattaattttttgagtacgtgttgcgagttcggaggtcgtacgttggcggatttcgggttcgtcgtttcggtttaggcgtcggtttattgttcggtttacgagagtcggttgttggttatcgcgcgttacgagtttaattcggtcgcggcgttgggcgtttatgggggtttttatggcggatcgtagggttatggtaattacgtgatttacggttcggaggcgttcgttttttattcgt

SEQ ID NO: 7207 - DNA, 1233 bp, synthetic construct
  misc_feature 1..1233: note = Description of Artificial Sequence: Synthetic polynucleotide
  source 1..1233: mol_type = other DNA
cgtcggttgcgtagtttagtataggttataggtcggggggtgggttcgggttttgcggagtgggcgggtttgagcgggttggaacgtttcgtcggttttatcgtaggtcggtattttagttttaggttttatagcgggtttttcgtttttattttcgcgggttttgtagggttggggttgtttttgagtttttggtaaggttttcgggagttttagttttgcggagattaaagtttttatattttcggtagagttcgggcgagtgtttcgcgggtggcggcggttgtggggtcgtttgggatttttcgtagtattgattttgtaattttttgtgtttgcgtttcgtggtgaggggcggcgggatgcgcgcgatttttttttgatttagttaaacggaaaagttcgcgcgtttcggttggaaggtggaggttaggtaggattcggtaaaggtatattttaaacgaagtagattttattttttatttgtagagggaaggcggtgtggacggatagaaacggtttttatagttatagaattatcgcggttatagtagcgcggcgttcggtagggagcggatcgtggtggaggtttttgagtcgagtaggttacgtagattcgggaggcgttgaagcgggcgtagttgcgttttggagtaggtagattaggttacggcggagggagaggttcggggacgcggcgtagtttttgcggagaggtacgggggcggcggggacgtttttttattggttgaaatgttagggatcggtttgggcgtggagtagtcggggcgagttcgtttttaggtatcgtcggttgttttaggtagggtttgtaggagtggttcggagtcgggtatcgaggtatcgaggcggggatttggaggggtaggggtcggggtagggtttgttaattaagtttacgggggtcgtcgggtggtggaggtgggatgggggaaggaggttgagtattagtttcgggcgatttaagattttttcggtttaattttaggagggaggtagcgttggcgggtgaagtcgttattttttttcgggaggtcgtttagtagttgtttttttacgtttcggggttattgcgtcgggttttggttattatttgggttttggtttacgtttagacgaggggtagcgcgattttttcgtagttttattttagcggttgtcgtcgtagagtatgaagaggtttggtttttgtagaaacgtagtttagcgcga

SEQ ID NO: 7208 - DNA, 2865 bp, synthetic construct
  misc_feature 1..2865: note = Description of Artificial Sequence: Synthetic polynucleotide
  source 1..2865: mol_type = other DNA
cgttttttgttttattcgggtggatgttcgcggttttggggttttttttatgttttgattttggggagtttcggttggtattggttcgcgaaggtgatttgcggatagattagttagagattacgttggttggtcgcggcgcgggttataaagtttagcggaggtggggtaggggattaagttgtttcggcgagggaagaaattgttgtttttaaattattgcggttggaggagtcgatttgcgttttagcgtgttaggataagggcggcgcgaggggtttaggggttaaatggggcgttgggtaggaggggttgttttttgtaggggaggaggaatggttttttgttagggatttggggaaaggtaatagttaggaggggatcgggtcgtaagaagtttattttggattgtagtacgggtagttagcgcgaatttagttaggaggtttacggggatcggtaaacgagaaggggatgcggtgaggacgtcggattggcgtttttgtcgcgttgatatttcgattgtttttttttcgtatcgcgttttttagtttgagacggggaagttatttagggtatcgcgtttttaaatagcggggaaaaggcgttttgggcggcggttgagtgatcgagggatcggttcggagttaggagttgggaggcgcggggatgtggtggggaggaggggagtgggggtagtgagggggtttaaattttgcggggacgttcgtttattttgtcgttgcggttagttttttgcgttttttcgacgtttatttcgcgtcgtattagcgttcgtagtagttttacgttgttggcgtaggcggcgcgtaggagggtcgtcgttttcgggacgtttttcgggacgtttttcgggacgtttttcgcgttttcgacgtcgtgttttttttcgttttcgaaagggtagaaagagtcgttcgaggcgatgttgcgggtgtttggtagattcgagaagtttttaaatttttcgtagttagcggggtttttttcgatttgcgcgtttcggggtggggacggcggtggtggggttatgtagcgcgtttcgtcgtttttcggttcggtttcggttagtagtattatgtcggcggtcggggcgcgggtcgggggtcggggcgcgggtaggaagagcgggacgcggggcgcgcgtcgaggttttcgtttttcgtttttgcgtttttagagaagtcgtggttcgcgcgttttagttcggcggaaatcggtattaggcggttgcgtttaaagaaaaaagttttcggaggttgagcgagtttttggggtgggcgggatcgcgggggtttttcgaggcggggcggggcggggcgcggggatacgttttttttcggggtttttttttcgcgtttttttttggttagagtttagagttaggtaggcgttttttcgagcgcggggattgggtatttggtagcgttgttttagagttggggatagttggcgcgggagaagtagaagtaattattaaagaagtcgaattcgagtcgcgggcggtaagcggtttcgttttttttttcgtcggttcgcgggatgggggcggaggtggcggcggggggacgtcggggcggagtcggtttttagtttcgggaatttcggatttttggagtcggttttcgtcgagggcgtcgggttttcggatttgggtggggtcggtttttttcgtcgttttagaggagtagagcgggtttttttttttcgggggatttcgggtttcggggttgattttattcggtcgcggtcgtttggaggtcggggaattttcggggcgtttggcgggtagaggagtcgggcgcgggagcggagtcgtttatttgggatttgtgttcggggagcgttgcgggtcgggttattttgaattgggggcggtcggttgttgtgggggagttttagttcggaagggaggataatttttagagtttttcgtttcgcggaatcggggtcggtcgtggtttgagggttggttagattttgggatggggggcggggtgtttcggaattttagggagtatttgagtgggaacggacgacgaggaatttttcgtttttatgtttggtttgtgttacgtgcggggatttgcggatttattttcggaggttgcgattgggcgttgattttacgtttggttgtttaaaagagtagggtcgcgggcgatagtcgtagtttaggtttatagtttttttggttcggttttgtttttttttcgttagttttggcgtcggggatgggcggggaggaggagggcgtgtgaggatttgttatagggagtttttgatttcggggtaggaggcgtcgtgagttaattttgggggaaggtttttgcgtaaaggcgcggaggtgcgttcgcgttcgtcgtaggttaaagattgcggaggttattagttttgtgtttttttagttttttttttttttttttttttttcgattttgatagcgtgtttattagttgttagtcggtgggaggttttcgcggttttaaggtgaatatagttaggttggcgtagtcgttggggattaggtttgaggtttacgtgtcgttgggtaagttgaggggtacgagggtatcgaattcgaaatagtcgtgggaggtgtaggatgaggatacgtttaaattgcgaagtcgttcgagttttcgtgttatatcgtattggttcgattcgttgttttggtcgtttggttttttagtgtttttagtaggagttaaagggtttgttggcggttttcgattcggtatttgtagggtttcggagggtggggcgcgcgggagtatcgatttttggtgaagacgttttcgtatttgggcggttttgagcgagtagcgaattgagattcgt

SEQ ID NO: 7209 - DNA, 1154 bp, synthetic construct
  misc_feature 1..1154: note = Description of Artificial Sequence: Synthetic polynucleotide
  source 1..1154: mol_type = other DNA
cgtgcgtttttaaggatgttcggtttttttttaattcgcggtttttttttttttttttcgcggttgtcgttgttgtcgcgaaaattaggagaagtggaacgcgcgcggcgaagcgtcgttttcgcggcggtattgggtatgtttcgtattcggggtcggtttcggcggcggggcggacgtttttttattagtcgggcgttcgggtcggtcgtcgaggtttaggtggaggttgaggttgtcgcgcgtcgcgggaggagtttcgttttcggcggttgaggcggcggcggtataggtggcgcgggtcgcgcgcggggcgtagttcgggagcgttcggcgtcgggcgtcgcggcggttttaggttcgcgttcgcggcgatagtcggttgagcggagttgcgggcgcggcggttgtttttttagttcggtcggttggcggcggcgttcggagtttcgaggagttcgtaggagttcgtggagttcgcggagttgggtagggggcgttgcgttcgtcgagttcggaggggtcgtcgggtcgggcgttgcgtattcgcgtcgggagtcgtttttcgttcgcggcgttcgtttttgtcgttcgttagtattttttgtttcgcggtcgcgtttagataataaaagcggaagatgttgtagttgggtaaggttaggattttgttttgaagtcgggcggcgtcgcgtacgttttttttcggattgaggagttgtcgtcggcggagggtgtatgtttgcgaggaagtcgtcgggcgtcgcgtttttgggtgagttgcggggttgggcggtcggggtcgggcgtagttttttttcggcgtcgtttttttttttttgtcgttggtgggggtggttttgggttttcggtcggtaggcggcggcggcggttgttgcggggtttttgtttgtttcggggaggatcgcgatcgcgttaggtttttttcggaagtcgttgtgtttggaagggggttcggggttagtgttttttttggagcggttattaagtggttgttttgcgtgttttttttttttgttatttattttttcgggaggaagcgtatttagggtaatatcgataatgttgtttttcgttattttgagaatatattcggtgtatttatgacgtttttaatatacgggaggagacgg

SEQ ID NO: 7210 - DNA, 1154 bp, synthetic construct; identical to SEQ ID NO: 7209
  misc_feature 1..1154: note = Description of Artificial Sequence: Synthetic polynucleotide
  source 1..1154: mol_type = other DNA

SEQ ID NO: 7211 - DNA, 396 bp, synthetic construct
  misc_feature 1..396: note = Description of Artificial Sequence: Synthetic polynucleotide
  source 1..396: mol_type = other DNA
cggcggtttttcgttttttttttatttttttcgtttttatttttattttttggtcgttcgaattttcgatcgggagtttagagttttgttagcgtcgtattgtgcgtcgcgtaagtcgttcgatttttttagcggtatcggttttaagtagtaaatatttgtgcgtttttgagttagggacgcgcgtggggggtgggcgtgtacgcgggtgggttagcgtagagtgggagtttgtgggtgtttttcgtcgggatttttaatttagttgttttcgagagtttaagttgagcgtcgtacgtgttcgtgttatttgttgtattggacgtagtttaatagcgtagagaggtttttattcggtatttagttcgatgtgggtcgtttttttttttttagcgg

SEQ ID NO: 7212 - DNA, 438 bp, synthetic construct
  misc_feature 1..438: note = Description of Artificial Sequence: Synthetic polynucleotide
  source 1..438: mol_type = other DNA
cgaggagtaggggttgcgggtcgggtttttgttgttcgcggttttcgggggtcgcgtcgcgtcgggttacgtgggggttttcgtttttcgagcgggcgtcggtgggaaatttgcgcggcgagagatagggggatggggcgtttttgacgcgattgtggggtgcgggtagttttggaggaggatgttcggttaagtttattttgtttaggtgtcggatttttagtttaggttgcggtttgttttgggttcgtgaggcgaggtcgtagcgtttcgacgtcgggtgggcgtgtgggtggagtggagatttgggtttttcggcgtatgggagtttcgtcgtttgcggtagggaatcgttttttatttttggttcggttcgggtcgggagtcgtgtttcgcgttgattcggtgtaattttttagtttatttttttttacgcga

SEQ ID NO: 7213 - DNA, 438 bp, synthetic construct; identical to SEQ ID NO: 7212
  misc_feature 1..438: note = Description of Artificial Sequence: Synthetic polynucleotide
  source 1..438: mol_type = other DNA

SEQ ID NO: 7214 - DNA, 411 bp, synthetic construct
  misc_feature 1..411: note = Description of Artificial Sequence: Synthetic polynucleotide
  source 1..411: mol_type = other DNA
cgcgtttcggttttcggggagtcgttttttagatttgtttattcgggagtttttttttcgcgtattttttagattttttttgagattcgagagcgttggtttttttttattcgcgatagttttgggatgatagtgcgggtttttttattcgtagtttttattatttggcggttaggggttcgcggttcgggcgggcggcgttagtgttttttggagttgggcggggagggcggggcgggcggagcgggtatggtggggtgtcgggggtcgtaggcgtagcgttttcgttttggttatggagcggtcggcgttcggcgaggtggttatgagttaagttatttagtcggcgtacgttattgcgcgcggcgagttgagcgcggggtagttgtttaagtggatcgatattatcgt

SEQ ID NO: 7215 - DNA, 1137 bp, synthetic construct
  misc_feature 1..1137: note = Description of Artificial Sequence: Synthetic polynucleotide
  source 1..1137: mol_type = other DNA
cgcgtttgttaggtttagatttatacgtacgtcgtttttgtttgtatatagtgcgttttcggcggttcgttcgtttttttttagtttacgttttattgttttttaagttagaagtttcgtagtcgtcgcgcggagaatagcgatagtcgagcgttcggttcgtttgtttgtcggtgggtttgtttgttcgcgtagtagattcggggcggtcgcgggagttcgcgtttcgttcgtcgcgtttttgtcgggatttattcgtagcggagggttgagttcgtcggcggtttttcggagtttatttattttcgcgcgtcggagcgtaggtaaaaggggaggaaaggtttttttttttagttattattttcgttttttttaagaatttgtttaataaagcgttgaggaaagagaacgtttttttgaattttttagtaggggcggagtttgttgttgttttgcgttgttatttcggttatattgtttttcgcgacgatttttgattagtcggggttacgttcgggagacgggattatgaagcgttcggtagtcgtttggtttttggtcgggtttagtttcggtgttttttagttcggtaaaggtaaggcgtcgggattcggatagttgggtgagggatgggttgggagttttttgagaaacgtcgcgtagggggtcggaggcggttttttcggcgtgttaagggtggcgagcgtcgttggcggcgcggaggaggcgtcgagttttgggtgtttcgagaaagtgtttgtaaagtttgagtagagtgcgcggggtcgagcggggagaagggtgcggggtatcggggtgagatataggaaagaggaggacggtggggagcggtagaagatagcgtttttaggattagcgattttgtggtttattcggttattgggtttcggcgtaaattttttttaggtagtgcgggcgatgttgattgtagacgtcgggtagggttttcgtgcgggcgggagcgggggaagttagtgcgttcgggcgttagttagttgatgcgggaagaggttggggagttgtagggtcgttcgttttcgggtgcggtgttttggcgtagggtttgggttgagtcgttcgtaaatttagattcggcgttgggcgttttggtcgcgg

SEQ ID NO: 7216 - DNA, 2383 bp, synthetic construct
  misc_feature 1..2383: note = Description of Artificial Sequence: Synthetic polynucleotide
  source 1..2383: mol_type = other DNA
cggattttttaggatcgcggcgtcggttggttgtttcggtttttcgcggtcgcgtgagtttttttttggtggtggagggcgtattttaatttggaaatttttagtttttaatttggtttcgtagattgacgtcgttttcggtggggcggtgggggtaggagggtaaaggggaggtttttttttttttggattgaggttgtaattaatagtttcgtgagtttttatttttggttgattgcgaatttttttattttaggttaggggtcgggattttatagaaagattcgtttttatttttaattttgcggtttttgttcggcggggaagtttagttgcgggttagtttagttgcgggttcggttaagtttggcgcgtttaggtattttagtttttggttcgcggtcgggcgaggacggagggggaggggaaggggttgttgtttttttttttaaattcggtttttaatcgttttatttttcgtcgtttattcgttttgtataggtagttaaaatagagttagcggttaattgacggggacgggaagtaaagtcgtttagcgtttcgttttttttagtcggtttttcgggttttttttttcggcgttcggattttggttttttttttttttttttatttttttttttgttttaatttcgtttttatttttcgtttattttttttcgtattcgggttcgttaatttttttttttaagttttttttttagttcggtttttttttcgggttcgttttttttttttttaattttcgttttttttttttttttcgtttttttttttttttttttttttttttttatttaattttggtttttttcgttttttagtttcgattttttttttattttgttttcgtttattttgcgtcggttttttagttcgggttgagttttacgtgtggacggtcgcgtttttattgatagtcgtcgttcgtcggttcgtttcgcgtttcgtcgggtttttaaaattttcgcgtcgcgttttttatcgtcgtattttttttagcgtttagtttttcgtttttttttttgttggtcgtacgtttcggtttcgcgtattttcgttcggtttcgtagtcgttattcgcgtttcgttgttttgtgggatttcgagcgagttcggagggaatttttttttttttttgggggcgatttttgtttgtttgtttgtttttttttggtgatttttgtagttttttaatattcgttttcggagcgtacgggaattcgtcgagttttgcgtgtaggttttttttttttttgaggtttatattttttgaaattttacgttagggtttttgtaattttttttttcgttcgttgacggttttggagtcgttcggggttttaggtcggttatgtaacgtgtatcgttcggggttgtcggttgtattttcgtcgcgtttcgtcgtttattgcgttagattcggcgtttcgcgtttcgtttcgtgggtagttagggggtcggcgttttgtcgaggtttttagttagagtagggagttcgagttcgagggagttttcggagtcgacgaagggtttattagattttgatttttttttgaggcgcgtagattttgtttttgattatttttttttcgcgggtttacggtcgcgcgttttcggcgtcggcgatggggagaagacggaggttgtgtttttagttttattttttgtggttgggttgtgtggtgttttgggcgtagggtacggtcggttagttttagtttttttcgtttaagtcgtttcggttttagtcgtcgtcgtaataggttcggttcgttatagtaggttttgaaggcgggtttttagcgttcgagtatcgcgaggagggtgtcgtagtggttagtcgcgttcgtcggcgaggatagtaggacgtgtttcgagggtaagtgggtaagcggtttcgtatttagggtttcggtttgggggaggggggaatttttagtttggcggttttttggtttatttcgttttagattttttagttggagtttagagttgtagttttttttgttagaatatttaaagatttttaggagcgcgtttttttttttttttttaatttcgtagtttagcgggcggaaagtttttttttcgggggttgggcggcgggtggttagggggtttaggggtgtcgatcgtagagcgtgtgtagagttcgcgttgcgggaataggttttgaatgttcggcggtaggcgggtttgggttcgtttgttgtaggggttagagaagtttgtttgttttttacgtcggggtcgtcgttcgtgagttttttgtttgaggacgtgtgtagggtttatagtttatttttttatcgttaattcgagcgttttattttgcgacgcgttttttttgatacgtcgg

SEQ ID NO: 7217 - DNA, 2367 bp, synthetic construct
  misc_feature 1..2367: note = Description of Artificial Sequence: Synthetic polynucleotide
  source 1..2367: mol_type = other DNA
cgggtcggtttttcgtttcggaggttggggagggggtcgtgggtttttgcgtttttaggttaagcggttttggaggtacggattagtaggacgtcgaggtggcgcgggtcgcggtttttttcgtagtagttgtcggcgagaattaggtagggaggcgtcgttgttgattgtattttatgaaagatttaggttcggttgtcgcgttgttatttttcggtattttgcgtcggaaacggtcgttttggagttcgtggtcgtcggcgggtaggtttagtcgttttagtttttgagaaaggtaggttatagttcgatttgttttgtggttttattttataattttaatagtaagtaggtttaggttgggtatttcggggtattaggagtaggttcggttaattggtttttattatgaggtttcgcgtatagggttatttggttacgaggtaacgttggggagttttgtggtttgagggtgggtaaaggataggtttttagtttttttgcgtttagttcgttttttagcggtagttagttaggaacggtttgcggggttataggggtggaggcgttatcgttcgtaggttcgtagtaggatggtcgttgggggatgtgtaggtataggggttggataaggggttttagaagtgtttgttttgaggggttggtgtgttttttttttattagtttagtttttgaggagagggaagaaggtaatttttttaattagggtaggtcgggcggttgttttattttaatattttttatttttaaatatagaaaatttggggtttgtttttaaatttttttggttgttacgttttgggtagcggattttttttgttaatacgtaagattagttttttttcgtaggttgagtagaaagaagaaaggtttaattttaaaattttaaattcgattattagttttcgtttaaacggaagtagggttagttttttacgagttaggtgggaaattgggtttagggagagaaagtgttttagggttaggttgggattcgttttggtttcgttcgtatgcggtagggtttttttacggaggttttagggcgcgtttttcggtttcgaggttcggtcgttagtcgcgcggattttagtttacgtttcgagggaggttaggatttttagtcggcgggattgcgcgtcgttttttttttcgtaggtttcggcgaatatttagttttttttttttttatttttttcgtttttcggttagtgttttcgtttttttcgcgggcgacgggcggcggcggcgggaggagcgggtcgagtcgaggaagtttcggtttcgcgcgttgggatgtagcgaattagtaggggtcgaagaatcgtgtagtgttagagttagagttggattcggggttttagtcggagtcgaaatttgagttagagttcgcggcgggcgagttcggagtttacgagtcgtagacgtagcgttgtttaggtggggtaagagacgttgggttaggggcgtagggttttcgcggtggaggggcgtagggaggtggcggtcgagttttgcgtagtttgtttttggcgtgtgtgggtttattcggcggcgcgggatagcgtaaggcgcggaaggttaggagttttcgaggtagcgcgaggagttcgtttttgcgtttagggtatagttatagtcgtcgttatcgggtgttattttatttaatcggcgggattaattttttgttttggtttcgggtattttaagagggtagtagtttcgggggtacgggttacggtttcgcgaagggtataatttgagaagttcgtggtagtttttcgtagcgtcgggtgatatagggtttttttatttttaggagaagtgggtaggagagagggtcgttcgttgtttttcgttgcgtttagggatggagggttttattatttatggaattgttggtttttttgcgtggttcgggattttagtcgtggtttcgcgttaagagggtattttttttaaacgaaatcgtttcgttcgttcgttcgttcgttcgttcgggtagtaatgtcgtagaaaagtagtagacgtcggttcgcgttttggtttttttcgtttcggatttcgacgtttcgtcgtagcgttcggaggtgtttttagtttaaggtagtttgttttcgtcggtataggtcgggttttttttttttaggagagaaattttaatttttttcgtaacgtttaataaagatattttcgcggttttttttaggtttggttgttgacgtagggtttcggagtacgtagtcgttttttaagaatcgggtttcggatttttgaaattgattagtttcgtaaattggagtttattttttcgcggtaaaggtagggttttaaagtcgggatcgt

SEQ ID NO: 7218 - DNA, 1235 bp, synthetic construct
  misc_feature 1..1235: note = Description of Artificial Sequence: Synthetic polynucleotide
  source 1..1235: mol_type = other DNA
cgaagtttagtcgatttttgattgttagtatttcggttataaggtttaaggcgaatagttgtcgtacgtcggcgcggttgtggttgtcgaaggagtaaataattttatcgttggggtttttatttagattcgttgtaaggatttgtattacgcgcgtgtcggagggtgtattttttaggacgcgcgttcggtataaggattggttgaagataggcgtattgttattcgcgtttagtattttgatgtgaataggtaggttggcggagagagttggggttttttcgtttaacgtcgttagtattaattggagattaggttttcgttttcggtttagggcgcgttttaatattagtttcgcgtatttggtgttgttttttcgcgtttgtacgcgaagcgtaaagtatttatttcggtttagtttataggtttgtaaagagttgttttttatatcgggatcgtgcgcgttttcgagcggaaagcgcgttttcggagttacggtttcgttaatttttaattttattttttgggtagggaaagtaggattgttgtcgttgatgttttggattattatttttacgttgaatagttttagcgggttttttattattaattttagagttatagtgtaagagggtagtgttttatatagtttttttcgatttagacggtcgtttataaatattttttcggtttttcggtttattttaaagaattttcggttagttttagatattattcggaatttgcgggttgagaggttatcgagatttaaattaaggttcgcgattacgttgtttatagcgaaatttttttttttttttttcgggattttatagtgaatgatcgtggaagttttgtttaaggtattaagtagaagtaaaatttttattattttttcggtgtttattagttcgtttttttaggtttttgggattattttatttaaaagtagttttttttagcggggtttagatcgtttttgagatttcgttgagaaatttttagcgggttagcgtttgggcgttgggcgtcgagttcgatatggttttttggatgtcgttgatttgttcgtcggttgtttagtttttgttttatttcggggcgtagaaaggggacgggtaggggttcgatttttagcgtttttattggtcgatagcggtatatagagttttagttaataattgtacgaagaatgagttagcgtcgggttttttgagtaggatacgcgttagcgt

SEQ ID NO: 7219 - DNA, 3043 bp, synthetic construct
  misc_feature 1..3043: note = Description of Artificial Sequence: Synthetic polynucleotide
  source 1..3043: mol_type = other DNA
cgatttaggagagttcgatacgtcggatagttgcggttagtcgtggttattttggtttttcgttttcgttttttttattttcgcgtgtagtcgggatacgggaaaggaaagttttggaagttaagcgtcggttaaaagatgatttgttcgcgtgttttttcgtttttttttttagtcgtgttatatggcggttttaattaggcgggtagtgcgtttcgtcgcggagatttagggtcgcgtcgtttgggtagtgggtgatgaaattttttaggcgtattatcgtagagggcgcgggcggggcgcggggcgggggtgggggatcgagagttggtatcggggtttatttgttttttaggaggagggtggggacggggggaggggcgagtgcgcgttaacgtcgggtgcgtgttttggggcgtttgggcgcggcgttcgtgttttcgtttttttttagttttgcgagtttttcgagttgcgtcgtggggtgacgggatcgagagtagtttttgttttcggtttcggcgcgggggagacgtgagcgtgtatacgtatatatatagtaggggaagaggcgttttaagcggcgtttaattttttttttttttttacgggtcgggtgagaaagtagtcgggggttatttcgattcggcggtttttggggagggggtcgaataagaaaagggaggagatggagataattttttcggatttagtttttttgtttttgtttttgtttttattatttttatcggatgattggagagtaaaagggaattcggagcggggtggcgagtagcgttttgagaaaatgtaggagtgtgtttggagacgcgtaaagttgttttttaagttttggttttcgggtacgcgatgtttcgcggcgggttgatttagggttgttttgggtttttttgttatttttttggaaatgatgtaagttttgattgttatttggatttttgtagtttagtttggaatgcgtttggattaggggaaagacgagaaacgatattttaggtgttgtacggtttattaaagcgggaagatagggtagttgtttagattaaatattgtatttagtgtttttgtttttatttttaatcgtggggttttttttaatgtaaagtgttataaggttaggaatttttatgtgtgtttagttggtttatagtattattgtgtttaggaaattgttttaatttattaagttttttgggttgggaattttattgaattttaaacggcggaaagaggaaatttttttaattcgatgtgggtgtgacgcgagttaggggttttagggatattgttttagagtatatcgtttttttttaatagtaattggagtttggattcgtttttatattgtatagttttttcgattattgttttggagtattcgtatacgcgtacgtattttcggtcgcgtttatatatatttatatatacgtacgtaaacgcgtggtcgtcgttaggtcggtaattttgttcggcgtttttagcggcgttcggtttttttttgtagtagttgagcgtaggtttcgtttttcggtcgtgttgttaaaagggtcggggtttcggattggtttagtcgtcgggataatatttgttcgatttttttatttaagtgatattagagtttttagggatatttgaggtattatttttgttattgtcgggtattcgcggcgttgttaacggtttggttatatgtttttcggagagttacgggagggcgttgggtaatttttattcgagtcgcggtcgcgaggaggagggaaaaggcgagtaaaaaggaagagtgggaggaggaggggaagcggcgaaggaggaagaggaggaggaggaagaggggagtataaaggatttaggtttttcgacgggaggttaatattaagaattatgtgtgtcgagcggttgggttagtttatgattttggttttggtgttggttatttttgattcggcgcgggggatcgacgttattaatttattcgagggtttttaagataggagtttttagtagaaaggtcgtttgtttttgtagaatataggtaagtgtatgtgttttcgtagtcgggagttattgggagaggatatcgtgtatttacgcggcgcgttttaggcgtttcgtcgggagttaggcgtttatttagggttacgtaaatttttgggatggtacgggacgtgtaaagggaagcgcgaggtaaggcgaggttcgcgtcgggtttcgagggttcggaatttgtacgtgttagtagggtgatgaaatggttggggtaggatttgttgttgttttttttagggtcgaggggaaatgaagtagcgtttgacgttgttagcgttagttttcgttttcgaatttcgggttcggtgtaaagcgcgttttatttcggtcggtacgcgggaggtttagagggttttcggagttgggttgcgttttgcgttcggagaatttttttttttggtttgtcggttttagtaagggtgtcgcgttttttttttttttaaaagatgttcgatattttagaattttgtcggcgagataaatggtattgcgaattttttttttgggggtattgttttcggaagggagcgtgagggtagcgtaaagcgtattttcgcggtgttgtcgttatttttagtttttggttaggttagtaagttaagaaatggtgatacgattcgaatcgtgcgttttttttgttttatcggtttttggtttatcggtaagttgtaaagtagagttaggcgtgtagggtacggggttggttttttttttagttcggaaagagaaagaaaatttgtttatagttttttcgttttacgatttttttttcgattttggggggtcgtgtgaacgcggtagcggcggcgtgcgtgcgtttatcgtacgagttggaatgtacgagtgtttattagggacgttttaagtgagtgaatggcggttttgtgcggttttgtttcggcggcgcgtggggttttacggattttgtcgtttttatatgttggggtcggtatttttattatttcgagattttcgt

SEQ ID NO: 7220 - DNA, 864 bp, synthetic construct
  misc_feature 1..864: note = Description of Artificial Sequence: Synthetic polynucleotide
  source 1..864: mol_type = other DNA
cgcgatttaatttttaattcgcgatttaatttttaattcgtgatttaatttaaaattttcgatttaaattttaattcgcgatattaagtttgcgatttagtttagaattcgcgatttcgtttggtttattttttagtagcgatattggcggttttcgattttttagatttagtgagtttcgtaaagtcgttcggttttcggaagtcgtaggtgtaggcgtcgttgggttcgcgggtttttttggttggttcgggttgttttaggattacggacggaaaatcgtaggcgcgcggtttatttcgttttaaggggagggttcgtttggtcgtgtagttcgtttcgttttttttttcgaagagagatttggtgttggtatgggtatttcgcggttatcggagtggtttttcggatgagtttggtttcggcgttgacgttttggttttgggggttgtttggttggtgttaggtagcggaagacgtttggagagttattcgtttttttttttattcgtttttatcgttgttcgtgttaggacgcgtagtttgtagttgtagtttaggtattggcgcgggatggcggagttttttttggatggcgttagggttatcgagtgtatagtttatttggtttgagggtttgttttttttggatattttttcggattttgatttttggcgttgggtaatttataggatgagatttatcggttgttggcgaagtcgatcgtttgattttgttgtttgggcggttggtttcgggattcgcgttgttggggacgcgggtttggtttgcggtgtttagttatttgttgcgggcgcgttacgtttaggttggtggttgtagtcgtagtttcgcgtttgcgg

SEQ ID NO: 7221 - DNA, 2071 bp, synthetic construct
  misc_feature 1..2071: note = Description of Artificial Sequence: Synthetic polynucleotide
  source 1..2071: mol_type = other DNA
cgttcggtcggcgtcgtttttcggaggttgtgtttttggggtggttggcggcggggttttttcggttcggttcgcggcgtttttttgtcgtcgtttcggggtgtttttgtttcgttgcgagttcggtatcgcggcgacggcggcgcgaagagggaagcgggcggcggcggcggtcgcgttaagatgcgtcgggttatcgtaggttgaggcgttcgtcgttttcgttttttttttcgttcgtttttttttttttcgtttgtttttttcgttcgttcgtttttttttttttttcgttttttttttgcgttttttcgttcgttttttcgcgtttcgtttttttcgtttcgcgttttgcggtgttgtagttgcgggcggttttagttgtttttagatgtgggttgggcggttcgcggggaattttcgcgtcggttgcgagtgcggggtttcggttgtagttcggttgttatggattcgtcggcgggagtcgttcgtcgtttgttttgtttcgtgttgttgttgttgttgttgttgttgtcgtcgtcgtttttgtcgtcgtcgtcgtcgttcgcgaacgttaggttcgtcgtcgtcgtcgattttttaggtaggtgcggttcggtttttatttttcgggattttcgtcggtttggttttgtttcgcgtgtttcgtcgttttttttttaggcgtcgtttagtttgatttgggtaaatttcgcgcgtttcgttcggggttaagttggttaatttcggggtcgggttggtcgcgtagggggcgtttcgtatcgttttcgagcgttttgggtcgggggagtttcggagtattggcggtttttgagtcgcggagggtggggacggagggtcgggaaaagtttcgcggttaagagcgtagagttagttttagcgggttcgaggggggagttagggcgaggcggcgtcggggttcgcgttcggggacgtttcggaggagtcggttgtcgagcgcgtagttttgggttttaaggattggttggggcgtttcgtagggaattttcggagatcggagggattttgttttattttttttagttttcgggcgttcggggagacggggtcggtagcgggttgagcgggagttggataggtaggataggtcgttcgtgttcggggaagtcgagatttcgtcgtttcggaggttggcggtgagggtattcgggcggtaggggttcgtcgaggggtcgtggtatacgggtaagggggttaattcggaatggttttcgagtagttttacgttttgttaaggacggtaggtgtaagggtcgggggattttttgacggggtcgttttttcgggtacggggaggtttttatcgagttttaattttgaacggggtagggggtagagtttttggtaggtaaggttttcggaggagggaacggttggggagtggcggagtttcggagtggtggttttgttaacgttttttttcggttgtaggaaagtcggggaggtgtaggttggtttttggggtcgtttggcggaatgtttttttttttcgtagtggggcggggtttgggggggcgtggtttgtcggcgggtttttgaggtattggggtttcgtggttttcgtcgatttaacgttttttttcgttgtaggcgggtttttggggtacggagcggagcgtattttggcggtgttcgtgcgtattgacgtttagggtcgtttggtgttttacgtggtgtcggtagttacgtttagagtaggggtacgagttcgtagggtcgtttcggttcggatttcgagttttttcggaggtaacgaggaggagtttggtagttattttttttataatgttacggtttttggtcgagatttgtatttgcggttgcggtttaacgttcgtttcgtggcgttcggggttattatggagtggtagggcgagaagggtattattcgcgtggagtttttgttcgggagttgtttttacgtcggagacgtggtcggtttagtcgaagttttttttgtggcgtttagtaattgcgatgggttggtgagtacgtatttttttagttttttttttttcgttgttttcgt

SEQ ID NO: 7222 - DNA, 1170 bp, synthetic construct
  misc_feature 1..1170: note = Description of Artificial Sequence: Synthetic polynucleotide
  source 1..1170: mol_type = other DNA
cgagttcgcgttaagagttacgtcgagacgcgtcgtcggtggggttacgcgagatgtaatcggagagtttaaaattagtttaggattaattttttagggattcgtttaatttttttcgtagaagagtttaagtggggtagtggtcgttataggttgaggatgattttcggacgcgttttaggcgcgatcgtattattcgtttttagtttaaagtttgagtgatttggtattatttttttaattgttttttatttttttcgtatttttgttgtgtttatcgtttttacgtatttgagagtttaaattatgttaagacgatttggagaaacgttcgatttgttttttaagttacgtaaggatttatttagacgtacgttcgcgcggagacgtacgttggtatacgcgtttatatacgcgagtatatatacgcgtatattattcggttcgtgcgcgcgggtcgttgtttttgttgtattatgtaaaggtggttgggaaagcgcgttgatttatatttatatagtttattttttttttatagtatgtgattaatacgtatttcggggaggagggagcgcggttgggggtgttaatcggaagggaatagatagtgagtgttattttgttgggaggttttagaagtaaagcgttaacgacgatagtagcggtggttttagttttattagtaattgtcgttggtaggagtattatacgttttaggagtttttcgggtattaagtatgggtttagttcgttttagttattttttttttttatggttttattttcgttgttagtatttcgattttagtttgtaattttgattttgggtttgattataaatgacgaaagatcgcggtagtttttaaagtgcgggagcgagtttcgtattggttagcgcggcggagggatttttttaggaggttttaagtttttaagtttgtggagagatttggtaatagttggtaaggtttgttttagttattttcgttggttttttgtttttgtatttagcgtttgagggcgttattcgttttttttttgcgttttacgtaagcggtttaaggaatttattcgattcggatttcgtttcgtatgttttttaagttttcgttattttcgtaggcgttttagaaaggcgtgatggttttagtttagtgttcgttagttcga

SEQ ID NO: 7223 - DNA, 2168 bp, synthetic construct
  misc_feature 1..2168: note = Description of Artificial Sequence: Synthetic polynucleotide
  source 1..2168: mol_type = other DNA
cgcgttataaacggggatttaatttattgttcgatttttgttagaggcgatttatttgcgtttttgttatcgtattttcgttcgcgtttttgcgttttaggtttttcgttgttttttcgttttttgtagcgcgggagcgttgtttcgtttggtttgttggttttttttagattttggttatttttttcgtggtaggaagggttatatgtattgatagatttttcgttggtggtggttgggtggtggcgaggcgtgttttcgggcgcgtttaaaatttagtagttttttttaagtagtagttttttttatttcgtttttaggattgaggatttagttttcgatgtttttttattttttttcgttttatttcgttattattttttaatttttttagtatatttttaagttttatacgggcgtttgttttttttttgtattttttagttttcgggcgtttcgttcggttgaagtttacgtattttgggatttaattgtttttaattattcgcgtagtttaagtttcgcgtttgtttggttttcgtttcgggagtttgaagttatcgggtagtttattgggtgttttcggggaaaaggtttaagttgtagagatgagagaagtggggttgggggaggggagaggttttagaaggaagattacgaatacgtgcgaagaaataaaagttattacgtgtgtacgcgcgcgggggtttaagggcgcgagcgcggagtacgttttagggggttagggatagtggttttttgtagcgggtatagtagggggcgcgggtatttatacgaaagcgtggtagatgaacgtttagtcgcggggtttttttagtacgttgtataggtagttttgtattcgtcggtatttgacgttgcgtcggtagttttggttattcgtgtaagagagcggtttttttagtaggtttattcgggttttttgtttgtttcggcggtttttttttaggttatcgtcgtcgttatcgagcgtggtcgcgcgggtgtttagtagtagtaggtcgtcgtttttggcggttgtcgagtttagtagtattttgtttcggtcggattttatattttttatgtcgttgtttaagcgtttttcgttcgtcgtcgtcgtcgttgcgtcgttttttatttagagttcggcggcgtcgttttttttttttttcgcgtggtggcggggtatggtattattacgggtatcgcgagggggtcgttagcgtttgcggcgggggtagcggttttatgtgcgtcggcgggttttaaggaggaagtcggcggtcgacggggcgttcgttagttagagatttttgagtcgggggcggggaagtaggtagttagtaaatcgttcgggtttcggggcgggaaaggaggggttgtagaggaggtcgaggagttttaatttttaatagtttttagtttcgaattttaaattcggatttgtttggggcgttattttgagagggttttttttgtttttttattttcgcgattattatttttttttttttaaattgttttcggggatagagtgggggagtgcggggcgtttcgaggcgcgtttttacgcgcgtatatttagttttaggtttttttttttttttttttattttttacgttttgtagcgaaacggttttagaagttttttttcgaggcgcgagttcggtttggttttggtaggggttttgtagttgttcggaaggtgaagttagttttgtgttttgaggagaaattggagatgtaggtcgttgtgttttttcgttgttacgtcgttgcgtcggattttgttattttttcgtaaggggtgagagcgggaatagttttgttttgttttttaggtattatttagtttggaggttggagcgtaaggtaacgtttcgggaagtggtattcgggttttcgtatacgggcgagtttttagtagtttagtggatagattcgtaggacgcggttgttaagttcgcgaggtaaggattaggtattttttcgcgttttattttagtttgcggattgtgattttttattttagtattagataagttcgcgagtaattgaatattttttttagtttatgggtggggtgtggaaagggcgtaaaattttaaagtggttttttcgcggtgagcgagttgtttcggggttttgtttgattgtagcgcga

SEQ ID NO: 7224 - DNA, 2053 bp, synthetic construct
  misc_feature 1..2053: note = Description of Artificial Sequence: Synthetic polynucleotide
  source 1..2053: mol_type = other DNA
cgggaagatttggaggtcggtaaaacggagcggtgcgggatgatgtttgggaatatcggtaaggtgttataaaatgaacgttaaggcggttataagaggacggtcgggaatcgaatttagcgtttagtacggggtttttgtggtcgacgtgacgtggtttcgttaggtggaaatcgtgcgattttttttcgatttaatttacgagagataaagatgtttaaataattacgatcgtcgtcgtatattttgtagggtttcgggggcggaggggaggggagcgttttttcggtagaagcggcggtttaggtttgtttggaggttcgtaatttattatgataaatgtaaagattaattaaggtttgattcgtgtatataggaggtagacggcggttgatagtggaaataattaacgagtatgttttttaatttttgtcgcggttgttgagtatatcgcggttttttaggcgttcgtcgttgtcgttttcgagttttagagtttttagttcggttttggagtggggcgtttttttttagcgaaaaggtgcgaggagcggggtttcgggtggtcggggagggggcgcgtcgggtcgggaggcgcggagttagtcgtttacggagtttaattgtttgtatcggggatcggcgggcggggcgcgttcgagtggtttcgtcgggaaagggcggcgggcgttggagaaggcgtttggcgcgaagttgggcggcgtttcgagggcggaggataggtggtcgcgcgatcgtagttaggtagcgaacggttcgggggttgcgtagcgcggttttaaagtttagttcggtttcgggtttagttcgttgtcgtttgttacgggagcggttttgcgcggagggagggggcgcgagatcgtattttcgggttcggcgcgtttcggtttttgggttttcgtttttttttttttttcggtttagttcgttgttttagacgtgattttcgcggaaggtgttggcgatgcgcgttgttcgggagcgtgtgattaatggtttcgaggtcgtgggcggcgtatgtattagtttttttttggtttggttagggtgtgagggtattcgggagtatagcgaggttatggtagcgggggttttcgggagcgcggcggtggaggaggaggaggaagaggagaagtaggtgacgcgggtcgaagaggtttgttttttttggttttagggttggcgtcgcggcgggtttttcgttttaagtaaagtttggggttacgggcgttgcgtttaggttttttttcgcgtagttttttcggcggggtttgtgtcgtcgtcgttgttagggtaggataaaggtttattaatacgtgatgggatcgcgttttataaatgggattggagcgagagggagttagagatagcgcgagcggagggagcggtagggattgcgcgagcgggacgaggcgacgggcgttcgggttggcggagacgggcggttttacgtcgggttaggcggggttcgcgggaggatttagtgaagagtttgggaaggggcgaggttcgtcggcggtcggagtagcggggcgttagtttcggtcgttgtcgcgggcgggcgttggagatcgggacgtcggcgttcggacggattgatttgttgatcgttcgtcggaggtatattttattttattttatttcgtttcgttagtagttcggcgtcggcgtcgtttttcgtacgttattttttttgttattttttttttttttatttttttttcgttttcgtttttttttgtttttcgcggcgttagcgtttttttttggttcgggcgggggtttcggttttttgtagagtttttcgtagttagtgggggatatttcgttttagcggataattagtttttgagttgggcgagaggtgttaagggagtttttgtttcgaggattaggggatgcgaagggtaagatttggtagagttgcgtttggaaatatttttttcgtttttcgttttttcgggtacgattagtgtggtttttaagtgtttttcgtggagtttttatttcgtgtgagcgaatcgtgcgtcgg

SEQ ID NO: 7225 - DNA, 1679 bp, synthetic construct
  misc_feature 1..1679: note = Description of Artificial Sequence: Synthetic polynucleotide
  source 1..1679: mol_type = other DNA
cgttttttttcgggaagattcgttataagtcgcgtttttcgtcgtttttaatttcggggtcgttttggtcgtttgtgaagtagacgtttacgttattgtcgtcgtttttgggatttttaggtttcgggggatagtcgggttcggtattcgggtcgtcgttcgttttggcgagtagattttggttagggtggcgggatttgatatgtcgttttaggtttcggcggcgtataagtattttgtcgtagaattcgtagcggtagggcgtattgttttcggcgtgtagtcggatgtgtttgttgagattgttggggtcgtcgaagggtcgtagatagattttgtatttgagtggtttgtagttcgtgtgcgttcgtatgtggattttgagtttatatttgcgcgagtatagtttgttatagtagaggtataggtggtcggttttgggtttatttgcgtcgttgttttcgttgtcgtcgttttcggtgtttttcgtcgtcgcgacggtcggtggtaacgttttcgagtttaggcgttcgcgatttttttcggtagttatttcggatagttgttgattgtgtatggcgatttttcggtcgatgttggttagcgattttagttcggcggggtttagggcggtcgttgtaggttcgttgaagtaggagatggatttcggatattttagtagttcgtcgaagtgtaatttgagcgggtaataagcggtggtggtcggtgagtcgtagagtagtttttcgttgtagattgtaaaggtcggtatgacggcgggtaggtggttgtatttattattcggataggttttgagatcgttcgggtcgaggggcggtagcgcgtagcgttcgaggggtaatttcggcgtagggggtagttgcgtataacgcgtttttggtagcgcggcggttgcgggcggggcgcgttttacgtgtttgaaggcggacgtttttttcggggggacggagagtagagggaagtcgcgtagggttttagagtagggtaggttaggcggcggcggcggcggcgggtttttagcgagtaggtatttgggatggtggtggtggtgcgcgtggtggtgatggtggtgattcgcgtcgttcgtcgtcgagtttttttcgttttcggggcgttcgtacgttcggttttcgtttagtagtttgtttaaagcgaggtcggttttttgtttgttgttgtttttttttcggtaggggtcgtcgtgagcggtcgtcgtcgttttcgttaggtcggcgggtttgaaagttgagcgtacgtcggggtagaaagttaggttgtcgattttcgtcgaggagtcgtttacgatgtcgaggaagtgtttttgttttcgggcggtttcgtttatgtttagggtacggtttagttgttttttgttttttttgggttgtttttatttgtttggggtcggcgaggtggtcgagggcgcggaagaggtttcgcgtttgatgttttttcgcgtatcgtaggtttgaattggtggcgggtttagggggtggggtcgtaaagtttttgtttgggaaggcgcggcgaaatcgggcgtcgggggttttggggagagatcgaggttattagtcgttgggacggcgttttggcgagtcgcgtgttcgtggtgtaggaaggcgtcgtttttatcgtcgttgaatacgtagtggaaacgt

SEQ ID NO: 7226 - DNA, 1474 bp, synthetic construct
  misc_feature 1..1474: note = Description of Artificial Sequence: Synthetic polynucleotide
  source 1..1474: mol_type = other DNA
cgcgtgttagaagtttttttcgcgcggtttttttttttttttttttcgtagtaggaggtttgattttcgcgttttgtattcgtgtggattaaacgtttagtttttttcgttataatcggacgggaattcgcgcgtttttcgggttattttttgtttgtgttgagttatgggcgaattttttaaaaaggagatatacgagtgggtcgtttaattttgaggggaaacgaggatttttttttttatttttttttttgatttttttttttattcggatcgtatttttcgaattattttcgtaaggaggaacgacgaatgtcgtcggttttacgagattgtcgttttttatttatgtttaaataaggatagaattttgtagcgaggcgataagaaaataaataagcgggcgttttaaatcgagttttcgggtgtgtagattcgtagcggagtcgcgggagcgaggtgggaaattttggtcgcggcgtcgggtttcgttcgtcggggggcgcggggcggcgggcgtatgcgcgtgcgcggtgcggttttagttttggttgtcgtcgtttgtcgtcgtcgtcgcgatgtttattttagttaaagcggttgcgggtttggggattcggttcgggtagcggagttttcggattcgtcgattcgtcgaggagcgcgcgtcgggttttcgtcgagtagttgagttcgtgtgtttcgcgtttcgcgtttcgaagttgtcgtttcgaattttggtcggcgttgtttaggtttttcgttagggattagtcgggtaaggatgggaggcgtagttgtagtcggtttttttttcgcgtcgggttgtgtgcggtttcgcgtttttttggttaaatcgggaagcgaaagttggattttagtttttcggggagtaattttgtcggttttggcggtagttgtttgttttacgcgttcgggtagtcgggggcgtcgttttttgttttttttcgttggtcgcgttttcgaggggttttcggtttttggaggtcgttttttttttcgggtttgggcgttgcggttatagagatttttaacggttagcggtcgtcgtttaggttaggtagttttagcgttttcgggttttcggttttatcgagtgtcggttttcgcgttttgcggcggtaagttttttggtgagtttcgtttttgtttttttcgtcgagttttcggggttttttttcgttttttgtagggtcgtttcgagtcgcgtagagtttgcgtgtagtcgggcgcgcggtgtcgtttatttcgttttcgttcggagagtagggtgggttacggcgtttattttttattttcgcgtttcgagagcgtttggtcgaggaggatcgttgttacggattttttttttttaaggagcgaggttagagggtttcgggagagcgtcgatggttggggattcgaggttcgcgttatttattcgtaattttttttttcgagtttttgggaacgg

SEQ ID NO: 7227 - DNA, 675 bp, synthetic construct
  misc_feature 1..675: note = Description of Artificial Sequence: Synthetic polynucleotide
  source 1..675: mol_type = other DNA
cggtttcggtaattttcgtatttcggttgcgtcggtcgtggtcggacgttcgagacgcgcggaggtatagtagattttggcgtataggttatgtcgtcgtaaacggggggcgcgtatttttttttaaagtttttagaggagatacgtatttggtggtagggggtgtaggcggttgcgaagtagggttgcggaggattatagatttggtatataatatttagatagtttatgatttttcgtagcggagacggttaagtgtttttttattaatttttttttttcggagtttaggggtgttgtatgggcggcgtttggattcgcgttttggagttattaggcggagtaaagttagcgcgtttcgcggttcggaatttagttggttcgttatttttttatttttgcgattttattttcgatcgcgttttagggtagaagcgtttgagttttcgttagtgggtatttaaagtttatgttcggcgggcgtgttgacgttattcgggggttgcggagcgggagggggcggtggggggcggggatcggggggttaatggggagcgagggacgtttgttggaggggtagcgagtgtgtttttcggggtttatttttgataagtatgcggttaagggtgtcggagattatgcggtttttagcggattcgaggtttcgtatcgcga

SEQ ID NO: 7228 - DNA, 1133 bp, synthetic construct
  misc_feature 1..1133: note = Description of Artificial Sequence: Synthetic polynucleotide
  source 1..1133: mol_type = other DNA
cgtcggttatcgtcgagtttttattttatttaattagatcgcggggaaggatacgtaaatttgtcgagggttcgggggtttcgggttgttgttgttgttagcgttttgggaagtgataggtattaggatttgttggtgcggcggcggcggcggcggtagttttagtcgcgttcgttatatatatttttattcgttcggtgtatacgtcgcgtcgcgggtagtgtcgtttgcggaggcgcgttcggggttcgtaggggtagtagcggtagtttggtagcgtcgtcgcgttttcgggtatttggttcgcgaagtttcgtttttgtcgtttttcgcgtcgttcgttttacgttttttagcgcggtcgtcgttcgacgcgcgttcgttttgcgttcgtcgcgcgtcggtttcgggggcggtagaagcgcgcgagggtcgttgttcgtttttttgcgtagttcgcggtttttaggtattttgcgttgttgggttcggcgggcgggggtggggcggggagcggggcgcgggtcgagcgggggcgtttcggtttcgcggttttcggcggttgttgtagcggttgttgcgcgtaatgatgcgggttcgcgtcgcgttttagtagcggcgttgttttttttttcgtttagatgtgtgaattttttttttataataaattttttattttgttttttgtcgtttttttttagggggttaattttgaggatcgtaggggttgtcgtttaggcggtcgtaggcggcggtgtttaggcggaaaggagcggcgcgaaagcggcggcggcggggatcggggtttcggggcgaggagtttgggcggtatgatcgcggtttgttgagttgaagtcggtcgtgtttttagagttatttcgcgggagcgaatcgagtgtgtgtgtgcgcgcgcgttcgggggagaagggattaagaggagggttagggaaggaagttggggttatggaataggggtgtaatcgaggtatttagagcggtcggaaagttcgagtggcggagaggttagaggtggcgagaaggggcgcggcggtatcggacgtatcgtttagtatttggtttttttgggttttcgaggatttgaagggtcggagcgcggagagttacggagtcga

SEQ ID NO: 7229 - DNA, 1808 bp, synthetic construct
  misc_feature 1..1808: note = Description of Artificial Sequence: Synthetic polynucleotide
  source 1..1808: mol_type = other DNA
cgggcgggggacgttcggtagttttgtaaacgcgtagatacgcgaattttatcgtttcgcgcgttttttggtttcgttggtgcgtgtcggggatgcggtcgcgtaggcgttcgttttttggttttttggtcgggtagcgggcgttcggttatcggagtttagtttaagggtttagtcgaggttttttcgcgcgaggcggttgcgttaggtgagcgggtatcgcggtcgcgttttttttgttatttatttagcggttagaggtattttgcgtttgggagttttaagtgttttcggttgggtgtttttgttcgatttttaaaaggaaagtataaatttcgggtgcgagtttaatttaggatcgaattttttcgcgaatttgaagttattatggggcgggagttattttagcgtcgcgttcgttcgtttttcgtatcggttaggatgttgcggaaggtaggggcgtcgagaggtaagggtgaaagacgtcgtttatatttttaaagttcgaatttgtattttttttgcgaggcgtagggcgggaggatcgttgtagttgggagtcggtttcggataggtaaagcgattcgataggtgaacgcggcgggagggagtaaacgcgtaaaaaattttgtatttattttttcgttggcgtttttttcgggaggcgttttggttgtcgatgtattttataaagtttaaaatgataaaaagttaagaaattagtcgtaagtgtatagtaatttagtaatgtttttttttttttttttttttttttttgattgttaattatatttaatgtttttaaaatatatgtaggtgttaggcgtatatagatagtgttcgagtagcgggatttttttttttatattcgataggcgtgttgtgatggtaagcgaagtggggcgggtggatagggaaattaattattgtatttttaaattatttaagtattgaattgcggcggtttcgttggggtggttggtatcgtcgcgaatcggggttttaggagtcgtcggggcggtcgtaggtagtatgttgtgcggtaattgtcgtaggcgggattcgggcgggcgagcggcggcggcggcggttgtagcggcggttttttgggtttagaagttgcggcggttgcggttgtagcggcgggggtttttggagcgtaggggagcgggcgtcgtcggtatagcggttatggttaaggggcggcggagagatttcgagttgtttttggcgtgcgcgagtaggagacgttttagtgttgggttgggttttcgggagtattatataggggaggaggaggaggagggtagggaggggggagggagaggagggtagggagggggagaggaggggggatggttgtggggggcgggggggagttcgggggcggggaaggaaattgttggagtaataattttgagcgattttaataatttttaattttaagagggaaagagggagttggaaaagtataggcgttgcgttttggtagagggacgggaagaggcgtttaaggggtttcgggtttatagcgtagtatttttggatattgtagtgacggtcggagaattttagttagaagaatggggaaagtagtgcgtgcgaagagtttttttagaagggtagttttggcggggagatttgggcgtattggggttggtaggtagtgttgaggtcgaagattttttatttattttagttcggttttttttcgcggttttaagttaggcgtattcggttgtcggtggtcgtgcgtttttgcgtttttgtgttttagcgtttttattttatttttagcgtcggcgcgt

SEQ ID NO: 7230 - DNA, 1323 bp, synthetic construct
  misc_feature 1..1323: note = Description of Artificial Sequence: Synthetic polynucleotide
  source 1..1323: mol_type = other DNA
cggtttcggttgcggtggtcgtttatttatttttttattttcgttagtattttttttttttttttatttgttttgagtatcgggttttgggggtcgggtcgtttttttttgtttttagttttggttttattttaggagttgtcgggacgtcgggcgtttttggaggcggacgaagaaggcggtagggtcgggggcgttagcgggaatttcggtcgtcgcgggtagtcgcggtttttttttttattttagggttcgggcggttatcgcgggcggatgagttaggcgagggggcgggtggtaaggggtgtaagcggacggagggtgggggcgtttttatgttcgcgtcgggggggtatcggaggtttcggggtaggggatgcgtcgttgtcggtgtttatagagggtcgtcgttattcgggcgtagagtttaggcgcgtttgttttcggagggtatcgggcgtagtaagtcgggtaggggagagggagtcgtcgtttaggcggcgtcgttatcgcgtttaagaaagataaaagggatcgggaacgggaggggaaaagttttttgttcggttttagatggattttagttttaaattttacgttataaagtttcgaagaggcgggttgggggcgggggtcggggcggatttttaggggcgtggttgcgcgtttgcgatttcggatcgtgttaatttcgtcgtcgttttaaaatttgtgggaaattttagttttgttatttattttttttggaggacgtagataggatttgttttgtaggagtttaggtcggtcgattcgcgtttcggttataaagttgtatttcgagagtttaaattattcgtagataaaatttatttttgggaataaagtattcgtttgtaggcgtttttttcgggttggaaggttggcgtgcggaaacggatatatttattcgtggggttcgtttttagttatcgcgggattatcggttatcgagttagggattcggtttttttagtttttcggagcggttggggagttttagtcgattcgtagtattttcggagtaggtatcgtaggattttggttttacgtttttcggacgttttttttttagatgtcgttcggcgggtcggggtttttttggcgggttgcgcgggcgttgcgcgagttaaattaaatttggtcggaaaagacgcggttaaggttcgttcggtttacgtttttcgtcggttcggtaaggggtttcggagaacggtttgggggggcgagaattatgggcgggggaaatggaagatagagggaattgaagtacgggggttttcgatgagtagtgcggatgttcga

SEQ ID NO: 7231 - DNA, 1501 bp, synthetic construct
  misc_feature 1..1501: note = Description of Artificial Sequence: Synthetic polynucleotide
  source 1..1501: mol_type = other DNA
cgttattcgagttaatgaacgcgattgttttgataaggcgtttttaattttatcgattttggtaaattgtaggagatatttagtttacgttatataaaaattattaaagtgggatcgtcgtagttgaaaagttcgattagtgtttggagattagaacgcgagtttttaaagtatatacgtattcggtatcgggaaagtttaggcgtttgtgatttttcgaaggattttgggttagtattttcgcgtttggattatttagggggttattagaaagtaatatacgttataagaaagatgtgggggagatttcgatgttcgcgtttttgttaggtggaggcggggtgtaggtagaagtcgcgcgttggattgttggatgaatttcgttacgcgtaggtttcgcgtcgatttcggaagggataggtaggttcggaagggatttttggggtttggggacgttttttagggtagagagtatcgttgcggttcgagcggttcgggtttttaggcgtggggtattcggtttttaagcgtttttcggggacgtaggcgtttacgtatcgtttagttgcgcgtttttagtatttagcgttcggcgttttcggcggagtttcgcgtattttttcggaaagtttgggggtttttttaatttaggttttttcgggagttttggggcgggggttggaagaaggggttatttatttcgtcgttcggttcgtttcgggttttcgaagtgtttgttttagtcgcggtttagtgcgttcgtaattaagtatttattttcgttttttttagtgtcgaagtttttttttcgcgttgtgtttttggtgaaaataggatatttttttcggttattttataataaatagcgtatataagcgggggagaagcggggcggagggagaagtcggtttcgagggggaggaggaaaggagaggagttaaaatttcggattgcgataggggggaaaggagaagaaaagaaaatgagagagcgcgtttagtcgtcgtagtcgttatttttcggtttttttcgtagttttttttttttttttaaggtagcgataattttacgtggataggatggaagttttgcgcggaagtcgggaacggtcggagcgtgcgtcgcgttgtcggtagtttcgtatttgcgtagggaggtggggcgggggcgacgtcgttatcggttattgcgggttcgtgaggtcgtcgggggtttcgggggaggtcgttagggacgcggggggcggcggcgcgcgggggatttatttcgtttttatttgatttcgggtgattgtttattgttatggtttgcgatttcgcgtggggatcgtttagggtttcggggttttggatgtttcgggtggcgtcgtcgtaattttcgtgtttttcgcgtcgtttttatttcgtttttattcgggtcgattcgagcggttgtagtttttaggttgaggggagggattcgcgatcgcgtttttttttttgggtcggagagttattgtcga

SEQ ID NO: 7232 - DNA, 1744 bp, synthetic construct
  misc_feature 1..1744: note = Description of Artificial Sequence: Synthetic polynucleotide
  source 1..1744: mol_type = other DNA
cgttttcgcggttgttttttttttagggtcgtcggtggtttaggatttggttatcggggaggggcgtggttttgtcgaagtcgatgagttatacgtcggcgcgatggtagtgatcgtgtataaagaggagcgagttgtcgattatttgcgagtttcgtatcgttaggtcgcggttttgtttagagacgtttttgtcgggttttcgttttagttttcgcggttcgggtattcgggtagtcgtcgtttatttcgtgttttttgaagaattcggatatttttagggtgtttcggatttgttgtaggcggtttagatatcgtttttgtagagggtggggtgggagaggagggtaaattaattaaacgttaaatgagtttttgttaacgatgaggagtcgggatttacgttgtgtttggtaaatgtcgttaggaggaggatttagggtttcgtttagcgtggtttagaagggaaggagcgtagagtagttgcgagttagcgcggtgagggttatggtggggatatagtcgagggtattgggttagatgataggggtagttttcggttttaggttttttaatattttagggtttgggatttcgtttttattagtatttttttatttttttgtataaattttttaaagacgcgaagtatttgttttcggtttcgcgtagttttgaagtcggtgttgtaggagtcgttcgttttttggatgtgggataggagtgttaggggtttcgggttcgttagtggggaagaggatagcgtagagtagcggtattttttagttgtaggggacggcgaggcggtgggagagggcggaggggtaggcggggcgggagcgggggatcgggaaagatagcgcgtagtggggttgcggcggtgttagcgaagcgcgtttgttttattttgatgttttcgatgcggaagtcgagggtggtgttggagttgatgttttttcgttattgtatgtagcgcggtttggtgacggcgcgttgcgcgtgtttttttttcgtgggagttttaggatttatcgttagtatttttttgtatatgttttttcgtagtttgggtcgtttacgggttttggttagttttttttttaggtaagttttgtgggggcgtaggtagcggttagggtatgagggggcgtatacggagattttttcgagtattcgtttcgggttttttttaagtagttgtttcggtttcggatttttatttgatttttttaatcgatttggtagggtacgtatatttgacgtttattttgtagtcgagtatataaggttcgtcgaagttatcgagtaggttttgtagttgtaggtagttttcgtcgtcgcgttttattacgtcgtggaaggtaggtacgtagtcgcgtagcgcgttagttattagtcgcgttaggtagtagcgtttcggtttcgagtagcgttttaggattagttcgttggtgttcgtcgttttaaaattttttgaggatcggtattcgttagcgtcgtttagttttttttcgtcgcgggtattcgtttattcgttttattgtttattagtgtgttttgttagttgtatttaggcgtagcgttttttgaaagggtttatgatcggtagattgattatggttcggattttttgttagtggtttttttgaaagcgatagggttaaggtttgataatcggcgtttcggtaatgtataagttttttttttattgaaatagggtttcgttacgttttcgatttatcgg

SEQ ID NO: 7233 - DNA, 1801 bp, synthetic construct
  misc_feature 1..1801: note = Description of Artificial Sequence: Synthetic polynucleotide
  source 1..1801: mol_type = other DNA
cgcgtagtttaggatagtagcgcgcgggttacgggcgagtggagttgtaggggttcgggcggagagtcgttgttatttagggaagttttcgggatttcgggtttttcgcgaagtttcggacgggcgttatcgaagtcgagagtttcggtcgagttttttcgtacggtgggcgtcgcgtttaggcgagcgcgcgaggtcgggcggggtcgggggtcgttcggggagggggcggggtcgggattttcgcggtcgcgcgtaggggttgggaagttgttttttcggtcgcgtcgggcgaggggttgcgtcggttcgcgaggcgtatgcgcgttgtcgagcggttttcgtttttttttcgtttatcgttttttttttttttttttttttttttgtattttcgtcgtttttttttttttttcgtttgttgggtgttgaagttgggcggatggtagtaaatcggtttcgttagaggatcgagtcgtttagtttcgttttttcggatttatcggcgcgttgtttatatttttaggcgatcgggtaagacgttgtttttaaaataagcggtgttaagtaaatgatattaaaatgtttgttttgtattaatggatggattttttttaaggtaggggggaggtgaaggaaggagggggcggagagcgcgatcgtttatgtttcggcgggggcggttgcgcggcgttggggttttagttgtggtcgcggcgttttgagcgggagcgggggtcgcgtcgcgggttcgggaagttgaatttcgcgtcgttgtttggacgcggttcgttcgtcgtttttagttgttgtagggaatcgggcgagtgttttgttcgtcggggaacgttcggttaggttttagagttttcgcggagagcggggcgtttgttgggggcggtcgggagggtcgggttaggggcgcgggagatttcgcggggacgcgaggtgttgcgggttttgtgcggttggttgggaacgaggagaatgtgttattaatagtgtttaatcgattgattattttgggtgttgtgtttttttttttatttttttttatttttgggaaaatgtattgtttaggtggggaaggtgttcgaagaagaggttgcgaaaatgaattttttgattagtagtaaaatatcggaggggtgtgtgtgtgtgtgtgtgtgtgtgtatgtgtatgtatgtatagggggtggggggttttttttgtttttttttttttttttagttaaaggaaagggagttttggcgtgtgcggcgcggggtggattttatagttatcgagggggcgaggacgaggaacgtttattaatcgcgagtcgttgttcgggtgggcgtatcggagttttttttgttgtaggtgatggtggttttttcgtgatcgatggaattatagtttaatttttgttttttcgttagtttttttgttgttttttatcgagtgttgcggtagaggttgggtgtagatacggtcgttttttttttttttttttgtttttttgtttttttgaataaatgtcggaggattaggggatggcggagggatagagttggattcggaagtcgcgggtgggagttgtttttcgcgagttcgaggttgttggtattttgtcgcgggtagttcgcgttagtttcgggagtttttgggtttcgggagagcgagtcggggtcgtttggttataaagatgttcgcgcgttcgttttgcgtacgggattcgttttgcgttttgagttttgcgtttcgttcggagttcgggacgtcggtttacgtgggagaatttttgtcgttcggggacga

SEQ ID NO: 7234 - DNA, 1801 bp, synthetic construct; identical to SEQ ID NO: 7233
  misc_feature 1..1801: note = Description of Artificial Sequence: Synthetic polynucleotide
  source 1..1801: mol_type = other DNA

SEQ ID NO: 7235 - DNA, 1684 bp, synthetic construct
  misc_feature 1..1684: note = Description of Artificial Sequence: Synthetic polynucleotide
  source 1..1684: mol_type = other DNA
cgtttttttcgggcgcgcgggttttttgtcgtttggagtcgagttggtattggagcgttttttttttggagcgtagaggtattcgacgttttgcggtagttcgtagttttttttttacgattttttagaatagttttgttttgttttttttcggtttttcgagtgcgttcgttattttgtttcgcgagaggtgaacgcggagaaagtaggatgattatttacgttttcgagaaattttgggtaaagaaaggtattattttagttcgtacgttgaaagtcgtttttttttttttttttttttcgttgtgtttgaatttttcgggatatttagacggttggagtttttcgattttaaggcgggcgacggtaaagttaaacgttagcgcgttgcggttttcgggtatcgaggcgttttcgttttcgttatttatatagggcgttaagtgtttcgattcgcgagtgacgaggacgtataggttagtgatacgattcgtagttagtattgagcgggacgacggggttcgagcgtaggagggtgcgcggggagttgaggagcgtcgggggttcgggcgcggcgcgtatttgaggtcgtcgtcgaggaggcgacggggagtagcgcggttaagagtagtagcgtcgtttaggatagtcggcgcggcgcgcgtagggtcgtttcggtttcgggggttatcgagagttcggggtgggtcggggttgggtgtttgcggttggtaggggggcgttggtcggagtttggggagtgtcgaggcgtcgtcgtcgggttttcgtcgtcgttcgtttgttttgcgcgttttgcgcggtgttcgtcgcgtttttgtttcgcggcgatcgttttcggtcgtatatcggtagtcgcgtttcgttattgaggtcgtcgatttttcgtcgagttttttagttgcgttcgggcgttttttgtcggtgtgcggggtcggggttagggtcggcgggggcgattcgggcgataggggcgacgggggcggcggggttcgggttggaggcgggcggggcgcgggacgaaggggtcggagcgtttcggattgatttagcggttttgaatttggggcggtcgttgtgtcgggttaagtggttgaggaagttttttttttcgtttaatttttttattttttggttggggaagtcgtttatcgcgtcgaggagtgttttttgtttttttatagaaatatttttgcgttttaagtggggattcgggtcgggattttttattcggttcgtagcgttgtagtttttgtggttagtttagtttttttacgtttttattcgtattcggcgcgtttacgttaggggtttttagcgtttttagattttgtttcgtttggttgttatttttagggcgcgtacgatgcgggtcgaaaaggaatttagtttttagtgtgttttgttgtttaggttaaggatttagcggatttcgttttttttttttttgtaattgtaatattgttttaggtttttttatttttttttttttttatttttttttttagtttggaagtttcgcggttttttagatggattcggagcgtttttggaggttatagtgatttaagttttaggaaggtcgggttttggacgtcgcgtgttgttgttcgtcgtcgatcggtgttttcgtagagataatttggttgaatttatcgtttagcgt

SEQ ID NO: 7236 - DNA, 6657 bp, synthetic construct
  misc_feature 1..6657: note = Description of Artificial Sequence: Synthetic polynucleotide
  source 1..6657: mol_type = other DNA
cgtgcgtgattggacggttttcgcgcggagcgaggaggttcgtagcgtcggggggagggcggtttagtagggagggcgatgcgagtttggggaggggttagcgattcggttaggaggtgaggatagttttttaattttcgggaagggaagggtagggggtcgcgtttggggggcgtcgggtagggtgcggacggcgaagggggacggaagggagagaggcgttggggaagggatttttcggaggtacggggtagcgtgcgggttgcggtagcgatttcgattcgggttttcgggttttgtcgggttgagtttgcgttcgtttcgtcgtcgttaagtttttttaattttgttcgttgcgttcggatcgcgcgttaggtttgggggcgtagtaggggttgggggcgtacgttgcgtattcggggacgttcggggttcgaggtggcggggggtttggtcgcgtcgtttttcgggggtggttcgggttttaagttttttaggtttagcgttcggtcgcgttcgtcgtttatttgttcgttcggtttcggtttcggggttgcgttcgtagtcgtcgtcgttttttaagttttaatttcgttttcgggattgaaatttttttttagtttcgtttatcgatttgcgcgcgcggtttcgtttttcgtcgcgcggtcgggggggaatttaagttcgttttgttttttttcgttttttttttttttttttttttttttttttttttttttttcgtttttttgttcgtttgcgcgtttttttttatttttttttttttcgtcgcgagttcggttcggagtttttggttttttttttttttttttggtttttcgagttttttgtttttttcggtttttcgcggtaattcgttttttttttttttcggcgacgcgtaggggttggggaaggaggggaggttttagaaagcgtagggggcgttttcgcggttcgttttcggtttttttcgtttatatttaaaaggtggagggggtgggtgggtgggtggggggagtgggggcgatagttgttggttgaataagttattcgcgatttttattattttaagtaaagttaaggcgtttttaggttttttcgtcggttcgttttttattcgggagggtagggatttaggggcggagaacgtagggcgtaggtcgggttttttttgtttagttttggtttcgttttttttttttatttattttaatttttgtgaggattttagggggttttggagtatttttcggtttagttttattttgataatttgtttgtgcggaagttttcgttcgtatgttataggaagggaaattgagttaagagaggtttagaatttggttttatatagcgcgtcgaaggtagagttttaggggtagtttggattttcggtaggagtttcgggattttacgtttgggtcgggtaggtttcggcggtgtttggataagttcgcgttcgtagaacggtcggcgtttggggattttttttagttttcgcgtagttcgcgcgttttcgtcggcgtttttttttcgttttttgtttttcgttcgtttttggttttcggttttagtattttcggtacgtttttcgttcgtcgttagtagttgggtaatttaacgagtatataaaagagttgatttaatttaaaggtagtaaattaagataaattttatagtgtgtggggatcggagagggaatgtgaatgaacgtttacgacgtcgtttagttttgtatggatcggtttagttcggttgtagggtttgatacgttcgggttttagggttttttaggagttagaatcggagagtgggttttgagttgttttggtttttaggtttttagtattggttcgaatttagtaatttagagtttgtggtttttttcggttggttgggtggggttttcgtgataggggtgtagagttttgaaggggagtgttaggacgaaagttagtgcgtttttacgattttatgtaaatattggggggtaggggttttggaaatttagtatagttttaggggtcggtaggaagggtatcggtggtttggaatatttaagttgtggtttttttttttttgtttcgatttggattacggttagagttaggtcgtaggttaagagtaggtttttgtttatttattagatagatattgtaagtttgggatgtgttaggtttgggtttgtggaacgaggtcggcggtgagcggggtatttttttttttttgtttgtttgtgaggtttttttagttgtagttttattagggagaagttggtcggtttttagagtttttttggttacgtttggaaggttttagtaagttattttttagtttttggtttggttagttttgtgtagaagatgattatcgggtttcgggttttagtttatttatttcgtttgttaaatataaattttaagagaggtattggatttttatttttagtaggtttttttaggtttgtgttggttaagtgtagtcgaagttttggaatgagttttttttgttttcgtaggtgtttttcgtgtgttttgcgttgtgttgggcgtttgttcggaggagtcgcgttaggacgttttgttattttttaggagtaggtatgatgagtttattttttcggggtgtaaattgaggtcgagggtttttttagagcgtttttgatcggtattgtttgattttagaggttagttttgcggttattcggggtttgagatttacggagaattttagaggttaatttgaggggcgggtaggggtacgcgcgcggggtcgtgggaggcgagatttcgtaatttgaggagttaggattttagtagagagcgaaatttggagttgggggaggggacggtagaggattggaggtcgggttgtacggtaggggtcgagttttcgcggtcgttttttttttttatttcgagcggaggttgcgtcgttcggttgcgatcgagttttcggagtttcggtcgggtcgtttttttttcgtggtcgcgtcgattggcggtttgttgttattcggacgtcggcgtcgtcgtcgcgaggatatttgttcggggtttaacgtcgcgttttacgttttttgttttttttttagatttagaatcggggagaggacgcggcggtgaagttgggaggttggaatttggagggcggcggagtttcggagttaacggggcggggggcggggtcggcgttggttttggggataaagatttttacgttgtttgagggttgggttttgtagatatcgaggtaggaagaaggatttcgtatttttcgttttttagatttttaaatttatttaggtttagatttgagtgtttaggtggggtgggggagatcgaatttttttgggttttcgaggcgcgcgaaggcgacgttgaaggggggacgtcgggacgttgttttttttttgtatacgtcgttcgagttgtatttttaaacgttttaggagtttcgcgggttttttttgttttttataattttcgaagttgtttttagcgattttttttcgtttttagatggggtcgtaggggcgggcgaatgtgttgcgttcgtcgtgggttgggaggaagggcgcggattgtaggaagtttttgtttttttttgggtagtttggtttcggggattcgcgtttagttcgcggcggaggattcggtcgggaatggtgttgagattgcgcgggtacggtttagggtcgtgatcgggtggttatcgtgtagtttgggaagagaaaaagttcgggggggggtcgatatttcgagatcgaagagggaaaatgggaggaaagtaggcggtagggagggaagagcggcggaagagggattaggagagttgggggttcgttttgggtttcggggtttcgttttattcggtagtttagtttagtttagtttcgttgcgttagtttttcggatcgggagaggttagggttatcgacgtttattaatagtcgcgagcgggtttttttcgggagtttcgtagcggtcggtagagtttagttatcggttggggtgggggcgggggtttcgtaatatttttttcggaggtttaagcggcgcggggcggggcgttgcgtttttttacgtcggttttgcgaagtcgaggtatttatagtttattttttttttattttcgatttcgagattaggttttagatgaagaggggttcgtttgtggtttaatttggggcgtcgcggttattttagcgtattcgaaggcgcgtttagttttttttttttttttttgtttagtcggttttttgtttttagcgcgtttcggaaagtttcggggttttcgcggcgtttttttagttttaggggttcggagttttggtttttttagtcgcggcgtcggggagggaagtttgttcggtttaggttcggcggtcgttaatttcgggtgcgttcgttttcgaatttgggtgggtggatggggacgttcgggagtcgcgggtttcgagcgtcgtatttagagtttcgcgggcggggagattcggttttggcgcggacgtcgaggttagggtattagggatggggtggttcgggttgcgagagtcgttggggattttgcgttgtttttcgtcgttttttttagagagtatttttttttttgttttttttaggggcggggatttttcgatttcgtagcggcgatagaggggtttttcggtttcggatagttttttgttttttaggtttttttttatttgggtcggggtgcgggtttcgggttggaggtattgtcgcgggcgagtagagcgcgcgtatttcggtttttcgagtgcggcggcggcggcggcggtttttttttttttttttttttttttttttttcgggttcgttggttttagatagtttttttttttttttcgttttgtcggtttttttcggagttcgttcggttggattcggtttgcgattcggagtttagcggagtcggcgggagttaggttgcggcgtttattgcgttaagcgcggggcgagcgcggggcggcggcggcggggatcgcgcgttcggagttcggggttggtcgggtaggcgggggagcggcggtttcggtttcgattcgggttcgggcgcgggcgtagtggtggcggtcgcggtagcgtcgaggttgtagtatattttttttgagcgtgatggaaggttttatgtgggagagcgcgcggggagggatggggagggggcgggggtcgcggcgggggcgatcggaggggcggggggcggggtcgttgttcgtacgtcggtgggttggggggtggtcggaggggggtttcggaggggaagttggagttagtcgcgggggcggcgtgggaagtcgagtggcggtttcgttttttttttttggttcgtttcgttcgttttttgttttcgttttaggttatttagaggtttttaggtttcggtttggaagagaagcgttcgaaggtttgggggtcgggattttggtggcgttgggaggtgggtttttgggtggggatacggttgtgtttataggcgttcggtaatttcgtggaagttgattttaagttagattttttgtgagcgcgcgcgttcgcgagggttaaagtatagttcgtaggacgcgcgtttgcggggcggggggagagcggggtatttgggggcggggaggtggagcgagagggtcgtcgggtttttggcggtttcgcgtttttagagattcgtttttttttaaggtcgtcgatttttttttttttttttttttcgttgcgcgtcgtttttcgtttttcggtcgggaggagggggaggcgtgggagcggttcggcgtttttcgattttcggaaggttcggtttagcggatttttttttttttttatgtgttttcggaattttagcggattcgaaatcgcgttttcgggttttgagtcgaggggtttttcgtcgttttttggtggtttcgagttttcgtcgagcggttttacggttttttagggcgtttttcgtttttattcgttttttttttagtttgcggttttcgtgtgggttaaaaattttaaattaggtttaagagcgttttcgttcggttaagttttcgcgcgtcgttttataaatcggtcgcgtgcggagttgcggagttcgggatttttagcgcgcgttgggcgcgatattttggatttcgttgttagcgtcgcgttttttcggtcggggagttttatatcgttaagagggtagggagaggggaggggaggggattattggaggggagggggttgtttttcgggtgtttttttcggaggaggtttcgggataggggtgggggtggcgcgggaggtcgtagatagcgcgtttcgaggatggtcgggtcggggatgggcgcgcggggtttttgttcggacgtgggtttaacggttttttcgtagtttagaaatttcgtttagttcgcgggacggtcgttcgtttttcgatttcgagtttttattatatttgtttttgtaggacggggttggggggattgagatcgtgattgaggtcggggtatggaggaagtgtcgtcgtttgttttcgggattgttggatacgaagggtggaggttaaggacggagtttttgtttgcggttgtttagtttttagtttttgcgcgggggcgtttagatttttagggaatagggagatagagcgggtcgagttcgg

SEQ ID NO: 7237 - DNA, 546 bp, synthetic construct
  misc_feature 1..546: note = Description of Artificial Sequence: Synthetic polynucleotide
  source 1..546: mol_type = other DNA
cggaggcggcggggtcgcgggagggagggggtcgggtttaggcgattggtagcgcgagttcgggagttttttcgtgttttcgttcgtttcgttttcgttattatttgttcgggatttggcgtcggcggtttcgggcgtttttagtttcggttcgggtttcggtttcggtttcgggcgtcgattaggtttttttggttttcgtcgcgcgttttttaatttgttgttgtcgtcgtcgcgttttttaggttttgttagttattcgcgttttgagttcggggttagatttttatggaagcgtcgcgatgttcgtttttcggttgttggatttttagaagacgaaatacgcgaggtgagcggcggtcgcggaggttcgcggggagggagggaggggcgcgcggcggcgggggtcgcggaggttattttggttttcgggtttcgtcgttcggagcgttagaggggatcggcggatttttgattttcgttcgagaaaattaggatttaggtagtttcgttttttcgttgggatggagtaatcggggcgttcgc

SEQ ID NO: 7238 - DNA, 288 bp, synthetic construct
  misc_feature 1..288: note = Description of Artificial Sequence: Synthetic polynucleotide
  source 1..288: mol_type = other DNA
cgcgcggcgtattgcgggtcgggaacgtgttgcgcgttgatatcgggttagttttttgtgatgggattttttttttaaaaacgtaggcgttttttcgggtcgtagtcgtagtcgggagattgagggttagggcgcggtcgcggggttttttgggtcggggcgcggtttacgttttaggtttttgcggttttgattagaagtcgttgcgtttttggtcgttttttattcgtttcgttttcgtaattttaggtttagggttatagcggtttagttttttttttttcgcga

SEQ ID NO: 7239 - DNA, 947 bp, synthetic construct
  misc_feature 1..947: note = Description of Artificial Sequence: Synthetic polynucleotide
  source 1..947: mol_type = other DNA
cgtgaggtcgcggtgttagtttatattttattgtgggtggcgggttcggtttcgcgaggaggcgtcgtttttaaattttacggtttcgcgtagcgaagaggcgaggcggtcgcggaaggtaggcgtagtttatttttttcgagaggtttcgatatttttcgggtgagtttcgaaaagcgcgcggggatttcggttgagcgttgggtcgttagtaattcggtttttagagagttatacgaaggaggggaagcggttttttttggggtttttgggaggtttggttcgggtttttttcgtagttttcggcggttagtttcgcggttttggggcgttcggatcgagtaaaggtttcggcgggcgggtttttttttcgttttttttaagcgttcgtttttcgtcggtttagcgtaggttttttcgatttcgttagcgtagggggcgcggttgtcggggatttagtagcgggcgcgcgggtaagtgcgcggcgggcgcgggttgcgggattcgtttcgggttttatttcggattttttttggtttgtttgggtgtttcgggtcgggggtagtcgaggtcgcgcggcgttttttttttgggttatttttttttcgtttttttttaggggagacgaatcgattggttgttcggtcgtcggaacggtaggtttcgtcgtttttttcgtttttcgtattttcggttcggtttttttttattatcgcgtttcgttttaattcgtagttagtattttttttttatttttttttcgttttcgttgttatttttttttttggatgttggaagcgtagttggtattttcgtttttttaattttttaaattttttttttttattcgtttattttttgtgtttcggttttttttttgggtgttgcggaggttttttcggttcgggggcgtgtgtgtagggaggcggatcgcggaatagatacgg

SEQ ID NO: 7240 - DNA, 1313 bp, synthetic construct
  misc_feature 1..1313: note = Description of Artificial Sequence: Synthetic polynucleotide
  source 1..1313: mol_type = other DNA
cgagaatttgtcgtagggggagatttcgtcgttaggttttgggaattgtttgggcgtcgttaaagttcgagtcggagttgttatttggggtagcggtcgggaagaggtaacgatgttagtaagaaagtagcggaggtaggaggcggtcggaggagtggattggagcggacggagtttcgtcgttttttagttcggagcgtttggagcgaaagttaagcgtttttcgagggcgatttttttttttcgggcgcgcgtttattcgttgtagtcggtagttcggcgggagaggtggtagttgtagtttcgtatcggggagagcgagttttttgcgcgcgcgtttattcgttttttaggtgattcggcgttttcgtcgcgttcgttggaagtttgtaaatttttttcgggggtttcgtcgttacgttgggaagttggggacgcggggggaggtttttggttcgtcgttttcgttgtcgtttgatcgtatttttggagggtttcgtattttgttaggtttttggaggtaaatatatattttcgatttataattggttttcgcgttaggggattcgcgcgtttttatatacgtacgtacgtcgggcggattcggcgtcggttttacgttagtatttttttaggcgcgcggcgcggcggttatcgagcgtttcggtatttacgcggcgcggggtttttagggtggttttaggatatagtcgaattttatagtttattagtattcggggtcggatttttttttggttcgttaaaatgtttataaatatagattattttttagaaaaaaatgtatcgtattttttttattttttgttttgtgatttgtttattggattaagtaatttcgcggttgttgtcgagaattaatttttgtaaataagtatattttcgagatggtttttgcggtaagtgtaataaaagtggttaaatgtaaaagttttagaagtggtcgagtcgtatttttaggaatttattaaataagtgtggagaaggtaagagcggagttcgggtgaagggattacgttggattgagtaaagattataatatattttatttagagtgtattatattattttttcggtgacgttacgtgggatttttgaatttttaaattattgcggttcgttggggagggacggagcgaggggcggggtcggcgcgtcgagggggtaggtttcgtttcggtttcgtttcgatttcgtttcgtttgcgcggattttggtgtattcgttcgggagcggtagcggcgggggcgattgcgtaagtaatagtttgtagagtttagcgtcgtgtgatacgg

SEQ ID NO: 7241 - DNA, 848 bp, synthetic construct
  misc_feature 1..848: note = Description of Artificial Sequence: Synthetic polynucleotide
  source 1..848: mol_type = other DNA
cgcgaagtttcgcggtttttgcgtgttttggtttcgggaggataaggatttttttttttttttatttgcgcgcggagtcgagtttttgttgaggtgagggtttcggaagtttacgtagtttcgtaggtcggtggtggtcgcggttgttttgcgggggtgagtgtgttcggtcggggtcggagtttagcgtgtgttcggtagacggcggtgttcgcgcgttttttttttcgcgttcgcggtgatagtttagatattagttcgggcgttgatagacgattttttttatttgttagttttttcgtttgttagtagagttgttggtaagtgagagaaaatagaggggcgcgaaggtaggcgcggttagggagtgagcggggcgttgggcgcggggcggagtcgggtgcgcggcgttcgggttaggttttatcgttcgcgtcggttttcgttttgtttagtcgtcgtttttttttttttttttatttttttttttttttatttagtttttttttttatttttaaattttttagttgcgcgttgatcgtttttgtggttttgtttgggggtagggggagaatacgaatagattcgaggtgtttttttttggagttggagtttaattttaatttttatttttatttttatttttgtgtttatttttgggtattagttcgggattatggttggttttcgtagttgttttcggagcgtatttggggttatggtttgtcgcgatcggagttcgttttaagtcggagtttgggggcgtagaagggggagcgcgtcgagaaagtgtcgggtaaacgcgcgtcgcgtttggttgggtatcgcgagttgggcgaggagacgg

SEQ ID NO: 7242 - DNA, 2406 bp, synthetic construct
  misc_feature 1..2406: note = Description of Artificial Sequence: Synthetic polynucleotide
  source 1..2406: mol_type = other DNA
cgggggaggggtatacgtagttttcgtgcggaaagatggtgttttttttttatagggttgcgcgggtatttattttcgttgtaaagcgttcgggttaggcgcggtttgtttcgggtcggggcgagttcgttgttttttgcggtagatagcgatgcgcgtttttcgttttagttttcggttcgttcggcggttcgcgcgttttttcggtgtagtatgcgggcgttgtgacgttttcggataaatgtcgtgtaattgtgtaggcgaatgagagttaaaaataagaacggaaaatttattattaaggtattattgcgttagcgtagttatttgaaggtttttatggttttcggcgtttgcgtttgaagttcgtttttaggttttggggggtatttgtagaaaatttttagtagcggttcgttaattagattttagggtgtacggggggtggcgtcggtaattatggtaatttttaaaataaaataatataaaataaagtaattaacgtttattaattattattttattttattttttgtattgtttttaggtagttggggaagtcgtcgggagtgtagtcggatgttggaatttaatgtgattcggttgattatgtaaagattaggattggacgtttttgtagttttatttcgttatttatttttttttttttatttcgtattagaaataaagtggggggggggggcgagtttttggaggagaaaatgataattggtatttaattttaggtttatagtgcgtcgcggtggggcgtaaagacgtaaattttcgggatggcgagttttcggggttttattgggttaaacgaaaattgatttgatttgttttttaatattcgagggagagaaggggagatgaggggagggagggtagggtttgagtgtgtgcgtgtgcgtgtgcgtgtgtgtgtgtttggggagggggaggaggtattaagttgtagtttgcgcgcggttttgcgtttcggcggggttgcgtgcgtgtgtttttgttcgcgttgttgaaacgggtttttcgagggatcggcgttatatgatttcgtttgtttttcgttagcgcgtagatcgttagttttttagtttgttcggtatcggaggagggtcgggcggtatttttcgggtattggggttttgcggagcggagaagaggttttagcggggaatggtatatttggatttaagaagtcgcggttcggcgttagattttggagtgtagatatttggggggaggggagagttagagggagcgagcgagcgagcgttagagagaggtagcgcgtagcgcgtacggacggggggttgttgcgcggagaagatgtaagcgcgtggggtttcgttggtttttgagtattatgtagaaggggattcggttgaatgatggttacgtcgcgtttttgggattgttggcgcgtaaggacggtacgcgtaaaggttatttgagtaagcggagttcggataatataaaatggtaaattaagtggttcgcgttgttgtagaatttgtttttttatttcgagagcgattcgagttcgcggttttcggggttttatttgttggagggttgcgtttgcgatcgcgcgtttttttttaagtcggcgttgtcggttaaggagtcgttggagaaataggtgaggcgagcgtcgcgttttgatttttttgcgtttcggtcgcggttttgggggtttagggttttcggttggttgatggcgtttgaattttggtttttttatttttggcgttttaggcgttttttgtatttttagcgagaggggaggtttgtttttagttaggcgagtgattgcggcgggtagagggggtagggattgagggcggggagtagatgtgggttgcggttgtttttcgtcggacgagtttcgtgggaggcgggtatagaggggtcgatatttggagatgtagaggaagatggggttttaaggattagagacgatgagtttggatatacgtttagttaaaaatggtgtttttaatttttatttttatcgtttagttttaatagtttcgatcgtttgttttatatcgggaacgtgtaatttttcgcgtttaggtatgggaagggtaagacggaggcgttcgagcgttgttagtttttgtttcgtcgtagttgagggcggagagcggtttgcgttagtttttcggagttgggttggggttatggggttatacgggtcggttcggtattatcgagcggtggtgggtttttagttggcggtcgtcggagtaataagtttaaagatttttaaggatcgttttgatgcgtcggggttagggttagggttgttgcggaggtagcgggacgaagtgggcgttttttttttttttcgttttttgcgtcgtcgtcgtcgtcgtagtcgcggttatagcgttgcgt

SEQ ID NO: 7243 - DNA, 1218 bp, synthetic construct
  misc_feature 1..1218: note = Description of Artificial Sequence: Synthetic polynucleotide
  source 1..1218: mol_type = other DNA
cggatttacgtcggttttgttacgtgttgttcgtagttttcgttcgtttttttcgcgttggtaacgggtattgattgttcgatattttagcgatcgtagagatttttttaatgtcgggcgtattatcggcgggttagcggtttcgttggtttttttgatatattttttatagttattttttttagttgagatttttttttttaatatttcgttaattaacgtgtaattttttggttaaaatgttagagttaagattaaatttgaagaaaagaatgaaattataggaagttttttagatttagtcgttagtaaggttatggttcgaagcggtgtaggggcggcgcgtcgggaagttattggtagagttgtgcgtattggggggtgttgtaagcgttggggagagtgtggagaggttgcgtggagttgcgcgttcggggtgggagttgtatttttaatgaagcgcgtgaagggtaagcggtgatgggttttgcgttagtggggttgggagcgtgttgggggttgtacgtggggttgcgcgtaaggtgagaattgcgtatgtgggtttggggattgcgcgtatcgaaggttgtaggcgttggggagggtgttgggggttgtgcgtggggttgtttttatcggaagttgtacgttcggggaagcgtagaggcggggtgttgcgcgcgttggggagtacgtggggggatacgtagggggatacgtagggattgttcgcgcgaatggtttcgaacgtatgcgttttattttatattttatagtcgttatgacgatcgggaggttcgttcgttaacggttagttaacggttgcggggataagttcgttgaggttgttaggcgagttaggtttttttggatttcgtttgattcggatgggttgtgtttgaaattgatttagttttattagggattatgaagaaataaggagtaaatttaaagtcgttgtaattttttcgttttagttcgtttaagcggtcgtacggggtttttttcgttcgggagttggaggtggaaaagtcggttttaggcggcgggaaattgttagggggcgttaggaggtttttttcggggaggattttaaatttgaaaaagcgaaaaggtttggagttaaaggtggtggttaagatttttttcgattttttttagttcgttcgtaattttttggcgtagtttcgggaagaggtgtacgaattgtaggcgcgg

SEQ ID NO: 7244 - DNA, 1848 bp, synthetic construct
  misc_feature 1..1848: note = Description of Artificial Sequence: Synthetic polynucleotide
  source 1..1848: mol_type = other DNA
cgtagtacgagtgttagggcgcgtatttggggggtgttttggcggtgtggagagagaagagagagggcgcgggtgatattacgttcgggttttttttttttcgtcgggtgggtggggtttcggcgcgtcgggagggcgcggggttaagtagggggaagaggaggagtaggtatgaatgtgtttgtgtgaagatcggggaggggtggaggaggaggaggaggaggagaaggaggaggaggaggaggaggcggcggcggcggcggcggcggcggcggagggcggggagggagcgcgcgcgtggttcgcggcgttcgggtttttttttagttttcgatttcggttcgcgacgcgtcgttttttagtcgtcgtcgttcgtttcgtagttgggatttatttcgggtttggggattcggcgggcgggagaagcgggggttttcggcgcggtttggaaggagcgagaaagtaaaagtaaggcgagtagtattttaagtttttttaatttcgttttttgcggcggtaggcgttttgttgtttagcgcgtttttttcgagttcgagagtggttgaaagaaaagggattgggcgggggtcggggcggaggaagagagagtgcgagggagcgaggagagttcggtaatatttgttaaaatttgggggaggaggagcgcggggaggaggaggaagaggaggagagaagggaaggagggagcgcgcgggaggggagcgcggagtcgagggataatttttttatttcgtgagtagtgtaggcggtgttaggtcggggcggggggtttttttatttagtacggggtattaggtcgggatgggatttttttttagaaagtcgattggatgttaggagaggcgtacggttgggggttttttttttttttttttttttttttttcgcggttgaattaaattagaattgttatttagggtttgtgagttagaagggatcggattatacgattttcgaaattgatgtcggagttgtacgagcgggagggagcgggtaggggtagcgttatcggcgcgttcgtatattcgtattcgcgtatattcgtcgtttttatttattcgcgtcgttttttcgtttttttcgcgcgtttcgcggtcgttcgcgtcgtattatgttcgcggcgggcgtatttcgcgtttagttcggtcgttcgtggtagtcgtagtcgttcgcggtcgcgcggagcggggagtcgttagtttgcgtttcgttcgcgggtttatgggaagttcggggatttgatagtcgttgtcgtcgtaggtacgtttcgttcgaagttttttgtttcgcggatttcgtagttcgtttttgcggtcgcgttcgcgttttcggggttagaggtggtttttagcgtggggacgggatggagtgaaaatggttgttaaaaggcgtttagatttagagagtcgtcggtgaggcgttcgagtaaggtttgtattcgttttttttttttggaaggtttttttcgaagagttcgattcgcggatcggtcggagacggattggagaattttatttttcggaggggggacgaagtttgtcgtagtggtggcggcgtttttcgttttcgtttttatttaaagggtttagaagaatttcgcgagtttcgtacgcgtttggtttttttttttgcgcggtggcgttttacggttcgggtttcgggcgcgtacggcgttcgggatgggcggaaggaggcgggaggtatggtgggtgcgcgcggggattttcgtcgcgggggtcgtcgtcgttggggtttttttagttcgggttatgtttcggagggcgggggtgtggtgtgagcggatggagagaggcgcgttttcgtcgt

SEQ ID NO: 7245 - DNA, 2119 bp, synthetic construct
  misc_feature 1..2119: note = Description of Artificial Sequence: Synthetic polynucleotide
  source 1..2119: mol_type = other DNA
cgcgggaggtagatagcgttttcgtttttgtaattatttcgttcgttcgattgggaagatagtgataaagttcgggcgtagaaaaggtagggttagggtaatcgtcgagtggtagcggtagggattagattgtgtttgattttggtaaattttattttttttgggtcggaggtatgtttatagaagggtggttagtaaggttggaagagtcgaagtttttttttattatttatatattattttcgggttcgtagggttgggaggcgagtttagtacgcgttttaggtgcgtaggggaagagtttagcgttgcgcgtagagtcggttttggagtttgttttgggggtttgtttttttcgtttatttttagtttttttgtggggatgggtgcggtaaaagatcggcggatttttttggtcgtcgtttggtcgtttattagttttttgattttggttaaatttttttttttttatatttgttttttttttttatattttacgttaggggcgtttcgtggattgtaattttgaagagagttttggtcggagggtgttagtttcgattgcgtttttaattcgtaggagtgattttgaatatatttttattcggagttttagtgtttttattcgtcgtataggaaaaagcgcgttcgatttcgggtatttttagtatcgttttagtaagtgtgttcgagattagatgaggggtgcgcggttgtatttatcgttttttagagacgtgggcgtttggcggggattaaggtggttgtgattagtaagtgcgacgtagttattacgagtttaaagtttatggttagtaggttgcgtacgggtagtaaggtataggatacgaaggtgattaaaaggagttgttaaattttttgttcggcggtcgttggttttttagcggtttcggcggaatttcgggcggggtcgtttagcgcgaaaggatagtagagtagcgcgaaggtgaggttgaagagtagcgttagttggtcgatttgttgtagttggggtatttgtagggatcggacgttggttattacgagtagcgttaggaagaggacgtagtgtatcgggtgtgagtttttggttaggtcgggcgcgggtttcggcgcgtttagtagttcggttagcgttagcgcgttcgttagtaggttgagaacggttagcgtttttagcgtggtcgtttgttttagtcgtagcgtgtagtcgcggaatagcgtttttagttttgggtaagcgaatttttcgtcgtacgttcggagttcgcgtcggcggtttgtttcggtcgttcgttcggcgttttcgggttcgttcgcgtcgttttcgtcgtcgttttcgtcgcgcggcgttttcgttattttagcgttatgtagcggtcgcggtcgcgggcgcgtttttcgtcggttcggggcgtcggggcgcgggcggcggcgtcggggcgggcgggcggcgggcggcgaggcgtcggggcgcggggcgcggggcgggcggagttggggcgtcggttgtttcgcgcgcgcgttcggagcgcgttttttttcgttcgtcgcgtttgcgtattggagttcgttcgcgtttcgatcgtggttttcggcggcgatcgcgttgcgatagtcgagtttcgggagtcgcgaatttgggcgcgtatagttcgcgttttaatttcgcgttttgcgttttcgttcgtcggaggagtcgcgtgatttcgagtattttttttgtttttttcgagttttagtttttttatcgtgtatagtggaatttatttttttggcgttatttggggagtcgaaaatattgaaattttgcgaaattttttgttgcggggtagttaattttggaaaatatgtgtttttttttatttaataaaattaggttattagatttgagaggggttcgcgtttgattgcgaatttagggttttcgtttttacgagacggagaatcgacgtttaagaattttcggggttaggaggaaggtggaggtttggggcgtacgttttttttatgcgtatgagggatttttcgtttttcggtaatttttttttaagttttagggtcgcggagattttgtgggcgggtgcgggttgcgggagttgtgttggggaggcggcgg

SEQ ID NO: 7246 - DNA, 562 bp, synthetic construct
  misc_feature 1..562: note = Description of Artificial Sequence: Synthetic polynucleotide
  source 1..562: mol_type = other DNA
cgggtcgttaggagggggagggggacgcgcgtcgtcgggttcgttattttgtattcggggtcgttggtcggtcggggtatttttacgttcgtttcgttggcgagattggagggattcgggatatcgtaaagtattttttttagtgtttgggagcgttcgttgtacgtttagttttacgtttttggaattggggttttttggttttcgggtttaggtttcggttttaggatgcgagtgtttattcgagggggtgggaaaagttgatttttcgtaagggaggggaaggtgtaatttatttttttagataattaatggaatatttttcgtttttttttttttttatttgtttacggtagaagttaggatggcgttttttatgttggtttgggtgtatatataagtgcgtgcggaagggtggttgtaggcggaggtgatagcgaagtaatttcgtagttcgttcgacggttttttgcgttttagatttttttttggcgtgtaagatatcgtgtgttttcgtaaaacgggaatgttatatttgatagcgtattttttcgttttacgg

SEQ ID NO: 7247 - DNA, 1404 bp, synthetic construct
  misc_feature 1..1404: note = Description of Artificial Sequence: Synthetic polynucleotide
  source 1..1404: mol_type = other DNA
cgtttgttttagcgcggttttcgggggaggtagtagcgttttttgtttttcggtttggtttttgcggtcgtagtttttcggttttgttagggttgtcggcggtttcgtttgtttagttagggttgcggtttagaggaacgcgcgtcggtgtttcgggttgtcgcgtcgttggattttagtttgtatttcgtttttttttttttgaaaaggtattaggaaaagagagagggagagaagagtttatagtaggtaagtttggtttgggttatttgttattttagtgggagggtgtgttggagatcgcggtgttaagcggggatagtcgggatttgggggtggttgtgggttcgaagtggaggacgagtatggtttgggagataaggaatcgttttgagatagagaaggttttcgggagcggatagagagtgggcgaaatcggtgcgtagtaatcgcggcgttagttttagcgcggtttttggggcgtagttttatttcgttttagtagttgcggagttttttgacgagttttcgtttggtagtattgtataaagttttttttttgagacgcgtttaggaattttgttttttttttggttttttggtttttttattattttttttggtttgggtagtagagagcgtttatgaatgtgttttcggttttcgtaggttgtaggtttatttggagacgttttagtcgggaatattcggggagtatttgattaaagggtatttgcgttttcgttcgtttttttttttgttggtttgggagaagggaaaggggtaaggaagaaggaagggaagcgtggtggtttttgttgtagcgttttggaagaggaatgggcgacgttttttttttcgtcggggaatcgcgacgtttcgtttgatggaagtgtgtatttttttagatttagagggaaagttggagttaaatagtagttataaagttggttgtttgaaatgtggttaaggtaaaatattcgggggatttttttgtagtagtgggtttggttcgttttggaaaggtcggatttgattcgtgttgggtatttaattaggagtgcggtttttagggtgttttttttcggtttttgtttaacgagtttggagttaatgcgttaatgggttattttggtagcgtacgggtcgttttcggtattgtttttttttttttgatgattcgagtttaattttttgggttgagttgttttgttttcgttatagtgtaaggagggaagttgataggaggaggagacgtcgcgttgtggtagggagttttgggatttaggggattggaagagagtcgcgcgttagtagttggggtcgttggtgttcgggatttcgagttatggggataggagttaaatagtcgaatttttagcgatttcgtttcgagcgaagcgg

SEQ ID NO: 7248 - DNA, 819 bp, synthetic construct
  misc_feature 1..819: note = Description of Artificial Sequence: Synthetic polynucleotide
  source 1..819: mol_type = other DNA
cgcgggggcggcggggtgatagttttcgtgtatgaattagttattttttaggtttcgtttcggcgggggtcggtcggacgttcgtttcgtataaagcgggtattcgggtcgtttggagtagaaagtcgcgtattttttttcgttaggcgttttttcggacgttttgtttagcgggtcgttcgattttttgtattatggatttcgttcgttttttggggttgtcgattttgttgttttttttgacggaggttgtattgggcgatgttgtttaggagttaataggtatttggtcgttttaggagtttttttttttaatcggcggagagggcgtagcgggttatggggtttcgtgtaggcgttttttaagtttcgttttttttaggtttttgtcgcgcgtttcgttggtaggggggattcgtttttaagtttgtattttttttgtagaggttttttcgttcggaaggggatagaatttttcgggatgttttttttttttaggagttacgtttgattatttttttttttttttgttttttttttgttttttttttaggaaataacgcggagatttgttttttgtttttagattacggattttgtcgggttttattttttcgttattattacgataggtatacgtagagttgtcgttagtttttgtacgggggttgcgagggtaacgttaataatttttatatttgggaggtttgcgacgatgtttgttggaggatagaaagtaagtgttttgcgcgtatttaggattttcgcgttttttgcgtcggcggttggtagtagtttcgttagttttttacgtttcgt

SEQ ID NO: 7249 - DNA, 1128 bp, synthetic construct
  misc_feature 1..1128: note = Description of Artificial Sequence: Synthetic polynucleotide
  source 1..1128: mol_type = other DNA
cgcgagggtttttagcggttcgcggtttcgggcggatttttagaacgagtgcgggtcgttcggattggtagattgcgagtttcgaggggcgcgggacgtagtcggtttagataaagaaatcggcgttagcggtcgtttttgtcgttttttttttttttttacgtatttttttaggaaaaatagggtatattgacggttaaaggggttggtttttttttttagatagttggacgggaggtgttttttgcggggttttgacgtttttcgtagaagagtcgcgggtttagcggttttcgatagcgttttcgtttcgtttttcggcgggcgtttttttttgttttttcgggtgcgaatcgggcgttggtcggggatttcggggacgcgtgcgtttttcgtcgcgcgaggtgtcgtcgagttagttcgagagggcggggggcgggcggggcggcgcgcgggggcgggggagcggtcgggatacgtgtggcggcggcgggggggacgcggcgttcggggttttaagaaggtgtggagcggggcgggcgtttttttaggtttggtcgaggggcgtcgcgtagaggcggcggcggcgtacggaggcggtagacgacgcgttttcggcgttcgtagtttcggtttcgcgttttcgcggtttaaagtaattttgggagtcgtcgtttttcgcggaatttttcggcgggggttcgtttttaggttcgttttcgagttcgtttcgttttcgttcgtttttttttcgtttttttttcgcgtggttttttcgtttcggcgtttttaaaattgaatgagcgagcggcgcgtagggcgcgcggcggcggcggcggcggcggcggtatggagcgtagtggttgggttcggtagattttttttttagcgttgttgttgggggcgacgttgagggcgcgcgcggcggttggttattattttcgtttttcgttttttttttttttgtgtatttattacggggagttggaaggggatggggagtagggcgaggtgtttatttttttgtatattgcgggtaattttatttattacgtttcgggataagaatattatggtaggtatcgtagtattttcgcgttcgtcgtcgtcgggtgcgttcgttagcgt

SEQ ID NO: 7250 - DNA, 1128 bp, synthetic construct; identical to SEQ ID NO: 7249
  misc_feature 1..1128: note = Description of Artificial Sequence: Synthetic polynucleotide
  source 1..1128: mol_type = other DNA

SEQ ID NO: 7251 - DNA, 1128 bp, synthetic construct; identical to SEQ ID NO: 7249
  misc_feature 1..1128: note = Description of Artificial Sequence: Synthetic polynucleotide
  source 1..1128: mol_type = other DNA

SEQ ID NO: 7252 - DNA, 1921 bp, synthetic construct
  misc_feature 1..1921: note = Description of Artificial Sequence: Synthetic polynucleotide
  source 1..1921: mol_type = other DNA
cgggcgttgttttttgcggtttttttcgtcgaggtttgtgcgtggcggggtttttaggagcggtagttcgtgcggtttgggggcggtttttttttcgtatcgtagcggggcgtgtaaagcgtttgcggttgtagtgtgggcgtttattttacgtgttcggcggcgtgcgaggagtagtaatattttttgtgggcgatgaaggtggataggttgttgaatttgatgttgtaaagacggtagtatcggtggttgtcgttgggtagcggcgtcggcgtgtttttgttgggagtttggacgtttttgttcgagtaggaggggggcgtcggcgggggcggtacggtttcgggcgcggcggtcggggacgggggcgggtcgggcggcggtttttggggtttcgggtcgaggtcgtttcgggggttacgggattcgggttgcggggaggcggcgggggcgggagcgggcgaggggtcgcggtcggtcggcgttcgggtttcgattttcgggtcggttaggggcgcgtcgagtagtaggtcgtgcgttaggcggaaatgttttagtaggttttcgcgtatcgggtcgttcggggggtagtaggggtaggcggcggcgggtaggtcgagcgcgtcgggcggtggcgtagcggggtacgagtattttttgtgcgttaggtaggtttcgaggttgtggaagtttacgcggtaggtcgtgtattcgtggtagtcggttagcgtcggtgtcggggtttcggggagcgggcgtcgcggttttttgtttaggtcgatggggtcgtcggtcgcggggtcgggcgagcgcgtaggggcgaggtcggggtcgttttcgttttcgttttcgggtcgcggcgattcgggcgcgggggcgtggtcgggcggcggggggggcggggcgtcggtcgcgtgtagttcgtagagtttgcggcgtttgcgcgtgcgtataggcgcggcgggagagggggtcgggggcgcggtcggtttagggggtttcgggggcgcggtcggtcggcgcggcggcgggtcgtggcgcgaggcgtagtagtatcgtttgtgtacggtgtaggtttcgtggcggttgaagcggatgttgtaggtttcgtatagcgtgcggttggggtcgtttttcgcgtcgtttacggagttattcgggttttggttgttttcgttgtttcggtcgttcgcgtcgttttcgggcgtggtcgcgtttttagtttttttttcgcgcgtttcggggttcggggacgagcgcggcgcgtcgggttcggcgggttggtcggggggcgcgcgggtcgggtcggggggcgttttgggtttgcgcgcggtaggcgcgttttcgggcgtacggcggtttgaatagtagaggcgtttgtgtacgtagtagttgttgacgttgttgaaggtgatttcgtattcgaagtacgtagcgtttttgggggtttcggggaagagttcggtttgcgcgtcgtcggcgttcgcgttcgcgttttgttgtagtcggttgtgtattagttcggatattttggttaggattttcgaggcggggggcgtcgcgtcgggttcgaatacgtattgcggaaggaatagggtttcggttaggtttagttcgtcgggtatcgggttggagttcggcgtggggttggatagttcggttttgattttggtcggggcggggttgcgcggcgacggcgttcgcgacggggtttggggtttaggtttttcggggtttaggatgggggtcgttttcggtttttttatcgtttttattttgatgtttttgggggtcgtcgggggttcgttgttgtttttattttgggttagaggtttcgttttggttttttcgttggtggtttcggttagggtttttttgtttagttttggcgatggggtgggcgttaggtttaggttcgcgg

SEQ ID NO: 7253 - DNA, 2872 bp, synthetic construct
  misc_feature 1..2872: note = Description of Artificial Sequence: Synthetic polynucleotide
  source 1..2872: mol_type = other DNA
cgggtgttagggcgcgttgcggtttcgcgggtgggtagaggcgcgtagaaaacgcgcgggtggcgcgcgcggttatttagtgggtttcgttcgcgtcgtcggcgtcgtcgtcgtcgtcgtacgtgcgtcgtcgtgagcgcgaagggcgttcggattcgcgttttgttcgttcgtttgttcgtcggggttattgtggatttttaggtaatagttaagtgagaagttttttttattatcgaaaggtgtttgcgttttttttacgtttttttattaagtgtcgcgaggtgcgattttattttaaatttatttataaatagttaggcgatttttttaaagcggaataaaagtaaaattaggttagatatcgggggaagtcggtcgtgttaacgcgtggatagggaaaggaacgcgattaaggtagtagttatttttgtgtacggttatttcgaagcgttagtagggtttaggagttttttgattttagaaataggagtgttttttttttattttttttttttttggagaagtatttttgagatgaacgttgaagtgtttaatttagacgcgagaagcgtgtatttgtttaattgagtaaataaaggttagtagttggattaataaagtgtgtgtttttaatcgttagatgtttttattgttgttttttttttcgaggttgggggtgggggtgcggggaggaaggggaaaagataataaataattaaaaagaagagagtaaataaatatatatttggtgtttcgatatatatttttttttagtcgaggttttttcggacgaagtaatattttgtattatttaaattaaaaattattcgtgagttaatagtaaattttttttttttattttttttttttttattataaagtaaaatgaaagagaataataagtggtgatgttgggttcggaatgcgattttaacgtcgagtttaaatttgatatatgttatattcgtttcggtaagtagggcgttgtttttggggcgaaattttgtcgttatcgcgggaggagcgcggagtagagtaaagtcgtagttcggtttagcgtggaggtggttgggatagggtggggtgcggaggtgtagcgcgttagagtgagggttaagaaatttatcgcgatcggggacgtcgtgggtagcgtttcgggaggtggtattcgcggcggcgaggtagaagtttttaaataatatatttacgcgcgagttcgggtagttgttgtcgcgagtggggggcgcgttcggggagggggggggtcgaggaagtcgtagttagcggacgcggtcgtcgtataaataatcggggcgggcgttcgcgggcgggttgcgggtggcgcggggttagagttagggcgaagcggcggtcgcggagttgtacgcgtcggcgtgtttcgcgttttttcggaggttcgcgttgtttcgcgtagtcgttttttttattcggatttgtgtgtgtgtgtgtgtgtgtgtgtgtgtttgtgtgtttgtgtgtgtgaatgtgcgttggtaggcgcgcgtattcggtcgcgcgcgcgtgttgttggtaatgcgaattgtatatatattgttcgcggggttgttttttttcggaggggcggggtgggggataggacgtcgtagaggattttgaagtatcgtcggattatttgtttgttttgttttattttgtgttgttattgtcgttgttgttgttgataggtttggaattagttggttaggatgtttttttttttcgtttatttattttttttcgttttttaatttttttaaggagggggaaacgcggggaagaatattgttcggatttgtagcggagttttttggttgacgttaggtttatttgttatgtaaataattcgttggagaatttgtttgtgttacgttagatttttttttatttttatttttttttttattttttgtttcgttttttttagttcgttttagacggcgagttagggaagggggtggggagggaggcgagaataaaatcgtatgttgtattggtaaagtcgagttgtgtttgttgttttttggtagtttttaaagtacgtttttttagtagacggagttgttggtaaatgaaataggggattttatttgaagtgtagaaagtttcgaagggatttaaagttttcggtggtagggagttaaaagtatatggtagtcggaaagggagattcgagcgtgcgttaaagcgttgattggtttttttttttacggtgtgcgtttttgcggtttggggtggagagaggtcgagtgtttttttttttattgttgttttggtttttgttttatttgggttaaggagttttcgggttttttcgtggtcgcgtagtttaggttatcggggcgcggtttggaaggaaggggtcgttaagttgggatttagagagtttgaggttttcgggaagggttttattagtgattgaggggagtaaaagtaatcggaaagaaaggaaagaagaaacggttagagtttgtttcgcgcgtattttaaagtcgaggcgttcgcgtgggggatgtacgggtttagtcgttagttttgggtttcggtttttatttatcgggtgtgattcggttgggcggtttgtttgggatttagggcggtgataggggaaaggtcgagggaggagagagcgggtttcggaggggacgtacgatcggaattttggcgaggggtttttttcggagttttagtttagaggggggttagcgtttttttttcgtcgttttttttcggttttttttttgttcgcgggtcgggcgatttttcgtcggtcgtttttttcgcgcgtcgtagattgagttcgttgttttgttcgtaagttagtcgtaaagcgtggcgtttcgagaggcgt

SEQ ID NO: 7254 - DNA, 2906 bp, synthetic construct
  misc_feature 1..2906: note = Description of Artificial Sequence: Synthetic polynucleotide
  source 1..2906: mol_type = other DNA
cgcgtttcgttttttttggttcgttcgggtttagggcgtcgtttgtagttgcgcgcggtcgtttttagatggaatttttttattaacgtaaggttcggtcggagtagttattcgggagttgggcggcgaggggttatttttttttatttcggcgggtgtaggatcggggggtttgggtagtaattagtggggaggagcgttggattgtgtacgtcgagttcggtaggttttcgtatgcggtatgcgaagggaatttcgaggtttttttgtagaattcgagtacggttttttcggagttttttgtttcgcgtttgcggttttttgaattattttaataaaatgatcgtttcggtagttatttatgtttttttttgcgtagtgttcgtagcggatcgcgttgtgtggtatttcgagttttggggattttgttgtacgcgttttttagattttcgggggcggggagtggggagataatcgttagagtcgcggggcgggataaatggcggaatcgtcgcgcggcgttaggtaaattttgtaagggaatcgcgcggtttgtcggttttattttaagtattttcgaaaagaaagtatgtggcgggatatttgttatttattatgtgttattttcggtgacgttttttggagttgtgtttatcggggattcgggttcgcgggtgttgttcgttgtgttcgggcgggcgtcgcgttttttcgcgtcggtttcgggttcgttaggtagtcggagtcgttgggtttttttataattatatttttttttttatcgttttcgtttttttttatttttttattttgtagttgggttttttttttttttttgggggcggggaaggggggatgatttttaaaaattagaattattgatatttttggttttttcgtcgttttaggttgaagagcggagggggattcgcgggtcgagggtttttttttttgttcgcgttagggtcgttgggtgatatcgaaatttagaggttttcgtttttcgggggttttttttttcgtttttcgaggtgattggttggcgcgaagcgattggcgatttcgggcgcgattttggtcgcggtttttcgcgtcgcgtcgggtgaatggtcgcgggcggaggatcgggaggcgtcgggcgtagattaatcgcggtcgtcggtgggagtatttgttatttatatggaagagatttggcgtttgttaggttagtttagtttttttagtttagagattagttataagtgcggtcgttgtgttcgttttatgcggcggcggcggcggcggcggcggcgttgatatggagttgcgggttttcggcgggtttttttatcgcgttttttgcggggagtagggtaagattcgtcgttcggtagtagaaagcggtttcgaggaaagtaagtgtcgaattacgggataaaaagtttttggtttttaaatttttttaaaacgttttgtttgttggaaaaggagaattttttcgttttattttttttttcgtttttttttttaaaattttttagcggatagttaggtgtattatttttttttatattattttagtgatttgttttttttgagtataagtagatggttttgtatgttcgtagtttgtgagagaaatagcgggcggaggtgacgggaatggggggagaaggagagtgggtattagggggcgaggggttggtcgggtattggagtttgattgggtgtttgttgattttacgttgtaaagaataaggtagttattttttttgtttgtttatgattatattatagtaaagaggtttagaaaagagggagattttattcggaatttttaaggtttggagatgtgattttttaaaagtttagtcggcgaatgggagattgaagggtgacgggaagggggtaggcgcgttcggcgttttgattgggcgtgcggcggtaggattttaaagcgttttgtttcggatcgtttgttttgggtgatttttcggatttgttttggtggaattcggatttgtttcgtcgagatgacgaggtattttcgtttcgcgaatttaataggagggatttttgaagttagcggttttcgggatgagtcggggtaattttcgttttttgagcgtgggttggatggatgtttaattaggatttagggaggatgggggtcgcgggggaagtcgggcgtttcggggttttcgatatttatattttcgtacggcgtacgttttgtttcgagtttgcgtttttcgagttagtacggcgagtttgggattttcgtgttttttttttgtggttttcgagaaacgtcggagtttcgtgttttgttgggggttggggggatggagaaaaggtttcggggattttgtttaaaaagtaaaggtaaacgtattttaatagtttttcggtagttttcgcggttggcgcggttttagtttcgggcggtttcgcgcggggcgtgggcgcgggcgttcgggcggttaggtgcggcgggggcggaggttgtatttttagcgcgtcggaatgtttcggggcgcgggaaaggtaaaagtagtttggcgttttttttacggttttagtttttatttatttagaattcggttttaatagtttaaggaattgagaagaaaaaggaatttgcgttgggaaataggggtttttggcgggttgagtggtcgttgttatggtagagatagaaacggagaggtagagatggatcgtttagttatgttaagcgcgaagtttattcgtttagttagaaagttcggatattttttgagtttcgtatagttggtgaaaaaataatagaattattaaaaaagaaaaaaaaatttttttcgtttgatacgcgtttttttggtgtaaatgaaatgcggagggatacgcgagttatttagttgcgtaaaatcgtattttcgcgg

SEQ ID NO: 7255 - DNA, 2906 bp, synthetic construct; identical to SEQ ID NO: 7254
  misc_feature 1..2906: note = Description of Artificial Sequence: Synthetic polynucleotide
  source 1..2906: mol_type = other DNA

SEQ ID NO: 7256 - DNA, 1696 bp, synthetic construct
  misc_feature 1..1696: note = Description of Artificial Sequence: Synthetic polynucleotide
  source 1..1696: mol_type = other DNA
cgaaggaggggttggcggtagtgtagtagcgaagttcgggttttcggttttgggagtttcgtggtttcggtcgtcgtttttcgagtttttattacgtagtttcgaatttcgaacgcgagttcgcgtttcgttagtagttagcgggggtgaggatgacgcgggtcgggcgagaggtaggttaaatgtagtagtttcgtcgcgggtcgtcgggtttttgagtttcgttttttagagttagggggtttcgggtgcgggtcggagggcgggggtcggcgcgggttttttcgtcgtagtttcgcgtcgttttagtttattagcggttatttaattgtttttttcgatcggtttaaaatagttgcgaacgtttgcgatttgcgcgcggttttttatttgacgtttatttcggttcgttcgttcgttcgttttggtttcgtttcgttcgtttagagggggcggggaggaagcggttcggggaggggggaggggggagggggagagaggaagagaggaggaaggaaggaggaaagaggaagacgggcggtcggaggcgcggggttgcgcggcgtcggtcggcgcggcgttggaaggcgtcggcgttaatttcgcgaggtaggcgacggagggggagcggcgttaatatataagagtattgtattacgttaatttttttttagaatagtatgcgttagtagtatatttacgttttgattgaaggataaaaggatgagagagtagtttgcgtggttgtcgtttgtaatatcgcgagttcggcgcgaggaggagacggtgggcgtcgcgcgtaggggtttcgttgttgttgttgtcgtcgttagttagcggggattatgtttttgggtttcggagcgtttttcgtagtcgcgattttcgttgtttacgtcgttgtagtagttcgttggcggcgcggttattgagggcgtcgggagtcgaagtcgcgaattcgtttttttcgtataaagtcggagtcggcggcgcgtcgggggtcgggtagcggcgggcggcgacgggcggttgcgcgtcgtcgggggttgcggtcgtcgtcgtcgtcggattcgcgttcgttttcggattttttgaaggggtttgcggtgcgggcgcgatcgcgggcgtcgcgcgttttttcggtcggcggatcgggttcgagcgtagtcgttacgtcgttggttttcgggggtcggacggagcgtcgtttcgcgtgtcggtagtcggcggattggagaattgatttttcgtttttgttttttttatttttcgagaagaggcgaggagaaagggggtgtgtgtttggggagggcgaaggcgtcgcgaatatttttttttaattttcgtcgtttcgcgagtttacgatcgtaattagttgtcgtcggttcggagcggtcgacgtcgggagagggagcgtagtatttagcgagtgcggtttgggcggtttcggggcgttttcgtatttttttcggcggcggttcgtagagcgggtcggggtcgtcggagcgtattttggcgatgaagcgttttttttcgcggttggagcgagtcggtgttagggtttaaggataaagtcgggaagcgttggtggcgtcgttttttgggcggaggggggggtatgtatttgtatagttcgtcgggttttggtttttttaggcgcgttttaatttcgcggtttcgtcggtttcggtttcgg

SEQ ID NO: 7257 - DNA, 2054 bp, synthetic construct
  misc_feature 1..2054: note = Description of Artificial Sequence: Synthetic polynucleotide
  source 1..2054: mol_type = other DNA
cgacggttagcgtttagagttgtaaatttcgaggcggttgagcgtttttttttgagcgcgcgtcgtgcgtttcggttatttatgtatgttttttttttcgttttatatcgttatcgttagggtagtttcgtgcgggtcgaggggatttaggggggtgtcggtaaacgttggtgcggaggagagtcggtaagtcgggcggcggcgggtgggagtatgtagggaggcgttttttgttttttttgtcggtcgttttttttcgttttagatgttagtcgcgagtttcgagttagcgagagcgagttagagagggagcggcggcgggcggcgggcggtagggaggagaggaggcgaggcgagggagggaggaagggaagtagggagggcgggagggaggagaggaggatttagagagcgttaggtagttggagtttttgtagcgtttggtcgggttttaatgtatagtagtagcgagtcgcggcggtagtaggtagttcgggagtttcggcggcggtcgagttagcggcggtttcgttttttgttttttgtaaattttgcgagtagttcgttcggggggtcgggggcgcgttcgggaggttcggttcggttcgcggtcgagtttttcgtcgtcgtagcgttagtcgtcgtagttattatcgtcgtagtttcgtgttttttcggggagtagtcggcggttttcgcggttttttagtttcggttttagggtattgttcggcgagtgtttcggtaagggtgggggttgtcgcggcgcggtcggtcgcgggttgtcggggggcggtcgtcgttatttagagaggcgcgtagaggcgtcgagagcgtttttcggcgggtttttcgcgtattcgtcgcgttcgggtagcggttcgatcgggcgagtatgggcggcgcggagtgacgtcgttgtgttcgtttggtattaaggatatttagttcgcgggggtggggacgaaggggggtagttcggcgtcgttatcgtagttttcgagagtcgtcgtcgttgttcgggtttcggggttgggtggaggaaaggggtgttcggaatcgatttttatttttcgatttttttgttggatattacgtttattttggacgtcgtaagagaagttgttaagtttcgtaggttttgattcggcgtttttcgcgtttttcggttgttttcggtttttttgtgtttcggtggagtatttgcgttcggggttggggttggaggaggtagttatacgcgcgtatacgtatacgtttagaggagggcgagaggtagcggtataggttttatttgtagtgttaatgcggcgttttcgttgaaggagggaaacgcggcgcgtttaggtaaggagtcggttcgtcggggagtggggtcgggcgggcggcgagggtagtaaggtcggatagatttgggtcgattcgggagtttttagtgtttcggagttagttcgcggtatacgtatacgtatatacgtaggtatatatatagatttatatcggtatatacggcgttcgcgtatttgtttacgttttatttggacgttcgcggaggtgtagcggtcggagtagggatttttcgggtgtgttttttttttacgtttttggatttagatttttttttttcgggattttcggggtgggattttgtgtattttcggttttgttttttattcggggaggttgagggagtaattttttagtttttagtttttttcgtttttagttgggttttaaaatgggagaagttttgagaggttttcggagatttatttagtgttatcgcggtttcgtggtttttggatattttgggattttaacgggagatagatttatagatattcggacgtatatttggagagagtggtggtttagcgttcggggaggaggttagataggcggttggggttgtagttttgtagggcggcgtatatgaaatagatattgcgtttttttagtaagaggtagtataaacgtttttttgaagcgtggtattgttttttcgggaatgcgtcgagattttaggtagaaagcggtttaaagtatcgtcgcgt

SEQ ID NO: 7258 - DNA, 1258 bp, synthetic construct
  misc_feature 1..1258: note = Description of Artificial Sequence: Synthetic polynucleotide
  source 1..1258: mol_type = other DNA
cgaataacgtagcggcgttaggcgttagggtttttatttttgttttttggatttttttcgtttttttgttttatcgagggttttgtgattcgattttatcgaattaatcgttgtttatcgagggtttgttgcgtttaaggaaggtatcgggcgacgagtaaggcggggacgtagtttggggacgtaggggttcgggttttagtttagagataggaggtcggcgtttcgatttggtattcgtcgacgaatttattttaaggtttttattggcggagtttttgttatttttttttttttttaaatgtagttttcgttattttttcgcgtttaggggttgttgtttgagtttagttttgtttattggagggcggcggtggagagggtgttggtttagcgtcggtagttgggtttaggattaaggtgggcgttcgtcggttttggtttttttagttttacggtgtaggatttagggcgcggttattcgagtttttcggacgtttttttttttgatgttcgttgtttttgttttggcgtttttagttcggggtcgtagtttgttttttttttttttttttttcgtcgtagttcgtcgttttcgggtagagtttatgtttagtttgggttttcgttcgggatttaggaagaggttggcggggttggagggtgcgggtcggcgcgggagggcgcgggaggcggggagcggcggtttttgattggtcggggcgggggagtgagcggagttttttataatgtttcggtgcggtgtagtcgcggatggatgttgcgggaaggggttgttatttgttgtttttgttagcggcgcgcggatttgttcgcgtttttgtagtcgtcgtcgtcgtcgtcgttagttcgttcggtttttgtagcggcgtcgtttgcgtttttttcgcggtcgtcggagcgggcgttatgaattttagtttttcggcgggagaggagaaaggggcgacgggcggtagtagtagtagcggaagcggcgtcgggagttgttgtttgggcgtcgagggcggcgcggattcgcggggcgtagggttagtcgcggcggcgggggtcgttgttttggacgagttcgcggtcgtcggttagaaggagaaggacgaagcgttggaggagaagttgaggaatttaatttttcggaagtaggtttcgtataggtaggtgcggggagtcggtagtcgagataggtgcgtcgcggcgggagatttatttttttatttagtaaggggcgttttcgcgg

SEQ ID NO: 7259 - DNA, 628 bp, synthetic construct
  misc_feature 1..628: note = Description of Artificial Sequence: Synthetic polynucleotide
  source 1..628: mol_type = other DNA
cgcggtggttttcggtttttttttattttattttacgaatcggcgtttggtcgttttgaaatgaatgatttcgtcgcgtttcggcgtcgcgtttttagcgttttttttcgggatagcggttaaggtgattttgatcgttttcgggtcgcgggtcgggtttgggtaggggtttttgggttaggagagggaggtcgtttcgcgtttattttttaaggtcgttttttagttggtgttgttttcgtagttcgattcggatcgtcgtagtagtttttcggggtcgcgggttttagtttttgcgggcgaacgcggtttgggggcggcgggggcgggcgcggggcgcgcggcgaggggcggcggcggtcgggttcgcgaggggggttttcgggtcggttttatgcggggcgtttcgtcgcgtcgcgttcgcgtttttgtatcggggtgcggggtttagttcgacgcgtattcggcgtttcgcgcgttttgcgggttttttaggtcggtttcgggtgggttaggatcgcggcgttggtaggtcggggttgagttcggtttttcgcgttggagtttttgcgtcgggtgtcgtcgcggtgcgtttagcgtttgtttcgtcgagtcgtagtttttacgt

SEQ ID NO: 7260 - DNA, 1075 bp, synthetic construct
  misc_feature 1..1075: note = Description of Artificial Sequence: Synthetic polynucleotide
  source 1..1075: mol_type = other DNA
cggaggttcgttttcgttaggggtttcgggggtgcgtgattatgaattttagagggttgggttttgatttgagtgtcgattcgttaatgaggacgggaggataaggttgtcgacgtagcggaaggtaggggggaagcgattcgaggatttgacgattatttttaggtaggggttttttaagtaggtacggaaattaattttattaaatcgcggagtggggattgggttcgggcggtgtttagtagggtaggggtagggttagttggcgcgtaggtatttgtagggtggagtagaataatcgtggggattcgtttttttggaggggtattgtttattttttatatgagttttaggatattttcgtggggcggagtttcggagacgttttaggttacgttttcgtcgttttatttttgtttgcggggggtcgagtagggagggaggtttagcgcgcgttgtgtgttcgtagtgtttacgggtagcggggacgtttgcgttcgggttttcgacgcgtagtttggagagttgcggagggtgtttcggggttatatatttattattaattgtatttaggtaggtttttttgtttttttcggggtcgtcgttcgtgggagggaaggtgtttcgtttcgatttatttacgcgggtagcggtgtttttttcgtttatcgcgttatcggtgacgttcgtttttgcgttcgtaggtgtacggttaggtgttttatatcgtttcgtacgacggcgttttgcgtttttgggacgtgcgcgggtttcgaggtgtttcgcggtttttttcgtttatgcgtagtttttcgcggttttttagtaataaggtgggttgcgtcgtcgcgtttttgtagtcggtttgatttcgcggggtttttgtagacgttagtttagatatttagcggtttttagagcgtttcgttttgttattcgcggtggtggcgttcgatggtcggcgaggggcgaggagcgaggaagttcgggcgggaggagagttcgtcgtaggcgtttggtttttttttggtggttaggaggcgttgggagcgggagtgttcgttttggggatcgt

SEQ ID NO: 7261 - DNA, 5566 bp, synthetic construct
  misc_feature 1..5566: note = Description of Artificial Sequence: Synthetic polynucleotide
  source 1..5566: mol_type = other DNA
cgaattagttttgtcgttggatttttggtcgttgttcgggtcggcgttagttttatataatgtcgcgtgagtttttgtgcgtgtgcgcgggggaggttcgagatgtttttttttcggtaagttttcgcgttagtatcgttttttagtttcgcgggttttttcgcggcgagtcgggacgcgtggttttcgcgggtttatttgaagaaggtcggttcgagtagcgcgtatagtagatttacgtcggttagagtatgggttgcgcgtttaggttggcgtcggtttgcgagttgttcgagttcgagtttatcgataggtcgtcgtcgtttaagtcgcgggttttgagcgattcgtttagggggtcgtcggggtcgtcgttttttttggcgttatcgtgtagcgagagcgttttggagtcgtttttttcgttattcggagagtcgttgtcggcggttgggagcggttcgttcgcgtcgggcgtatatggcgggttttgtcggggttttcgggagttcgagtttaagagttgtttcgagtcgttcgcgtcgtcgttttttttcgtatcgttcgcgtcgttttcgtcgtcggtttcgtcgttttttttttttttcgcgttcgtatagtaggttttcgcgttttttcgtcggtcgaattcgggtcgtaggatgttgtcgatgaagaagttggtgatgcggtgcgggtgttggtggttgtcgggcgtttgtaggatcgcgggtagtattagagttcgtcggcgttcggtgttcgtttcgttcgggttgttatcgtcgtcgtcgttcgagtcgtcgtcggggttggatttcggttgtcgttgtttttttatcgtcgtcgttgtttcgttaggtttggggttatttttttttatgttgtttatagtaaattttatattggtttttcggggacgtttttttaaattagttttcggttttttcgcggcgtatacggagattttcgcgtttttatttcgtcgagtttttcgagggcgtgcgcggcggtcgcggttagggttgaggttttataagtcgtcggtcgcgttcggcgcggagttatttttgaatttacgaattgggttagaaatattacgagtcgtttcgttcgtttagacgatgagagatttaatagagttaagttttcgatttcgtcgcgtagtcggggtttagatagtcgtagtggttcggcggggacgcgggtcgtttttcgggtttttcgttttttttcgcgttcggtcgtttcgggtttcggcgtcgtcgtttgggtcgttcggggcgagagttgcgcgtatgtaggtagcgcgtttttcggcgtttacgttcgttcgggtcggtttcggtcgtcgtcgtcgttcggtcgttttcgttcgtacgttttagtcggttttcgagggtgtcgggcgttcgcggttagcgcgttcgttatcgttcgtacgtatatggaggtttttttttcgcggtcgtcgtttcgttgcgggtcggggcgttttatcggcgtgcggtcgcgttttcgtcgagtttcgtagagtttcgcggttcgagtcgtatgggtgagagacgcgaggttagggttcggtcgggtcgggttgggtcgttcgcgtttttcggtcgttcgtcgttttcgtcgtttcggttttcgcgcgggttcggaaatttttaggttattcggcgtaatttgagatatttttattttggatttttgtttttatttttaatagagttttttcgagtgacgtcgtaggtcggttttttggatacgtgtttcgggttaatggtcgcggcgtcgcgcgtttacgtgacgtttcggtcgtcgttgggtgataggagtagttcgtcgttttttttttttttaaagcggtcgcgtttttcgtttcgggtgcgggagtttaggaattcggagagattttcgatcgcgttttttgcgttcgttcgcgttttttttgtcgtttcgcggtttaggggtgtgagttattcggcgatagtttcgttaggttatttcggggcgcgtaggtggatacgtataggaagatcgttatttttaagatttttatattgtttatcgtggggcgaaattttataattttttgtataaaatgtataaataatattaaatgagttgtcgagatataaagggatttttgtggttcgttttttttgttgatggagaggaatagtgttatttttatttgattcggtaattcggtagttttttgttttaaacgtagagttggcgcgtaggatattttttttgtagatatttattgtaagtgtgcgtgtgtgtgcgtgtgtagggaggcgcgtgtatacggtcgtattttattcggggatagcgatttttatgaaatatgtttagcgattcgaaagagcgggggaatgtagtatgcggttttatttgcgaagggagaaatttaggagtttcggaggttttaaaggaattttttttgttaaggagaggaggggtgattgtttagttaagattttaaaattaagtcgttcgtttttttttaatttttttattttgattgaggagtttttagatcggttatttcgttttttttgttttaaaattttttaaattaattttgtcggagagtagggtttatttgaaacgagaattaggaatttaacggtaagggtgggagttttagttggtttttttttttttttttttttattttttttagattttttttttagttgttgttagaatgtttaattggaagttttgtttttttttttttttttttttttttttcgggtttttttttatttgtttttgtttatttattaaatattcgttgttattttaggttcgtttgtttattatttaaaatgtatttttatggaaatgtgtgaatttttggaaatattcgatagggtagttttgggggtgcgggagtatttgtacgttatgagtatttttagtgcgggggaggcggggaggtcgtagtttggtacggatattttagggttgattggttttgggtagttgtatcgtgtttagtaatttagattttcgtagaggtagttagtaggttgttgttaggttttgagtgaatttggggagtttggtaagtattttcgaggtagcgtggtttgttaggttatttggggtttgaaggttgtattttggttttgcgaagttttttttttagtgtttattttacgtgttgttttttttttgtaggttttagagtgttggttgggttgggatgagaaacgatagtttttatagttgtttttaggaaaattatttttttatttaggacgggaatggtgggggaggaggtgttgggttggttttttggttattggacgtggttttggttagagtgtgttttttgttcggtgtgtttagggtagggtggggaagttttttttcgttggggttggatttttttattttttttttattggaggagtttttattaaatgttttggttaggtatatatttgttaggggtttttttcgagttttaaaaaattaaattttatagtttatttgtttttcgggaaaatagggttggtgagagtttgtgggaagttttattgacgtttatttggttttttggggggagaattttttgtaattttggaaattttgatgattattagttaggaaagggagggtttaacgattttgggttttttgaatatgatattggggggaggaggggttttgagttttttggtttttgtaaaattattttaggttaatggttttatttgttttatgaaagttaattaggcggttttttgagaagtattttttgaatttttgggattttttgtttttgattgttttagtataaatggttttaagacgttgggttttagttttgtgtttttttgcgatttagattttaattcgtggttgtaatagagattttgggaagtagagcgttatttttagggcgtttggcgggtcggtgggtagagatttgttttcgtagggtttgcgggttgggttttggggttggttggaggaagaggaattcgtgggtcgtttttttggaaaggaggaaggtgagaggtggagggaggaataggagaaagagaaataaatgaagagagagataattagagggtatcgggttttttagagtggatttaaatacgaaataattttgggaaagcggtaagaggggttatcgtttaaagggtcggggaagttgggatggggttgtagaaagttgagttgtttaggggttgggcggtgttgagttttatatatacggaatttcgtaaggtgttttaggaagtttcgagaagcgcgtatgaggatcggtttcggtcgtttgttttagttgggacggcgtttcgcgttttttggggatgcggggtagtggcgtgttttttttttgcgatgttagtttcggttgtcgcgttttcgcgagtttagagttttcgttttttttttcgaacgatcgtcgtttttaaggtcggtttttttgtgcggattagacgagtttttttcggatattagtttttttcgggatggaaagtggggtattgattcgggaatttcgttttttttttagttttatttaggaatcggagagcgttcgcgattattcgtttgcggaggacggttttttatattttttaggttcgttgtataaagaggggtttcggagagggcgagtaggaaagtagtttttagacgtcgtgcgttttaggatacggacgttagttttgtaaataaaattttagtgaagcgtttcggagatatcgggcgttcggatgtcgagttaggttttcgtttttatttgaaaacgaggttagagaagggtgattttttcggtttttttgcgttttttttattcgtttcgtttttttagtttgacgtggtgatatttggaaaaatggatttaatgaaagtcgttcgttcgcggcggtttcgttattcgcggggtagagacgtttaataatttttgagagcgagatttttattttagttaaagtaggtttggttagttttgcgttttcggttgggagtcgagtttcgtagttaagttttaggcgtcgggcggggaattggggtcgataggagagtaatatttttttcggggcgagtagagagttatcgtcggtttttggggttgacgtttcgattcggtttgtagataaaggtcgaaacgaaggggcgcggggagtaggggtggggcgggcggggttaacgggcggatattgcgtgtttgcgtttttttttgggcgaaggaggatcggtttataggtttatcgggcgagttcggggacggggtttgggaggttgggtttagggtttgagatttttttagaataattttcggaaggagggggttaaatgcggtagcggcgggtttgaaaagggttaggagcgtcgtaggaattggggtgtataggttttcgcgtgtttagcgtttcgttttttttcgttttaggtttgttaggggcgcgcgtggcgcgggtagagtttggtgggtgggttggcgcggatagaagttttgtcggggagcggggaggggggggtagtcgtattgtacgttttggttttgtttcgatcgttggagaagcgt

SEQ ID NO: 7262 - DNA, 5566 bp, synthetic construct; identical to SEQ ID NO: 7261
  misc_feature 1..5566: note = Description of Artificial Sequence: Synthetic polynucleotide
  source 1..5566: mol_type = other DNA

SEQ ID NO: 7263 - DNA, 1164 bp, synthetic construct
  misc_feature 1..1164: note = Description of Artificial Sequence: Synthetic polynucleotide
  source 1..1164: mol_type = other DNA
cgaacgtttggattttagcgagcgggcggttttttggcggcggtgattatcgttgtgttcgttgtttttacgcggcgttcgttaattttacgtgttcgtagtcgcgcggcggggtcgggcgttcggagttgattttagtttttaggatagaaagggtggttaaacgtagatttggtaatttttcgagtcggcgattatagattgttggtggttgcgttacggtttcgggagggttagtttttcgttgggtttttagggtattaagaaaagaggggtatgcgagtttggaagttggagagagttcggggttttttagagcgggtgggacgtcgcgtttttaggatttcgcgttacgcgtattttttttatttcgatatttattgttatttttatagcggagcgaggggtttcgtcgagggcgagcgtatttcgtgcggttgagatgttcggaacgttttttcgcgtttcggtttttttagaaggggttatagtcggttcgcgagttttcgggcgggggttgagtcgtagtgttaattaaggcgaggttattttggttcgcgcgttttttattttagggttttttcggtagagaggtgattgtaggttatcgttagtcgggtttttatttttcgttttcgtcgtttcggtttttatatttcggaattttttcggcggagtttgcgagttcgggaacgcggttttagttagagtggaagggatagcgcgggaattcggtagagagaaaaagcgggaattgggcgtcgtcgttttacgatcgggaggagattttttttcggttttttttggattttatttcggggatcgtttcggggttagagtttaggttgggagagtttttgggcgtatttatcgttttttttaatttttttttttttatttttagttcgggtggtagtggttattcgtcgggtttgtaggtggaggggagtttgcgcgtaaaatttacggtcggcggcggttattttttcgcgggaggcggttagattttggagttatacggttagagttagtacgagtagggttttgttttttatttcggggcgcgtttttttggaggagttgtaaggcgcggatcgattgatgagtcggttgagtcggaggttggagagggttggagtcgcggtttggcgttgagtaagtcgt

SEQ ID NO: 7264 - DNA, 1495 bp, synthetic construct
  misc_feature 1..1495: note = Description of Artificial Sequence: Synthetic polynucleotide
  source 1..1495: mol_type = other DNA
cggcgcgtattttatatcgtttgttttgtgttttaaaacgtcgaagttaattttttacgcggttttttgttcgattatttatttttgcgttgttaggtatatcgaggggatcggttttttttttaggcggtttattttagcgtttttcgttagagggtatacggttttcgtgtaaagcgtttatggcgcggggtacgcgcgtacgtagtttcgatttttatagtttaggttttattttcgggttgggtttagtcgttaaggcgttggggaggggtcgtgttagggagcgaagcgttttcgggattttgggagggtgcggtcgggattgttgttttttgttttgagttttgggcgtaggcgttcggtaggattcggcgtttaggtgagcggcggtttttaggaggggaagtatcgcgcgatttaacgggcgtttagagcgtagggcgaagaggatgggcgagggagagggggagggagaggttacggtatttgaggaggaggaggagtaggaggagtaggaggaggatcgtggggttcgggtcgcgttgcgtatttatttgggttttggttgttcgtcgcggatttcggttttttgtcggagtttcgttttttttttttgtttttttttttgtttttgttttttttgcgttcggatatttcgtcggagacggagcgttttacgcggacggttttcggcgtaggcgagtttggtttaagggttcggatcgggtttgggaaaagtttgtttttcgagggggagagcgagcggtcgcgttgaggcgttcgcgttgcgcgggggcgtttttcgttgtttgtagggagcgcggcgcggacgcggcgggcggttcggttatttggaacgggcgttcgttttggttttcggggttgtttttgtcgtttcgggaagtcgtcgatgggttttatcgttggcggttcgcgttttggtttttgttcggcgttttcgtaattcgatcggggagaggttattatcgttttgtttacgtttttatcgttcggtagtcgtcgtcgtttagtttttggttttcgcgcgagttcggagttttaataagtttcggggaatttttcgtcggtttttttttaattgtttcgtagttatttatttttcgttcgtaggttggaggtaggcgtttttttcgtatttttttttggtttcgtttttttttttttttttattatatttttattttgaggcgcggatacgttatcgggaggagtttgggttcggcgttttcgggcgtagtttttttttttttcgcgttggtcgggcggggggtggcggcgcggttgtcgggaattttcgataggggtcgttggacgttgcgcggagatcgaggttagcgtttcggagattcgggaatttaggcggagattcgaggttttcgttgttcgttttttttcgtagttaggtagcgtttgggagggttgtttcgttttattttacgcggaaaaggacggcgtagagaaaagtttgcga

SEQ ID NO: 7265 - DNA, 352 bp, synthetic construct
  misc_feature 1..352: note = Description of Artificial Sequence: Synthetic polynucleotide
  source 1..352: mol_type = other DNA
cgtcgtcgttggtgggtggcggcggttcgggtgttttttggattgcgtagtaaagaggtattttgggagatggggttaaggttttagggggtgttattcgcgaacggtttattcgttagattaggggggttttttggttgtgcgtttggttagaattggttttgacgatggaagtttttggaattaaagcgttgtttttttttttttgtgttatagttggagttgcgggagcgtttgttttgttcggagttcgcggttttttttcggttgtttcgcggtggcgttacgcgtttttttcggagtaagttcggtgcgtagggtcgggggcgtgggcggttgttgttagaggcgt

SEQ ID NO: 7266 - DNA, 1141 bp, synthetic construct
  misc_feature 1..1141: note = Description of Artificial Sequence: Synthetic polynucleotide
  source 1..1141: mol_type = other DNA
cggggattaggcggtgtgtcgttcgggtagttagtgggtcgggcgagtttgcggggttggaggggacgcggggttgggaggttggggagttgggggttgatttcgggcgggcggggcggggtagggatttgtcggtttggggcgggcgtattagacgagtttttcgttcgtaggtttttagcgtttagtcgcgtttcggttgcgtttcgtcggtttcgtttcgtttcgtttcgtagagtcgtcgttagtagtgggagacgtgcgttgagaggcgggggttgcgttcggcggaatagtagttttcgggcggagagcggggtcggggttcgagagtaggtgatgttaagagttgagcgggattcgtgagcgcgcggtttagtatttattagggcgtttcgtaaaaaatttcgttttcgtttgtttttgggaattataggtaagttttgggttttcgaggtgtagttttaggtagagtttcgtgttgggaggtgggaagggggtttgattttggggatttaggtagtttggggatagttttattaggggtcggtgtttagaattggtgagggaggtattttaggggttgggggagaaggagcgagcgtttttcgtttttttttggtatttagcggcgcgtttgttggtcggaaaggtagcgagaagttcgttttttttgttttgttttcggcgatttgcggttcgggtgggagttcgtaggtttcgggtttttagcgtcgttggttagggcgcgggtaaagtttgttttttcgcgtttagtcggttttttcgttttcgtagcgtcgtaggtgtcgtttgttttcgtttttttgttgtaatcgttttattatggatttttcgatttagatttttcgcggggagtcgggttttatttgcgtttcgagcgtttgtttgttttttaatagtagcgtttggtttttcggttgggtcgagttcgatagtaacggtagcgtcggttcggaggacgcgtagttggagttcgcgtatattttttcggttatttcggttattattacggcggtttatttcgtagtgttcgtcgtgggtttggtgggtaattcgttggttatgttcgtgattattcggtgagcgcggggatagcgtagcgttgggggttgggcgg

SEQ ID NO: 7267 - DNA, 3297 bp, synthetic construct
  misc_feature 1..3297: note = Description of Artificial Sequence: Synthetic polynucleotide
  source 1..3297: mol_type = other DNA
cgagacggataggaatcgaggagatttttttgtagcgttttttatttttcggatagaaattttgtagattacgtttatttttttatttcgtgtatcgttcgtggttcgtgggtagtagttgtttttttgggatttttttcgtttgttcgcgagttttcgtacggtcgcgtttttgttgttggggtcgttcgttggttttggttgttcgttaggatttttttttgatgttgttaagttcgggaagtttacgatgtattttagtgttcgcgcgtcgttttttttaaagttttttttttatttatttttttataagcgtggagggagatggggtaggtcgcggcgtttatagattttttttcggcgtttatttttttttttttatttttttagtagcggtagggtcgtagcgtacgtaaatttttttttaaaacgtttattttatttttagttagtcgttttttttagggttttttcgttcgagttgggtgtggggatcgtcgcgtatatagagacgggaaagttatttcggtttcggagcgtcgtttttttagaggtttttggttcgttcgtttttttagcgttggaggatagtcgcgtatatagatttttttttttaacgtttatcgcggtttttagttgtagtttgtatttttatttttcgtttttagtttttcgtttttcgttttttgttttttagttttcgtagttcgggcgtttagatttgtttcgattttttagggtagtttcgagggtgcggaagattaagtgttcgggtttgttttaggaaaatttcggcggcgtttgtacgttaattgttttggcgtaggcgaagggtggagggtatttttttgtttattcggtttttaagagcgtgaatagaggtttcgagtgaacgtttatatttagtcggttttttagggtttacgcgtggggcgtttatttttttattttgtttttcggtgtttttgttttggttgtattttttttaaaaggaggcgttacgattttaggaggttttgtttttttattttttttagcggcgtttaaattattagtttcgggcgtttaattttttttttgttttttttttatttcgtgagaaagtcgacgtttttattcgtttggttttttcgaaatacgtttcgggtggttaatgcgatttttagggtttaaagattagattttcgcgttttttattaagatatcgacgcgaagtcgtagaggtggaatcgcggacgttttggtaggttcgggatatattgattttggtggcgcgatgttttttttcgtacgcggacgtattcgtagttttatttttttaaattcgtattgcgggaaggaattttcgattcgtatcggttttcgtttcgtagtaacggcgatattttgaggttcggacgagcggcgcgttttttttagtttcggttattttttagtacgaagttttagggcgagttcgagacgaagaaagagagttcgaggaattgggatatttacgagtttatcgtttattttgtcggtcggggaggaagtttcggtcggttcgttttcgttcgtcgtgcgtatgcgtttcgcgggtgtttttttaatattgtagcgcggagggttgttttttttacgtcggcgattgtttatcgcgtttttcgttttttttcggttttcggtttttgttttagtttttttttttcggtttttttttttttttgttttgtttttttttcgtttttttattttttttattcggtcgggtaattttacgtttcgtttttttttagcggcggcgtattttatcgtcgcgggtgttaggggtattttcgaggttttacgcggggcgcgatttttatttcggtcgtagttttattgttttagtttcgtattagtaagttttaagagtgtggatgcgaagttaggcgcgcgtagagggcgttcgcgaagttttttgtgttatcgttttttttcggcgcgcggggtcgagcgagattagagtgtgttggattgcgtgttcggatttcgtgaatgaagggagcgggaggaaggagcgggggtgggcggtaggtatggagggggcgtttggtttttagagtttcgcgtttgtggattgcgcgtttttggagggtagttttttatttttttttcggttcggggcgtttttttgagttttgttttcgttttatttcggcgtagtttaggttttcggttttttcgttttggaaagcggttttcgtttttttttagttagttagagcgcggaggttttatttagtaatcgagcgggggataagggggggaattaatttttgattttagatttcgttgagattttcggtagtcgtttttcgcgtttttttttttagggatttcggagttcggggaaaggagtagattagggggtagcgggagggggaatttagtcgtttagtttttcggattcgtagtatcgcgtgttttcgtagttcgtagcgttttttcgggagtgggattcggtggggtcgcggggttagttttttggagttcggagggttaagttgaagttggaaattgatttgatataaaaataatattacgttatttttttttttgtttgtcgagagggtaggggagtgggagagcgagcgttgggagtaggcggaggcgcgtttgggggaggttcggagtaggcggaggagagcgatacgttgagagtttgaaaggtagtttcggggaagagcgagggttttttttcgtttttttggattatggaaaggaaatggtttaggaaaaagtagtttggagtgttttttcgcggggaggggcggtgtttcgggagtcgttaatgtttcgttttaggatttgtttagttacgtttcggttttttcgattttgttattttttttattgttagttttagcggagcgggttagttggggttaggaagaatcgggagaggttggtgttttggggaggttgggtgtggggcgtagtggagattacggtatttatcggtataggcgagttttgtttagcggtggcgtttttttttttgggtttggttatcggatgggggggttttagcggacgatttttcgagggtcggtcgggtagtgttagcgtcgtttcgagtaggagcgagaggcggttcggtagtttttcgtgttttttcgagagtcgggcggtcggtagggcgggaagtaggggggagaagtttaggcgttttcggggagtttcgggagggggtcgtcggagaaggtgagagaagaattttgcgaggttggaaagcgggttagaaaggaggtcgaatagtttcggggcggcgggcga

SEQ ID NO: 7268 - DNA, 2213 bp, synthetic construct
  misc_feature 1..2213: note = Description of Artificial Sequence: Synthetic polynucleotide
  source 1..2213: mol_type = other DNA
cgaaggcgacgggtttaggatttgtagaaatcgttgcggtttggggcggtcggggatttacggttttttggggcggttttgaataggttttggggcgtagcgttcgttttttaaagaagtttgggatcgggttttgtttcgttgtaagttacgtttttcgtgagtttataagtgtaaaattagaaaagaatgtttcgtttaaataattaaagagcggtggttttcgcgggggtagcggaggcggttagtagggttttcgttttcggggagaagtgtttacgatttaagggttgtttgttttaggaattttttaaagaattatagatattgagagtattcggggtttggtaggaagtgtagtgtattttttagttttagggtaattaggatagtatgaattttttattttgtggtagaataaacggttagcgtttcgatgtggcgcgttcgatttttttttatagagtttaaaagttacgtttaattaaattgtagcgttttcgttttagttgggtatcggtttggaagcggtttggaattagattggattcgaggaggtaagatttcggtagcgcgaggttaattataggttttattcgcggtttttagttcggttttatcgtagtcggcggtagatattttaaattttttatacgtcgtttttagcgaggcgtttcggggaaagtagcgtgaggtagtgagtcgaggggcggggttaggaggacgtttcgttttcgagttcgtttcgtcggagggtttgattaatgattttttaagtcgttttagttttcggcgtagttttttcggtgggttaggtttttcgttcgatttgttttagtcggtcggagtatatacgtttggtcgcggggcgttcgtataaaagttatagttagcggaggttggaaatagtcgtcgatttgggtatcggtcggacgaggatggagtgattagcgcggttttggttatataggttttgttttacgtttttcgttcgtttttacgacggagcggagttttatttagtcgttttaggaaaggtgaggggttcgttagacgcgtattgcgtagttttcgggttcggaacggtggcgggtgtcgtatttcgaggtgaggttaagggtttttcgtttttcgggtagaaattttttttggcgtgaaaggtcgagggcggttggtgagtcgtggtttttcgcggcgtcggcgagaaggagtcgcgttatttttcgtgcgtgtcgggttggataaagttatttaagcgcgaacgagtgttgattttgagttgtgttttcgagattttttttttcgggtagagtagattttttgtttaatttgtttttgaaaagtaaagtcggtattgcgtttttttttatttttttaggaagtttaagaatttcggagtttcgtaattttttttagacgttcggaagtaaatcgcgttttaggtaaaacgagttcgtttgagagcgtttttagtttcgttgggttgttggtgggcgtacggggagaattagggggttgcgtttttcgggttaagttcgatcgtttttcggttttatcgtattttcggttttttgtagcgcgcgcggcgcgggaagttgttatggatcgcggtcgtttagcgggtagtttttttagcgttagcgtcgagttcgcgtttttggtcgtcgttattcgcgattcgcgtttcgggcggatcgggtcggggtcggcgggttttgggggcggttcgcgtttcgggagcgggcggtcggcggcggcgaatgcggcgcgggagcgtagtcgggtgtagattttgcggtacgtttttttggagttgtagcgtacgttgtcgttcgtgtcgttcgatattaagttgtttaagttggacgtgttgttgttggttattatttatatcgcgtattttattcgtagtttgtaggacgacgtcgaggcgtcggcggacgtcgggttgggcgttttgcgcggcgatggttatttgtattcggttaaggtaagcgggcggggcgtatcgcggggttggggtcgagattaggatattttgatttgttttgttagttatcgttttgggtagatgttttaattttttttcgggtgaggcgggaagtcgatcgggagaacgatttcggttcgcgagggtattggtggtaaggttttcgtcgcgaaagtcggttttttcgcggtttataggtggttggagaggcgtttaaagtcgg

SEQ ID NO: 7269 - DNA, 363 bp, synthetic construct
  misc_feature 1..363: note = Description of Artificial Sequence: Synthetic polynucleotide
  source 1..363: mol_type = other DNA
cgcgggggttatcgcgttcgcgaacgtagagtttatacgtggattttcgcgtttgtgatgtttcgattcgtttcgggttttcgtatagataatgtcgcgcgtttttttcgtagttatttcgggattcgcgtttcgcgtcgttcggacgtttttttgcgtttgtcggggatatttatcgatattaggaattttagcgtgtttatatagtttcgttcggttttttggagttcgttgagtacgtatacgcgtaggcgaagttgtttttttaggtttttggcgttttcggcgcggttgttttcgcggttgttttcgtttatggtcggcggcggtgcgtagcgcggcgttgttcgtcgtgttgagcgt

SEQ ID NO: 7270 - DNA, 960 bp, synthetic construct
  misc_feature 1..960: note = Description of Artificial Sequence: Synthetic polynucleotide
  source 1..960: mol_type = other DNA
cgtagaaaacgttgtaggggttaggcgttcgagatatttcgcggggtagtgggtattaggtttaggtttcggttgtagagcggaggggcgtcgggtttaggaaaggggttgtgggtgggggtacgggggagattcgaggggtgttgggaagagggtttttttttttagcgttagttttggtgtcgttgtgtattcggagtcgcgcgaagggcgtttttcgattcggaggtataggagcgtttagagaggaaagaaagaaaaagttatcgttggttcgaatttttggaagtcggagtcgggttttttgttttaaatatcgaggtagaattttttttagcgttgtttcggtttttttgttatttattttcggtttgtttttggaagaatcggttttttagtttttcgtcgtcgtagttgtgatataagtaagtgtagtcgcgttgttcggggttcgttagggtttttcgcgttcgttttttatcgtggttcgcggcggtcgcgttttcgtttcgtttcgttcggtcgtttcgtcggtttttgtttttagttgggttgtcgtgacgaggagacgttgttgtgaaattaaatttgattttgagtttttaggcggcggtcgagagttcgcggttgttgatgtttttgggttttatttcggggtaggagggcggcgatcggcgttcgggaagcggttgaggggcgtcgcgatttttagcgagcgtcgttcgagttttagttcgttcgggtagttttcgaggtttagggcgtcgtcgttaggtacgcgaaagttatttggaagggagttgggtgcgcgtaataatggggttttgagtcgtggtcggtaggggagaggtgtagtcgtttaaggttcgtggcgtcgggcgttgtacgtggagggatgtgttaagggtcggtttgttttttttcggggaggtggtaattgattgggacgtcgggggacgg

SEQ ID NO: 7271 - DNA, 1404 bp, synthetic construct
  misc_feature 1..1404: note = Description of Artificial Sequence: Synthetic polynucleotide
  source 1..1404: mol_type = other DNA
cgttcgttttttttaggttcggtgggattagattcgaagttaattttcgttaggcgttaggtgtagattttaggttaggttagagtagtttttgggttttcggatcgggatgttcgttttgtttttttttttggtttcgttcggtttgttatagggggaggtttcggtttcgtatttcgggtagcgaatttcgtcggtcgaggttagtttcgtgcgggggtttttcgcgggatcgatcgttaagcggtattgttcgtttcgggcgttcgttcggttttagacgtaggttttgcggtcgtttcgtgataagtatattgacgggttattgttttttgacgagtgttaaaaagttcgtttgttttgaacgttaatttttaagtgatttttacgaggttttttttttcggttttttcgttgttgtttcgttcgtattcggtttttagtaggtgtttaagaaacgtttagtaaacggtagcgtaggcgagtttgttttgcgcgttggcgcgttttattgtttacggatggcgggcgattttacgggattttcggttcgtaggattttcgttttcgaggttgtttttgggtcgggaggggttattttagaggggcgtttattttcgacggcgggggtcggggcgtcgcgggtaggggagggcgtagtttttaagtagttttagtttggtttagatttcgcgtttagcgagtcggtcggttaggtttatattttttatttgtcgttcgttttaggggaagggttttttcgacgacgttcgagtttttttttttttcggagggtcggaggtcggcgtttattggtcggttttgggcgacgtttcgttttttcgacgttacgggttaatgagcgcgcgttgttagtttattagtcgggttggttgggcggttcgggagttcgagcggtggcggagcggcgagtagcgagtagcgtttgcgggagcggtcggtcggtcgggttttcgcgtttcgtacgttcgtacgtttagcggggttcgtattgagtatgggcgcggcggtcgtgcgttggtatttgtgcgtgttgttggttttgggtatacgcgggcggttggtcgggggtagcgggtttttaggtaagttttcgatcgaggtggggggcggcgggcgcggggggttcgggcggtcgaggcgcggtttcggagggtttttttttcgcggatttcgagttcgtttcgcgcggtttcgcgttttttgtttttttgtaaagtaatttttagggtcggttcggggcgtttttttttcgtagttcgggcggtcggggtttttgagttcggcggggtcgtattaggggtgggtgggtcggggtttcgggaggggaagcgcgagcgcgggagcgaggaagaaaggcggcggttttcggggatttcgcgt

SEQ ID NO: 7272 - DNA, 1247 bp, synthetic construct
  misc_feature 1..1247: note = Description of Artificial Sequence: Synthetic polynucleotide
  source 1..1247: mol_type = other DNA
cggggggtaggtcgcgagagggagaggatttcgggagtagacgaagaagtggagtagttaaagtttgcgttagaagaggttggggattgcgagaggagaggttggggtttgtaggggagcgtagtagtttttagtatcgatttaaattttaaagattcgtggtttttgtttgatttcgagggtcgggaatagacgtttgtttttgtggagagcgatatttaatcgagaaaatggggttgtttcgagttgggttttgcgtttggtttagggcgaggtttttttggtttcgggttggtttttgaggggcgtaaacggtaggtttggcggttggggtcgaggagggagggtattatcgtttcgaggtagtacgtagtttgtagtagaggcgtttgttttaagttgttttttgggggcgtcgtcgtcgtttttttttttcggggtcgttcgtttttaggaaagtggaggcggttggcgaggatcgagagtcggggtcgcgttgcggagggattatattttcgggagttcgagggggattttggcgcggcgggttagtttttgtttttcggttacgggtcggtagcgttcgttttttttcggttagcgtttgcggttcgcgtcgcgcgtatcgttcggtaatttcgcgcgcgtttcgcgggggcgttgcgtttttttgttatatcggcgtatcgcggttttttttttttatattttcggttcgtattattcggttttttttttattttttttattttttttttgttttttttttttatttttttttttttggcgaggggcgggagggggcgtggcggggtcggggtttgtgtggttgggattcggtttttcgtatttcgagttcgttcgaggagtcgggtttcggtcgttgtttagtcgtttcgtgtttcgcgcgttttgcgtcgtcgttatcgttttttggggagacgtagttatttgttcgttatggatatttttagggttttgttttcggtcgttttttttattagttttttgtgggatttgttcggtttttagtaggtttttattttatttttttcgtcgttcgtcgagttgggttttattaagggtatgcgaagtcgtaaggaaggtaagatgtagcgggcgtcgcgcgatagtgacgcgggtcgggagggttaggaattatagtcgcggttttaggacgaatttcgggtttagtagtttcgggcgtaggagtcgttaggtaggggttcgcgcgtggtgttttacga

SEQ ID NO: 7273 - DNA, 1861 bp, synthetic construct
  misc_feature 1..1861: note = Description of Artificial Sequence: Synthetic polynucleotide
  source 1..1861: mol_type = other DNA
cgtttattgggcgacgtggggaaataagttttagttttcgaagcgcgattaaaaggagaaattaagtttttatcgttagggcgggggagggaagttgggtgtcggtaggcgtttcgtcggagacgagatttttttcggttttagaagcgtttcgttagggttagagagggcgagcgtggcgggagggaagtttttgttttttagcggttaggcgattcgaagtcgagcgtcgtgttatacgtatttcgtttcgttttgtttgcggtattttcgtgtaatttttatgaaaatgttttttcgtttttgacgtttcgcggtgtaatttttattttttaacgaggagggggtcgtcgtaggattgggaatttagtggtcggcgttttagtattttcggacgcgtttcgtgttttttttagtatttttttgagggatcgtttattgcgattttacgtagtgtcggttatttcgttttagtcgtagggagtattaaataaaagaatttttgtaaatttttttttttggatattcgcgggttttttaaatttggtttttatttttttagaatttgtatgtagttaaataggaaagttggcgcgggggggatggtgtgcggaggaagggatttcgaagtttttaggttatttttggtttcgaggagcgcgcggagtggagtcgttttttcgcgggttcgatttaggttttttttttttgttattttttttttttcgttttttttagattacgtagtaagattcgtcgagggcgaagaagttgggagtgattttaggggtttttgcggttagattaaatcgtaattttcggtgtttttattttcgcggatcgcggggtaacgttagcgagtagcgtttttttgaggaagggaagagggggaaagggtgatcggacgagcgtatttgttttagcggattttcggtgtatatttggggattgggggttttttaggtggcgtttttttattttttgcgggtttttttcgtagttttaaatattttaaacggcgcgcgtatttttcgtttggtttatttatcgatttcgtcgatacgtaggttattaagtttaaggtgagtaggatttacgcgcgtcgtatattttttagggatcggttgtttttagtcgttgtttgtaattagggtaaaacgaagttttttgtttagcgttcggcgtagttcgcgtatacgaattcggagtagagtatcgtagcgattgcggtttaggttcggggattcgggttcggggttcgggggcgttcgttttttttttttgcgtttgttttcgtcgttcgtagttgcgtttcgggaacgcggcgtttttttatttgttggtttttgtattttcgatacggagttggtgtttcgggaaggttgttttttgaagttttttttgttttgttgtggttttgttttttcgcggatttttttttcgtgtcgaggtttagtttttggttttaaggaataaattcgttggtttgaaagggagttacggtagaagtttaggggtagagcggcgggagcgcgcgattcgcgcggttggagtttcgggggtatttggagagtagcgcgtttaagcggggttattggtttcgcggttgcgtttttttttttttcgcgtcgcgttttttttttcgggttttttttttttttttttttttttttttttttggtttttttttttttgagtttgtttttttgggtttttttgggcgattggggagaggaggcggtagtgtgatttttagataaattcgggagaaatttttataggattatacgtcgattggtagtttcgaggattagtgggcgtcgcggtttcgcgttgtggttgcgtcggttttgtttatcgg

SEQ ID NO: 7274 - DNA, 3044 bp, synthetic construct
  misc_feature 1..3044: note = Description of Artificial Sequence: Synthetic polynucleotide
  source 1..3044: mol_type = other DNA
cgtcgagggggaggggttggaagatggcggcggacgtatatttattcgatcgcgatagagtttaggtttttagttcgcgtcgtcgttcgttgttcgtagttattgtgggtagttttgttttgtttcgcgttgttggtagagtcgtttcgcggaggcgtgggattagggtggcgttcgtattttttgttagcgcgttttcgttcgggttcgtttagggagtatttgtgtacggttatattggattttgtgttttagttattgttttagcgcggcgggaaaggagagggtacgtatagagtttgggtttagttttagtttcgttggggtttcggagttaagatgattagcgaggaaattcggaaaggcgttaaggaaaattatatcgtttaaggttcgttatttttattttagtcggttttggcgtttttttttttcgatatatatttttgtttttagatatttttaaaatagttcgggcggtcggcgttggtcgtagttttcgtggtttgggcgtcgttagcgggagggagggcggcgaattggggcgcgtaggcggtcgtagggtagtgggcgagggggcggagggtagggagagaggcgggaatatggagttaggtttttatttgagtacggattgtttttttttttttttttttttttgtttatttatgacggttaggatgattttttttttttttttcgtgaggtggttgaggttaggtatttcgggttgtagaggcggttgagaggtcgtcgggatgggagttaggcggtttcggggttcgataggagtcgatatgtttggtggagtcgaattattttagggaagcggggaggtaattttattggtagcggcggtatcggcgcggcggttggggtagtttttagcgttgggataaatatatataaattaatggtttttaatttaaggcgatagttttttttttttaagaaaagtagggggaggggagggcgagcgcgtggggaaggagggttgaggagtgcgtttcgggaaatgtttttttttttcgggggcgaagggttgtgaagtgagcggtttaagggaaaggggaattggaggtcgggacgcggagtgcgcggagaggcgggggagggtggtggagtaaggtggcggggatagttaagggtggggtgattggagggagtaggcgggagggcgataggcggatcggggcgcgagtgtgttcggtcgcggttagggtcgggagcgcgcgcgtcgtttcggaggggaaggggtgtttgcgaataagttttcggggaattcgtttcgagcgttcggaggcggagtattgtcggttcgaggggtatttaggcgggagtcgagagggtcgtgaggaagcgaggacggtttttcggagaagtaatttattcgtttcgtcggttgacgtattatagggttttcgcgcgttatagagggagaatttttttaggtatattcgggagcgggtcgcggggtcggaaattttcgcggagattttaattttatttattttattttcggttagagtggagaagcgaaagcggagaagatatgacgggggttagcggcggagagtttcggggttagggtttttcggttgttaacgttcggatttaggcgagtttcgacgtgtagcggggtttggcgtcggtttttttttattacgcgttcggtttagggtcgtttagtcgtcgttatcgtcgtcgttttttgggtcgatggagtcggcgcggaaggttcgcgcgttttgcgtcgtcgtcgtttagtgtcgtcgttagtatttttttcgttttttcgtttttcgggtttatttcgcgggggcggcgttattttttcgttgtttaggttcgggtatcgcgggcgtttcgcgggcggtagtcgtttttttcgagcgcgatttttaggttgggttcggggtcgggcggggagggaggagagattgagcgtgaagggagagggcgttcgagttttcggggacggaagtgtggagaataggagcgtgtgagggggcgttcgaggtgtcgggggcgggggaagagtatgagtaggggtgggggtaggggtgttaggtgtagtaggtagggaggtagaggcggcgagtgggggcgttcgagggatcggggcggggcggggagcgtaagggtggtaaggcgttcgagagttagggttggagttgaaggtgggtgatagggagggggcgtttaggtgttaggatttgaggagaaagagtgcgcgtagcgggagggtttcgaagtgtcggggcgggattttggaaggagggagaacgtgaggagggaggaagggtttttggggtgttagggatgggggttaggaaaggggtagagagttggaggtttataagtggggatagcgggggagggaggttggagcgagtggggaacgtaggtggtgtcgagggcggggatagggcgaggggagcggggcgtgaggaagttgtgggaaatcgcgttggacgttgagaatgtgcggaaggattttgaggggaggacgcgagatagcgcgaggagagacgaggagagttagggttggtcgggagggtgcgaagatgaagcgattattggaggttgtgagggtgaaaggagtaagaatcgtttagagacgggttgggtcggtgttggggttaaaggtttttgtttgttaggttttttttggcgtttattttagaaagaagaggcggagacgcgaagagatcgggttagagttagattttcgaagtacggagatgggtttaatgaaaggacgaggaaagacgagaaattagcggtcggagaacggaggtggtcgtcgtcgttttttgttttgttcggggttgggcgtcgttcggagagttttttcggagggggcggggcggggtcgggtgaatagagttgggcgggttcgttagtttttttaggcgttttgggtaagtaatgtgggtgattgagttcgggtgtgtgtgtttgtgtgtgtgtgtgtgtgtgtgtgtgtgtacgtatataagtgagcgtgtgtgcgtattttatttagttttttatacgcgcgt

SEQ ID NO: 7275 - DNA, 1603 bp, synthetic construct
  misc_feature 1..1603: note = Description of Artificial Sequence: Synthetic polynucleotide
  source 1..1603: mol_type = other DNA
cgatttgatttttgcgagcgtgtttgtttcggaaggtgttttttgattcgtcgtgttttttaagtattatcgggattttcgggtattcgggggtttagggttatgtatttttttgcgcgtttatcgttttgaatttatagttttcgcgttgggaagtgattggcggttttttttagggaggatttcgcgcgttattagggttagatattattcgaattttcgttcggttgagcgttttggcggcgtgagtcggattcgttcgaagttttaggatacgatttgttagttattagttcgcgttcgtagggtagagacgtacggtcgttcgtcgtagaggcgcgaatttttatatttattttttgtttcgtttcgggtttggtgtggttttggtatcgtttaggatcgggattttgacgttttgattttttatcgcgtggggaagttatttttttcgtttcgaggtttcgatcgtttagtttttttgagaagtttttattttggttattaaaagtggtttttaagagtagttttacgttaatcgtataaagtaatgataataataataataagcgtttaaaggagcgggattgttttttcggttggacgatagcgtcggggattcgtagcgtgcgcgggtcggaattaaaaaagtagttcgggagcgcgagggttgagcggggtaagtatgggttgtttttcgtagttttttttttgttcgaggttcgggttggtcgtttgtttgtttatgattgtttagttgttttttcgattgtttaggtaaagtttgagatatttaggggatcgggagcggattttttttagtttcgttatttatttatcgttttttcgtttcgcgtatttcgtttttgggtaataattttattaattttcggtttcgcgcgtaaatttacgtttgatttgtcggggtttgttttgttttcgtcgggatatttcggcggcggttgttgtcgttggggttttcgcggtgttcgcggtcgcggttgtcgttttttcggttttcgtcgtcgtcgtcgtcgtcgtcgtcgttggttaggttcggttcgtcgtcggtcggattttaggtgtttcgggcgttgggttttttcgggagtcgcggatttacgttcggagatgagtaagtaaatgagagaagagagacgggggtatagagagtgtgatagtgaggaggggagggggagaggagagcgacggggggagaatgggaatgtataagcgaacggttagggagagagaaaaggggaaagagaagagaaaaataatacggaaagaaggaagagaaggagggagggacgggagagcgagtagcgaggagagggggagcgcgggggcgtagggcgcgggaggaggagcgcgttcgttcgtttttcgtttcggcgtgcgggacggatatttcggcgtcgtcgtcgtcgtttcgggtcgcgtagtttttgttttgcggcgggaggcggcgaggcgcgcgagggaggggcgcgtcggggttgtggggaggggagattattttattagttaaaggaggattggttgtatttaaatttagttcggatgtaaattacggtttcggttttggtcgggcgaagtgcgg

SEQ ID NO: 7276 - DNA, 1365 bp, synthetic construct
  misc_feature 1..1365: note = Description of Artificial Sequence: Synthetic polynucleotide
  source 1..1365: mol_type = other DNA
cggtttgtatttttatcggaaagtgcgtttgttatattttttcggattatttcgttttttcgagagcgttttgttttttatagttcggaaagaaagaaattttagttgtgaagtgatcgtggagaaagcgtaggaagcgatataattggttagggaggtagagagtgtgagcgggcgtattttttgtttggggatcgcgttcgcgggcggggacggagtattttagtggttgtattcgtcgtttcgcgtttttgtttggcgtcgttaatttcgcggcggtcgttggaattttagagttgttaggcgtttttagtcggtttcggtaaatttttttttagtttacgtgttaattaagcggttcgtttttcgagttcgggatggagtatcgcgtttagggaggtcgcgtcgttcgagacgtgcgtacggtaggtaatttatattaaggtagtcgtagttgcggcgtttgggtatatcgtcgtggattttaaatggtttaagagcgtttttttagttttgcgtttttagtgtttttagagttttttttttttttcggagcgtcggtataacgtattatgtcgttgggtcggagtttagggttcggtagaggttgttaatttattgattataattatttttttttttaattcgttcgtagttgttcgttttggattaagtcgtttcgcggttcgtgttaggtagtgggttcgtttttttttttttttttttttttaaattgggacgtgcgaaggcgtagttgttttttcggggttttttttattttttatatattttgttttcgttttttgttttttaggttcgtggcggagagatgttgatcgcgttgaattgatcggtgcggttcgggggtgagtggcgagtttttttttgagttttttttagtagcgcggtcggcgtcggttttttgggcgaattttttagtttttagattttgagaggcgtttttttttcgttcgatcgtttagatgtagtttcgtttttttttttttgtttttattattttgaattgtatggattatagttattgttaaggtaatcgatggagacgtagtaagcgaggtgggtttttttttgttaaaggtgcgtggtgggttttaggggtggcgtgtggaggcgtttatttacgttttggtttcgggggtttagatggttagggttgtgttttttattttagtttttgcgggtttttagtttttatttttaggattttggagttttataaaatattttgttttttgtattttggaggcgcggggagtcggagcgagacgcgttgggagttcggcgagtcgggcgttaatcgggcgtttagggttaagtcgtgcggttcgtatttatgttcgtcgt

SEQ ID NO: 7277 - DNA, 419 bp, synthetic construct
  misc_feature 1..419: note = Description of Artificial Sequence: Synthetic polynucleotide
  source 1..419: mol_type = other DNA
cgtggcgggcgttgtttattcggcggagtcgagcggcgtgtagaggttataagtgtcgtagttggtgattgggggatttttttcgggaatcgtgtcgggagagcgcgcggtgttggagtcgtatcgggtggtcgaagtagaaggtgagtggcggggagtgggatggggtggaggttttgaatgtaagggtgagagttttggagtttagtagagttggagcgtatattttcgttttttttttttcgttttcgagtattaggcggatatattcgtatttcgaatgttttagtgggcgtagagtttattagaaatggatagtcggatttttcggcgtttgttgggggtatcgttgttaggtgtttggggttcgttttttcggttttgttcgtatagggcgtatttagaggtcgttttttcga

SEQ ID NO: 7278 - DNA, 3675 bp, synthetic construct
  misc_feature 1..3675: note = Description of Artificial Sequence: Synthetic polynucleotide
  source 1..3675: mol_type = other DNA
cgtagcgaggtcggttgcgcggtcgtcgcgtgggtcggagtttagtgttttttggtggcgtcgaggcgggtaggcggttttcggatcgcgcggaggttcgacggttgtgatttaggggtggcgtcgttgttagggcggcgggaggtttgattggggtttcgtcgtgggttgagttacggcgtaattaattattagttgttgggaatttttgtcgttcgttcgcggtgatttattcggtagttaggtttatttgtcgagcgcgggggttttggtttttaaaatgaatttggggagagtgtttgttcggggtagggtttttcgttttttcgttttagggcgttcgtagatttagcgaggatttgacggtttagacgtagtttatagcgcgggttttttttttttggtgggtattcgtgatttttgaaagtggggtgtagagcgttttagttgggaggtttcggtgaattattggggttttagattttttgggttcggggtttttgaggttagggagttcgagtatcgttttagggggcgatttatagaagggattggttttttggagttcgcgagttgttcgagggttaggtttgattttttagttattttttggttagttgttagtttgtcgttaggtaatttttttttatttttattttttttttggttggggttaggagaggaagaggagtttaggggtttttgaggtttgggtttgtttttttggagttttagggttttaggcgggatttaggaagtcgaaggttaaggaaaagtttttcgatagtttaaagggagagggcggggagggggaggaggtaaaggaggttaaaatgggaaggagataaagtttggagagggtttatttggaagtagggaataggtgcgttttagttcgagtttcgtgtttttattttaggtggtttcgagggggttatcgcgtggtttagggttgtatttacggcgtattttgcgtttagttgtggggaattaaagagtgattatatatattaaagagtgattatatatatatatatatatatatatatgtgtgtgtgtgtgtgtgtgtgtgtgtgtgtgtgtgtgtgtgtgtatttttttttttttttttagtaaagtaatagagaggttattgggtcgggggattgcgatgttttttttcgttgttttgattttaaaagtggcggtttatgttgtttttagcgttttttagggaaacgattcgggtttgtaggtgttggtttaagcgggttgtgtcgttgggaggcgagggggtcgaggtagttttcgggattttattattttacgaggttatgtttttggttaatgatacgttttcgcgtcgggtggttaggtggggggtggggggtggggaagatttcgtgaatcgttgttgtcgtttttttgtgtgtttatggttttttttttttttgttttttattttttgtttaatttgtttgaagttgttagtttgttatttttggttgaatttcgttttttttttttaatttcgagttttttaaattttttattcgttagggttgtttgcgtttttggggagcggggttagaaggatttaagaagtcgcgtttatttttttatttttcgttaaaattcgtcggcggtttcgttttcgttttttttttggcggtttaggtcgtttttttcgggtttttttcgcgtgcgttttgcgtcgcgttgggtttgtagcgggagttgttatagtagtttcgttagttggttggggattaggcgggaggtggcgcgttttggaggttgtgggagggagggagggagggaggttcggtttcggcgtagttcggttttcgtttttcgaggttttttcgtcggagcggggttgttaagcgtatatatatatatatatatatacgtatatatatacgcgtatatatatattcgggtttttaacggcgcgtacgtacgtagcgttcggggtagattagcgcggcggtcgtttttcgggacgttcggacgtcggagggtttcgattttcgcgcggtttatgcgttcgcgttcgtttcgttgtttcgcgaggttcgcgggatttttttcgtcgtcgtcgtcgcgttcgtcgttttcggaggagcgggttggtcgatcgttatcgcgtcgtttttcggtcgttttcgaagtcgttttatcgcggtttttgtcgttttggggtcgcgtttcgttttcgcgttttgggggttgagtcgagtaaatttcgcgtatcggtcgacgttcggcggggatttcgttgcgtattcgcgcgttcgggtgggcgttgggcgcgcggatttttggggagcgggttgtttttttcgttgtatttgttcggtttttttttcgtttgtaggggattttagagatatcgttatttcgtaaattttttttttttattatcgagagggggcgaggaggggtaaaaggggaagtaggtttcgttgggcgcgcggatttgtaggttttttgttgggtatcgttattcgcgagttggatttataggggtatcgggtttcgcggtcgtttttcggtcgttttttggtttcggttttcgtttttgcgtttttcgcgggagcggggggcggggtgcggagggtagtaaggttcgcgcggtatttagcggggtcgttttgtatggttttgcgtagtggggcgggttgtttcggtcgggtttggcgtagggtgtcggggttttcggacgtttggtttcggcgttcgagtagttttttgtgtttgttcgttttttcggttgagttcgggttcgcgtcgtttttgtttcgttagtcgtttcgcggtggcggtggttgtggcggttttagcggagggggttttttttagttttttcgtttttcgtttttttgttgttgttgttgttgttgtcgtcgtcgtttataatttggaggcggcggcggcggcggcggaggaggaggcggcggcggtcgtcgggcgttgtagtgggacgcgcgcggttgtgagtttgcgggatatgtttttcgcgtcggttttttgttggcggttatgaagaggtagaacgtgcggattttgttttttatcgtttgtatttttatttatttgttggtgggcgtcgtcgtgttcgacgttttcgagtcggattacgagatgcgcgaggaggagaaatttaaagtcgaggagattcggattaaggggaagtataatattagtagcgaggattatcggtagttggagttggtgattttgtagtcggaatcgtatcgcgtcggcgtttagtggaaattcgtcggttttttttattttgcgattacggttattattattataggtaagggttgggcgcgtcgttgggttttcgcgtttcgggaggagttcggggaggcggttgagcgcgtcgcgtcgggttgggtgtagggcgtcgagggttaaacgtagttttttttgggggttttttcgtagcgtttttttttttttagggagtttttttttcgcggcgttttcgagttttatttttcggggattttattcggtgttttttatcgcgttggtgtttgggtcgggcgtgcgagtttcgagcgagtgtgtttgagtcgggagggcggaggcgttatttttgcgaagagagtggagcgttaagaataattttatagtagatatttatttatttatcgtttcggcgcgggttgggttgcgcgg

SEQ ID NO: 7279 - DNA, 3675 bp, synthetic construct; identical to SEQ ID NO: 7278
  misc_feature 1..3675: note = Description of Artificial Sequence: Synthetic polynucleotide
  source 1..3675: mol_type = other DNA

SEQ ID NO: 7280 - DNA, 3378 bp, synthetic construct
  misc_feature 1..3378: note = Description of Artificial Sequence: Synthetic polynucleotide
  source 1..3378: mol_type = other DNA
cgggtcgggtcggcgaggggggtttcggtcgagacgcgaggcgcgttacgggattcggcggcgggagcggatggcgagcgagcgagcgagcgggcgggcgggcgggcgggagggaggtggcggtcggggttgtttaagatggggtcggagtcgcgggttaggcgcggaggagacggaaggggcgggtagggtcgcgcgggcgcggtgcgggcgttttttttcggtagttagcggtagcgcgtcggtttttcgtttttcgttattgcggtttcgcgtcggtcgtttgggtttggagtttcgcggcgttttcggaggacgggtttcgcgttttacgatttattttcggaggcggggtcgggtcgatcgggggcggaggacgtcgtaggaggttgttcggatttcgggcgtttgttaggttttttttggggttttttatgttaggtttcgcggttgtgttcgtaagcgtagatggtttcgggattcgggttattttgacgtcgtagatttagtacgttgcggatcgggtacgttggatttcgggataagtgcggagggtcgggggttggaagggattcgagagtagagttcgcgtttttattttacggacgcggttatcgaggttcgagaggggtcggagtttgcgggagagggaagggttttcgagggttttataatttggttgcgttttttttttagttcgggattcggatgagtgttgtttgaggtcgaggcgacgaatcgttttttattcgtttttgcgcgggatttcggtaggaataagcgttcgtttttgggatcggaggcggtaaattttaggttcgagttttttagcgtagcgtttattcgcggagtcgcgcgtttttttggcgtatttttgggtttcgcggttcggtttttagtcgtcgggtttttcgggttagttttttgttttttagatcgaggcgtaataagtttgaaagtagcgttaaggagtagttagcgagtcgaagggagggcgtggggcgtcgggcgtttcgggattttcgaacgcgcgtaacgttcgttttcggggatcgggcgcgggcggtaggcgagcgggattgattcggcgggttgcgtatatttttttttaaggtttcgattgtgcgcggacgggggcgcgtttaggaattttcgttttttttttcgtttgtttgattttgttgggtatttaaagtcggattcggcggtatttcggcgtgcgggcgtagagtttcgttgtcgtttacgggagggagcggttcgatttttttcgttgttttttcggtagtcggggtcgtagacgagtggaaggtatgagggttttaggagacgtgatagtcgtttttttagattttatatatcgtatattattttttttttagatagaaaagggatttagtttttttttttttcgttttcgttcgcgcggtttttgttgttttttcgcggcggttttcgtttcgagggggcgtgtgtttgtgtttgtggggagagtatcgagggttttcgtgggtttttaggatggagcgggagagtagattttttagttttttttttaatataaacgataagcggtttttttggggcgggagtgtaggttttttattcgtttatacgtttttttgttttttaattatttcggagttgtagtttaggaatttgcgttttagattcggaggaagaacggggaggtcgcggcggggacgggtgttgaaagagggttggtttagggtttttcgggttttagtttaggcgtttgcgttttaagaaatttagaagtttaaaataaaagtggaaaggggtaaggtgtttagcggtttggggttggggtgttagattaggcgttttttttaggttgtcggggagtggttaagtaggagtcgtcgcggttaggaggagggacgcgggttcggagtcgtagttttcgttaagttttttcggtcgtatcgtttcgcggtgatttttagtttcgtcgttttttttcgaggtcggaggagttttttatttcgtttagggggtcgcggggatttagggagagggtttttggtcgggtttagagtttttagtttttttaggagggggcgggggtcgtgttcgtttttcgaggtagtttcgcgcggttttaagttagcgcggcgacggtggagggtcggcggtttttgtttatcggcgacgcggattcgggagtgttcggcgttcgggagtgttcggcgtttggagcggagacggtatagggtcggtttaaagttgagagcggtttattcgcgcggtttgttcgatttagtggaaaggtagataaggagggaagagttaggcgttcgcgtgggggtggggggcgtaaaaatagtttttcgttcgaagtgggggagagtatttttagggagtttttattgttaatgttaggtttataggcgagggtttttacgagcgagggtttcgagaaggagtttggggtttttttttgtttgtttcgagttttgtgcgtggggggaggacgtttcgggtttttataatgtttgtagggggttttggacgtgattagtaggagggggatacgttcgggggtttttcggagtttgttgcgtttatgtgtggttgttgggggttatggggggtttttttagattttcgttagcgtttgtgtgtgttgggggtatagcgggaacgttttttttagtttgttttgtgtatgtgatgaagaggggtgttaggttgtggtgtgtggatggggaggaggcggcggcgtcgaggagttttttttgcgtttagggtcgttttttttttagtttgtttaatgcgggttcgcggggatttgttatattttatcgttatcgttggagaaggtagggggttgagggggtagggggtgggggtttaaatttttgagttttgagcgtaaaatttcggagttgcgaagttttaaacggcgaagttaggaagtttgggcgttcgtttttttttcgatttttttttattttcgttgcgtttttattcgtcgcgtttttagtttttcgttggagttttttttattttttttagtagtagcggtttcgtcggcgaggattcgattcggcgagttgtaaattttcgcgagcgtttcgcgtcgtcggcggttgagtcgggcgttcgatcggaggtggggggggtttttttagtcgtcgtcgttttcggttcgttttgggtttcgtcgggacgttttttggagagtattcgtcggcgtacgtaggttttttttcgttttttcgcgtttgttggagtttttcgggcgttcggagggttcggatgttcgcgttgcggacgatgttggcgcgcgggttcgggtcgggttaggacgcggcgcggtcgtttgtgttttcggtttttcggtttcgcgttcgt

SEQ ID NO: 7281 - DNA, 1108 bp, synthetic construct
  misc_feature 1..1108: note = Description of Artificial Sequence: Synthetic polynucleotide
  source 1..1108: mol_type = other DNA
cgggggtttcgattttttttaggttcgtttttaattttatattgttattcgttcggcgtttatttattttttttagaggcgtatggatttcgtcggtcgggttaggttacggcggttgcgggttatagcgattttttcgggataggacgggtgcgggttttttttattcgtaggttcgtcggtagttttcgttcgcgtttttgttcggcgtttttttcgtcggttcggtcggggttttatcgcgtcggcgttgagttgggttaagatggcgaaggtggagagtcggttatagaggtagcgcgttcggagggcgtcgaggggtatcgtgcggtagtcgcgttacgattagggttcgagttgcgggggggcggaggaggagggtttgggggcgggcgggatacgggagggagataggcggagcgttagcggcggcggggacgcgggcgtttcggttttcgagcggcggtttcgcgtttcggtttcggtttcggttcgtcgtttcgtatttgcgttcgtagtcgcgcgttcgttcgttcgtcgtcgttaggtttcgcggttcgggcgtttatgtcgcgttttgcgttcgtcgtcgtcgtcgttgagagtcgcggagcgtagttcgagggagcgtcgggcgggggagtcgagcgatcgggggcggggcggggggcgagagttggttcggggttcggtagtcgttcgtttcgcgttttcgtcgtttttagttttttcggggttcgcgttttcggttcgcgcgggaaggagggggaggttcggaggggcgcgtgggcgtacgtggagcggggagggtgcgagtcgggtgtggtttgggggcgcggggcgggttcggagcgcggcgagggttcgtttcggagtttttcggtttcgcggtttagggcgtcggttggagttgacgattttgggatcgttttattttttatatttatttttttcgggttttattatttttggtgtttgcggtttattttttgggatagatatagtttttttcgcggggaggtttgtcgttggaaatttttttttgcggtttgatttagtcgttcgttgtttacgggtcgcgattgtttcgttttttatttgagtacgt

SEQ ID NO: 7282 - DNA, 1700 bp, synthetic construct
  misc_feature 1..1700: note = Description of Artificial Sequence: Synthetic polynucleotide
  source 1..1700: mol_type = other DNA
cgaatatttatacgtatatatatattcgggagcgtacggacgagttgttttttttaaggttatttaaacgttttaattattttcgggcgcgtaagtttaagcgcgggagttaggatttatcgttaagacgttttgggcgaggaattttacggttattgtttttagtagtagttatttgtatgggaaagggaggaagagagacgtgaacgtgcgggttcggtttgttagttttcgagagttatatcgaagggtttatgcgcgcgtgatttacggggattaggtagaaagtcgtttatcgtcgtagggtagggtcggttatcgcgcgttggtttttttttatgttggcggttcgtttattttgggtttcggttagttttatttagtttagaggcgatagataaagcgagtttagcgtaggatgagggaggtagtttatttttatcgtcggtttcggttcgcgagacgcggggatagcgcggtgcgcggttcgtatgtaggggtgatcggagggtcgttttttttacgattcggaaagaaggagagtttttcgttaggtttttgtgggtgttttttggtcgaggagttcggttttcgtttttttattttttttttttttatttttaagtaggagagcgtgtagttttagtttgtataaggcgttttaagtcggtgttttcgggttagggtttgggcgtcgttcgggggtcgtttttatttcgggttcggttttaggggttgttgttcgaacgtattggtttttttagaagtattcgtcggcggtatatcggtagggcggtcggttttgttgggttttttgggcgtcggtttcgggggttcgggcggtttttttcggttttcggtttggattcgcgaacgcgcgggcgcgaggggttgggacgcgggagttttttgagtgcggagcgcggagttttggtgtttcggcgtattgtagttatattttcgggtcgcgcgttttcgtcgttttttattcgcgtcgtagggtttttttttttgaggcgtcgttcgcgtatcgtcgggggggagggggtagcgttaataaattggggagttcggttcgtcgcgtttaggttttcgtttggagtcgtcgtattcgggacggtgcgtagcgttggaagttcggtttttcgagagttagttgttcgtcgcggttttcgtacgtcgggtagtcgtttttcgtcgtttcgggcgcgttattatggggtttcggtttagcgtttggttgttgttgttgttcgtcgtttttttgttttacgaggagtatagtcgggtcgttgcgaaggtgagttttcggttagtttcgttttcggcgtttcgtttcgagtttgggcgtttcgagaggtttttttgttcgcgtttggattcgttcgtttgtttttcgggggtcgcgcgtggtacggttaggtgtattttttgggtcggggttcgttgggggtttttgtaggttacgatcgcgtattggtggatcgagttttttttgttatggtatgggtattggagagttaaggaattttttcggggaagggaggagaaatagttcgcgttgtggcggggtgagggtgtttgggagtcggcgggatttgaattcgcgtcgcgggtatgttcggtagttgggcgtttttattcgtttcgggtgcgcgagggagttgggggttggagggtcgggagcgtttatttcgcgt

SEQ ID NO: 7283 - DNA, 692 bp, synthetic construct
  misc_feature 1..692: note = Description of Artificial Sequence: Synthetic polynucleotide
  source 1..692: mol_type = other DNA
cgattcgcgatcgtatattttgtagagattcggtttcgtttttgtatttttcgtagatttcgttttgtgattatatttttcgttttttataggtattggttcgcggtcgtgtacgtttcgtttttattggtttcgtttcgtgattacgttttcgtaattttgatagattttattttcgaggattttttttaggagtatagtgatttcgtttttatagggttcgtttcgttatattgattttttcgtgtcgttcgcgggattttatttttgttcgtttgtttcggtgtttatggggaagtttggtgttaggggttattagttagtttaatttatcgttcgattggtgggataaggataggttagcgggttataggtcggaagtgagattcgttcggtcgttttgggacgcgggaagatcgaggtttcggtggtttttttttttttcgtttggtttttttaggagaaggagcggttaaggtaggattcgatatcgcggtcgtattcgtttttttttttgttttagagtatagtttgggatttttaggggggagattgaatgagtgttgtcgaggatcggcgagagtttggaacgttcgcgttttcgtaggagaacgaggaggtgacggatagggaacggggagcggtcgttgggtgggacgtttgagattttcgggaaatggtcgggtcgtcga

SEQ ID NO: 7284 - DNA, 1924 bp, synthetic construct
  misc_feature 1..1924: note = Description of Artificial Sequence: Synthetic polynucleotide
  source 1..1924: mol_type = other DNA
cggcggagtaaattgaacgttatttttcgattaaataggagtttcgggtttatttgtttggaagtttttaggcggtttggaggggttcggttttcgggcgcgattcgtaggggttgttttgttcggttcgcggaacggacgtttattcgtcgtagttacgaatttattaacgatattaagtattggtcgggtagattaggcgtcgtggaggcgttttagttttttagtttttcgtaacgacgcgttttaggggtgcgtagtgtttggcgcggtgatcggattcggtcgttttttcgatcgcgtagagcgagaggttatattttggattttaggtcgggtttttgcggttttgggagggaggtttcggacgttttttagatttcgggtttttgtaatttcgaggtcgggttttaaaattacggttttttcgagttatacggagagttcgtggttaagggttaagggcggttttcgattttcgggatcgtttttttgagaaatggttgagagttaagtttagagttgcgtagggaagggagttaaagagttggcgtcgagcgcgaagggtcgggaggcgcggggaggttttttattcgttttattgttttgttcgttaatgacgtcgatgatagcgatagcgtcggtcgagtgttttttttgtttcgggtcgtttaggtatcgggtttttttttagtattcgtagtacgtattgaagaagacgttacggaagttttcgttttttagattcgggggaattaggaaacgcgttcggcgattttcgggtagtagtatcgggttaggtttgttttcggaatcgttgacgttattcgtcgtttttttcgtttgggtttttcgcgggtcgtaggggtggaagttcgatttgggttagggttcggatttttttttttcggtttttgcgtcgtcgttttcggtgttaggacgcgttttgttttcgtcgagatttagacgcgtcgaaagtttcgcgcgggtagtttttcgttttacgtttcgggttgcgcgttttttcgcgaagtttttgtcgagtgcgcgcgacggcgtcgtcggattttttcggatcgcgttttcgcgtacgtttgatcggagtatttcgttttacgggggcgttttgcgcgtttttttttttcggtgcgattttcgtttttttttttttcgcggtttttaggagtttaggtatttttcgacgtcgttgtcggcggaatcgggaatttttttcggggttttttgcgggttcgaagtcgttttttcgaggcggcggagttgggtagtttcgggtttcgcgtcgtttcgcgtcgtttcgcggagtcggagttttttttcggagtttggatatagtttttcgtttcgtcgtcgcgtattggatttcggtagcgtggagtttgttcgggaagttgggttgcgtcggtttggggcgaaggtttaaggggcgcgggggtcgggacgcggggttgtggcgacgatcggttttttgcgaacgtttaggtcggcgggttcggggttataggttgggagtggagttggcggttattggggagtagagaggacgtttaggaataggtgtattagggtttcggcggttgggtcgagggtcgtaagtagaggggatcggcggttgttagtaagttttaagtagatgttttcggcggggtagtcgtattttatagcgtttatttcgcgtatatcgagtatttaaaacgagtaaaatcggtttatacgttggaatgtagtttatgattttaaaattttatttttaggttgtttagattatacggtttcgttttatttatttttattgaataacggtcgttggataatttagagaagtagtagaaattacgagaaaaatagtggagttaaacggcggtaaggatcgataaggttggcggggatattgagtaaacggcgg

SEQ ID NO: 7285 - DNA, 1991 bp, synthetic construct
  misc_feature 1..1991: note = Description of Artificial Sequence: Synthetic polynucleotide
  source 1..1991: mol_type = other DNA
cgtttagtttttatttacggagggcgaagataaaaagcgttttaggcgcgtagggaaatcgcgtaacgttgtgtttattgtagcgatttttttagaaaaataaataaggtttttcgataggttattcgcgtaagtagtagtcggtcgagtttttttttttcgttaatttagtagttagcgttgtcgttttttaagattttttttaatttaagtgtaatttagtaaggagggagagttagagattttggggacgttcgaggaaatcgaatttcgaaattttttgtttttaaggcgcggtcggagatttttgggattttaaagcggagagaattttttaattttttgttagaagagcggggttagagatttttgggatttttttggagtcgaatttttttttttagttttatttcggagggcgggagcgaagattttgaagatttttttagcgtaataaatttttttaattttgttggaacgcgggttttgggatcgcggggaagtttagaggggcgaatttcggaattttttgttttgagagcgggattagggattttagggattcgggagtagagggaattttcgtaatttcgtcgaaatatagggtgagagatcgtggggaatttcgagtcgagcgaagttcgtaattttgttcggcgggcgggattagacgcgttttcggcgtttttagatcggcgatgtagcgtggtcgggagtttaggattttaagcgtcgtcgttgtcggtaagtatcgtcgtatttttttataatttaggattcgtatggtaacggttatgttggggggattttatttaagaaattcgggttttgtcgggagcggtggtttacgtttgtaattttagtattttgggaggtcgaggcgggtggattatttgaggttaggagttcgagatcggtttgattaatatggtgaaattttcgtttttattaaaaatataaaaattagtcgggtatggtggtgtgcgtttgtagttttagttatttgggaggttgaggtaggagaattgtttgaattcgggaagcggaggttgtagtgagttaagatcgcgttattatattgtagtttgggtaatcgagcgagattttatttaaaaaaaaaaaaaaaaaaaaaaattaaggttgaattcgggttttcgtacgttcgtatttatttgcgcggttattacgcgttgtttttcggcgattaggttgtattttttgtattggtagtcgcgttatatgtagaagcgtttgtggtttttgagcggcgaggcgtagtcgtggtttttgtagcgtgcgtatttgggtagtcgcggggattttttgttttcggtatttaggttcgacgtttcggagtcggagtcgttttttttgttgttgttttcggcgttcgagtcgttggtcgtttttattagcgttttagacgttttgttaaagttttcggttttgttttgcggcggtatttcgggggcgtgaggggttttcgacggtgtagagggtttgttgaatgtttcgtcgttgggtatggtgtttttaggagaagtgcgagtattttggttttttttttcgtttggagattgttgcgagggatgaattcgacggatagcgacgtttcggaggaggaggcgtaggagacgtgtgcgttgtagtcggaggcgtagttggagtggcgaggtttgggtacgttacgttcggagtggtggggggttgtgtttttttttttggcgcgcgcgcgatttagaattttcggatattttttagaatattttcgggattgtttgggagggagcgtggttacgtttatcgtttttcgattttagttatcgttttttagttgtttgtaaatttgtatcggttgtaagtatttagggttttgttgtagggtttttgtaagcgtatcgagagatatagagcggtttgggaatcgcgtggtatttttcgtttcgttttcggaggcgttaagattcggttgttaaagtacggtgtatcga

SEQ ID NO: 7286 - DNA, 1667 bp, synthetic construct
  misc_feature 1..1667: note = Description of Artificial Sequence: Synthetic polynucleotide
  source 1..1667: mol_type = other DNA
cgattttatcgtagtgagtgtgcgtacgtgggttttaattttgttttgttttaatttcgttgtttttttgtttaatttgatacgtttcgaattttttaatttgggaaggtatttggcgatattgacgtatagtttcgtcgtttggttgttcggaggcgttttttttgcgggcgcgagtgttattcgcgttgggtttagatttagtcggtttttttcgggagaggaagtttcggtttggcggagagtaggaaggaaagtttcgataggtttacgttttaaaattttgtttttagtttttttaagtggagttgtagttggtatttcgaagttgttttcgcgttcggttaaattttcgtattttagacgtttttatttggtttggcgagttgcgtttgtagagtttcgggttgcggttcggtagtttaacgtagtgcggcggtcgcggttaattcggtagtagggcgcggcggttgcggttgcgacggttgagaggttggcggcggttgcggggcggcgacggcgtttttcggcggcgggggttttggtagagcgcgtagcgagtcggggatgaggttttttaagttttcgttggtttgttgtcggcgtagcgttatttgcgtagttatgattcgttgtcgttcgatgatgaggatgtatttttcgtaggtgtagtttttgaagcggtagtaacgtttgtggtttttgagttaggataggacgttatggttgcggtagcgcgcgtatttgggcgtgcgttgtaggggcgttcgtggcggttgcgatatcgggtcgtttatgtataggtagggggagtcgtagtcgtttatgtttcgggttttcgaatgagttggtagtttggttgcgggagagggttagggagcgttggacggcggggttgcgaggttcgtttaggggcggttttcgggcgacgcggtttttggtttcgtagtttcggtggtcgtgtgtgtttcggggcggtcggaggtgtcgtagtcgtttttttagtttttttcgcgtttatagttcggttttttagtttacgtttagttaacgtcgacgcgggtttttgttttgggcgcgtagtcgggtcggtacgttttttttcgcggaggcgttgcggcggttgtaaggagtcggcgatagttttgattaaggtttgagttagtttttttgtagttttttcgtgagtcggtcggatttaatattttcgtcgtttttttttaatttttttttttttttatcgttattttcgtttttggggtttttgtttttttgtatttttcgttttacgtttttttttttttttgcgtttttcgggtgtttgtattttattttttttgttatttgtagttaggttattttcgcgggggcgttcgcggtttttttttttaagtttttttcgttattttagttcgcggttggagattgcggcgttttagaacgcggcggtgttcgcggggcggagaaggggaggattagcgggagtgagggtgggggtgtttgtaagcgagtgaggtggtcgtttcgtttttttttttttttttttttttagtttagatttggtcgcgttttttcgagtttaaggtcgtttttatttcgatatttggtcgtagaagtttagtttcgggagaattcgaatttacgggagtgttgcggttgtatttcgg

SEQ ID NO: 7287 - DNA, 433 bp, synthetic construct
  misc_feature 1..433: note = Description of Artificial Sequence: Synthetic polynucleotide
  source 1..433: mol_type = other DNA
cggttttttgtagtttcgggcgttttattttgttgaggtcgttttcggttttttttgatttaggttgggcgggaaaggtcgggtcgttttcgtttggtttagatcgttggtttattcggcgggcgcgcgtagttgtatttagcgtagcgttattggttttagtttgtagattgcgtttttttttttagtattgttcgtttaggtttcggagttttacgttttttgattggtcggttgttaggcggtgtgaatattgattggtcgaggtacgttggtagggagtttttcgtttttcgcggtttatatttttttttttgaagcgtttcgttagagttcgtttatcgggttttcggtgtagtcggttcgtttgtttagaatttaaattcgaggtatgacggtgtttgtaagagagaagttattatttatttcgcgg

SEQ ID NO: 7288 - DNA, 896 bp, synthetic construct
  misc_feature 1..896: note = Description of Artificial Sequence: Synthetic polynucleotide
  source 1..896: mol_type = other DNA
cggttttatattttggcgggcggcgtacggagcgtttcggttttcggtattagttagcgtcggagtgggtaggattggagatggtagttttcggtttaggggaagcgggattttacggaagggttgggaagagggtaggaagagggggcgggggcgggaattgtttcgttttttttttttttgtttatttttattggttaagggttttttggttttaatttatttttcgtttttagggcgtcgtttaaagtgtgcggagtaggtgttttgggtggagttataattttgcgcgagtgttttggttgagcgtagcgtttatttattgttcgcgagcgtttatttatttgttcggtcgattgtttagcgaaaggggttttaggtcgggcgtagtcgttattcgggggatcgaggttaggagaggggttaagagcgcggttgatttttgcgggtcggggtaggggacggtggtcgcggttatgtagttttgtgttagggcgtgggggttgcgtttgggtcgcggggtcgggggcggtcgtcgtttggttgggggatcggggtcgtgttgggcgtcgcggagtcgggatagtagtagtggcggcggggatagcgtcgcggttggggtttcgcgttttttggagcgttttttgtttagatacgacgatttcgttcggaggtatatcggttttggggataaagattagagagagatgttgtagattttggggttggcggtaaggatttttattcggtttttcgcggtttttttttcgttttgttcgggttttgtttgcgcggtttttcggtttttattttgagttttgttgcgtttcgcgtggttttcgtattttgggtttcgggtcgtggcgtggaagtaaattcgtgtttttggttttcgt

SEQ ID NO: 7289 - DNA, 1494 bp, synthetic construct
  misc_feature 1..1494: note = Description of Artificial Sequence: Synthetic polynucleotide
  source 1..1494: mol_type = other DNA
cgagcggtttaggagcgagtttaaaatttcgtataggtttgttcggtcgcgttttttgattggttaaggcgcgttcgtcgtttcgtcggtcgtaggcgttacggtagttttagtagtttgggtttcgttatcgttttcgcggtagtttcggtcggcgtaagtgcggcgcgcgttgggggagggggcgcggcggagcgttaggttggcgtcgggttatcgcgggattaagttttttagttacgcgtgagtgtttgtgcgttttgattcgaagtttttcgtcgggtcgttattttagaagagaagatagtgagcgtgggcgaggcgaggtatttagaggtttcggcgatttttgttttttagtttttcgttttttcgcgtcgcggttttgggcgggcgtcgcgagtcgggtaagcggcgtttgagtttcggtttagaggtcgaggcgcgttttcgcgttttgcgcgcgcgtcggcggggaaggtgcgcgggcgttttgggttcggcgtttgggggtgggggtgggggcggggatgggggtgggggtgggggtgggggtaggggtggcggcgggtcgtggggcggtggggcggtgcgtttgttttatttcgcgcggttcggcgtttcgcggaagtcgttgttgtggtttttttaaaaggatggggtttagaagttttttttgttattcgtaagtttttattttttttagtttcgcggtggataattttagattttttagtattttcgttattttttttttttgttttcgttgattaagaggtttaaaagtttttttttttttttgatttagaggggtatagttttggtgtcggggggttgggggtggggtgttagtttgggggttcggagcgtagattaggtttttagggcgcgggagtttgttgtttttttttgtaggggtcgttttcggacgttttattcgtcgttacgtggtttcgggatgtgcgggttgcggtagagagtgggtagtaatgtttttggttttgcgttttcgttttagtcgcggggatttcgaggcgagtcgttaattggtatcggtgtttcgttttttatttttggtatcggcgtttttttaatcgtcgttttcgttggtgggagtacgttggttttgttttttttttagtttttttatttttcgcgttgatgggcgtttttgtttgcgatttggtagttttaggatgtcggatgttattagggaagcgatgtttgggagacgttttgtgttttgcggagttgcgcgtttgttgggtggtgatggtgtatatttttgtttgcgttttttgtagaggtataaaggttgggttatttttgtttgtagttatatggaaattaagcggagattgcgggggaggagaagtggttaggcgtcggcgggaggtagaggtcgtttcgtagttattgggggcgagtgggggtttttggagatttttattgcgcggtgcggtttttgaggtgtttcgtttgggaagatttcgg

SEQ ID NO: 7290 - DNA, 828 bp, synthetic construct
  misc_feature 1..828: note = Description of Artificial Sequence: Synthetic polynucleotide
  source 1..828: mol_type = other DNA
cggaggttacgagttattagttcggacggtgaaatttattttttttttgcgttttacgttcggatgggagaattttagttttttacggcgtatcggggaataattttagagtagtacgcgagtagagtttttagcgtttttacgtttacgtttacgattttttttttaatcgcgcggtataaggaggtatttacgcggagttaatttgatagttttcgtcggggtggaaattcgcggttttttcgtatcggtatttcggatataggtttcgcgtaggcgcgtagtttcggatttcgtttttgtttttgtttttgtttttattttttttgggtattatcggatagtgttttgattcgtagtttaatcgtcggggtgtcgattcgcggggatttatttttttgttttttttttcgcggcggcggcggcgttagttcgttttcgattcgagcgtggcgttttcgcgttggtcgttcggttcgggaaattgttaaattggtcgttattatttacgcgtttgtcggggaagggttcgtcggcgtcgcgttttcgaggtttttgcggcgaatcgcgttacgcgcgatttttggtcgggggcgggaggcggcggcggcggtaggagaagtttaaggttcgagcggttcgtagtttttacgtttgtatttttttattttcgttagttcgatggttcgtttcgcggcgtgtattggagtaagtaggtttcgtttcgagcgcgcgcgttttgggaagtgttgtaagtttggagatttggagtgagtttcgggcgttgttggttcgattgttcgcggtgttttttcggtgaggtcgcgg

SEQ ID NO: 7291 - DNA, 2705 bp, synthetic construct
  misc_feature 1..2705: note = Description of Artificial Sequence: Synthetic polynucleotide
  source 1..2705: mol_type = other DNA
cggggttgttcgtttatttaaatatttttcgttttagtaaaggttgagattcgttagttttgttcggtttgattagggcgtttttttttcgtcgggtggtttgggcggtttcgggttcggcgttttttatttcgttggtttttttacgttcgtcgggttttttaggagtgtattagtatcgagtgtaaggagtcgtttttgttttcggtcgaggtaggggttgtgggttttagtagagaggtaacgggcgaggtcgcggtcgcggagtatacggtggatggcgtcggaggttgttgcgaagtcgcggggatagtgagtttcggttgtagcgcggatacgggcggtagcgtaggcgtgggtttgatgggtatcggtatggtaggtaggttttggtttgtcgagtggtatagggatttgatcgggatttcgaaggttttatatttcgggtttatagggatttcggttgcggttgcggcggtcgcggcggcggttatcgaatttatgacgttaacgtgcggttatacggagttgacgacgttgttaagttggtcgggtacggggtagtttaggtggtgtatgacggacgttaagggtagttttttagtttgtagtacgtttttgtagtttcggttaataatgtttttaatggtaaaggggtgtttgaagtttgacgtggacgttgcggtcgcggcggtagcggcggcggtcgagtttagttcgtagggtgggaattgagataggcgttttacgttgtttatcgcggttgtcgcggtcgtcgtcgtcgtcgtcgttacggtcgtcgttttttgtattttgtcggggtgagacggttgttgaggttgcgattgttggggcggttgttgcgggggttgtgacgggaggtgcggaggcggttgcggagtagtaggcggttgttgatggaaatagtgtattatgtgcggcggcggcgggggcggcggcggcggcggttggggtgggtggtggtgatggtggtggtgtgcggtagcgtggtgatgatggtggtggtgggggtggtggtggtgatgggggtgaaggtgttttttcggatcggcgttcggcgcgtttttggtgtttttcgcgtgtaagtgagtatggtcggcgcgtagtattttgaagcgtttgcgacgtcgtaggaagttgtcgttttcgaatatgttttcgtagtcggggtgtagcgtttagaagttatttttgttaggttggtcgggttttcgcggaattttgatgaagtagtcgttgaaggagaggttgtggcgtaggttgttttgttagcgttgtgtgtgttcgcggtagtaggggaagcgttttatgatgaatttgtagatgtcgtttagcggtagtattttttcggtcgagtgttggattgttatggcggttagcgagatgtaagagtagggcggtttttggtcgttgtacgagttttttttcggtcgcggtatcgttttcggtttttttatcgtttttcggttcgtattggattatagaattttttcgtatttcgtttttggggtttggttgtttttattaatttttattcggtttttttagtttcgttattttgttttttcgttttttaggttttttttgttttttttttttgtttttttcgaattgtttggtgttttcgattttggtttttcgggtttatttagttttcggaagttggtaatttttggtttcgacggttgtcgattggcgcgtatagtcgcgggcggagtgtattaggtttatcgtcgttttttttgcgttttttttcgggtggttaaagattgagtgttggagttggttgtagaggagagtggtaaggggtcgtgttttttttcggtttttttgttttttttaggttcgagggaaatttagattaagatggttgggaggaaggtttgggtagtagagattttggttttttaaatttgagtttgcgtttgttgttttggaggttagtgatagtaggatttttagtgttttggacgtaggtttttggttaggtatttagttagatcgcgttggagtttttttttttttggagtgaaaaattagggtaaggagagagaagattggtttttagggcgtttttttttttttcgaggttcgtagcgtcgtcggggttagaagagacgcgtagttttaggttgtcgttgaggagaaaaaattttggtggtttttgaagcggtagcgttcgtaggttttgttgaggagtgtggggcgtaggattttgggagcgagcggcgggttggagagggcgtttgcgaatgttgggtgagtgttggtcggggaggtttagtcgttcgcgtcgtagttgtcgtttttttttcgggtttgttttgaggaggagaggcgacggtagtggtagcgacgcgtttttttggttgcgttttgtaatggttttcgagacgtcgagattttcgtagttagcgtttcgagattattatatgatcgaggttgagggatttagtcgtcgtcgtcgcgtttgtagttgaagaaggggtaagaaggcgtcgtgtttcgttttcgtttttttttttatttcgtttcgggcgttttttatttatcgcgtttattattcgttcggtagtttttagttatttttcggtgcggcgggtggcgtaggttgttcgtcgggagggggtatagtttcgggtgtatttttcgtagttgcgttttattcgggttattaagtacgg

SEQ ID NO: 7292 - DNA, 704 bp, synthetic construct
  misc_feature 1..704: note = Description of Artificial Sequence: Synthetic polynucleotide
  source 1..704: mol_type = other DNA
cggtaggggtcgtggaagggtagcgttagttaggcgttatgtagttcgcgtatgaagtttagtattttttgggagttgtcgtcggttgatacgaagattatttcgaagggcgcgggtcgtcgcgtttcggttattagcgtcgtatagaagtcgtagagtagcggcgtgaagtcgcggttcggcgcgtatcgggtcgtcgcgaagtatagtgttattattttgttttgtagcgtcgtttcggtttttatcgtcgcgtttttataggttattaggtgtcgttcgtttagaatgttaattatggcgtagatacgtagttatttgagattcgaggatatttgtaggaggatgattatttgcggggaggcggcggcgagcgtcgcggtgtttcgtttttgttcgtattatcgggcgttggattttttaagatttgttttagatgcgtttatattttggttaggtttcgtttgtggttggagtaattgtgttcgcgtcgataatgagatatttagatattagagattttagatatttgggcgatagcgcggtattcgtttttgggagcggggttagttaggtaattttaagtttttaggtttttgtatttttttttaattgcgtttcgtttatatttttgcgtttttttattattgcgtttcgtttatatttttcgtaagttttttaattgcgtttcgtttatatttcgt

SEQ ID NO: 7293 - DNA, 950 bp, synthetic construct
  misc_feature 1..950: note = Description of Artificial Sequence: Synthetic polynucleotide
  source 1..950: mol_type = other DNA
cgtgtaattttaagtagcggtttttcgggtcggggttgcgcggtcgtcgttgtgttggtttttaacggtgggagggtattatttttttgttttgttttcgttttttagaaggttgtttcggggtttttatttttcgtttcgtttcggggatagtggttcgtttgttatgcgcggtagttcgcgtcggggtcggtattagtagcgttcgggcggatgtagcgagtttacggaggggtatgtttttacgtattaagtataatcgttttaggaatgattcggtgatatcggtcgatgattttttttatagtttgtcggtgagcggcggcggaggtaaggtttcggcggcgcgcgcgatttcggcggcggttttttatttggtgttcggcgaggcgttgcgtaaggcgttcgacgatgggttcggtagtttgggttatttgttttataaggtgttttatttgaaattttttagttcgggttttcgcggtttgtcgtcggtcgttcgggagcgggcgggcgcgcggttttcgggtagttgtagcgcgtttagtttggtcgtttcggacggtagtgcgttttcggcgtttcgcgtttcggttatgagcgtcgttaggaagggtcggttcggcgacgagtcgttgtttaggttttttcggggggcgtcgtacgttagcgattaggtgttggggttcggagttatttacgtggttaaggtgggtgcgggcgcgggtcgttttgggggttgggggttttggggttagttcggggtagatttttttattttttgaagttcggggtgcggggcgttttcgcgattgttacgttagaggtaagtaaatgcgtattttttagtaattagttcgtttgatagcggtgaggagggaattataaatgcgtttttttcgtatttattgggaaaaggtttattattcgggtggttcgtttcgtttcgg

SEQ ID NO: 7294 - DNA, 4861 bp, synthetic construct
  misc_feature 1..4861: note = Description of Artificial Sequence: Synthetic polynucleotide
  source 1..4861: mol_type = other DNA
cgcggtttttgtttttttttttttcgattttttcggggttatttaaaagtcgattaagtcgtcggttttttagttgtttttatttttttatcgttttttttttttgtttcgtttgtttttgtgtttttcgttacgttatagttcgttggtttttacgttttttttggtttttttgcgtatatttcggtggcgtttttggtgtttttatattattgtttggaattttgtttggtttacgtcgtttgtttttgtttttttttttatttgtgtcgtttgattttttcgattttcgtttttgggggttttgtttttcgaatttttcggttttttttttttagggcgtgcgtttcgtttagtttttttcggtttcggtcggtcggttttttttacgtggtttttttttttttggtttttttttcgttttttttttttttgggttttttttttcggtttagtttaggggttgggggtggcggcgcggggcggggcggggcggggcggtgacgcggggttggtcgggtaagaggcgcggcggcgtggggagggggcgtagtttcgggttcgatcggtcgagtttcgcgcgtttcgttcgcgttttgcgttttcgttcggtcggtcggcgggggagggggtatgagtcggcgttcgcgcgtcgtttcgagttgcgggtcggtttagagtttcgcgcgggtttcgcgtcggagttaagtcgtcgtcgtcgtcgtcgttaaatcgcgggcgtagtagtgggcgtcgcgatgtagcggtcgggggagtcgggcgtcgcgcgtttcggttcgttcgagggttgcgcggattatcggtcgtatcgttatcgtagttttatgattgaggagatttttacggagttattcgggtttaagggcgtcgcgttcgtagtcgtcgttgtcgcggcgggcgagttgttgaagttcggcgtgtaggcgttgttggcggcgcggtttttttatagttatttgggtacgtgtggcggtcgcggggtcgcgggtcgggtttggcgggagatagcgagttgaatcgcgggggcgtttcgagtttttttcggtatcgaagtagtttcgggaagttgttttgggagcgtaggttttgggatcgtttttcggagttttttaggcgggaggcggagggtgtaagttttaggttttatagaaattaggtttcgtgttcgcgggtcgttcggggagggtgttcgtttttttttttattgttttttttcggtttttagttcggggatttcgagtgagtatttttagtgtaggcgtattgttaggttacggattttcgtgggtggaagcgattttaggttacgggcgtttgggtttcgtcgtagagggatggtcgggagtggtcgcggttgtttaatttagggaagtcggatttttggggaggaggtttgcgttttcgagggttgggtgttgacgcgggtttaagtcggttcggagttttcgggagttttagcgggcgaggaacgcggttttggtcgtagtgcggatttgtttcggttttgttttggggttagaggtttgattgtgagtagttgtttggttgttttttttggttttaggtcggttgggtttttgtagggtttgaacggtttgcgtagatttttttagtttttgtttttttttttaatttggcggggtttgttttgttttgatggtgttgtttttatcgtattttattttcgttttgtttttttttatttcgttttttaatcgtttgtcggtcggtttttttcgttttttttattggggtcggtttgttttttattttttattttttttttacgggttttttgttttatatttatttgcgttttgttttgtttttttcgattttagttaggttaggattcgtattttagtgataggtttgtcggggaagggaggtttttacgttgtagtcgggattttagttttttaagtcgttttttttgtatttttttattttttagtcggtgttttttagtttggagacggtagggttagcgcgttttttttaagtttagttgggattcggttattcggttatttttcgtttttatttgttttgttgttattaattcgtttgaagcgggtatataattattttaggattgaagaaaatggaaatatttgtatggggaagcgtttgaaaatagaaaacgtgaataataatttttaggtttttagggtattttggaattttcgggaagtatttaatttcggtttagatgatttttggttatcgtatggttgttgtgttacgtacggaagagtaaatgtgtacgtttcgtgtatgttttttttttaacgtagtaaggttgatttggttggagtaaacgttatttttttaggattagttgtcgttttttttttggtttttatttttttcgaaagataagatatatttcgagtttttcgtagttgtaaatatgtttattaggaatttcgagattttagaggtagttgaggtttggggaattttaggatagaatacggatagggtcgaggagatatttttttttaaatttggggaacggtaacgttgaggagggtttttatttgcgttatcggcgtcgatcggtagggcgtggaggttttgcgttgggaggtattggttaagcgcgagtattttcgcggtacgtggtgcggtagtttttggggtagaggagcgcggtcgtagtttattcgggtttttatttttttttttcgtagtcgtgttgaaggtcgagtaggcggcggtgtttaagtttttattggcgtcgttgggttgtttagggttgagttttgcgttgttggcggtagggttcgggttgttcggcgtcgcgggtgcgttatatttgtcgttcgagttgtagtttcgcgggaagttggaggcggtaggttttggggagttaggtattaaagttaagaaggggcgtcggagtcgtattgtgtttatcgagttgtagttgatgggtttggagaaacgtttcgagaagtagaagtatttttttacgtcggataggtagggcggtataaggttggggttagcgggttgtgggagtgtggttatttgttttgttgagggtgcgttttgttttttttagaatagattttgttgagtttttgggtttgagttagttgtaggtgaagacgtggtattagaatcggaggatgaagtggaagaaaatagtgagtgtgtttggtggttttttattttttagttttttgggttatgtttcggtgtatgtagagttgtttttttttttttttttattgagattttgtttaatttttcgattttttcggtgtttggtacgtatcggaatttttttagttttttttgttttttgggtaagttaatatttcgttttttttcgcggtatttttaggttttttggtagttttatgttttttaggtcgggtcgttttttaggcggtatttggataaatggtcgttatttttcgggatatttttttattatttttttatatggattttgtattttttagttttatttgggtttaagttttttcgggggtttttagtttacgtgttggtttatttaggtgttggcggtttttcgtgtaggtgttgtagggcggcggtttggagttttttattaagtttaaggggcggtttaagaagaatttaattttaacgagcgagtagtttattgagtaggagcgcgttaaggatgtagagaaatcggcggaggtgtcgggcgagtttagcgataggagtcgcgaggattgagggcggtatacggtgcggggtttgggatgttcgcgttattcgtagtttttttattcggcggaaattcgcgagtcggttttttcgcgtttaagaagtttattttttaagtttttttattatgattttgaatgcggataattggggttaaacgaggaaggatatagatttaaaagttagatttaggttttagcgcgtttttgggttttaatttgggagattcgtatttagttcggcggaagttatagtttttattttgagtttcgtggcgtagagcgttttacgcgtatttacgtttcgtttttcgtttgtatttttatttcgtttggggtttgttttttcggtcggggagtttttaggtatatattcgtttttggacgtcggggatttagcggttgggtttaggttataacggtttgagattgtttcggggtaattcgtcggttcggtttggaggtcgggttttcgatgtcgttggggtttttatttttttttgcgaagacggtgattttttttttaataaaatattttatgatataatcgggttcggtggagtagtttttgaattcgtagggggtgagggtgggggtgggggtgggttcggtaagataagcggaacgcgggtagttgttttttaaattttttttttttcggttttgtcgaaggtagttgtgttttttattattaagttcgggttaggtacggcgggcggttcggtggttgtaggattttaggaatcgtttttattttgggcgtgaggggttagtttgaattttatttttttttttttgttagttagagagtcgttggtaggagcggtttggtcgtatcgcgggtgtttaaaggagcgggagttagaggttcgtcgtagagttcgtttcggaagtggttcggatagagagtcgtttcggttgttgtttcggttttttgggatttgaaggattagttcgtgcggtttttgagatggtttttattaattttttatgaggcggatgggaagtcgaggacgtaaggtttggatagagtttttttattagcgcggtagttcgttcgcgggtttttgtagtagtaatggttttttagagtttttatatttttcgtaggatatttagggcggcggcgt

SEQ ID NO: 7295 - DNA, 999 bp, synthetic construct
  misc_feature 1..999: note = Description of Artificial Sequence: Synthetic polynucleotide
  source 1..999: mol_type = other DNA
cgttgggagtcggggcgcgtttttgtttttcgcgttaggagaattattttcgttttcggagggagttcgttttcgtgagggtcgtttttagtttcggttcgtcgtttgaagatagtagtttcgggaatcgcgacgatagtatcgaattggagattaggaagttttggtggaaaaggttaaggagtggtgtgtacgcggagttcgggattcgggcggggatagagcgggagcgcgggcgtagttcgttagcgtcggcggtagagttttagttagaggttgcgaggggtttaataggtcgttaaaggtgtttttggttagagatgttatagcgcgtatttaggtaggaggtataggggattttttataggggttgcgggagttggcgttttttcgttttaggtcgggagttgagaggggttttagcgtttaggtcgattgcgttttgatcgggagttattgcgtttagcgtagttcgagggcgttgagttcggaggatgcggcgcggggcgggggtttcgggagtaatagagattgggattcgagggttcggttcgcgttgttgtttacgtagcgtttttattttggaaagagtgtttttcgcgcggcgggtcggtttttttagcgcgtatttggggttgtttttgtagggttattttcgtttttagggaggtttacgttcgtcggcgaggaaggatggtgagttttggtttagcgggaaggttggaggaacgtaggttcggaggaaaaagttttttagatttgggttattaacgaaggtttttatagggattattaggatcgggacgtcgtgggtagaggcgttatgttttttgcgttatttttttggggatcgcgcgttagttcgtggtgtagggtcgagttttggggttgtgagcgcgcgtttcgttttcgtgcgttggtggaaagcggggtgttcgtgcgtgcgtttgcgagcgtgtgtcggttgtaatcgtagggagcgtaaataggtcgttacgt

SEQ ID NO: 7296 - DNA, 1750 bp, synthetic construct
  misc_feature 1..1750: note = Description of Artificial Sequence: Synthetic polynucleotide
  source 1..1750: mol_type = other DNA
cgcgtacgtattttagaggttatttagattatgtttcgtcgtttgggcgtttaagttgtagtcgttttttgtgtgtaggtagtagttgtttggtaattttcgagttcgttcgcgtttttagtatcgtagaattagggttaggtgttttagtggttgtagttaagttaggtattttgtttagcggcggttgtataggagtagaatcgagaattcgtcgtttaattttatacggggtgattgtcgagtgtttatgttagcggttttaattttttttaggtggaggagtgggcgggaggtacgatttgggggtttttaggttgggcgcgttggcgatttcgaggtcgattaggttatgtatttttagttcgtttgggtatttaagttgtagtcgttttttgtgtgtaggtagtagtttttaggtaattttcgagttcgttcgtattttttatattttagaattagggttagatgtttttgtggttgcggttaagttaggcggtttgttttgtagtagttgtataggggcgggaatcggtttttagttttattttcggtggttgtagagggtttttggttagaggtttcgagttttggtagaggaggagtcgggtgggggtagggtttggcgggtttttaggttaggggtattcgcgatttagaggtcgtttaggttatgttttattatttgggcgtttagttataggcgttaggtaatttttaagttggttggcgcgtttagtttcgtagaatcggggttagatgtcgttgtggttgcggttaagttaggcggtttgttcgcggcggttgtatcggggtaggaatcgatttttagttttattttcggtggttgcggagagtttttgttagcggttttattttttttcggaggaggagaggagcgggagttacggttaggcgggtttttaggcgggaagggatgcgcgtttgcgatttcgggatgttttgcgcgagtttaggagaattcgtaagttagcggcgtttgcgttcgagttgtagtcgttttttgtcgtttacgcgagttcgagagcggttttcggagttcgggttagcgtcgagttgtaggcgcgcgtttaatcgttttgttgggtttacgcggtttgagaggtcggagcgtttaattgttggtacgcgagtaacggtttagttaagtttattcggtttgagaggtcggaggttgcgagtgtcgttgttgaaggttgtggtggatcgggttggatcgcggattttgagttatatcgcggggttgggggtggattttgggtttgggggtggattgttggtttggtggtggattttggatttaggggtggatagcggggtggggagggggatcgcggatttggaatttggtcggggtggaaaggttacgaggagtcgcggcggtttagtagcgggtggttggcgtttgagaagtcgttattatgaggaaattttttagtttcgggagacgtttgggttaggcgtttttgagttttatggattaagagtacgcgggtcgggggtattatatcggggattgggaattgcggaagatttatagggtggttattaagggcgacgtcgcggaggtggagcgttgtttgattcgtaggtttcgggatttggatgttcgcgatagaaaggataggtagcgggggtttagttcgcggtgggagggggtttttaggttttgtttgttcgtagcgtttgaggcgggggttttggaggtcgtcgggttttggagtcgcga

SEQ ID NO: 7297 - DNA, 391 bp, synthetic construct
  misc_feature 1..391: note = Description of Artificial Sequence: Synthetic polynucleotide
  source 1..391: mol_type = other DNA
cggtgttggagcgaggatgcgtagatcgaggtagggaggcgggggtgcgggaggtttcgcggttgcgcgggcgcgtgttggtggtttcggcggaggtttagtttcggttcgcgttcgcggcgttttcgttgcggttcgagcggtttggttgcgggatttgtgcgtacggatggcgcggtcgtttcggtagtattcgggggtttgggcgtcgttgtttttgttgttattgacggggttcgtcgtttgcgtagttagtttcgcggacgacggtgcgggttcggggggtcggggatttcggggacgcgcgcggggggatacgggcgtcgacgaggcggtgtcgcgttacgattttttttacggtattttcgcgggggagttttacgatttgcgt

SEQ ID NO: 7298 - DNA, 817 bp, synthetic construct
  misc_feature 1..817: note = Description of Artificial Sequence: Synthetic polynucleotide
  source 1..817: mol_type = other DNA
cgcgcgtcgtttttttcggagttttcgagttgttgaggagtttggattgtgtttgtttttagtgttagatgaaagggcgttgaggtttttggtcgttgtttcgcgtttagtttcgcgtacgtttttttgcgagttcggtcgtttagcgttttttttcgttcgagtcgtcgtttgcgtttcggggtagtcgttttgtttttagcgcgatgtggtttcgtttggttttttgttgttggggtttggcgttcgtttcgggttgggcgattttttagtagatgttttcgtcgcgtaattttagttttcgtttttttttcgagatcgcgttcggggttttcgggagtattttcgcgtcgttcgtttttggcgacgaagcggcggggagtagagtggagcggttgggttaggcgtttcggcgacgcgtgcggttgttgcgggagtttagcgagcgtttggagtttgtttttttggtggatgattcgtttagcgtgggcgaagttaattttcgtagcgagtttatgttcgttcgtaagttgttgttcgattttttcgtggtgtttacggttacgcgcgtggttatcgtgattttttcgtttaagaattacgtggtgtcgcgcgtcgattatatttttattcgtcgcgcgcgttagtataagtgcgcgttgtttttttaagagatttttgttattttttatcgaggtggcggtatttatattaagggcgttttttagtaagtcgcggtaaggcgttcgtttttttcgattcgggttttagttttcgggtttttcgatttatcgttgtttgttcgtttttatttcgg

SEQ ID NO: 7299 - DNA, 814 bp, synthetic construct
  misc_feature 1..814: note = Description of Artificial Sequence: Synthetic polynucleotide
  source 1..814: mol_type = other DNA
cggagtacgggttacgtgttttaggtttcgggaattagtttttattggtcgagggttcgcggggtcgttaggagggttttttaggttttttttagggatggagtagttacgtttttcgagtgtgtttattttatcgatggagtaaagtgaggtttttagttcgttcggatgtttttgcgtcgttcgcggggtagttttcgtatagatacgttcgtaagttttcgattcgttcgttattcgcgtttagatattcgcgagtttttggggtcgtagggacggtgtagcgttcgtcgaggcgtttttatttatttgtgattattgtcggagatttttggttttttttcgttcgtagttatatttgtagcgtgaacgcgtttcggggtagttcgaggtcggttcggaggcgtagttgttcgtttcgttcgttgaaatagagcgttcggttcggcgggttcggtttttcggtggcgtttttcgtttttcgttgttgtcgtcgtcgggggacgcgtacggttttttaggtatcgttcggcggcggcggcggcggcggcgaggcgcggcggtcgcgggtcgttcgggtggcgtaggtggtcgggtcggcggcggggcgcgggggtcggtcggttcgcgggttttttcgggttcggcggggacgttcggttagttcgtagtttagcgcggcgtttagtagttttaggtgtagtatttaattttagagtcgtatgttcgacggtttttttcgtttttttttcgtttttgtatcgttattcggagttgttagttttgggagtttcggcgtttcgatttttttcgt

SEQ ID NO: 7300 - DNA, 1429 bp, synthetic construct
  misc_feature 1..1429: note = Description of Artificial Sequence: Synthetic polynucleotide
  source 1..1429: mol_type = other DNA
cgcgagggaaggattattaaatttaaagacgcgcgtgttcgtgtgtttatatagacgtgtgtttcggcgtttgtatacggtcggcgcgtaggtatgcggacgtttatacgaatatataggtatgttttattgacgtatttggggtatttttttttaaagaaagtaaggaatgaaaatttaatttgagagttattagggtttatttggaggtcgtttaaggggtagaaaaaatttgtaatgacgttagagtgtttgtttttggtgtaattttattttcgggagggttggatataatacgtttggaaagttcgaggggttgttttaggatttgggggcggggggtggggtatttagtaatttttgtcgcgggttgtttaagaaacgtggaaatatattttgcgattttttatttttttatatatataggtacgcgatttcgtcgttatttttcggattagtagtttacgtttaacgttgggtcgattttagatatataggtagtcgggattttcgttcggtgcgtttgtttatttatttttttgcgttaggttgggacgcgtttcgtttgtaaaaggtttaaacgtatttttcgtcgcggggcgggatttaggggtttaggtttcggggtttagaggcgggtaattttgttaattttttttagcggcggggaacgtcgcgtaatcgttgagttttgttcgtcgagattaaataagtagaggaataggttgtaaatatatattttgatacgtgagtgatatttacgcggtgcgagaagttgtagttaagggaaaggtaaggggtggggggagcgggtatcgataggtacggaattttcgtaggcgtcggaaacggcggtttttcgattttttttttttttagaaagtggtaacgaatgtttaagtttttcgaatttgttttttgtgggaggtgataggtgaacggaatttaggtttggttattttcgtcgttgtttatttttttattatttgttttttcgtagataagtagattcggcgtataatgaggtagtagtttttagtcggttatcgtgattaatttagaataaaagcgttttttttacgttttttttaataaaggggttattagtttcggcgtttttcgaaggttgcggggttttcggttgtcggttgcggagttgtcgcgcgtaaatttttcggggttttcggggttgtcggcgttacggagtcggggtcgcggagggaggaagcgtaagtcgttcggagaaagtgaggttagattcggcgggggagaggggagggagtcgggcggtcgcggaaggagggtgattgattagtgcgcggtgttcggcgttttgtttcgttattagaggcggttaaagtagggttacgtaataattttagaatcgttaattaattgacgttgtaggtaattattttattgtgcgcgt

SEQ ID NO: 7301 - DNA, 7708 bp, synthetic construct
  misc_feature 1..7708: note = Description of Artificial Sequence: Synthetic polynucleotide
  source 1..7708: mol_type = other DNA
cggaggggaaagcgagtttcggaaataggcgtagtttgtggcgagggttcggtggtcgagttgaatttcggggtttcgggagattcggtttttgcgggggaggtttttttcgaagtcgttattggcgggggagtagagaaaaggggaaagaaggggagtggagaaaaagggaaaggagtcggttttaagtagcgaggtcgaggtcggttagaggtaagggtagggggcggcggcgggggaggtagtcgtggggtttaggtttggtcggcgtttcgaatttttttattttcgtttttagtgttcgggggcgggtcgagattttttaggatcggattcggggaggagcgaggggtcgaggggagggggaggattcgggttttttttttttttttttttttttttttttttaattaggtcgatttaatggagttaaagagttcgtaaaattatgaataatttattcgtgatttgttattaatttatcgggtttcgagtttttgtcgttgggattgaatttgtaattaaatttgatttcgttttattttattaaagacgagattgtaggtttaattgtttaaataatggattggaattaaattagtaattacgtcgttaggtatatatatataaaaagttggggttgggggaggtcgggcgttcggtcggttcgcgcgggattttcgcggtcgcggcgcgtaaatttaggcgtaaagtgcgcggttcgggtttttcgttcgtttttgtcgtcgttttcgtatttttagttcgttggtagtttttttcggggtagggggaggttttcgttttatcggggttcgggttcgaggggttgcgggaagaggtcgttgcggtttcgtttcggaaggatttttcgatttcgcggttcgcggttttgttgtaagtttagcgttcggcgtttcgacggcgttttttttttattcggtttttagttcgtcgttttttagtaaggtgtcgtcgcgtttcggagggattgtttttagagtaagaggttttgtaaggggtcgtcgtggttgggttataggatgtgggatattgttataaataagttcgtgttttcgtggtcggaattttgtacgtatacgtatacgattcgcgttcgtatatttcgttcgcgatcgtattttttagggttttcgttttttagttttagttgtttcgcggtttatattgcggttattttttttttgttagtgcgggaggggagggaagggcggacgttagatttaggaagattgggttgggtttcgagaggtcggggagatgttttttttttttaatttagtttcgggagtttcgaaagagttagtcgtatagttatcgtcggcgtatcgaacgtcgttttttttaggattaggagtttcggttaaggtcggagaggagggtacgggaataaatacgatatatatagagatagagatagagagaaaggacggagagaacggaaaggaaaaaaagagagagggaggttagagagaaagtgagatggttgaatggagggtgttttttgtagaggttaaataaggtttgaaatttagtttttagtttatttcgttggggtaaacggcggttgaatagtaaaaagtagaaataaatttttgtattttttattttttttttgtataattttaaaatcggcgtcgaattttcgtgtttaggaaaataatatagttttttagttattaggtgttttggagtcgagtttcgcgaggtgttttcgagtggaagttgatttatttgataaatagaagcggtttggtgttgggggagtcggtttgaattcggttttgtttttttttggggggtggtaggagaggagggatggaagttttagagagttatatttgtggtagtgtttttagtaaattttaaattcgcgttatcgatcggtttatcgttgttttattatttattaaattgggggttgcgttttttttttagtttcgtatatagggatatacgttttatgattttttaagcgatttcgttggagcgaatattcgttttttatttttttttttatttaatttagattttttaagatgaaaataattgattttttttcgtcgtagtattttttgtatagttttgggtttgtttttgtttttgtttttttttgtttgtgtattagattaaagggaaaaggaagaagaatataaaatttttaaatttaattttgttgtaaacgaaagaaagaaaataattgtatataaattttagttcggaagttcggagagttataaattttttcgggttttgtagatttcgggtagatgttgacggtttatttgtcggaatttagaatttttgtagttgttttgagtagggaggggcgcgggagggggtagagttttttcgggaatggtttggggtttaaagatgtcggaaattcgaattaagttttttattttattttattttattttattttggcgcgaggttaggtttgtttcggtttcgttttcgttcggggggttcgttttcgagggttacggtttttattttagtaggcgttaggaaattcggaggaaaaagttcgggaaaattgagatttgtttttaaaggaggatcgggtcgagtaaaaggaatcgtagtttttgtttttttgagttttttaagttcgagttttttaagtttgtcgtttttgggatattttacgaggttaggtcgtattttaggtcgagttcggcgtttcgggttatagttagtttttttttttgggattttcgtcgttttgtttcgttttttcgttgttttagttttcggtttttagtcgcgttaatttaaaatttgtttggcgttagcgtcgttttgttttttttatttttgttattttttgtttagtaaagtggggtaaaggtttaaattaaaaagttatttttaaaaaaataatttattagagataaggttttgtattcggagtagtaagggattattgtatttttttttttcgttttagtcgaggacgtatagtttggaagtttagggggttaatgttttttttgcgaggtcgttcggtgtttaaggttcgttatttgtttagtatatagagatttaatttagttttcggtcgtcgaggtcgtatatttttttttaattttatgggggcgtttcgtgcgtcgcgtatttattagcgttgtaggtcgttagattcgtatcggggttcgggtttttacgttttttcggtcgttttttttgtatagtgtttacgttattgtagtagggaagatttagagggttggtttttgttgcgtttagtttcgcgtttttggtcgtcgcggttgtagcggtcgtcgttgttacgtcggtatggttgaagtgtgcggggtattcgttttgtagtagcgtttcgaagtgtaagcggtagtagattaggttgttttttatgtcgaagtggtcgttcgtggttagtattttgttatacgtggtgtacgtgaagtagttgaggtgataaattaagtttcgagcgcgtattattattttcgaggtcgagatgtttaggtggtagcgggcgtagcgttgtatagagaagcgtttgtagggattatggagggaggggttgtgggaatatacggttgggtattttttttttttttttttaggtgtcgttgttgttgcggggggtaattttttttttaagacgaataattcggtttttatttggaggatgggggggagagagaattagattttgatttaggtttggttttgttttaaaatagttttttttaatatatttatgtttatagagatttttattttatttagagttttcgtaagttttaggaaagtttttatttgggagtggagggagatatttattatttattttttttttaatttttatttttttttttaaattagcgtttgggaattttattgatttttataatttggaagaaatatagagatagggaaagagagagagatatagacgtagagatagagatagagagaatatatatagattttaattttaaaattggggagaaggagaaatagagaatttggagtttattagtgattttggttttttgattttggttattttttatttttatttttttaaaagatttggaaatgtatttatttttatagttttttttttagttgtgttttattttagtttgggttgtttaggtttgggggtgtttgtttttataatttcggattaatttaagaaattttaaagagagaggggagtaaggattttaatttaagtttttttgtggtttaagtttcgagtaggagggtagtttttgttttttttttggtttttttatttcgtagatttttttaagagttttttaaattgttgttttaaaaggttattatttaatttgtggtggtttggagaatttggggggggagcgggggagttttgagtagtgaatttttttttgggattaaacggaaaggagagggttaaattgtaagattgtgtttgagattggggggaggggttttgaggggtagttgggtgggggggttatttgtagtagttttttttgtagtagatgttatcgtttttgttgaaataggtgagtttcgattttaggttgagtttgtattcgtagtatttgaggtagcgtatgtgttattgtttgtttatcgttagtaggtagtagcggttcgagattttgttttcgtagtcggcgtatagcgcggcgcggttattgttgatggacggtatggtttgcgaagggagggaggcggaagatagtagcgtttgcgttagttagcggttttttcgtcgtcgggaaatcggtatttataattttttttgtggttttggttattttgaacgcggagggggttgttaggatatgcggcgcgtttttttttattttaaaaggtttatttttatttttgggcggtttagaatttaggtttgtttgcgtagttttcgttagttacgggtttaggtcgggtttttggtttaaatggttttggtgtttattttttttttttttagttttttttgtttttttttttaaaatgttcgggttgtgtttagggattaggatagttattttagttaagttttttaagagttttttttaaattgttttttaaatgagttattcgggggataaggtgattattaagttattttttatatagaattttttttggagagatagcggagtttttgggttttagttttagtgatttttggatttttagattagaggttaaggttaggataagttagttaatttttggtttttttgttatacgggttggggtttttttgggttcggggatgaggtaagtggggtgtagggatatttttaaagttcgtgggtgaaggataggtttaatttaaatatttttttatttaaattgattagtagagaaggtttaatcgaagaagcgtttagaggtcgggaggatattggcgtcgttgtttttgttttcggagtagagaagtttttttcgtgttttttattttcgcggttttttaaaggttatttttgggttcgttggtcgggtagtgtttgttcgtttggtttttagggaggtttgaggcgaggaattggttatttggggttgggttcgcggagttaggtgtagagatttaaatggagtttttttcggcgagggttaggtcggagtttgaatttttagttttggtttggttaagtttgattagttaagggtttggggacgcgattaacgataaatgttggtttcgaagatttcggtttttgaaattgcgttgggggttgaggaggattttcgattgtcggaaagttgggagcggtttaagtcggttggagttttaatgtttttagttggttcgtttttttttggcgtcgttcgcggcgtcgttagtaatcggagtcgagaggtggaggagagcgcggggttgtcgatttcggtatcgggtaaggtgagaagggagtcgtttcgggtcgcggatgggatttcgtttttagttcggaagaaacgtttttttttatttttagggtcgagatttcggttttaattttgttttttttttgcgttttagtagtcgggtttttttcgaatcgggagttatcggttttgtattttgatcgaggatttttagtatttagtttcgtgcggtacgaaggacgttttttaaatttcggggagtagaggcgttgattggttcggttttattttagtttttagtttcgattttatagtcgcgcgtttatcgtttcggtgtcgtcgcggtcgatggcggagttgatggcgggagtttcgtttttggttttgcggtttatttcgtcgatgatttcgtgtatttcggggttcgatagattgtggaatagtatcgcggcgggatcggcggggtcgggggcgcggttttttcgagggagggtttgtttttcgttttagttgtttggcgtttttggcgttaacgggttcggtgtatcgttatcgcggtttcggtttcgttcgagttcggttgagtttttaggtcgggtttcgggtttcgggcgttcgcggggtaggacgtttttcgtcgaggcgtaggggtagttatattgcggggcgtttgggcgacggcgttaaagttagggttataagggtacgggataagcggggcggggggagtaggagattaggatagaggtcggcgttcgtcgcgggcgtttttacgtcgcgggtatcgttcgttcggttttagcgttcggggcgtaaagtaagggcgtaaattttgttcgaggcggcgacggttgcggtcggggtttattttgaagtcgttaggtgttcgcggcggtttagttgtttggattttttttttttttggggtgcgtttttagtttaaggcgatttttttgggcgttgagtcggcgattggagtaggggttttttcgaagtttgcgagtcgagtcgagttatcgggagaattgaagaggaggaggaagaggaggaggaggaggcggaggaggaggtggaggaggagaaaaaagaggaggagtagagtgggaggaggagtcgtcggtcgcgggtttagtcgcgcgtaatgttttttaagcgcgcgtttagtttagtttcggttttgtagttcgcgttagcgtaagttttcgcgttttttttatagtcgcgtttgatattacgttttgtcgtcgtgttattggtcgttcggcgttttaggttttggtagcgcgtgtttcgggaaggcgggagatttaagagggaggggagaggtaagaggagtagaggagagtcgagatggtgggagttggtgggcgaggttggagggcgggggtgggggggaggtagggaggagggagagcgcggggtttggagtttttaagatacgaatagttttttgcgatatttttagaaaggaaaattaaattttttattttaagaaggcgtagtaaggggatgttcgttttattgcggttttttttcggtttggagtcgcggttttaggtattcgtttgggaggttcgggaaggtaggtttgtggtagagttgtaagagttttcggtcggtcgttttttatcgagtttcgttttcggttcgggttttgtatagcgggttgtaggcggtcgtgtaagttttttgggtattcggtagagtttgagtggcgagatcggcgagagttgtgattttcggggaggggggttagttagtatatttacgttttaagttcgttagggtttaatttgtagtttagcgtgtagtttttcgtttttttcgg

SEQ ID NO: 7302 - DNA, 3969 bp, synthetic construct
  misc_feature 1..3969: note = Description of Artificial Sequence: Synthetic polynucleotide
  source 1..3969: mol_type = other DNA
cgttttttttgcgagtcgcgcgcgtttgcgatgcgtaggttgttttggatttttcggggattggggggatttttttgggaagttaagggggatattttaagtgtgttttgtaaatcgtattttttgatgtgaaaatcggtatgcgcggtgcggtcgtacggggagagcgcgtgtttgggggtggggggtatcgtttaggaaagcggagttatttcgggcggaaagcgattttcgtagaaagcgtcgcgcgggcgtcgttgcgtgttcgtcgtttatagtcgtagttaaagagacgtaggcggttttacgcggtttggtttatcgtcgtttgtagtgttcgcggcgcggggcgtttcgaggttgggtttatcgtttttttcgcgtttttgaagatttttcgggttttttcgaaggagtattgtttttttttgtattttttttttagggagttcggtcgtagtttttttaggaacgcgttggcgcgtcggcgtcggtgtaggacgtcgtgggtttttttttgggttacgaagattgggaaatgcgagtttcgtgaagcgtttatcgcgtgtttcgtttagtgtttcggagatcgttttacggtttacgcggcgggggtatcgtaggttttcgttcgttttggaggaggggagcggcgttgttcgcgggtttggttgggtgttttttttgtcgtgttttcgggttagttattttcgtcgtttatttttttcggtttggtttttttgttttcgggggttgatttcgagggcgcgttcgggggtacgcgcggaagtcgggtcgaagggggttgcgggcgtcgtcgcgtaaacgtgaggttgcgggtcgatgtcggcgaggagaaggcggcgcggtttcgggtgtcgggtaattttttggggtttacgtgaatcgcgcgtggaaattcgtatagtcgttcgcggaaatttaaatttttcgtttttattcgtatcgcgttttcggcggttagattcgttttttttaggttttcgttttggttcgaggcgcggtttttgttcggttttttcgatagcgagtttcgggttttttcgttagtttttggcggttttgggtttttgtcgtttttttcgttttcgtttggggtttttttgtttttcgcgatttttgagagttttagatttcgcgcggatttttttggggtcggttttgagagtatagtttttcgtcgtagtttttggttttttcgtaatttcgacggttatttgtggataaataggatcgtcgttttgtttatgggaagacggggttggtgagggttagagacgtttagggcgaggtaatttcgtgcgtttagtttcgagtaggtcgttttttaggacgttttatagtcgaggggatcgttattcgggagcgtcgtgagttgtgggtattacgcggtggtggagagtgattttcgtttcggggcggtcgtgttgttcgaatttgttttagttcgcgaggggagacgggtttgggggtaggcgggagagggaggtttcgggaggaggcgagcggggttgagaggacgcgcgggaggggttttggagaggtcgtaggaggcgcgtttcggagggacgatttttgttgggaggacgaggttttaggtggacgttgtgggtcggtgggtaggagttcgagttttgtaggagcggtttaaattggttattgagcgcggaagaagggacggaaggtgagcgttattgggttacgtggggtcgagagaaaggttattgtttgttttttttaaaattagttttatacgtcgacgtttttagagaattggtttggtttggaaggaggttgaggatgtaggcggggatattaaagaatcgggtttaaggaggtgggaatttacggatttcgagtttttataggaggtgttttgggcggtaggagtgggaggggaggtttatgtttttgtagttttcgatatttacgttttcgggatatttacgattttcgggatatttatattttcgggatatttacgtttttcggatatttacgtttttgggatatttatatttttgggatatttacgttttcgggatatttatattttcgggatatttacgttttcgggatatttatattttcgggatattttcgttttcggaatatttatattttcgggatattttcgttttcggaatatttatattttcgggatatttattttttcgggatatttatattttcgggatatttacgttttcgggatatttatatttttgggatatttacgttttcgggatatttacgttttcgggatatttacgttttcgggatattttcgttttcggaatatttatattttcgggatattttcgttttcggaatatttatattttcgggatatttattttttcgggatatttatattttcgggatatttacgttttcgggatatttatatttttgggatatttatattttcgggatattttcgtttttggaatatttatattttcgggatatttacgattttcgggatatttatattttcgggatatttatatttttgggatattttcgtttttggaatatttatattttcgggatatttacgttttcgggatatttatatttttgggatattttcgttttcgggatatttatattttcgggatatttattttttcgggatatttatattttcgggatatttacgttttcgggatatttacgttttcgggatattttcgttttcgggatatttacgtttttgggatattttcgttttcggaatatttatattttcgggatatttattttttcgggatatttatattttcgggatatttatattttcgggatatttatattttcgggatatttatattttcgggatattttcgttttcggaatatttatattttcgggatattttcgttttcggaatatttatattttcgggatatttataattttcgggatatttacgttttcgggatatttatattttcgggatattttcgttttcggaatatttatattttcgggatattttcgttttcggaatatttatattttcgggatatttacgtttttgggatatttatattttcgggatattttcgttttcggaatatttatattttcgggatatttttattttcggaatatttatattttcgggatatttacgttttcgggatatttatattttcgggatattttcgttttcggaatatttatattttcgggatatttttattttcggaatatttatattttcgggatatttacgttttcgggatatttatattttcgggatatttacgtttttgggatatttatatttttgggatattttcgttttcggaatatttacgttttcgggatatttacgttttcgggatatttacgttttcgggatacgtatattttcgggatattttcgttttcggaatatttatattttcgggatatttatattttcgggatatttacgttttcgggatatttatattttcgggatatttacgttttcgggatatttatattttcgggatatttacgttttcgggatatttacgttttcgggatatttacgttttcgggatatttatattttcgggatattttcgttttcgggatatttatattttcgggatatttattttttcgggatatttatattttcgggatattttcgttttcgggatatttatattttcgggatatttattttttcgggatatttatattttcgggatatttacgttttcgggatatttatattttcgggatattttcgttttcgggatatttatattttcgggatatttattttttcgggatatttatattttcgggatattttcgttttcgggatatttatattttcgggatatttacgttttcgggatatttatattttcgggatatttacgttttcgggatatttatatttttgggatatttacgttttcgggatatttatattttcgg

SEQ ID NO: 7303 - DNA, 2490 bp, synthetic construct
  misc_feature 1..2490: note = Description of Artificial Sequence: Synthetic polynucleotide
  source 1..2490: mol_type = other DNA
cgtgaattcgagtttcggttacggtcgttattcgtttttatttatttttacgttgtagtgcgattagttattcgcgtggtattcgttacgatttagttgggtttatagataggagttgtttttttttattgtaggcgggtgatttaaggtttttattgttttatatttgtttagatcgcggggtattcgggtttcgtagttttttggtcgcgttcggggttcggggagtcgggttgcggttggggggtttggaggatgagggcgaagattcgagttggattgcggagagggtgtcggcgcgggtcgggtttggggggaggatacgatcgggttttcgttttcggatatcgtacgcgtcgatatagaggggtcggttttcggttttggcgcggcgggttggcgtagggcggggtggcggttgaggggttcgggttttaggtgcgtttcggagcggtttcggcggcggtgcgggggggaatagggaggtaggatggggggcggggaggcgggaggggggagtcgaggttttcgcgtcgttagtttcgcgttttcgttttttcgttttcggttcgagcggtcgttatcgcgggcgggcggcgttgcgttcgggtgcggtttttcgtcggcggcggcggcgcggtcgagaggtgcgggtttcgcgcgggcgggacgcggggcgttgttcgtaggagcgattaggtgggcgtcgggtcgatcgtagtcgtcgtcgcgttttttttcgcgtttcgggttttggtttttcgcgtttttttttttcggatttcgttttttcgttcgaggtcgttttttcgtttcgggttcggtttttcggagttcgtcgattttcgttcgaggttttttcgttcgacgtttcggtggtagcggcggttcgggttgcgtttttcgttgtcgtcgttgttgcggttttgtttttttcggggagggggtttcggcggttttgcgttttcgggttttcggtttcggcgtcgtcgtttttcgttttttgcggttcgggttttcgtttgggttcgattttgcggggtttcgttttggcgtttgggtttttgttcggtaggttttcgcgcgttttttgttttcgattttcgggttgggcgttttcgtttttaggtttttttttcgtgtttttgtagtttttcggtttcgttttttcggggtttttttcgtttcggcgtttttgtttgtcgtttatcgttgtgtttttggttttgcgttagttttttttgggtttttttttcgggttttcgttgttttttcgagtttttgatttaattttttatttttcgtttttttttttttttttttttttcgtttttttttttttttttttttttttttgtttttttgtttttttttatttttttttgtgtttcgttttcgtcgggttttttttagttgggcgttttagtgtttgtgtttttggtattttcggattggtttcgtgtttgcgttcggtggcgtcggtcgttgtttttcgttagagtttttttttatttttggttttttcggattttgtttttgtttttttcgtttttgtcgggtttttagaatattcgggtcgggcgttttagcgtttttgggttttttggcgtttttttcgcggttgagtttattttttttttttagaatcggggttttgtttttagataaacgaattttaatcgaagcgtatcgaattcgagggttttagatcgggcgcgacggggttcgcgcgggaggagtttttcggacggggcgggagcgtggggtttggtaggggaaggtcgggcgcggggattgtatcggatttatttcgggacgttgcgcggggcgttcggtgggtgtcggcggtagcgtttgggtatagagaggggattacgcgacgggtcggcgatagcggttggggcggcggtcgcggggattttaggttgtcggttttcgtcggttttttttgattcgttgttttttcgtaggcggacgtcgcgggtatggattattcgtacgacgaggatttggacgagttgtgtttcgtgtgcggggataaggtgttcggttattattacggattgtttacgtgtgagagttgtaaggtgagcggcgagcgcgcggtaggggtgcggtagacgggcgttgcggggtttcgttgatttttagttttcgtagggtttttttaagcgtacggtgtagaataataagtattatacgtgtatcgagagttagagttgtaagatcgataagacgtagcgtaagcgttgttttttttgtcgtttttagaaatgtttgacggtggggatgcgtttggaaggtgcgcgtcgcgcgggtttcgatttttgattttttatagtttgagggggtagggggtgggggtgggagaggggttgaggggatagtattattggttttcgcgaaggtttttcgtgcgatattagggtttagtcgttgtaagagaatcgggcgttggcgttgggtgggtttcgggcggggaagggacgt

SEQ ID NO: 7304 - DNA, 5370 bp, synthetic construct
  misc_feature 1..5370: note = Description of Artificial Sequence: Synthetic polynucleotide
  source 1..5370: mol_type = other DNA
cggtcggtttagcgtaggatttcgggataacggatggtaattgggggtcgttcggaggtttttaggattttattagtgttcgttgggttgggttggttcgttttagttttaagacgcgtagttttcggaatttttggagttgttcggtttagtcgcgtatagagtcggcggtagagcgggcgcgggtcgggttcggtagggggttgatcgggttcgagtgtcgggcggtggcggggaaggaggacgagaagcgtttattgttggtagttttgtttgtagtatagttttcgatttcggaagtagtagttggtggtgagggtttgttgatacgtcgcgtattgtaaatatttttcgtgttaggacgattcgttgattcgtattaggaagcggtcggagatgggtcgttggtagttttcgtagacggcgggatgcgggtagtcggagtttgtagcgtatagggcgaaagttcggtcgttagcgtcgttcggtttagtttcggcgtttcggtcgtatcgggtttatagttttcggtttcgagggttcgggtcgttcgggattatcgtttgtcgtttgcgtttttcggatcgtcgcgttaggggtcgggcggtttcggttagttcgttttagttttcgggtttcggcgtggagaggtcgcgggtttcgagttttggttcggcgttgtgtttttttttttttcggagaattcgcgtttcgtgttaagataaatgataacgagtacggcgtagggtggtcggttgggattaagataggcgaggtgaggttggggcgttcgttggttgatacgttttacggtggcgttcgtggttttttattttcgatttttttaaaatttgtggtttgagtgattagggagacgttttttttttagaattttttttattttaggtgattttgcgttttttttaagttcgttaaggtgattgttaggttttttattatttttgttattcgttatttattatatcggagtggtagttttagaatttaagtttggaaaggatggtgggtggcgattggagttgttttgtttttttaggacgtttgtcggaggcgtatttgcggttttttggcgattattttaggagttttgtttttgttttttttttatgttttgtaaatttattttttttattcgttggttttaacgttcgtgtttatagtcggacgacgttttattttacgttcgagattattcgggcgtttcgatttcgtatttatttagtagtatttttagagtggcgggttcggggcgtagggcgtgtttttttattttgatgtcgtttaatattttggcgtagttcgtttgttcgcgagggaagtatttttttagcgattcgggatttgttgttatatttatgggacgcggggcgcgttgcggatttcgtcggtcgggttgttcgttcgtcggttcgtttattcgtttttcgttgtcgcggttttggaatcggggaggcgcggttttcgtagggtaggggttgcgtcggttttcggcgatcgtggagcggcgacgcgttggtttcgggtttcggcgtcgtgcgggcgggtcggggcggttgtagttcgcgtcgcgttttttcggatatttgtagttacgcgcgtcggtttttttgttatttgtttgttagtttcggaattcggcggcggcggttgttgtagacggagtcgcggggaggaggcggcggcggcggtggcggtggcggcggcggtaggcgggggagggggtgggggtgtaggggcggtttcgcgggtcgcggggggggcgcgcggcgtagcggggtttcgggcggggcgtagcgggtcgcggggtttcgggcgcgtttttcgcgttattttagtgttatggtgcgttcgttgagtcgtcgggtttagagttggggttggcggcggagggatacgggtcgttttatttttcgaaattttttgatatttgaatttcgcggtcggtatttttgcgtcgggatgcgtcgtcggttttacgttaaatagtgtcgtttcgttttttcgcgcgtttcggggtttcgcgtttttggttcgcgtttcgcgtcgcgtttggtttcgagtttaggtttcggtttttcggttcggtcgtttcgcgggtttttcgtagaagttttgatcgttttcgaaataaatttttttgttttatttttttgaaaaattgatttgggagttggggagcgaaggttttttttttttttttttgttttttttattattaatattttgtaaagttttagcgttacgaggagtggtttcgagcgaggttagattgcgcggacggtagggagcgcggcggtttcgttaggggacggcgtcggtcgggagtggtcgtttgggaattttcgattgtcggtcgaggtaggtcgcgggggttgagtcggagtttttcgggcggcggcgtttgttcggggtcgtttggttcgcggagagggtcggtttttaggaacgaaggacgggggcgggtagaaggcgaggacggttggttttggattcgtgtaaggggggtttaggtttaggaacggggagtgagtttggagtgtgggtgaggggtttgggaaagtttcgggtttggtagagattgggcgggggattgagtcgatgggaggttggggtttcgggatcgagaatgggggatattgggacgataaggaaggttaggtttgggtttaggcgatcgagagtttagaggataattaaggttggaaaaggggttttcgggtaggggtaggagtagtgggtaagattcgggttttttagggtttgtagtgaggggcgttaggagggagtggtggttttagggtagcggttttgaagaaattaggttggttgttaagatcggggttttttggcgggtcgggtgttcggttaggggtcgttgggacgcgcggattaaggatagtgttttagttagtttgggtaaagtggatttcggtaacgggacgcgaaagttggcgagatggagttgtcgattttcgcgttagtcgggtttggtattcgcgttcggtgcgagaggttatagcgtcggatcggttgtttgcggttcgtggtttttatcgacgcgcggtttatcggggagtaggggggcggttgcggttcggggtagcggcgggttgatttttcgcgattcgttgcggggcggtttcggtttttttcggagcgaggtagcggcgcggagtcgggcgggggcggagggtatggggggcgggttttttgatttcgttggaggcgaaagggcggatcggatttggaatttgcgggaggtttggttagaagtggttttttgcgtcgcggggtttcgcggaggggttcggttttgtggaggattagaggttttcgttttattttatttgcgtgtgtgtcggtgggtatttgtgtgtgtttgtgcgtgtcgggttttcgtttttgcggtttttgttttcgtgtgttttttggttttgtatatacggtatgtgtgtttttgtaattttttagatttttaggggtgaatttgtggatttgtgtttgagttttttgtattcgtgtgtatgtgaatgtgtgggtttttcgtgtttgtgtttggggtgtgtgttcgtattattttatgcgggggtttaagtttttgtgcgtgttttagtttttgtgttgtgtttgcgatttttttttgtatgggtgtttttgttagttttgcgtatttgtgtttattttcggggttttgaatgtttttgtgtgttcgcgtgttttttagtgtgtgtgtgtgtgtgtgtgtttgtgtgtggtggggggttttgtgttttcgtgtatttttaggcgtttttgtgtggttaggtcggggagagtggatagttaatgtggagttttttttttatatttcggttttttttttgtttgatttggaaattttaggtttggattcgcgaagttgggttgggtttgagtcgtttttttcgggtatttggggcgggggcgcggttgttgtagggagaagtcgggcgggtaaggtttcggcgtatagagttagagtttcgaggcgcggagcgcggttcggggtcggcgggcggattaggtattttttgttttttgttggtcgcggtttatttttgtaatcggggttgggcgattgtttgtaggcgagagttttcgttttaggtttagatttttttttttttttttagggtgtatatggtaatattttttcgttataggttttgtatttttaatttttggcgtaaggttttattttttttttattttttttgtgtttggttttttttattttatagtttttttttttttttttttggttgaatgagggtttttgcgatttagttttttaggtttttttaattcgggttggcgtttagtgtcgatttggggtcgttggttgtgtttagaggcgtatttttcggattattcgaaggtttggttttaaggtaggaggatttgtgggaagtatttttttcgtgtcgcgtttggtttgttcgggtgcgtatgtatttttagcgtttttttcgcgtttttgttagttatattttacgttattaaggcggatatagggtggtttgtcgttatgcggttcgcgtttagataggggcgttggttcggtggacgttagagtttggttgttttttttggtttggggtggggttgttgagtttatattttttgggtttttttgtatgtttttttcgttgtttatttattttttttatatatatatatatatatatatatatatatatatatatatatatatatatatatatatatattttttttataggtttcgttttttgttttttgtttttatttttcgtgtttcgtgtttttagttgagttggtcggtttcgggtttttcgtacgtagacgcgtaggggttttagatttttttagtataatcggggttttcgcgtttttttatcgttttttttgtcgaagaagcgaagaagcggtcgattggacggtatagtaggggtcgaggtttagagtcggtttttgttcgtaggcggcgaacggtattttgtttcgttaggtttttgcgggtgtgattcgtgattcgtagattttttcgggcgtttttggtttatgacgcgggggttgttcgttttacgtaggcggtttcgggatgttttttcgtttagattttagcggtagaaatagtttcggattttttttatttgggggaaagattgagtcgggggttcggaattattggaagaagcgagaatggaaagggaggttttggagcgggggtttcggttttttttagtttgcggacgttttagttttattgagtttcgttttagttttttcgtttttttttttagggttttgtatttttttttttgcgttattcgtttttttcgagtacgg

SEQ ID NO: 7305 - DNA, 3120 bp, synthetic construct
  misc_feature 1..3120: note = Description of Artificial Sequence: Synthetic polynucleotide
  source 1..3120: mol_type = other DNA
cggacggatcggcggacgttgcgggttcggtcgggttgataggaattatttgcgttgttttaggtcgtttttcggtttattgtttttttgaattcggtcggttttcgcgggtcgtttgatgtttgtagggttatagattttcgtatataaattatcgtcgcggggttgggggtggggcggaggcgttgaaatttaattcgtagagtttgtttcgtcgtcgtttttttgttttttttttcgttcgttcgacgttttttatttatttttttttaaataaggtttattttttttgttaaaaaaataaagttggtattaagtgtttcgagggagaaagttttttttttatttttgatttggaaggaagggtcggttgtcgattgagtcgggattgtagagggggttttaggagaggacgggcgggaggtgagtttagggtttttggttttatcggttttttttttcgttttcgtttgttcgttttatatttaatggtagcgaattttatggttttcggttatgttttgtttttttattcgttttgttcggaaagggttttttttatcggagttttcggtttttatgttgttagagatggaagtattattttttgttttttttttttttttataaaatagtttttgtttgtcgtttttacgaggtgatattttgtttttagttcgattttttttgcgttcggagtttgggttcggcgcgtaggagattgcgtgtattttggcgttttcgatttttgttagggcgtacggggattttagagcggattttttacgagttttaataggaggttagggagtcgggatattagagataaattttttcgaagttttttttcggttttattgattggagtttttgggttgaaattttacgagttttttatttttatgtttatgaggggagtaaaacggagttttcgggggtacgtaggtttcgtttttgggtgttggttttgtttttggtttttttagtcggtgtagtgattcggaatagcgcggtcgttttttcgacgttcgcggttttttattgcgtcgaggcgagcgttacggttaaagtttaagtttcggcgttcgttgcgtttgtcggagttttgtttgttcgagtaggtagcggggtttaggtacggcggcgacgtcgaagggttagtcggtagatagggttgggtttttgcggttagagcgtcgtaggaaagttttgtaaacggtgggacgagggtggcggcggcggcggcggaggtggcgagaaaggcgttacgggtttggcggagaagagggttttcgtgggggtggaataaaggaatttattttcggaagaaaggggtcgagtatgtagtcgggaatggttaattttggagatttgtaggagtgcgagcgttgcgatattagttttagggatttaacgaaatttgtttcgtcgagggttttagtttggtatttttattcggttttttttttttggttaatttcgttttaatgggggtggtgggtgtgtattcggagtgttattttttttgggaagaggggatagagtaggattcgtgttttcggttagaggaggtaaatatattttattaattttttttttatttattttttagtcgtggggttattgtttttattttttagacgttgttaattaaggtattcgtaaaattattttttttttcgtttttacggtaacgtttcggtttttgaggtttaagcgcgttcggaaacgaaaagcgttagggggttatagggtcggagtttttttttttcgtcgttttcggaaggggtggaggggatacggttgtaaggtgttcggttttttttttgtgtttgatatgaataaggggattaggatggtaagttttcgtcgtttatttcgtgggataaagggtttcgcggtttgagcggtatagtttttgattaaacgatagagttttgttatttagtattattttaggtatttgtgttcgtgatataattttattagaagataaaatcggcgaaattttttttataatgaaaagttatatttaatggtcggattttttttttattttttttttcggagtttgttcgttttttttcgttgttgttggatatggttcgtttataattggtatttaaagtattaagttcgggagaaaaacggggtttagggtttttgtaatttttttaaattgtttttgttcgaaatttttatagatataagtttgttaagagtaaatatttgtggattgatataattatattttttttttgtaaattaaatttaaaaaaaaaaaaataagataaaaaaaaatttgttattcgtcgttttcgggttggggcgtaggagggagggggttggggtcggttttagtattcgcgtcgggaattcggttttcgggtcgtttggttgtttttaggagttgagggatttcgtacgttttttaggcgggaaaagggttttagattttttttcgtaatttttaattttttgtttttttaataaataaatttttcgaatttgttgtttttggttagttcgagggggtcggtaggagggtttggggaggggcgagggttgtgtttaataaggaatgaaaatgttagtttttttcgttagttttattttttttagcgggagtttgtagtggttttaaggagaattattggttttttttggatcgcgtaaggttttatttggcggggtatttcgattttagtttaagagagttttcgagttattaagggttttcgaaacgttgagaagttcgaaagttgttgtagggttttggatttcgggttttagtttagcgcgttttaggatcgaatttttttataaattagttgttgggtgaaagggttgcgttttagaaagggtaggatcgtgtgcgcgtattagagcgcgcggtttttaaattcgggttaaatttttggtgatatcgaaatttattaatcgtcgttggtgttcgcggttcggttgcggagtttaggagtttatgtatggtgttattttatttttagtaaagaatatgttgtacgaatcgtcgagaggtgggtttggaggggtgcgcgggtggaggtcgttgaaagtcgttttattcgcgtgttcggacgtcgaaggaagttttttcgt

SEQ ID NO: 7306 - DNA, 3120 bp, synthetic construct; identical to SEQ ID NO: 7305
  misc_feature 1..3120: note = Description of Artificial Sequence: Synthetic polynucleotide
  source 1..3120: mol_type = other DNA

SEQ ID NO: 7307 - DNA, 7861 bp, synthetic construct
  misc_feature 1..7861: note = Description of Artificial Sequence: Synthetic polynucleotide
  source 1..7861: mol_type = other DNA
cggattttcggtacgggttgggaggagtttagaggcggggtgagttttaggttcgggcggtttagagtttcggtttagggggcgtttaggttaggagtgttcgtcgtttttagttcgggtggaagcggcgacggtcggacgttcgagttttattcgcgattagcgtttttcgtcggtttttgcgtttttttgttttagttcgcgcgtattttttatatgaggttgttgtttttgtagatgtttacgtgtttcggggcgattacgcggtcggtgaaggggtttatttcggttttcgttttgatttacgttttggagaagatgtcgaggttttcgttagggatggagttttgagcgatgattattttcgtaggtagtattaggttggatagtttttgtatttttgcggcggcggggttaggaaaatcggttagagttcgaggtagtcgaggttcggttttttttttttcgtcgggatttcggtttcggttttgtttagattagttaaatttaagtcggttttaaatttagagaagttattcgggtgtggaggaagtcggatgtgcggaggtttaacgattttttttttgtttgtaatttggagatttttcgtgttttggaaagcgagtggtgcgttggggattatttttagaagtgggtttttagttttttcgcgaatttttaaagtattcgtaattttttttattttttgtttcggataagtttaagaattaatgagttaacggtagcgagcggttttatgtatagggaaattgaggttaggttttgtaaggaggtgaaggttaatcggagattttttcgtttagtcggttttcgggagtttattgtgtgtttaggttttgggtattggtagaggagtcgggtcgtgattagcgttggggatagatttcgggttggtaggtgttggaggtgttaaagaagtatcggtagtagttggttaggttttgcgttcgttgtgtgatttcgggcgcgttcgagtttttttttgtttttaggttttggggtgttagggagggcggcgttcgggtttagataaatttcgatgttatttttttgggcggggaggagtcgcggcggtttttagtttttcgagggtttttttgtcgggtatttgcggtagggttggaagcggcgaggcgtataagggcggtttttatgttttataaggtttttttttaagttatttgggaaaatattcggcgagcgggtcggttgaaaggggggggttaaacggtgtttattgcggcgcggcgggtaatttgttacgttgttaaagtgatcgtatttattcggttttattcgaaagaaattgttaattttaaatttattagttttggaagaatgttgtagtagtaaattgtagtttaatgcggaggggatttgtttaaaaggggtcgaggaattttttttataaaaaagggggattagatggttgatatagcgtgaatggaagtggaattagtttttacggtaaattaagagaggaatagaaatcgtaaagggggaaaagagggcgacgcgtagagatgttagagttagggaaagatattgtttgcgggttgatgaatgaggaataagaatttgagatattttaaagaaaagaaatttttttcgttttttttttttttttttcgtttttttcgcggtttttttttttcgttcgttttttttttattttttttttagtttcggttgttttttaaagtttttggtttaagtgggaattttcgtgggttaagtttaagttaattaaatgaatttaaaattttttttttttgagttaattgttattatacgtttagtaaggttgtaaatgtcgggaattcgttagtttaagcgtaggaggggaagggaggggtcggcgggggcgtcggggtcgagcgacggggtcgtcggggtcggtttttgagtcgggtgggttgcggagttgtttggtggttcgcgttttggtttggtttatggggaaattgaggtgtatcgagcgtcgggagagtttaggttggcgcgagtagtagcgaggtcgggtattttagtcgcgtttcgcgtatcgttaggacgggaatgggggtcgtcgggaggagggattgcgtcgggtttcgacggttggatttatcgtcggagaaggattgcgttagtatttcggcggtgaaggttgttttggggttggcgtggtggtttttgttttcgaagagttgtttttcgagtacgttgcgttagcggtcgtataggaagttgtgtaggatgtcggaggtgataatttcggttagcgttagtttcggcgtttttagttcggttttgagtattagggttttagtcgggagtacggagtttattatgggcggttcggagtttttcggcgtcgggggacggtcgggtcgacgggggaggtgggcgggcgagaggggagtttaaggggcgagaggagagcgttgcgatggagaaggaattagagtagggggaggacggagaggaggaggacgtaggagggagcgggaggtgagggggcgattgggaggaaagcgaacgagggggagaggggaagagagatggtgaaatttgtagagatggtaaaggcggcgcggagggtggagagacgcgggtggaggcggaggcgggtgcggggggtgtagggtgggtgagaggcgggtggttgtagggaagcggtagtaaggggtttaggcgcgcgttagtttttcgtatattcggtcggggtcgttttttttttggtaaaattttagcgtttttataggagtcgtagtgatttttttaattggttattaatgattttttgacgtcggaggatagatttgttgtattcggttgggttcgaggagttttcgtcgcgagagcgcgaggggcgggggcgcgcggatcgttttaaatagtatttttttattttttttttttttttttggttttttttttttttttttgttttttttttttttttcgtgggaagcgtagggtagggagggaggtttagtcggttttgaggagaggaggggacggagaaggggagggggtgcggcgaggttttttaggattttagggattaggttagataagaggggacgtttggtttcgggtttcgcgttttttttaggtttgatttatgtttatcggtttggtttagttcggcgtttatttttattttgttgtttcggttggtcggtttagttttgtatcgtttttttttttcggttagagttcgcgttttttttttttttcggttttgtatttttcgggtcgttatagtcgtttcgagttcgcgcgtagttttagttgttacgcggattttttgtttagattgcgttgttgaagtcggcgtttcgttttatacgggtcgcgttaattcggtcgttgtgtacggtcgggtgcgaaattttttcgcgggtttacggggttgtcgaggcggggtcgtagcggtcgtcggggttggggttggtttcggtttgagatagttttatggaaggttaggttttcggtttttgcggggttaggtcgggggtcgagatgggcggataggaatcgttttggtagtttgtttttgggaaaagaattttttacgggatatagggggattgaaaggggtttcgagattttttttaggtgggagtaggcgtgtttgagagcgaagttttttagaaattgtaggtagtttcgcgagaggttttagtgcgggttcggtttgcggttcggtttttcggttttttgttgagttgtaatttcgggaagtcggtggcgttgcggcgtttttttttttttgttttttagtttttttttttttttttgtttttttttttttttttttttttttttttattttttttgtttattattttaggagtagatttgttttgcggcggtttcgaggtatttcggagtttagcgattttttttttcgaagtaggtagttgttgagtttagcggaaggtttcgttttttgtaggtttcgcggttttttagtgttagttttaagtttcggattttaggttttgatatgttgggtgagggagtttattttatttgtcgtatttttggtttttattattagtttataattttagatgtcgttaatagaggtgtttggattttttcggcgtgggttaggtttacggattagttttcgttggattgtgtggattttttagattttttttttagcgcggaggatttgggtggaagaatagcgagttgattttttatgagcgagattttgtttaaacgtttgttggtatagacgtttttttattattcggacgcgttttggttaagagggttttatatttggcgtttagattttagatttttggtttttagtttttgttagtagttttcggtatttttcgttttcgttgggacgtaaagggaggaaggcggcggtagttggtttttagattttgcgttcgggttcgttcgaggttggagtttaaggaagggtatatttggtagaaggtaggatcgttgggtagggcgttagtagagggtagcgttgttgaggagggaggtgggttagggtcgtcgaattttttatttatttttcgacgtagtttgtgggtcgtatcggttttttggttagagttcgagtttgagggggcgtatggagttcgatggtttttgtaggggagttttatcggggtttattttttggtttttgggaagatttaggtggagaggataaagtgttaggagcgagggagacgacgtcggggagcgttgttaggagttaagcgttgcggtagtttttaagtttcgaaagcgattttagtttttttaggatattaaagggggataaggattgttgtgtgttttgtggattgttttttttttttttgggtttcggtgtttttgtttgtgtaatggtttgagttggattttgtgaattgaggtttttttgtttggtttttttttgggtaagattattttattttacgataatttcgaggattttgttttttttagggttacgttttattgcgggaagtttttaggtttgtgtatttttcgtgttggggtgtagcgtttgggttttgaatttcggtttagagttagaggtttggatttcgttggcgtagtgattacgggttcggattgcggttagggagttttatttttttttttcggattcgtaagttcggagagtagtattgggagtcgggtagaagcggagcgtagaacgtttttttagttggtgcgtttaaatttttatcgcgtttatattttgtgtttttagtttagcggtaaaatttatttggattttcgttcggggaaaaaggagttcgtaggtagcgtttagttttaaggtgtattgaaatagggagtaagattttgtgtttatattttttcgggaggagatttcgaggggaaatatttcgggtttttttagcggatgattcgtgttattttgttatttttcgcggggtttaggcgcggaatgtgttcgcgtaaaagtttttttttttcggtcgggtcggagtttttaggtttcgtcgtttttttcgttcgttggtcgttatttggcgatttttttaatatttatgggcgttaatagagaggtttttagtatatcggtttattgtgggcggttcgtaggatttgaataggtttcggtttttttttttcggcgcggtttttcgaggggtcgggttaggagtgaatggtttcgtttttcgtttcgcgtttttttttttttttagggagaatatttttattttttttttcgttgtcgtcgtcgttcgggtttttatttacgcggtttcggtttcgggcggaacgaattaatttgtcgcggtttttcggaggttattttcgtcgttcgggtgttttttttttttgagtttacgggagtggagagagggtcgtcgcggtaggtcgacggttttacggagggatattgaaggggaagtggaggagaagagtaggggcgattcggaggggtggttgggtcggggcgggtaagatagttttagggttcggtagtcgttcggggttggttaatttttagttgttgtttcgtttagggcggagcgtcgaggggaaggaggtcgcggtttaagttcggaggttcgttcgttttttttttgaggtattagcgcgcgttttttcggttcggttgaggtatttatgagaacgggggcgtgtgggatagtttagggtttcgtacgacgttttcgttttcgtcggtgcgtcggggtttagtttcgggagagttaggtttcgatagtgcgttttagggggacgttcggaagggcggtcggtttcgcggtttttgcgttttcgttttggggttcgggtttgggtgcgggggaggggggtgcgagtcggttaggcggggttaaagcgtacgggttttcgttttgttcgtttcgtcggtttttagaggcgtagaaagaagtttattgttcgtcgagaaatatatttttgggggtcgagtgaaagttcgttttttttttgaattttagaagaaagttttttgttttcgtttttcggagggagagatttgttttttttttcgggagtttcgcgcgtttttttttttcgaaatatttgtcgggggaaaatttattttggagggtagatcgcgttcgttttaagtttggcgaatttattaaaaagatattagcggcgggggtaggtttcgcgtaggtatcgatcggtcggaatgagttcgaggaagaaaaggcgaagaatgcgttcgcgtcgcgtttagacgtttattcgtttcgtttagtttttgcgttttagtttcgtatagggagaggggttttcgcgtcgtttcgtattgtttgtgagtttcgcggttcgcggtttagtcgtttttattcgggtttttcggtatagtttttcggtaatttttttttgtcggtgttgcgtttcgttttggttttttttgcgcgtaggttttcggtcgtttttttttttcgttcgttgtcgtcgcgcgtttagtattcgcgttttttttttttttttttttttttttttttttttttttagcgtttttttttttcgttggcgtttcgattttttttttagtttcgtatatttttttcgtttttttttcgtacgtttttttttggttttttgagttttaatttttcgtagtggtttaggaaatttttttttcgcgtggggttcgcgtcgtttttttttttttattttcgtttttcgtaagacggtttagggttttagggcgttttcgtcggcgcgtataaaggcgcggttggttgttaaggcgggtgggggcgaggtcgaaaaaaacggttttaatagacgtgattcggggttaggtttgcgcggggttgtcggcggagtggcggtttcggtttagtgaatggggatagcggtttttttttttattttatttttgtttttttttaatgtaattagtttttaaggttcgggagagataaaggcgcgtttcggggcgtttacgtggagtgcgtaggcgcgaagtcggcgtttcgatcggtaggtgattggtacgcgagtttttttaggcgtttaggggcggaggaggggaagttttttttttgcgtttttcgaatttttttttatcgtttatatttcggtttttaggttagcgatgttagcgttatagtttaggttgattaaggcggcgggaacgacgggagagacgtcggggatattaggagatcgggcggtgggagagatagaggcgtaggtttttggaagtagagggggcgagataggggtcgggggagattgaggtaaggcgatgtcgaggtggagggagtagatgaaaggtcgagtcggagacgtaggggtataaagattcggagatgaaggaagtagagggggagaggtacggttttcgaaagagcgg

SEQ ID NO: 7308 - DNA, 1434 bp, synthetic construct
  misc_feature 1..1434: note = Description of Artificial Sequence: Synthetic polynucleotide
  source 1..1434: mol_type = other DNA
cggtttcgcggcgaggggtttagacgaaggaaacgtcgttttaggggcgcgcgggcggagatggagtggtttaggttgggggagcggggagtagggtcgttatcgttgcgtcggttcgcgacgtttgtttttgttcgttttgtttttcgtcgtttttttgggcgattcgggtttcgcgcggcgttcgtttagttcggggtttcggattgaggagggggaggaggaggaggaggaggagtcgcgttaaggcggtcggcgggcgtatttacgtcggtgttgcggtttagcgtttcgtcgtcggtcgtcgagagtttggtggtgttgaggtttattagcgagggtagcgtttgggatatttagttagtgattatggttatggtgtttagtacgatttcgattttgagtagcggtatcgatatcgcgtttcgagttgtttttagcgttcgtttcgagttggtatcggttttcgcgtttaggcggtttttaggcggcgggtatcgcggcgggtaggggcgtttggttgtgttttcgcgttttttcggttcgtcgtcgttcgttcgtcgtcgtcgtcgtttcgcgcgtttcggttatcgtcgtgtttttttcgggcgttagggaaggtggttaggtggtttttgttcgtcgcgttttgcgtttcgcgtcgttcgttttgcgttttgttttgttcggttgcgttttttcgggttttttcgtcgttatcgggaagcgtcgttcggttttgagcgttgcgcgggttgcgcgcgggggtcgcggtcgggaggcggggttcggtcgggcgggatcgacgtaattcgtttaggaaatgggtggattttttttttcgttcggtttttcgtcgttttttggttgttggtagcgaggtttgtaaattttagttcgtttaggagttgggattagggtgatatgaggagacggatatattattatttttagattataaaatattcggcggcggcgcggggattttagttgggggtacggttcgcggttttttcgtttcggggttttttttatttttacgtcggggtattttttttcgattttcgtagagggttcgttttggggtaaaggttgtcggtagagagacggcgtcgttttgtttattggagttttttttcgcggtgattcgagggttttagttagtttgggtcgtcgtttgaaatttagtaggtagggtaggtttcgaaaagtagttagattcgcgagggtttttagcgttaggggggcgtcggggtatcggtggagagttaaaggcgtttttgcgattttagggtagtcgcggtgttttaaggttttgtttgggaggaagggagttaatcggtatttttgatatttgtatagtaaggcgggggttggggtggtttgtcgtggttcgcggtgcgtagtgagggttttgggagggcgtatattcgg

SEQ ID NO: 7309 - DNA, 5053 bp, synthetic construct
  misc_feature 1..5053: note = Description of Artificial Sequence: Synthetic polynucleotide
  source 1..5053: mol_type = other DNA
cggttcggtattttgcggtttcggtacgtagttttcggcgttatatttattttttttgcgtttcgggttgagttttcgtcgattatttgttgttttcgaggttaaattttagcggcgggaggattttgttgttttttcgatttttttttcgggaattttagtttttttggcgtgtgttttagtttaggtttttgtttttgggtcgtttcggcgtaggaagttgcggggtcgggacgaacgttggcgggaagttttgatttgggtttttttttatcggtgttcgttttcgggtcgggtacgcggggcggtttttgggtatcgtaggtttcggcgtaaaggcgtttagagttcgtagtggttcgggttggttttcgcgattttcggtttcgtttcgtttcgcggtttcgtttttcggtcgtttcgtttttcgttcggttagaggtttcgggttttagggcggttcgcgggcgtagcgtttagtagtattcggagtcgtttggacgtcggttcggggttattgcggggtggcgtcgttgggttcgggaaagttcgggattggagagtggcgacgtcgggcggcgggatttatggaggcgcgcggggagttgggttcggttcgggagtcggcgggaggcgatttgttgttagtattgttggcgcggagggcggatttgcgtcgaggtgggtgttcgggtcgagtggttgtatcggggagattaggagatttttaggttttttcgggtttggtcgcggaggttggtaggagttagaggatttgggcgggagtgggcgcgaggatttcggaacgttcgcgtttgggcgttttagtttgtatttgttgtagggtttttggtttgggttgttagggagtgagtgaggttgtggtattgcgttgtttcggttagggagttttcgggggtttagggtgggtttaggagatttttgtagttcggagttagttttttgggttggaggaggcgtagggagtagtggcggggtagtgattacgggataggagggtttttaagaaggtcgttttagtcggattttttttacgttttagcggaatagagttagatgtaggggttaaggtcgagttgaatttcgatcgtcggttttttcgaagttaggttttagcgtttgcgtttatagatattcgttcggtttattttcgtttagggttcgtttgtaggaaaaagttttttttttttaggttttttagttttttggtggtattattttagtttttagtattttggtttttagggaatttgggtagtttttttcgattttcgggttagttggagtcgtaggatggggaaggaggtttcggagttagtggggagtgagagggatcggtcggcgggaagggggttatatttaggttgtgggggttcgcggttttttatttatttatttatttttcgacggtttttgggaggggttggtcgcgggggttggggggcggagagagggagggaggaaggaggattgcgcgttcgcgttcgggagagttggtcggagcgggcgggttggcgtttaggtttcgtcgatttcgttatttttgatataggagttttcgttagggttggagtcgttatgtagcgtaaggttggggtcgcgggcgcggcgcggggtgggttggggcggtttttgttcgacgcgggcgtcggcggcgagttgcggtcgaggcgttgttcggttcgcggtgttgaattcgcgttgtgtcggtttgtcgggtcgtttcgtttcgagtcgggttttcgtttgcgatcgttgtttacgatggggatttcgggcgcgtagcgggttttcgacgtttcgtattcggagttgcggttttgtcggatgcggggcgtatttatcgtcggtttttcgttattgcgtggggaggcgtagtttagtttttttcgtcggaggtcgagggagtttttttttggtgttttttatttattgggagatgggttggagtcggcggggtttatagttagggaggcgggtgtaatatgttagtaaatttcggtttttttagcgggtattttttttttttagagattttttttaagtgaagagggagtttttagtttttgatatttggaaaattcgtttatagattcgaggtttttatagggtatttttggatttttttagtgtggtttttttagggggtttgtagtatcgaagtggggtgtggggggtagaagtagcgggaagttagacgtttgagtaattttgacggtgttgggggtatttacgtttgatataaaggtagtggatcggtttgtttagtttatttataagtaattttgcggttgtttaatgatggggaaggtattgatatttatttcggaggtttgtagatagggttattaggtagggtagttatatttgcgaggagtttttagaaagagtggttatgacgtttaatatgaaggagattcgatggggtgttttagttttaggtgatggtgaagattcgtttttttatgttttttgtcgggttttagagagtagatttttttggggtggggtttttatttgagttttatatgtattttttttggtattggtaatattttgtaattgagtatttagtttcgtgaaatggtttgggttgtttttttgtttatatatatttttagatcgatgttagtttttttttagtttttgatataggatgcggtgtttgtatattttcggaatttgcggggttatttaagttggttggggaagagggtgtgtagggaaaggaggatttttcggtagttttgagttttgtgggtcggaggggagattggttcgcgttggggtgggaaggtggttttattgttttttggtttacgaggtgatttagaattttttcgtgtttatagagatttcgttgtgcgttggttgtgattagtatattttggatcgttttatttttaaggttttggatcgttattggtatagtaagtgttttaagtgtagcgattgttatacgttattggtcgagcgttgttttagtcgaggggagagcgtttattgtaaggacgatttttttaagtgagtttcgaaattttattttagtgtgggagcggagggtacgtttgttttagggatttttttttttataattattaaggttaggttttcgaagtttgcgtttttcgtaattttagtttatttttgttatttaggtagggtattttgtggtttggttaaattaagggtggggtttttttatgggtgttttttgggtggttgggtttggttgggatattagtaagtattatttggaaaaaaaagtaatttattatttaaattatagaagtagttattagagaagatatatttttatttgtaggattttattggatttagttttttcgaaattggtgatgttttagtttttaatgttggtatttagcggttttggtttagtggtttttatggttttagttgtggggtgtgagggattggttttagatgggtttttttttttcggatttatttttttagatttagtatgggttttgtaggtaatggcggttgggtttttcgaggtttttttgagattgaggttttttttttagtgggagtgggtagttttgtttcggcggttaggttggcgattattttgtagggtcggatagagttttttttcggggtcgtttttttaggtagtcgtttgtttttttttaattcgttcggggcgaaatgagtttcgcgttttcgcgttgagttcggttttgtgcgtttcgtaggcgtttcgggattaagtgcgtcgcgtgttagttgggtatttcgtttacgtaggtggtgcgtcgcgtttaggatttcgtgtattatttgtattgttttgtttgcgtcgtgtgtaagcggtagttggttacgggcgacgagttttattttatggaggatagtcggttcgtgtgtaaggcggattacgaaatcgttaagtagcgaggttagtcgaggggacgacgtttttattttttttggtttgaaaaaaatggggttgaggttacgtttaggggggcgttcggggaaattttttttttaagcgtttattaagggggtttgggttagggcggtgtaggtagtaggaagtcgaggtcgggaacggcggagttacggatagattcgcgtttcgaatcgtttcgttcggttcgaagtgtgcggtttttcgtttttggtcggaattatcgttttaaatttttggtcgcgaaggttgggttatatttatatttttagaataaaggggagttcgcggggaaattagggtgtttggagaagggagttaaggttgaaggcgggggcgtcgtggaggtgcgattttagggaaggcgtcgttttcgttttcgcggtagaattcgtttttcgtcggcgttttttttattttagttcgggtgttgttcgtttttgttaatcgtttttagcgttcgcgtttttcgagaagtttgtggggcgggatgggggtgggtatttgaggtttcgacgttttcgcgtcggtcggggtgggagggttgggggttcggtcggggtcggaggggttgtcgcgttttatcgttcgttcgtcgcgtagaggtcgaggttacggttaagcggtcgcgtacgattattatcgttaagtagttggagacgttgaagagcgtttataatatttcgtttaagtcggcgcgttacgtgcgcgagtagttttcgttcgagacgggtttggatatgcgcgtggtgtaggttagcgttcgtttttgtttttttttcgttcgcggttttgggggttttcgtagagtcgggcggtcgtttatttcgtttcgtttttaggtttggttttagaatcgtcgggttaaggagaagaggttgaagaaggacgtcggtcggtagcgttgggggtagtattttcgtaatatgaagcgttttcgcggcggttttaagtcggataaggatagcgtttaggaggggtaggatagcgacgttgaggttttttttttcggtaggcggagggatcgcggagttcggggggggacgagcgcgcgtcggcggggtcgtaggggttttagggagttcgcgg

SEQ ID NO: 7310 - DNA, 6343 bp, synthetic construct
  misc_feature 1..6343: note = Description of Artificial Sequence: Synthetic polynucleotide
  source 1..6343: mol_type = other DNA
cggtagggcgggacggggttgcggtttattatggaatagtcgtatacgtgaatttttttgttttgattttggtgggagatgcgttcgtcgtttagatatttatagtcgtagttttgtttttgtatgtcgttcgatattttgtcgtagatgttcgttgggatgggagggcggttttaggacgtgttttggtcgtttttggaggtcgcgggaggaatttttagtcgaaggggtttgaaattttagttttgaatagttttttttttaggagagacgaagttttttgaggttgggatagggatgaatgagcgaaggagggtggaatcggggagggcgcgggaattgggagattgttggggagggtgttaggtcgtgttacgtttttttcgtttaggattttagtttgggttaaatttagtaggggtaggattcggagtagagcgtagttcgttacggttcgtagtttcgttttcgtttcgttagtttcgtttttgtttcgttagtttcgttttcgtttcgttagtttcgttttcgtttcgttaggcgtgtttttggtatgttcgtaggtttcgtttttattatggtatttagtttatttgtagtcgcgtacgatttttttgttttttgtagtcggagtttcggagcggggagtcgagtggattcggattagtatatatttgaagacgtcgtcggagtcgatgtttatattaggaatgagagcgaggttcgttatcgttatgttttttttttcggagttttttttttttattcgattcgggggtcgtttgtattgcgggaggcgggttttgcgagagcgacgattaatttcgtcggggaatgttttttaaggtttagcgttttagttaattgtatcgtcgatcgaggtacgtgttgattaatcgtaatttagttttttgtcgttttgcggtttcgttagtttcgtttaaaggaaacgtggaatcgggaatgggtggtgatgaaatttagttaacggagaagtttttttttagcggggttcggtggtatttttggaacggggtagttaggcggttcgcgaggttggggtaacgagggaggtttgagggatttgttagttttgattttttgtttcgtacgtagttcgaagattatttttttcgtggtttttatcgtttaaaggttttttttttttttttttttatcgttcgaaggtttttttttttttcgttttttatcgttcgaaggtttcgttttttattttttttatcgttcgaaggattttttttttttttcgtttatcgttcgaaggttttttttttttttttttttatcgatcgaaggttttcgtttttaatttcgttatcggtataaggaggtaacggtagtcgttatatttaagttttattttatttggttcgaaagtttttgttttttggaaattatttcggtttaggggcgttttcggtcggtttttaggggtggggtcgaatgtagaggttttggggtagggggcgcggggcgcggcggcgggtgggtaagcgggacgtttggtcggtgtagacgcgcggggacgagatgggcgtgtcgggtgcgaaagtaggagcggaggcgggggtgtttaattttttttatttggtgtttttttttttggtttcgaagtagggttggggattttaggagggtttttgcgtttggtttttatttttttttcgtatattttattttttagagagttttgggcgcggattagggtgtatttgggggataggtggaggtcgggtcgtcgggtttgcgtttttacgttcgtagtacggcgtgcggttagagcgggtgtgcggggatttttcgggataggttaagttttttcgggtgggtttttacgtttattaattagtttttttttttatttgttcgtattacgttttgttttttaggtttttatttgggaacgtttcgttttttggtttttttttttttagttaggtgttagttttggttaggtttaggtgttttgttttttttgtttaggttttttgttttttcggttgggagatttgtatatcggtttgaagatttttttgcggttttttttagtttttgtagggtttagattgtagcggttggaggcgaagggacggtagggcgcgtggcgtggttagtgtgttggtttcgattagcgggaacgtattgcgtatcgttcgttttgtttatcgtttcggcgggacgcgttcgcgtatacggacgtatagaggtcgattagggtgttttttagcgaggaggtaatatagtcgcgggaggcggggcggggcgtgtttaaagtgatagattgggttttggttacgtcgggtttttggacgaggggaaatcggagtcggggaggttttagcgagagtttcgcggatcgacggggatcggatttttacgggtggggtttgtgtagtagtgattttttcgagtgaaggtagagttcggcggtttttaggtttatttcgttttttagcggggagtatcgagggcgaggatcgattttttttggggattttcgagggcgagttgggagagggaggaggttcggaggagggagaggggttgttgggggtgggaaggcgaagggtttgtgaggaatattacggggacgaagggtcggggggtgggggtttgggcggagttggaggtcgaattgagcggagtttggaaggttggggaattagaggcggggtttagaagaagtcggggtggggttttggcggggttcgggggcggttttgggtgggtcgggcggggtttgagtgggtagggtagggttcgggttagcgtttgggttaggtttggtgggttcggcgttttatatgatgtcgtttagtaggttggcgttggttatttagtcgagcgcgcgcggttcggaggcggttatgattatgtatatgaaggggcggtcggtgcgtcggttcgtggggtagatggtggtgggcgtgaagcgtttgttggtttcgacgaattcgtaaagttgttcgtagacgcgcgggaattcgtggcgtaggaagacgtcgcgtagtcgtagttcgcgttggatgtggatgaaggttatttcgcgcgcgcgtcggttcgtttcgtcgttttgatttaggttcgtcgtgttcggcggtggcgttaggattagcgtttttatgtcgggttcgcggtttcgcgtcgggggcggtcgcgcggggttgtcggtcgttagcgttattttggcgaatttgcgtattgttggttcgtggttgcgtggcgcgggcgcgggtagggtcggtgttttcggtggcgcggtgtcgggttttacggttacggatacgttgagtaggaagtattttgtcggttcgtagaggcgtttagcggtcgttagttcgcgcgcgtagttgtttaggggcgtcgcgtgtgtggttagtttacgtagcgataggtaggtgggggatagtagtagtttttttaggttaaagcgtaggaagttgtcggtcgagtttggatttgggaagtttaggaagagtacgtcgcggtcgcgcgataggaagtcgatacgcgcgatgcgcgagaaagcgcggtgtatcgggtcgttgtcgcggtaaaattgtagtacgtggcggtatacgttgtttacgcggtcgtatacgtagcgcgttttgtgggcgttttagttttcgcggcggtataggcgcgagtagtagtaggtgtagtagttgtggtaggatttgaagtagaggtaggcgttgaatatggtttcggtgcgtcggtagcgcgtattggagtaggttattaggtcgttttcgtcggcgttgggttcgggggacgcgtcggtcgtttttttcggggtcgcgggtttttcggcgttgtcggtcgaggcggggggcgagcgtggcggcgttagcgcgggggtttcggagttcgcgggtcgcgagtttagtagtcggcgtagttgggggtttaggtagtcggtcgcgggttttgaggtttggtcggcggtgggtcgcgagtcgatgattaggttcgtgatgagttcgtttagttgttttaggtttcgttggcggttagaggtggggtcgtcgggggtcgcgtggggaggtggtcgcgtgcggttttcgggtaatttttaggttttggcgttcgggcgttcggtggcgcgtaggttattgttagtgatggtgatttcgggcgttacgtattagttgcggtttaggttttcgttcgcgcggttttttttcgttagcgacgtttcggatagggatagtgcggcgtagcgtttgggagaggtggataggtttacgacgacgggcgggcgtcggttttcgggggatacgtttcgcggttttcgtatttcgcgttttagtaggttttcgtagttgcggtcgcggtttaacgggttttttcggcgcggtttcggggttagaatgttgttttaggagcgcgagtagtggcggttgtcggtggttagtcggggcggattggtgtcggtgtcgtcgtgttaggaggcgagtaacgggtcggggttagagggcggtattatttgtagggtgcggtacggtcgcgggttttagttcgtttaggtcgggttgttgcgcgggtgcgggtacgttcgagttaggacgttacgttcgcggtatttttcgaagtttttcgtgtaaaaggggcgggcggtggagtgggttcggggtttttcggggatatagcggggttcgtagggtaggtcgtaggttcgtggagtttttttatagtaggagcgggagggcggtttttggattgggaaggtgcgtattttttttgcgtagtagtcgtttatgcgttttggattgggtttcgagagtttttcggacggatagggtttggggtagtaggcgtcgaaggttgggtcgggattggttgtaaagttgtttcggaagttttggggtttttttgtatagaagaattgggtggggttcggcggggtggtgaagggtagattgcggcgttcggcgtagtttcggggtttaggtaggggttcgtcgtagtagaacgttcggggattcgtatagtatgagtcgttgggcgtcggggtgcgcgatagcgttatgtggcggggttcgggtatcgtgaggtcgtggaattgcggggcggggcgggtttagtgcgcggtttcggtgggttcgtaggatcgcgagtttcgggtggcgtgttggagtattgcgtcgtttggtttgatgtttaggcggtagcgtacgtggggggcgggattcgcgggtggttcgggcggtgcgtagcggttcgcggcggcgtataggggcgcgacgcggtcggggtcgtttcgttgcggttgtaatttgatgggatgtagttcgttggtaagggcgcggagcgtcgggtacgcgggttttcggcgcggcgatgtttcggttcgcgtcgtacgttgggtttttcgttttcggcggggtaatatcggcggcgaggcgggcgcgggcgttaggttcgggggcgcgcggggcgtatttttggagcgggcgcggcggcgtggttcggtttcgcgggttcgggcgcgcggtatagcggatttcggcggcggtggtttcggtagggtttttatggtcggttcgtttagcgtttttaggaagtcgaagttgcggtagtggcgtttgttgaaaggcgcgggtttagtaggtcgggttacggatcgtttatatggcgagtatttggacgcgggtttcggggtcgttattttgatgttttggtatacggtcgatattagtaggttcggagggttcgtacgggttattttaaaagaggtttttaggttggcggttttagtttatattgttttgcggggtttttgttttggggggagacgcgggttagggcggtttttttcgtagtttaggtttcgttatttttttacgttggttcggtttatttggggcgtagcgggcggagtagttttggttgcgggtttgggtcgagaacgcgggcgttttttttatgtcggggttagaagtatttgcgggaggaatttagttgtttaggcgttcgttttgttcgttttttcgttttttttttgcgatggggcgggcgggttagaaaggtttagtcgtggttgtggttttcgcggcgggagttttcgcgtgaagttttagggttttttttttttcgattagtgacggcggggtcggttcgggtggattttttttcgggtggggtaggggagtgggggcgtggttttggggttgcgttttttggtgttcgtagttggaaggacgggtcgtatttgggttttatttataggtgttgttttaggagacgttagtgattgcgttttcgttatagcgtttattgtagagcgattttttcgatcgcgtatagtggaaggcga

SEQ ID NO: 7311 - DNA, 1089 bp, synthetic construct
  misc_feature 1..1089: note = Description of Artificial Sequence: Synthetic polynucleotide
  source 1..1089: mol_type = other DNA
cgttgaggggtcgtatttattcgcgtaggtattagtaggtagttttggcgttcgcgggaggcggtcgggggcgggggtttttcggtgtttatcgtcgtttttgcggttgggttcgcgtttcgggtcggtcgagtttaacgttaggatttcgttcgagttttttagggtttcgttaggcgtcgcgttcgcgttcgcgtttttttgtcggtttcggttcgggttttatcggggcgtagggttggggaatcggagtttcgttcgtcgattcggagtatcgtttacgtagattcgtttcgggcgagggaggggtcgggcgcgtattcgcggggagggcggcgagcggggattagtcgaagtcgggagaggggcgtttttacggggcgggaaattggcgcgcgattttgggggaagtgtaggatggggggataggggcgttttcgcgggggtggatgggggattatagcggggttggcggggtaggggtcggcgtacgaggttggaggaggggagcgcgcgtttttattcgggttgggtcgtcgaggttcgcggcgtatcgtggcggcggtgggcggaggggggcggggggtatttttttttttttgtggcgtaggtgggcgcgttttggatcggtttgacgattttttttcgtcgttttatttttttggttaaaggtttttagtttttaattagggatatttttagtttatagtttcgaagttatgggtttttttcggttttttgaagtcgttatatttgtgttagtcggtcgcgtttttagattttttttcgcggagtttttttagtatttggagacgtagcgtagggtttcgaggacggtttggttcggagaaaagatatcgaagttttaattttttttaatttcgttttttttttttttttatttttttttttcgtttttaaagttcgggggttttatttttttttcggttcgcggagtttttcgaattttgcggggattcggcgttcggcggtgtttttttggggcgtacggggttggggcgggagcgaggagattaggtggggaggggattttagattttagacgttaggggagacggcgtttttcgt

SEQ ID NO: 7312 - DNA, 1020 bp, synthetic construct
  misc_feature 1..1020: note = Description of Artificial Sequence: Synthetic polynucleotide
  source 1..1020: mol_type = other DNA
cgtagagatcgtagagattaaggaggcgttcgcggttgtagagttgtagagcgggattttttcgagttgtttgtgttcgggtagtcggcgcgtaattgagttagaggatagcgtattttttcggcgcgggtcggtagggtttttgcggtcggtaagttggtttttcgggtggttatcgggattttcgagtttaatggcgggggcggcggtaaaatcgataatattgtagagattatttttatttttaacggagtaagtgttcgagttttaggtggcgacgttatttttttttagtattttcgttttcgcggagcgtttggtattttttttttgcgtatttttcgtttttgattgtttttttagtttttttttttatttgttttttgtttttgttttgcggtttttttcgttttattttttttttgttattttttgttttttaatagtaggtcgggattttcggagatgcggtgtttacggagtagttgtagggtgagcgggagcgcgagcgggagggggagggagacgcgggcggcgacggattgggtagtagtttgtcgttggtcgtgtttttaggtttttttagttttgaggcgttgttcgtttaggtgggggcgttgggcggcggttagtagttgtagttcggtttttgttgtttgtcggtgtttttcgtggttttgggtatggtttcggattttatttttacgttggcgttttcgttgtattgttattacggggtttttttttttaatgtttttggttgggagtagttttttaatgttagcggcgttagcgtcgttagcgttgttttagtagttagcgtcgttagtcgtgtcgttattagtatcgatttttcgtgtagcggtttcgtttcgtcggattttaattattgttttaaggattgggattataatggtttttttgtgtttattattaacgttatcggttaggtgaggcggttaggcgggtcgcgggtttgggggcgggtagagagcggcgagggcggggttttacgttcgt

SEQ ID NO: 7313 - DNA, 6343 bp, synthetic construct; identical to SEQ ID NO: 7310
  misc_feature 1..6343: note = Description of Artificial Sequence: Synthetic polynucleotide
  source 1..6343: mol_type = other DNA

SEQ ID NO: 7314 - DNA, 1109 bp, synthetic construct
  misc_feature 1..1109: note = Description of Artificial Sequence: Synthetic polynucleotide
  source 1..1109: mol_type = other DNA
cgatatagggtggcgtgtagggagcgtgttttggtattaggcgggcgcgagggggtagggcgtacgttcgggatacgttttagggaaatcgtttttgggtttggtagttgaatttagacgtcgagtgtagttcgttcggtgcgcgcggcgttttattgttagatttcggaaattagttgttagggtggggtcgcgttttggcgacggttattcggttatttttgtcgttttcgttttttttaagagatttttttagcgggttaattttttgttcgggtaaattttttggtgagtttttcgttttttttttttcgttttttttttttttatttttgttgtttcggttttttagttcgttcgcgtcgcgttttatcgttttcgtacgttcgggcgtacgtttttttcgttcgggtcgttttttggtttttcgcgttcggtagttagtgttttatcgcgtcgtttcgcgttagggttcgtttcgagagtcgtttttttttcgtcgcggtcggcgcgggtttttcggttatgcgttttcgagttttagtttgcgtcgtcgcggcgttcgggttttgtagttttttgttgttgttcgcgttcgggtacgcgtgtttcgcgggttgcgtttgtatcgattcgtatatcgtggattgtcgcgatcgcgggttgtttagcgtgttagattttttttttttggacgtgcgtaagttgttggtggtcggtaatcgtatttagcggattttcgaggatttttttattttttacggcgatttggtttatttggattttaggaataattcgttgcgttcgttggaggagggtacgtttagcggttcggttaagttcgtgtttttcgattttagttataataatttgatttagttgggcgtcggcgtttttcgttcggtcgggaggttggtgaagtttagtttggttaataataatttggtgggcgtgtacgaggacgttttcgagattttggagtcgttgtaggtgttggagtttaacgataataatttgcgtagttttagcgtggtcgttttggtcgcgttgttcgcgttgcgttttttgcgtttggacgggaatttttggttgtgcgattgtgatttcgt

SEQ ID NO: 7315 - DNA, 1109 bp, synthetic construct; identical to SEQ ID NO: 7314
  misc_feature 1..1109: note = Description of Artificial Sequence: Synthetic polynucleotide
  source 1..1109: mol_type = other DNA

SEQ ID NO: 7316 - DNA, 1384 bp, synthetic construct
  misc_feature 1..1384: note = Description of Artificial Sequence: Synthetic polynucleotide
  source 1..1384: mol_type = other DNA
cggaagggattcgtcggttgcgtttcgtttaggttggtcggggtcggtgtgatcgtgtgatttcgtgtatattgcgttcgggttttcgtgaatgatagtagtttgtaatttttagtcggagagtagcggtggttatcgtcgggcggaaagggttataagttagaatgtaaagcgatttcgtttcgggtgtgggggatttcgggttttcggttattttcgaggtcgggcgtgttttgttcgttttttttcgttttgggcgtcggggcgattttattttgcgttttaagttgggggttttttatgttcgtcgtcgtcgagtttttcgtcgtcgaggcgttggtcgcggttttcgggttcgggtcggggtcgtcgtcgtcgtttagtttcgttagttttcggttggtggtcgtgagttcggttcgtaggttggttattttttggttggtcgattggatcgttttatcgatgcggagcgcgagttgtttattgttttttattatgtttaggattttggtttgggggcgagagaggtgataaagagttgtatgatgcgcggggggcgcgcggtcgggtattttcggttttatttgttgtgtttttcgcggttcggtttcgttcgcgtttcgatttttaggtatcggtagcgtcggttttttcggtataggaatgatagcggcgtttttagttttagtcgcggcggtggcgaggcggcggggggaggaggcggaggagaaaaaagaggaggagaaggaggaggaggagtagcgatcgtcgagatttcggcgggcgggcgtcgagagttgttttaagaaggatatcgcgcgttattaggtattttttaaatggagtttattattcgtcgtcggttcgggagggggtttcggtcggaggttgggggtatttttggtttttcgcgttttcgtatttcggagatatatttttcgggggggcggaggcggcggacggtagtcgggagggggttaaggtggcgtttttggcgaggggtaggggtcgtttggatcgaggtcggttttttgtttttttttttgagcggtggggtagttttcgttttggagaattggtgtttcgagtcgtgttaaggttggggaggtgttgggtgttcggaagagagggtgtttggaaagggggttttagaggggagtcggggtggatttttatggaagggagacgtttgcgttagtttaggagtggagttcgtgttttatcggttttttaaattgcgagtacgaaatttttagaggggagttgagttggtgtttcgcgtgttttttattttttattttttattcgtaggttagatttgcgttgtttattttaggagggagcgtttatttttttcggcgtgggtcgttggtgttttcgt

SEQ ID NO: 7317 - DNA, 1384 bp, synthetic construct; identical to SEQ ID NO: 7316
  misc_feature 1..1384: note = Description of Artificial Sequence: Synthetic polynucleotide
  source 1..1384: mol_type = other DNA

SEQ ID NO: 7318 - DNA, 835 bp, synthetic construct
  misc_feature 1..835: note = Description of Artificial Sequence: Synthetic polynucleotide
  source 1..835: mol_type = other DNA
cgtgaagtcggcgttatttagtttttttcgttaattgtttatttttttcggttattgtttttcgagtgtttatcgagtgttcgtgggttagcgagcggggtcgttggaggaaggggcgggtgtgtttagggttggcggcgggttcggggtttttgggaggaaagggtcgttcgtttagttttttttcggagtttagagacggtttcggcggcgcgggtatataggggtatatagcgcggggcggagggagggggtggcggtatcgttcgtggagggcgcgggttcgtttagtttttcgtatcggcgttttttcgcgcggtgtttttttcgtatatttatacgtatttatttttatagttatatattttagtatttgtaggtataaacgtttgtagggatatattacgatatagatatttaagtatatataggtatcggtttatagattcgtttttgagttatatataggtatcggtttaaaggtataggtaggtttatagattggtttttgagttatatatagtttagatttagatgtatatatatagatgggaacgttcgtttgtacgtgtatagatatacggatatattcgtatattatcgcggggtttcgagtatatacgcgtttcggtagacgtttatagatatacgtagggtcgggagcgtatatatatagatataggtttatatagatagattcggttttaaaaatacgtattcgtagaggtaaaggttagcgtataagtacgtatagatatatcgataggcggttttcggatatcgcgttttttgtcgtatttacggtttacgtaagggtttatatacggttttacgg

SEQ ID NO: 7319 - DNA, 2248 bp, synthetic construct
  misc_feature 1..2248: note = Description of Artificial Sequence: Synthetic polynucleotide
  source 1..2248: mol_type = other DNA
cggttttcgggttagtttttcgttgttatcgtcgtttagttagcgttcgtcgcgtgggagtcgcgaggttaggtttcgtagacggcgggttttcggtttcgttgttttcggcgggcgcgttttttttagttggttcggtcgttgggttgtcgtcgttttttagttcgcggtgttagttttcgcgttttacgtttggttttcgggtttcgtgttttcgtagtagaagggattggggtcggcggggcgggtggggacgtttgggaagcgaggagagttttcgtttttcgggcgtttttttataatggggttagggttttttttttcgtttttcgcgtaggtgtgagcgcgcgagtgtgcgtttcggtaagtgtgagtgtgaagtgtgtgtgtgcgggggagtgcgcggagggagcgcgggcggcgggcggcgcgggaggcgggaggtagggcgtaggggagggggttgggagggagagtgtgcgcgcgtgtaattttatttcggggttttgtgcgagttcgggcgatagtatcggcggcggttggaggaggagcggtcggagacgcgtgtagttcgttcgttagagttcggtagtcggggtaggtgggagttcgcgcgggagtcgagtcgacgcgagtcggagtcggagtcgagttcgagcggagttcgggcggagtttaggagtttcgttcgcgggtagttcgtgggcggtagttaggcggggcgggcgtcggcggggcggttttttagtaagatgtgcgcggcgtcgcggggcgttttttatttgtagcggcgttcgggagtcgggcggttgggttaggcggcgttttcggggttgttgcgcgttcgcgtttagagttgtcgttttagggagttcgttacggtcgcgtttcgggtacgttcggcggcgtttaacgatgatcgttttttggcggcgttttcggagtttggtttgggaatattgggtcgggtttttcgtgtgcgttttttggatttcggattcgcgcgggatgttttacgttattcggatcggtaagcgttttttggagtcgggggttttcgtgcgttcgggagggggcgggaatgagggggttttttaacgcgtttcggagagatttttttaattttttttcgagttgttgagtcgatcggtgattattaggagtttttttttgtgaggataaagttttagagtcggggttacgggttttatttattggggaggaggtcgtcgggtcgtagtgggcgaggggtttttggcgcgtttttgggaggttagatttggtatagtgtggcgaaggtttttagtgcgatttcgagtcgagggcgtatttcgcggtgattgttagtatgaatcgtagtcgatcgagttttgcgatcgggttttttcgtagagtggggattttggggaaggcgttaattttttttttttgtttattttatttttcgcgggtttttcgtttttatttttggtatagttcgagtagtcgtagcgaggtcgtagggtatagattcgtatgacgagggtagtcggtttttttttttggtggtcgtttttggtttcggtggtatcggtttagtttcgtgttatggggcgggggttgggggagtaggatttcgttgttcgttgtagttggtttttcggggttaaggtttttttttcgtttggggtagtgtaggtagagggaagggacgatggaggtcgtttagtgcggttcgggtaggcggtttagggacgttagcggtttttaaagttagttcgaattttttcgtagttggcggcggttggcggggttgcgcgcggtttttcggggtttcggttttttcgcgttttttttcgtcggagatttttatttcggtttttaattttgttgtggtcgtttaaggtattttgtaggtttgagcgtcgcgtatgtttcgggtcgacgatcggtagggttgggtttggtcgggttaagacggagtttttattatcgtaggttttgcgttcgttattaggtcggatatttgggtcgtttgggtttattcggcgttagtattagcgtttggtattaggcgagtcggatttcgtcgagttagggttattttttttttttatagtttttttttagggcggattttgggttgttagcggcgtgaaagaggtgtcggaatcggtgtcgggtttggttttcgtatttgagatttttttaggaggcggttagaaatttagcgggtgggtttttttttgggcggtcgttcgggagtcgg

SEQ ID NO: 7320 - DNA, 3541 bp, synthetic construct
  misc_feature 1..3541: note = Description of Artificial Sequence: Synthetic polynucleotide
  source 1..3541: mol_type = other DNA
cgaggttggatagttttcggtttgtacgtcggatttttggagagttcgagttttttttttgagtttattttttttttttttcggggcgtgattttattacgattatagtcgatgagtcgtttaagttgggagaaggagcgagaaggttgtagcggcgtaggttagatatttttgggtttaacgtttatttttaattagcgtttttgttagtagcgtttttttcggagttatagtttttatttcgagattttttttttttggaatttcggagcgcggtcgggtattaggggttcgcgtaggattgtagaatcgttgtcgttcgtcgttttagttttagttgttcgcgcggtatttatttgggttttagtgttcgggagaaggtgtgttcgcgcgaggcgtgaagttagagttcgttcgatttcgttcgtatcggacgcgtttttagggtagaggaggtcggcggagttgtgacgttgggattagaggaaggagaaggaaagtcgagacgggtcgggtagacgcgtcgaggagcgtttagtgtacgttggtagtcgcgggaggcgaggcgggcgcggtgagtagtcgcgtcggaatcgagtcgcgaattcgcgtcgtttcgcgttcgtagtcgttaggattcgcgggaattttggttcgtcggtagcggtattgaggagggaggggcgcggggttgagtcgtttttcggagttcgagcgtttttcggagtcggtaatttttgttgttcgggcgggatgcgggcgggaatttagttcgcgtggaatgtgggatcggtcgggttcggagtttttagcgttgggggaaagcggggtttatatagttaggacgagagggggtgcggttttagggttattttcgcgttattttttacgtggcggtcgcgttttcggggcgtgagtgtgtacgcggacggtaggggggtcgtgaatgaagttttagcggttaattagtacggtcggcgcgcgggatttcgggagcgacgtttaatggagagttttgggtggtcgggtagggtggcgggcgggcgcgcggggcgggggtcgggtaggggaggcgggaggtagtttcgcgggtagttaatgggcggcgggcggggtggggtttcggagcgtcgagcgggtcggggttttaagtcggcggagcgaggcggcggggttcgtagacggagcggagcggcggcggcggcgcggcgtagggcgcggggcggtatggttattatcgcgtagtatttgtcgcggggtttcggtggcggagtcgggggtatcgggtcgtttatgtattcggacgttgcggcggcggcggcggcggcggcggtcgcggagcgattgtatgtaggggtcgcgtatcgcgaagtgtagaagttgatgtattacgagtggttgggcgcgggcgcgggttatttcgtgggtttagcgtatttttagtggttatttacgggaggaggcggcggcggcgattgggtcggcggttcgtatttagaatacggtaaggtaggcggcggcggtatcggtcgagtcgacgacggcggcggcggcggaggtttttacgcgcgtttggtgtattagggggcggtttacgcgggcgcggtatgggcgtagggtagtatagcgtattatttgggttcggttatgtcgttttcgttcggggttagcgggggttattagttttagtcgttcgggttgtacgcgtaggcggtttattcggggggcggcggcggcggtttggtcgggatgttggcggcgggcggtggcggcgcggggtcgggtttgtattacgcgttgtacgaggatggttacgaggcgtagttggagtcgtcgtcgtcgtcgtatttgggcgtttacggatacgtatacggatatgtatacgcgggcggtttgtacgcggcggcggcgtatttgtattcgggcgcgggcggcggcggtttatcggtgggcgagtattcggacgaggatgcgtttagttcggacgatttggagtagttcgttaagtagtttaagtagcggcgtattaagttgggttttacgtaggtcgacgtggggttggcgttgggtacgttttacggtaacgtgttttcgtagattattatttgtcgtttcgaggttttgtagttgagttttaagaatatgtgtaagtttaagtcgttgtttaataagtggttggaggagatcgattcgtttagcggtagttttattaatttggataagatcgcggcgtagggtcgtaagcgtaagaagcgtacgtttatcgaggtgggggttaaaggcgcgttcgagagttatttttttaagtgttttaagttttcggcgtacgagattatcggtttggtagatagtttgtagttggagaaggaggtggtgcgcgtttggttttgtaatcggcggtagaaggagaagcgtatgatttttgcggtcggcgcgggttattcgtttatggacgatgtatacgcgtttggggagttagggtttggcgggggcggcgtatcgttatttttcgcgtttttatcgttttcgtcggcggcgttgtattattattattattatatattgttcggtttagtgtagtgatttcgcgggtcgggttttcgtcggcgcgttgtagggcgcgggcgcgtagttcgttcgcgcggtttggattttttttgttcggttgttttggattttataaaaaaaaaaaaaagtttagaaattttcgaataaaattaaatattcggacgatttttttcggtgagcggcgaagatagttcggtaggttgcgtcgttcgagtttcgggagagaggagcgaagattcggaattcgttaatttatttcgggtattttgttcgtcgtttgttttttgtttttattttttcgacgattttcgtttttgttttttcgggttgttcggggtcggatttcggtagcggtttttttaaagcgataggtaacgtagtgcggggttagggatttttcgggagagaggacgaagcgaggagagttttttatttttttttttcgcgtggatttttgagtttgcgggtttagggtggggggttgttattttattcgttatacgtttttttttttttataaggatgcgttttatttcgttttttttttttttcgggtttggttttttacggtttttatttattcgtggagtttttcggtttttggggtttttttaatttcgttcgcgtttttaatttaaatcgtagtatattgtatttatcggggtttcggaggggaggtcgcgagagtcgcgtttgtgtataaaagtaggaaatagttaaagttttaatttagtttaatttatttttttttttatatttttttattttattttttttttaaaaaaaagtaaaaaaaaaaaaaaaaaattaataaaaaaaattcgagtgtttatttttcgtttcgttttattcgagtttcggtttggttttcggttacgtcggaggggtttgcgtttttatatatttagacgggaaggggtttttgttttgttgtagatcgatcgtcgtatagcgcggtttttgtttttcgcgg

SEQ ID NO: 7321 - DNA, 1513 bp, synthetic construct
  misc_feature 1..1513: note = Description of Artificial Sequence: Synthetic polynucleotide
  source 1..1513: mol_type = other DNA
cgtaagaacggtttagcgaattttgtgtaggggaggcgtcgaggattggagaggttttgttaagggtttcgttgggcggaaggcgcgcgtttttttttatgggaaagatagatgtggggttaatgaaagggaggtcgagaggcgcggggacggtcggggagacgggggcgtggcggggagaggaaagttttcggagaaagtcgatcggattatcgtaagcgaggtatgtagcggagttcggaggaggaaggcgtcggggattggggtagggttagggcgggacgggggtggggggtgtggggggtattataggtagttggattcgagggttttgagttgaaatttaatattcgtttttggaaggatcgtttttttttttttttcgttttttttttttttttttttttttttttttttttttttttttaatttttaggacggagttttgcgcgggagaggagagggtttgaggggaggagaaaggaatagtattgagaggggttaggagtttaggaaggggagggaagggtagtcgcgggttaggggtgagtttgcgggttacgcgcgattttcggagttttcgtagtttttttagtgtttttatttttagtttaggcgagtttataggattcgggtttttgtttttttttcgttttttttttgtttttttttttgttttgtggtttttttttttttttttagagatatttgggagttgtttttaagttttggggcgtttcgcggggttttgttaagggtgcgtgtgagagagggcggcggagtcggcgtcgggtgttaggggtcgagggtgggagcgggagttcgtggttttgcgttttggagtcgaggattggaagggggttgggttttttcgtcgtttgggcgtaggtcgcgcgtcgggaaggtagtttcgtttgttttaggggtgtttgcgtgttggttgttgttgttcggggcgaggcgtcgtagcggcgattttagattttcgggcgcgttgagtgagtgcgcgcgtgaaaatcgtcgtatcgtcgggggtgcgagtgtttgggtcgaagcggttattttagcgatttagttttacggttacgttttcgggggtttttggttttaggtaatttggggtaagcgttttagttttcgtttttttttttttttagcggggtcgtcgtagattttagttttgggagtatcgttttgtagcgcggtcggcgggtggagacggttggtttttaaattcgttcgtttagtttaatcgtttcggcggttttttttagttttcgaggtttttttgagcggtttggagaggcgtcgagcgtagtttagcgttcgtttgtttattcgtttcggttcgggaagggaattttcggattttgcgagttcggggcgttttcgcggtttagggcgggtagttttcggggtttggtcgagtcggtggcgttcgggaggtcgcggggatagtacgtagcgcgcgtttttggatgtcgtttcgtagcgacgtttcggttcgtttcgt

SEQ ID NO: 7322 - DNA, 3541 bp, synthetic construct; identical to SEQ ID NO: 7320
  misc_feature 1..3541: note = Description of Artificial Sequence: Synthetic polynucleotide
  source 1..3541: mol_type = other DNA

SEQ ID NO: 7323 - DNA, 558 bp, synthetic construct
  misc_feature 1..558: note = Description of Artificial Sequence: Synthetic polynucleotide
  source 1..558: mol_type = other DNA
cgtgtttggttttcggaaagtgcggacgagacggtgtgggtgggttaggagttatttgtaagggtgtttgtaaatcgtgaagtttagaggagaacgggagaaggatggaatcgagcggagaggggaggtgtatggtaagaatttcgttcgtttcgggttgaaggggagttgtgggtcggcggttaacgtttgaaggagaggggtttcgggtggcgggaggcggttggggattcgcgtaggttagcgtgtcggttttttttagtttatcgttgtcgtcgtcggggttgttttaagggagttaagcggagtgggagcgggtttgcgcgtttttgttttgcgcgtaggggcgggggggtttaggacggggcgtttttttttatttatatgttgatttaggatttttaagcggttcggtttaggatatcgtttggaaatttagtcgcgtgggagagggcgattttatttttaatttttttgttgtgcgtcggtttagtttttagaagttagcggacggcggaggaggtggttcggttttttttggtggttttgcgttttcgg

SEQ ID NO: 7324 - DNA, 7244 bp, synthetic construct
  misc_feature 1..7244: note = Description of Artificial Sequence: Synthetic polynucleotide
  source 1..7244: mol_type = other DNA
cgtatttgttgggtcgtttcgggttttcgagttttcgtggttatatttttggtttttgcgggattttcggttcggagtggggaaattttacggtgatttggttttaagcgagaaggatatttgggttatcgtttttttaaaagttaggtagatttgtatagtttatttcgttttcggtttaatagaatttttcgaaaattttgtttaaaggagttttgggagtaggcgtttggcggtttttgcgcggaattcggcggttgtcggcgtttttttttcgattttatggtttatttatttaggtgtagtcggggttagatatatttggtttcggaatttttaggtgttggaaggtggggtttgggttttgcgtttttagaggatatattatttttgaagtatttttttatttttattttacgcgggagattttcgcgggggttgatattttttttttttttaaatttatttatagattttagtaagtggtattttttgggagcgagtaattagttttttatcgttattatagattttgttcgtgtcggagcgttttcgcgtcggggtttggtgaattttttggaagtttttcgttcggttttttagcgaattatttttatttatttttttttttagttttagtttttcggtgggtattttttagggttttttcggggcgttaggttttgcggttttcgggtgggggttcgttagtcgtatcgttttttttttatttttatttttgggtttagaagttgatagattgataagacgcggtttagtagtcgtgttaggcggaatgggttgcgttttgaggtcgcgacgattcgggtcgagtttgcgcgtttagattttcgtcggtttggaggttcgaaagagtaacgtagagacgtacggttaagagtggagggagaacgataggaacgtttattttttttattatttaaacgaattttttttattttgaaggagagagagaaaagtagagaataaaaacgagagtgatagaatattagaaattagagggaaaaatagaattagagggaaaaatagaattttagaaattagaggggaaaagatatagagataaaattagagttatagaaatcgagggcgattcgttcgagggtcgcggtattaattttagatgtttgaaaggtaatagttttttaaaaaggaaataaaatttgaaatttgttattttttttgtagaacgagttgttttttagggtcgtgatattaagataagacgagaataaggcgaaagttaaaattgaaaattgttcgagggggttttttagtagtgattttgttttttgtcgggaaggtcggatagatcgatgcgcgttttgagtttaagagaatttgcggagatatagaggttattttttattttcgtttagaaaagaaaaaaaaaggggggggggttatttgtttatttgtaataacgataaaaagaattttattattacggaaaagaaatcgagatgttgaaaagtgaggaaaagagagtttaaaaggggttgagggacgcgaaaagaggggcggggagaggaaaggtttagggcgcgagggacgtggcgggtatcgataggaagtgtaattttattttttttcgttgagtttttttttaaatacgaaaatttttataaattatatttattttttaggatgattatcgtattaggatttttaaaataaagtaattgagttttaaggagataggaggaaaaaattaaagtagtttttaattattttaaattcgtcggatttgggagcgcgtcgaaatatagtaggaagaaggtaggaaaaatcgttttggtatttatgttttgaatatttttttttttttattttcgtatttttgtttcgtttttatttcgatcgtagtaattgaattgttatttgttttttatttcgttttagggttttagagttatttgggaagttcggttttgttaagcgttttaggttagtaagagcggtgtagtcgagtcggcgttttagaagtcgagaggttatataagtttacgtagagaggcgtatcggatacggtaattaggagtaatttatacgttttcgggcgtacggaaattatttgttaggaaatttttaacgttttttttcgtttatttttttttattttttttttggcgcgttttttttttttttagaggtacgtagtggagtttttggagtttcgaatttttcggatattgtagaatgcggggtttttcgggcgcgggttcggttaattagagcgtcgtttgttttttttggttaatggtaggcgttatattgttgtttaattttgtttaatggagttttaaggattaataatagagcgggcgagcggtttattgagagtttggtagcgtcgggtaattgggtttcggttgcgcgtagcgttcggcgcgtatcgcgaggggattcggtacggcgagagttaggtcgcgggttttaattacgcggttcgtagacgagttttcgattcggatttttgaagggagggttggattgcgttgcgttttgaggggttcggaagttcggatatggtgattgaaggagggtgacgtggttagataaggggtcgggggtaaagggaagcggttaagagttttagcgtcgttagtggagtcgggaggcgcgtgtagcgttagcggaggaggaggatttcggagtttaaggtaggtagttgagggtcgtagggagagtagtgggtggagatttggtttgcggtttttgttgaggaggtttgggtttcgtgggttttagggacgttcgaagggtttgggagaggaggtaacgtttatagagaggaggtttgggattttcggacggagatataaggattttgtcgcgggttttggtagggacggggaacgcgggaagtagaggagatcgcggtagaagcggggagttgggtttgtttgggttttatggggttgcggcgtgggagggattttggtgttcgtttatggttagttgcgaaggcgatttttttggtttggtgcggtttgttgggttattcgtgttttaggattttaattttgagattagaacgtaggagtttgcgttcgagaggggttttttgggattttaagacggggagggcgtgtttgacgattttgtttttaaattcggaggggaggggagggtagtgtgaggtggttttcgagaaagatttttttttcgaaatgtttaatttttcgtaggatacgtttttcgtttcgattattattttagattgcgaagttaaaaaattgtattataggttttatttaatttttttttttagtatttgtttgtggggtttttttttatatattttttttttttaggcgcggtttttggatttcggatatttagattagttgttttttattgttttttttgtttatgaagtttatttttgggttgggtttgtttatatagaaagtttttttggtcgaatttttttttttaatattttttagttttaagttaaattttatatatattttgttttttattttttggaggtttttatcgtggaatttttggcgtttatatttttacgggttttagagttattgggtttaattttgtttaagttgttttttcgtttttattttgttttttaaagttattttttttgttgttgatttttttttttaaagtttttgttttaaattgtattaaaaataaataaataaaaagaaataaaatttcggtttaatcggtttttatatttgcgtttttatattttttttttttttatttttttattaaattgatcgttttgtttcgggtttttttgttttgtttttggtattagtttaatttttgggttaaaattgtcgttttaattttagtttcgttaaacgagtattttttttattcgttttattttaattaggttaagttttggggtattattttaatttttttaaatttttattatagttatttgaattagtgatttttatattttatatgtttttttattttttttagcggaattattaatttagataaaattttatttttagcgtgtatattaggtttaagagtagttatggttagattggggtgaaggtgttagggtttataaggaggtttcgattgtatttttttttagtaattttggtttttttagtttagttttcgcggtttaaatttttttttttagtttgggttttttaaggcggcgttttggtttagcgcgcggtgtgttttttattaggtttttttttttttttattttttttttcgttaggttttgttatggagttgcgttcggagttgtttagcgtgttcggtgcggcgacggcggcggcggtaatagcgacggggtcgtttgtggcgtcggtggcgtcggtggcggtagtcgcggcggtcgttgtatcgttatcggtgagcgtggtaggcggtttgttgcgggggtcgttattgttgttgcgggtagtcgagaagtattcgcggatttttaagtgcgcgcgttgtcgtaattatggcgtggtgtcggtttttaagggttataaacgttattgtcgttggaaggattgtttgtgcgttaagtgtacgtttatcgcggagcgttagcgtgttatggcggcgtaggtggcgttgcgtaggtagtaggcgtaggaggagaacgaggcgcgcgagttgtagttgttttacggtattgtcgaggggttggcgttggtcgtcgttaacggtattattttttcgaggttcgtttacgaggttttcggtttagtgtgcgtcgtcgacggcgggggatttggagcgggagcgttcgcggggatcggaggcggagtagttggcgtagggggtttaggtgagagcgcggttaggtcgtaggtaggggtagtaggatcgtagttttggggtacggggtttaggggtttgtttcggtttagaaagagtagaattttcgtgtttagtcgtcgcgattgttagggtttatcgttcgtttagtttcgggtatggagcgtgggtatagaaatttttttttttttcgtttttggagtatttgtattttattttttttttttgtatcgggtcgaaatgtatacgttttaatttttttattcgtttttatttaaacgtaggtaggtttttgtttttttgtttcgttttttttttaggtggaaatttgcgtattttcgttcgttttgcgtttttttataggttttttttttttgtttttttttaatttttttaaggaatttttttttttttaattgatattttaggttttgagacgttttaggttttgagacgttttagttttttttttttttttcgcgtttttaacgttttttggataatcgtttgttgcgttttttttttttttagtttttttcgtattttttttggttttttaggtttgtttttttatgttttttttttttcgttttttattgtttgtttagtattattttttttttttggattttcgtggttttttgtggggagggaagaaattaggttagagtcgttgagggaaaggagggattcgttttaaatttgggagggaagaattttttaggttttaattttggaaagggtggattagaaataggggttgtatttttgtttgtagagaagtttgggattttttagataattaaggcgtttttttttataggttgtattgttagggtaggtattttttatatagtgggtttttttgtatagcgtggttaggtagaagttatgttgttttttgtttgaattttggatttggttatttttttacggtagggtaggattggaagggtagttaagggtggaggtgttggggtatagacgtggggaaagtagtattgaatatcgagtttatagggtataggtagttggggttttgaggagtatagaaagagagggagttttggggttagggttgtaggggtttagagcggaaggaatgttagagtaaaaagaaagaggggtattggagtttagtgaataagggttgtggggttgagggagaggaaattgagatttaaagggtcgaggtgttgtgattgttgttttttagttaatcgttttttacgatacgttttttttttttttagaggttaagttgtagaagtttgatttgttttttaagacgttgttgtaggtaggtcgttcgggtagttcgttgtcgtcgtcggtgaagtttttattattcgacggcgtagattcggggttcgggacgtcgtttttagaggtgcggttcggtttaggttcggagaacggcgatggcgagtttttttttggttcgtttttagttcgggtttttaaagaggtaggtggtagttgtttaggtagcgttggttttggcggcggcggcgaggaggatagttcgggtttcgttagttttttgggttttgaattcggtttagaggttgataaagaagagggtgaggtcgcgtcggcgttagggttgggcggaggttcgggtttacggtagcggacgtcgttggatattttgatacgcgtgtttttaggttatcggcgaggcgttttggagttggtgttgtagggttgcggcggcgacgtggtgtaggttatcgagtaggtgttgaattattatcgtgggggtttggcggtcggtttgggttttgcggcgtttttagataaggtcgtcgtgggtgttgtagtagttgtagacgacgcgtggtttagtcgcgtcgacgtcgtcgtcgtcgtcgtcgtcgtcgtcggggggtttgggttgtttgcgtcgttgtaggcggggttcgtcgtattttcgtattatagatttttgttggtcggcgttatggcgtttggggcgttgggttcgttgagtagtcgttcggttttttcgtcgttgtagtttaacgttagttatttcggtgtcgacgcgggcgtttattcgttgggcgcgtcgttcggttttagttttttgcgtttggtttatttcgcggcggcggcgtatagtcgcggtttggtttttatggcgttttattttattgtcggtttggtgtttacgttcggttttcgtttatttatggattacgtttttagcgattttatgcgtgatcgttcggtcgtcgttgttgcggcggtgtataaggagtcgatttacggcggcggtttgtacgggtttatggttaacggcgtttcggagaagtagtagggcgaggggtttggtagtcggtcggtttttaaataggaattttagttttgttttcgcgggttatcgattttttttcgtttagcgttttttttgcgttttggttgggcgt

SEQ ID NO: 7325 - DNA, 824 bp, synthetic construct
  misc_feature 1..824: note = Description of Artificial Sequence: Synthetic polynucleotide
  source 1..824: mol_type = other DNA
cggagtcgttaggagtgagtatttttttttcgggatatttagtttcgcggcgtttttcgcgcgttttggttttatacggatttgttagttttagggaataaaagcggagttcgttcgttttttattgtagtcggaggatgagtcgagagggttgagcggagagtgtggttttcggcggttggaggtaggagaatatgttgcgttcgttcgtcgcggcgtgagaggttcgaggtgggcgcgtcggggtaggggcggtcgcgggcgtttgttcgtttagtgggcgttgttcggatttggcgaggtggtggtttgtaatattgtgttcgtattgtttattgtgggtcgggcgtcgagttttcgcggtcgcgagggagttttttgggtgggaattggaggtagtgggggaaaagtttggagttagaagttaggtagcggttgtcgcggcggttgtggagggttgtttgcggtatttggcggcgcgcgttttatcgcgaagagcgggaaggcggcggttgtagtgtgcgtaaagttttgggtggcgcgtaaaggcgtaggcgagggtcgtcgtatagagtcgtttaagttgtggtcggagcgttagggcgatttttgggaattttttaagcggaatttttcgagataagcggtttttgttttttgatattttagtcgaggtcgagttgacgcgtagttatttaattttttttgtttcggggaaataattttattcgcgtcgacgattggattttggttggttgggtagcgtcgagattttcggggggtttagttttgtggttttgagtattttttcgtttagttcgcgt

SEQ ID NO: 7326 - DNA, 824 bp, synthetic construct; identical to SEQ ID NO: 7325
  misc_feature 1..824: note = Description of Artificial Sequence: Synthetic polynucleotide
  source 1..824: mol_type = other DNA

SEQ ID NO: 7327 - DNA, 1415 bp, synthetic construct
  misc_feature 1..1415: note = Description of Artificial Sequence: Synthetic polynucleotide
  source 1..1415: mol_type = other DNA
cgtttaaaatgatttcgggcgttttatttaaagagacgttttggtttaggtagttcgttggggtcgaaggttttattttttttcgatttatcgggtttcgcggcggaagttttcgtttaggtaggggatgttttaggagggaaggaggcgacggtgtttaaggacgtcggaagtcggggattttcgtttttttcgggtttcggttaggttattagtgttggttcgcggcgcgggtgtttagttgcgtttgggatattgcgggtacggttgtggcggtaacggtagcggtcgtcgcgtcgtcgacgttcggtaggattgagcgtacggagcggcggaatttttcgtttttttacgtgtagagtagcggattgagcgcggatagggcgtagtataggagttagttggtcgtttgtattttttagggtatcggtagcgagaagtcgttggttaggtttatttatattagtggttgcgtggttagtaggaagacgtagtagagtagtagtatcgataggtcgttgagacgtcgttgtgttcgtcgcgggtgtagcgcgggcggtaggggttgggtttgcgtcgggtgcgcggcgttatcggggttcggcgcgtgttgggcgttcgggaaggcggcggcggcggcggcgtagtcgggtaattggtgtagtaggtggaagttgagtacgttgattcgtttgacgttgatacgtacgcggcgtacgatgtttaggtagtagtgtagtagtagagttgtttgcgttagtagcgtcgcggcggttagtagcgtcgggtagtggattcgcggtggcgcggcgtcgggtcgcggtgtttagggcgggagtagtagtacgaggtttagggcgagcgtttaggatagcgttagtatgttcgtcgtgtggcgtttttggtatagcgtttggtaggtggcgggcgttcgggtgatgagtaggtagcggtttagggttacgaggtagtgggagaggagggatatcgtgagttcgaggtttagtagtttatttcgtagtaggcggtagttgtttttagcgtcgttttagtttgcggggggtttcgtagagtcggtgggtaggagttcgagtatcgttttttgcggtatttagagggcgtagacgttgaggtcggcggcgtagtcgtttacgatgaaggcgttgttggtggtttgtagttttcggaaggacgatacgagatagatgattatgtcgttggttagcgtgttttcgatggttaggttcgaatataggagtgatatcgggatgcgtcggttcgtttacgatttttttttttcgtagagtagtagtagcgagttatcggtggtggaggaggtggatgtggaggaggagttggttattttggttaattttttatatttttttcgttagcgtcggtttttggtagcgcgg

SEQ ID NO: 7328 - DNA, 1415 bp, synthetic construct; identical to SEQ ID NO: 7327
  misc_feature 1..1415: note = Description of Artificial Sequence: Synthetic polynucleotide
  source 1..1415: mol_type = other DNA

SEQ ID NO: 7329 - DNA, 3039 bp, synthetic construct
  misc_feature 1..3039: note = Description of Artificial Sequence: Synthetic polynucleotide
  source 1..3039: mol_type = other DNA
cgggcgtttataggcggcgcgggtagcgcgagtttcggagtttcggaggtttgtgcgttttgagtcggtatggatttcgagtattgcgcgttttttcgcgtggggtttgtattcggtttttatgtggtttcgggggacgagttttcgggttcgtagggaattttcgtcgttgcgttttatttgtatttcgcgtcgtttcgcggttcgcggttgattcgtttttcggtttgcgggtttttggagttttattttttagagtcggttaagtcgttcgttaagtatttgtaggatttcgggttcggttcggtttttaacggcggttatttttacgagggtttcgcggaaggtaacgcgcggcgcggggcgtagcgcgtagttcgatttttttttttttttttttattcgggtttattcgggtttttttgtttatttttttcgttcgtttattttttaattttttgtttttttcgtttttcgttacggtttttacggaagtcgggttggcgttggttcgggttaggtaaaggttagtgtggggcgggagggtgaattatcgtttttcggcggcgggaatggaaggcgggaggtcgagggaaggtgtagtggcgacggttcggagtttagtcggggttcgaaagtagttggatttgggaaggagagagtatgttttgtcgaagttggattggaattgttatttattttgaagtttagattcggtcgagggttgtggagttatattgagatttgacgaagaagcgcggtttttgtgtttggcgttttttgagggttttgaggttgggttttaatttagagtggttaaatcggggtcggttggggattgcggtttggttttggttcgtttttttttttcgggtttagtttttataggaagggtgttgtttgtgcggtagattggtatagtttggtcgcgattggtcgtgtaatgttagggttgtttttaagacggaataattgtatttttattttttatattaagttggtttttttgtcgttatgtattatgatagtcgtttttttggtagttttggttttttcgcgttggattattatcgttgggtagttaggagtagttttgggtagtttaattttttggcgtcgcgggtttacgggtcggtgttttgtgttaaggtcggttggatcgcgtcggtattcgagaatgcgtttgaaggtaggggtttggtaggttgatcggtagttttgcggtcgttcgtcgtattttatgatttgtaaggcgtttcggttttcgtattgtatttattttatttgcgttgttatatttcgtagtttaggtttagaattggattttttaagattcgttttaattttttgtcgtcgttcggttggcgtttcgcgggtttttacggagtggtcgggtattttcggttttcgtttagtcggggcggtgggaatgtgtaggggagggcggggaggtgtgtgtgggttaacggaggaaatgaacgagttcgcggagtttcgtgtttgtgttttttgaaagaggtttttttgataaaaattatagttgggatttaatgagaagtagttggtttggtttttttgattttagttagacggtagaggtcgcgtagtgcggtgagtatcgttagagataggtattcggtttggtttagcgtttcgcgtcgggtaggagttatttttttaggttcgcgtttttgttaggcgcgtcgtattcggtatcgatagttcgggttttcggattatatcggtgtcgcgcgaattgtagagagcgttggtgcggaacgagcggtcgggagaaatttagtatttcgggattcgacggtaagggtggttttgataacgaaatatcgagaaagaaaattaaagaaagcgagcgataattaagaaaaggggaagggaaattgaataaaataacggagagcgcggcgagaacgagagggtaaatggtagtcggcgagttgggatgaattaaaatgaataaatgaggaacgaacgaataaaaaaagtaggagtaagatcgaacgaaacggataattagagaagggggaaaggataaagagggagggagtagattaaataaaagaaaacggagtatgtttaaagcgtagaatatattaaaatgagaataagggggtaagaaaattaacgattttagttgaacggaggataggttaaacgaaagggaggtaggcgggtgcgagtagagtttggtagagattttggcggtcgttagtttttggcgtttttgtcggtgtttaacgggttgttagcgtttttgcggtagagcggatttcggcgtagcgcggcgcgcggtggagtttggttgtttgaggatagttagtttttagggtcgtatagtttatttggtgggaagtggcgggcgaagagggaattcgttttatttttcggtttttaaaataatcggttcggagcgtttttagtttatacgagtgagcgcgtagttgcgttttatttgcggcgcgattttttacgaggttgggtagttgcgcgttttagagtttggcgtatttcgtttttttttcgtttgtagttcgtcgttcgcgtagttttaggtcgttttttgttgagagcgtttagttttgttttgaatttaggttgcgtgttggcgttgttagttattttcgcgtcgttcgcgtttggttagtttgtttcgagtttggttttgacgtcgaaatacgttttcggtaagagatttttattagagttttgttcgttgtcgttgaggttttgagtcggatgattcggtcgatcgttaaagtcgaggagagttttaagtttttagattcgggttgaggtttttgggttaacgttgagaatttttaagaagggtatcgaggttttatcggggttttgtttacggcgtttatgtttattttggttttgagttttcggcgggagttgtaggagtttgggttttagcgagttttgtaggtcgtttagtgattttatagtggtcggaggaaatagtgcggcgcgggataaggttgtagcgaaatgtgaaagttaaggttggtttcgcgg

SEQ ID NO: 7330 - DNA, 1277 bp, synthetic construct
  misc_feature 1..1277: note = Description of Artificial Sequence: Synthetic polynucleotide
  source 1..1277: mol_type = other DNA
cgcgtttttggggagcggtttatttatagtattgcgagtatttagtatcgttttagagtacggcgtatataggtataaatgtagtagaggtttttcgattcgttaggacggcgttttttttagatgggtattatacgtacgttttttgttttagttatttcgttttttagatgcgttttttacgagggaggaagggttttttgttagtttcgaatttagcgaggattagttttaggattgagaattaaatatttatttcgggcgtgatagttttgtttcgtttgttaatgttattgttaaggttataggtttgaggtcgagcggttggggttggggtttttagttgcgtaagaggtttttagtggaattgcgttttgggcgcgtagttttaagtcgcggatgggtcggataggtttttttcggtttttcgcgggcgtttgttttcgtagttaagtttaatttttttcggagtttttgggtttttttgagtattagaagttgaagttcggtgtttaattcgtgcgtacgtcgttggggatttcgatgcgcgaaggagagcgggtttcggggtttcgtcgttaggtaacggcggttggagcggcgagaggagttcgggacgagcgtagggtcgggcggatgcgggggtagcgtcgttttatattttggtttttagttttttttggttggggcggggttagaatagggaaagttgtagtggtcggttcggtaaagttaggcggggcgcggttagcgatttatttgttacgcgtgggtagtcgcgtagattcggttcgtgtatttcggtcgagtagttgcgattttcgacgggtcgcggacgtatagtttttttttcgggttataggttttcggttggggttggggcgattcggagttgcgcgtcggcgtacgcgatttcgttcgttttttattttttgttttattattagttttaatttggttttcgttcgtcgcgcgttcggggtttaggggagcggcgcggggatttaggttttacggcggagagagcgcgcgggattgcgaagattggggtcgagtgtcgttttttttgcgttttggtagcgtcggttttgcggagtagaacggagttgggcggagcgttgcgcgtattgttttttcgtttttcgaaaggttattttggcggcggggcgtcgtgacgtaggtttgatttacgcgcgggtcggcgttaatgcgaggttttcgggtagcgagcgaggttttgatggtcgacgtaggcggagagggtgggcgtggggcgg

SEQ ID NO: 7331 - DNA, 2394 bp, synthetic construct
  misc_feature 1..2394: note = Description of Artificial Sequence: Synthetic polynucleotide
  source 1..2394: mol_type = other DNA
cgttgtaaatgcgttaatatttcggttgttagcgtatggcgagcgttttttacgtttattcgtaggagcggcgtttcggtcgttttttcgtttttagtttgttttgttttcgtttttttttttttttcggttatggttatttttggacgtttgagttttatcgtgcgtagttttttagatttattcgagtaggacgcgtaatatttgtcgaggcgggagttagaattacgcgttttttagttcgatttttgcgtcgtttggttggattcggagcgcggttattatttttgtaagtgcgtggtggattgcggtgcggggtgggaggtaggaggcgtggggtagtagaattaagggtttagtttacgaggggtcggaaagtcgaaattttagtttagagtttagatttttttagttttggaaacgggagttttgttttcgaatttttaacgtatttatttcggtcggtatattttaagagtagatttttgtttggtattggtgtttcgagatttggggtttttgtgtttgacgatttttagaggtcggaataattgaaatttaaaacgcgtcgttatttgtcgtttttattttatttttcgttttttttttatgtttgaaaatacggttacgatttttaggttttcgtttgggatggttagtgttggcgagtttatttttatttcgtttttatttagggtttcgtaaatttcggtatattgtagtgtagtcgatttggaggaggtcggcgttggtgatttagtttgtgataaattggtcggttagcgtaattatcggtgcggatatgttaagagggtttcggggtgggttttttcggggtacgattttaggttcgttgatgatcgttgtggtatgaatgaggttatcgtattcggagaggtggatgtttagatgtggatttaggaaatggttttatttcgaaagtttcgggttagtgggcgtgttttttggttagtgtttttacgttcgcgttagaagggtagtaggttttcgtagggttcggcgttttatttattcgtgttttttttgttgtttttagtttcggacgagagtagtttggagattagttcgttagattcgtcgtagcggtcgttcgttaggttcgcgttttcgggttcggacgtcgagaaaaggaagaagcggcgggtgttattttttaaggcgtagacgttggagttggagcggcgttttcggtagtagcggtatttgtttgcgttcgagcgcgagtagttggcgagtttgtttcgttttacgtttacgtaggttaagatttggttttagaattatcgttataagttgaagcgcgttcgcgttttaggggcggcggagtcgtttgatttggtagtattcgtcgagttgtacgtcgcgttcggtttgttgcgtcgcgtggtggtgtcggtgtttgttcgcgacgggtagtcgtgcggcggcggcggcggtggcgaggtgggaatcgtcgcggtttaggagaagtgcggcgtttttttagtcgtcgtttgttttttgtcgggttattttgttttcggtttcggttcggcgtttggtttttttttcgtttattagtatttagtatttttcgttttggttttttggaattggtgaggtcgtagggcggtatttggggttattttcgattttggagcgcgttttgcgattggagtagggtcggagtcgaacgtttggaacgtttttcgttcgtttttttgtagttttatttttttgggcgttagggtttttggcgcgtttttattagtcgtcgcgtaagtatatacgagggacgtgtgttagagtttttttttttattttttttttatcgttagttttagagttagattttatgtttgggttttatttgtatatttttaaatagcgatttgtataggaagtaagttatttttttaaaaaatagagtattttttttcgtagttcgagaataaaatgtgtggggttgggttttttgcgcgtttgcggggaacgtaggcgggagtcgtgttttttagatcggtgttcgtatcgttggttcgttttttgattggttaagtggggttcggttttagttggatcgaagggcgggttgtagtttcgatacggttttaggaagatatttgggggatggaggggtggtgatgttagggttgggcgcgggaagaaaaggagaggaggaagttgaggtaattttgggatttttgttagcgggaggcgttattggttttagagtgatttcgatttttcgttgggtttttagagttgttggcgtttcgaatatcgaaaagttaattttgtggattacgatagggtagaaggagttttttcggagatgagtcggcgaggttaggtgcggggcgcgttgtatcggagtagtttaggtcgggtcgt

SEQ ID NO: 7332 - DNA, 1627 bp, synthetic construct
  misc_feature 1..1627: note = Description of Artificial Sequence: Synthetic polynucleotide
  source 1..1627: mol_type = other DNA
cgtttcgggtttggagggaggggaggtttttcggaaaggggtggcgagagattttcgttacgatttttaagttttttcgcgcgcgttggaggggatacggtgggcgtttaattttcggcgtagtagtaggttttataggttgtttgttggggtttggggaagtcgaaattgcgtatttcgggattcgggagtttttcgtagcgcggtttcggcgtggtgattgggaagcgtatattgtcgttagttagttagtcgtcgtcgtattggtttagtttcgaaaatttttaggcggcgtagaggtgtttaattttggttattacggcgtcgcgtcgtcggtacgtcgcgtgggttttagatagcgttagtcgttcgggtacgaagaatatttggtttggggattatagcgggttatcgatcgagggtagggtgggcggagaggggcggttgatatttaggaggcggagttggggtgcgggatcgtagaggtgttggatcgagtttgggtaagaggagttgggggatcgaggtaaaagtgtagggagggtttggagaggtgagttggagtttgggcgggcgggcgggttgatgggggggcggtgttttggagggattcggagattttgttttgattttaagttgaggtttatttttcgttttttatattttttagatttttttttaagattttgttttcgtttcgcgttttattcgttagcgcggaggtgaagtagaaggcgtcgtagcggtcgcgtattcggtcgcggggttcgtagttgcggatttcgggtcggtttcggtcgtcgtacggggcgcgtgcggtgagtatagggtagcgtacggagttttcgagtagttagttcgcgttatattagtttagattttcggtttaagttggcgggagacggcggaggtcggggataagaggcgttataggtaggagttagattgagttcgtttggcgttttttttcgggtttttgagatagtttcgcggggtttgggaagtgttgggttcggtcgtttattttggtagagttgggagtaggtggttaggcgttcgttttgtttttcgtacgtttgtttcgtttcgtagtaattgaattggtatcggtttcggttgggttggtacggaaatattatatttagggggtggcggggattttggggagggttagcggatgggagcggagggggaggaagggcggcgcggtttgggagagggagttggggtttttaggggtgcggaggagatattgggaaggagttttgggagatttaggcgaggcggattcgttgttatataggaatggggcgggagcggaagggttttattttttaagtttaaggttagcgttacgttttcgttttcgatgtcgttgatgagttcgtagcggtatcggttttcgttttttaggcgtacgttcgcgatgattagggaggcgtttagtcgatgtttttttcgtattttggcgcgtttttttaggggtttatattttcgggcgtgtagttcgttggtgatgaggattagcgtttttcggagttttttaggttttattttgttttagcgtattttgtagttgggaggcgtggtgtttaggacgtagggtagcgtggtcgtggttttacga

SEQ ID NO: 7333 - DNA, 271 bp, synthetic construct
  misc_feature 1..271: note = Description of Artificial Sequence: Synthetic polynucleotide
  source 1..271: mol_type = other DNA
cggttcgcggagttagcgtttttttcgcgtcgatttcgggtttcgggcggtcgtcggggggcgtcgggcgtatttttcgttgttaatttttcgttcgtgttttcgttcgcgtttgggtttcgtcgtattttagtagaagttattatagagaataaattatttttttgttttcgagatgggttttcggggaggaaggtaaattgtttgtttcgtgtataataagttaggcgtggagagtagcgcggaggaggtcgcggtagttatcgagcgg

SEQ ID NO: 7334 - DNA, 884 bp, synthetic construct
  misc_feature 1..884: note = Description of Artificial Sequence: Synthetic polynucleotide
  source 1..884: mol_type = other DNA
cgtagtattttggcgaatttttttacgtttttggtgaagttgtttcgataaattcgaaatatatgttgtagcgttttttattgttggtcgttgaacgtgttttgggattaaggttttagagagcggacggtgttcgagtcgttgttttagttgtgcgtttgtagtttttttagttacgttaagtcgtcggtgcgcgtttagttgttattggcgaaggacgagatttggaggtagcggagggggaaaagtttttgcgggattgggagagaatgaagattggaggcgtgtagtaagtggtcgggagagtagttagtataaagagaaggaagaaagaaataagaggagatgagttttaggaggcggttgatgttagcgaattttgtgtcgcgttgttttttttcggagttagggagtagcgagttttttatttagatcgcgttagtgcgtttcgggttttattagtttttattaggcgttgtttttttcgtttttatttagtttttttttttcgttttttcgcgagtgtatttaagcgttttcgttttatttatttttagcgtttttttaagtttggaggagcgtttagagtagtagaaatagtaggtattttatatcgttcggcgtggggatttcgcggagcgtcgttgcgcgtcgttttttgatttgcgtatttttttttttcgtcgtttagtttacgttttttttcgttgggtgttagttaatttttaagtttagatttcggtagtttttttcgttgggtttgtcggcggtttgttgtttttgtcgaagggcgttttcgtttttagttgtgcgagttgtaaagaggtcggggttttaggaattttggcgtcgtcgtttattttagtaggttttataatcggcgt

SEQ ID NO: 7335 - DNA, 1007 bp, synthetic construct
  misc_feature 1..1007: note = Description of Artificial Sequence: Synthetic polynucleotide
  source 1..1007: mol_type = other DNA
cgcgggtttggttttaatttagtacgcggaggtttttttttttttagttttagcgaaagggcggcgggtgggaattattcgttattttggtaatttttttttgtcgtttgtttataatagtttgaattatatttttgttaggtagttattagttcgattttttttttttttagttttcgtttttttttttagcgtttaggttgggggcggcgtcggtgttagtttagtttagggcgaagtttttagggtcggttcgggtcgggttgcgggattcgtcgtggagcgtaaagtgtttgaagttttcgcgcgtattcggttttgtttttaaaggttttttagaaatgtaagaggttaggcgtagaaatatatacggacggtagttttatgagaaaatgtagataaagagttcggcggtagggttatatgttttttataatttttaaagtcgttattttaattagagttttttttgagttttaatgtttaattttgagtaaataagtcgttttgaaagaagaattcggtttttaattaaaagtgtattaatattttttttttttttaattttcgcggagtaaagtttcgcgcgggcggaggcgaggttaggtcgcggcgaggtcgtttcgggttcgcgtcgtttcgcgtcgtcgcgcgtttttaggtgacgttaggcgggttcgggattagggtttattttgcgtttttcgcgtcgcgtcgtagagttaattaaaagtaatgttacggtaaatttaaaggtttttcgttggcggagtcgcgttttcgggttagtttgcgagagagggtttttcgaggtaggtgttggggatttatttgtgtgtgagtgtgagtgtgtgtgtgtgtgttcgcgcgagcgtacgtgtgagcgtttgtgttgaaagggagagttttttggattttttggagatcgagattgttttttttttttcgtttatgtttttagtttttttcgtatatgtattagtgaagaaacgtacggatatcgtcgt

SEQ ID NO: 7336 - DNA, 2191 bp, synthetic construct
  misc_feature 1..2191: note = Description of Artificial Sequence: Synthetic polynucleotide
  source 1..2191: mol_type = other DNA
cgtcgcgttttgttcggttttatttattcggtggcgtttgggttcgttttagttttttatttttattttagggtattatttattagggtttcgtttcgttttagttttacgtgcggggttttatttcggcgttagcggttttttaaatatttttatttttatatattattttttttttattcggacggtagtcgaatagggataaaatttatggcgtatagttagtttttttcgcggagtacgttttgtgttgttttagtcgttggggttttttatttcgggttatagttttttggcgtttttcgggtcgaggtagtcgggtcgaggagtgtcggtgtggttcggttacggggcggggtcggcgggagtttcggtcgtcgtcgtcgtcgttgttgttttcgtttgttttttgggtcgttcgttcgttcgtcgttgggtgcgttgtacgcggggggtagtcgtggtgtagaggtttatgtagcggcggcggcggcggcggttgttgttgttgtcgtcgcggaggtagatagatcgggcgttgttatcgtcgttttttttcggttttatgtcgtcgtcgttgtcgttttttttttttcggcgaggggcggggggtttcggttcggggtgggtattatttttcgtagcgtcgtttttttttttgtttttcgttcgggcgttggagtcggcgagggtattcgtcgttttttaggagtgtatttttcgcgcgttttgtcggagcgagggggcgggcgtgggcggacgtcggggtagcggggatttcgcgcggttgtaagaggagggggtttttttaaggatgttcggcggtttttcgtttttaggtgcgagttgagtttgatcgggagcgagcggcgcgtcgttatgtcggcgtgacgggcgttttcggttgttcgcgcgggttttcgcgttgttttacgtcgcgtcgtgtcggtatcgggttgtaggatgggttgtatttaaagtattatttgtaaggcgcggattcggcgcgagaatatcgtggtgtacgatgtgtgcgttattatcgattagtgttttacgcgtatcgaggagatttcgtttatcgttttgcgttataagattttttattttaaagttttcgttcgcgtggttatgttttttatttttcgttacgagatttgggtggtgggttggatttaggcgtgtaattagatggagttttttaatatttatagcgatttgggtatgtaagcgattcgtcgcgcggtacgggagcggattttgggtttttagttttgtttgttattttgatttttttttttagtttttttttattgttgtttttatcgtttttttaaatttttttttcgtttttttttttattttttttttttttacgtttttgttttagtgatagggcgggtgtagggaggttttttgcgaaggtattttttcgtggtttgtttttgattttttagaaacgcgaggagaaaggtgcggggcgggaagaacgcgataaggagggttcgagaggcggaggtggggatggttggcgagtgtttggcgagttttagggcgtcgtttgtgttttgtggggtttttcgggaagagtttgggggaaattatagaggagtggagtggagtgtcgggggcgtatgggttgtgtcgcgcgttttttggagaaatcggagcgggtttggaagagtaggtttcgggtattcgagcgggagttggtagttttgtttttgttttcgcgattgttgaagtttcgaatttttgtttttcgggttagggagttcggaggcgttttcgtttggaattataagtcggatatagttgtttttttgttttcgcgttttttggattagttttggtggggagttggaaggtatcgagtgcgtttcggttaagaagggcggatagttttgtgcgagtagcgttcggttggcgcggcgcggggtgttttttatgttaaaggaaaggatggattttttgtttgtttagggtttttattttttaaaatttttttaattgcggtattggaagggatttttttggcgtttatcgtcgaattttatcggcgagttgggagttttttaatttttagtagcgtcggttggtgcgcgtcgggtttggttgttgcggtgaagattaaggatcgtcgcggttttttaatcgttaggggtcgtaggttacgggcggtcgcgttcgg

SEQ ID NO: 7337 - DNA, 859 bp, synthetic construct
  misc_feature 1..859: note = Description of Artificial Sequence: Synthetic polynucleotide
  source 1..859: mol_type = other DNA
cggcgcgttacgtagggaggttgttcggggttggcgcgtatcgagggggtgggggtcgagttcggggcggatttttttttcgatttttcgattggaggatagggaggaaatggttttgtatcgtacgatgaaaggtaggtaggagggttattaggcggggggtggtaggggacggaggatgtttagagttggaggatttcgttcgttttacggatatcgttattttgttttttattttattttgttttttattttatcgtagcgtttggtttatttattttttggttttcgttgttcgtttacgttttaacggttcgtagcggggtcgttttattgtcgtatttttatttcgcgttttgcgcgtttatttgtttacgaagttttcgagtatcgagtttttgtcggcgttttggtcgtttattacggcgatttgcggtagttttagtaggtagttttgttttagcgtcgaaaacgcgttttgtagacggtttattagcgggattagtttttttatttttcggttttttattttgttcgaggggtcggcgattagttggtttttgttcgtttttacgatttgatagggagtaggggtcgcgttgttttggttgttgttgttgcgtcgggtttagttagttaggttttggcgtagacgtcggagttcgtcgttagttcgtcgtttggttttgatagttaacgattcgtagcgcgtttgcgcgggcgggtaggggcgtggtttattttcgcgacgtttcgttttcgtttcgcggttgtttcgtttcgggttttttatcggattattaggttaggcgcgtacgtattgtagtttagttgcggttagatgttacggtttttgcgt

SEQ ID NO: 7338 - DNA, 791 bp, synthetic construct
  misc_feature 1..791: note = Description of Artificial Sequence: Synthetic polynucleotide
  source 1..791: mol_type = other DNA
cgcgcgattgtagttttggggggcgcgttcggaatcgaaatggtttaagagatttgaggatcggcgcgtttttttttttcggttttagtttttaattttcgttatagcgtagagggggtagtgcggtgggagggggggagttgtggggttggggtttcggtttggtcggtgaagttttaggattcgttcgtttggggttaaggtaaggggtgcggtacgaggagcgtagggagtttcgagttttaggcgtagatttagttgcggattcgtcgtatagttttggtgttgtaagcgtggatcgtgggcgtaaggtttcggcgggaggtattcggttcggtcgcggtcgggtttgtagggttttggcgtagcggatttcggcgcgttttggttcgcggttcgtagggtttagacggggtcgagatagttaagttcggttcgttcgcgttaggcgttggagttaaggttgacgggcggttttgaattatgtttggaggagcggcgcggtttttagggtttcgttgagacgcgttgtagggttgttcgggttttttttcggcgacgcggttagtagttcgcgtcgcgtttttagcggcggtaaaaattaggagtttcggggttttgtcgggcgtcggtattggagggtaagagatgttggtttttttcggggtttattatttcggggttttatagtatttacgtgggatggggatttcggagtagattacggacggaaaggaacggtggttttattttttgtaaaagaaattttcgcgcgtatacgggtgtttcgg

SEQ ID NO: 7339 - DNA, 586 bp, synthetic construct
  misc_feature 1..586: note = Description of Artificial Sequence: Synthetic polynucleotide
  source 1..586: mol_type = other DNA
cgggttgcgcgtttcgagttgtacgggtaggtatttttttcggttttgttttataaggtggggagagcggggttggacgcgggagggggcgggggggggagcgtgagaagaaacgaaatcgcgggaaggaggggatatcggcgggttgggtagagggcgaggcggaggttaagttgggtttgggcgtcgtcgttttcgcgcgcgtttgttgtcgggttcgggttattcggagagcgcgggcgattcgggtttcgcgtttgttcgtcgtcgtcgtcgtcgtcgtcgtcgttacgcgtttagtttcgggttgttcgttggttcggtttcggtacggcgcggcgcgggggcggtgggtgtagttttagttgtcgtgcgtttcggcgtttttgtgcgcgagtttcgtttagttttttttcgtatgtttttgtgtgttttttttcgtaatgtttttcgtgtttcgcggggggtgtgtggtacggttcgggcgttcgtagttttgtagtttttcgttgtttttttttttcggttcgtttttgtcgttttttgtcggttcgttttttttttttcggaattttttttttttcgt

SEQ ID NO: 7340 - DNA, 1678 bp, synthetic construct
  misc_feature 1..1678: note = Description of Artificial Sequence: Synthetic polynucleotide
  source 1..1678: mol_type = other DNA
cgggatcgacggcggcgtttttttttcgtttttcgtcggtaggagaggacggggcgggagaggaaggggttagttgtggttgtagtcgttatttttcggcgttcgggattcgggacgtttagtcgggttttgtagagggtgttttatttgggtattagcggtttttcgtttttagttagggtatcgaaggcgcgttcggcgggatgtagcgaattgttttttgtttcgggatagtggagcggtagaaggtttaatttttcggttcgtttacgttcgtaaggtggaaaaagtggggtgaaatcggggaaatttagcgaaattggggcgaaagaagagagattaaagcgtgttatttacgtgttagatggcgaagaagatgagcgtagcgtatagtattagagatagtatgtagtagaacgtagcgaaagtgaaggttatggtcggcggattttaattttattatatacgttaagaagtttttaggagttcgatgtttttttagaggatcgtattttttttaaggagtcgcgtttgtacgtttttttttaggttagtgtttaggagggcgtatagttagcgaagcgattcgagggttagcgaataagcgttggattttcgtaggtttcggcgattttagattcggtttttcggcgaagataggaaaacgtgtgtcgagagtcgttggagggaatcgttcgtaaatcgaagaagaaattaaattagtagcgaatatttgtaaattagtgttaagttgtgagtttttcgagattaatacgataagcgatgcgacgattttacggaggatcgagggaggaggttttattcgttttaggaagagttttttgtttttttttattaaatcgttgaggagagacgagcgtttcgtttcggattttttcgcgttatcggggcgtaaacggatagtgtttagcgaggtgttcgagcggttttcgagttttttttaaattttagagtcgggtagcgttttttttcgagagaaggagtttttaggtagtcgggaggaggtaggtttcgttggttttgcgttttagacgcggtttttagcgtagtcgtgcgtttcgaggcgcgttcgtttttaatcgtgatttcggttagtcggttttcgtaatttaagtgtttcggaaatcgggggtcggatcggggcgagtattggttttatttaacgggttaattttagttcgggtggttgtagtagtgggttttaggttaaacgttgtagttcgttttatttgttgttgtcgttgtcgtcgtcgtcgtcgtcgtttttgttattgcgagaattgtagcggtgcgattcgggatttttttttttcggcgttttattttcgatttttgtttcgttgagcgcgtttttttcggcgggcggagattgtagcgtcgggggttgaggaaaggtgggtggcgaagcgtcgtcgggcgtttggtggtcgttgtcgtcgttattgtagttgtgtacgttcgtttttcggaggaaatttgaagttagtagtataagtagggttggaggtcgagcggaggtggggcgggatcggttggagtagggattttttaaatacgtgcgtttggaggaggtgggaagttgcggaagggtatggtgtgtgtttcgcgtttaaacgtcgtagtcgtttttttcggtttttgtagtttcgtttatcgg

SEQ ID NO: 7341 - DNA, 1600 bp, synthetic construct
  misc_feature 1..1600: note = Description of Artificial Sequence: Synthetic polynucleotide
  source 1..1600: mol_type = other DNA
cgagacggagttagtatttgattagcgattaatagtggatcggcgaggcgggtttttaattagagcgagatttttagaagttggatagtttttgtatttatgggagtatgcggcgtagttggtagtgatttttaggaaatttcggtagtagtcgtcgtcgcgggtgtggtgatttcgggttcgtcgtttatttggagcgtttcggcggcgtttggtttagaattatcggggcggatagttttttggagttgtacgcggattgcggaaggggatagtgagcgggatcggttcgtatttcgttcgcgggttcggatcgttggaagtattcgggtttttttttttttttgtttttcggtttcgttttttttttttcgcgttgcgcgtggcggtttcgggttgcgcgtttttgtaggaggagatcggtattgtcgtcggcggttttttttttaatcgttagtttcggtcgcgcgtttcgtttcgtttcgcggaggagggtgggggcgtttttcgcgtcgggttcgtttagttttttcgcggttgttcgggtcgggttttttattggtcggcgggcgggaggtgaggggcggtagggttcgtttttggcggttcgcgttcgggaaggtcggtagtcgagcgtcggaggtcgtggagagggcgggtagggaggcggcgggcgtcgaggagatgtagcggcggcggtggtggcggtggtggcggcggtggcggcggcggcgtttggtttcggtcgtagtttttgcgtttcgttcgttttgggtcgtttttgttagtttcgcgcgcggttcgtttttcgtcgcggttcgtagtttgcggcgttcgagtttcgagggcgttttttcgggcgttgggttcgaggcggttaagacggcgggtcggtcgggtacggggcggcgggcgttgtgttgcgggttgcgttggtggggggcggcgggtcgcggcgcgggtttagggttcggcgtgtgcggttgggaggtattgtgggggcgggcgcgcgggcggcggtcggggttatggtcgagggcggcgggggcgcgcggaggagggcgtcggcgttgttcgaggttgttcgcgcgcgttacgagagtttgtatatttcggacgacgtgttcggcgagttcggttcggatagcggcgggaattttttttatagtatttcggtcgtttcgcgttttttttcggtcgttttttcggacgacgagcgcgagttttcgggatttttaggggtcgtttcgttatcgtttcgcgtttcggacgtataggagtcggaggaggacgaggtcggcgcgggttggagcgtagcgttgcgggatcgttcgttttcgcgtttcgaggatatcggcggtaaggggttgttcgcgggtggatgtcgggggcggcgttggaatcgggcgcgggggaggcgtgggtgttggggcgggcgagtttagatttttcgtgggttggtttgtgggtgttttttcggaaataaatgaggttgtaggagcggtgatcggtttgattgtttttgggggtttcgaattcgtgggtggagagggtaaggcggaggtcgtggttagtatttttttagtgataatgtcgtcgg

SEQ ID NO: 7342 - DNA, 2394 bp, synthetic construct; identical to SEQ ID NO: 7331
  misc_feature 1..2394: note = Description of Artificial Sequence: Synthetic polynucleotide
  source 1..2394: mol_type = other DNA

SEQ ID NO: 7343 - DNA, 1160 bp, synthetic construct
  misc_feature 1..1160: note = Description of Artificial Sequence: Synthetic polynucleotide
  source 1..1160: mol_type = other DNA
cgtaggattcgtttttcgatggacgtgagttttatcggttcgttggtgagattttttacggagcgcgattattttagattttttttaatcgtttcgtttattattaagtatttgagttgtcggagttgggggttgatgtcggatagttttcgggggttgacgttcggtgatttttttatgttattgcggtcgtaggcgttacgggtaggtgggtgggtagggggagtatggatagagaggaggggattcgtgaggagtagattttagggcgagagtaagagcgcggtcggggtttttcgggggcgagcgtcgcggtagagttcgcgttttttttttttcgtcgttatttatttattttttcgggtagttgtttttagtgttttattttgggcgtttcggggtagtgcgggttggggcgagtggcgagggaaagaatgattgaaatttttcgagtagttttatcgcgcgcgtcgttttttttcgagttttagattgtttagtgttttagttgtaaagggttatttcggcgtttcggtttttcgttcgtcggttcgtttatttacgttcggggcgttatttatacggtaatgtttttgtttttgggtgcgtcgttgggaaattttcgaatttttataggtaaagatagagtgggatcggtagtttttagatttgaggcggaggggtcgcgggtcggagttttttgtagtcgttagtttgggaagattggagtgcgttgtttatcgagggtttgcgtcgcgtcggtcgtttcgggtcgttttgtgcgcgttcgcgcggtttgtattcgagcgttttcgcggcgtgcggtacgatgtaggcgcggcggtttagttcggtgattttaggtcggttcgcgcgttcgtcgtaacgattcggtagtcgaggtagcgtcgcgttttacgttcgttatcgtcgtcgtcgttttagtatatcgtaggcgtgagtttcgtcgcgatcgggagagtttttttagttgtgcgttttcgaggtatttggtcgggcggggaggcgtcgggtcggggcgtataggggttaggcgggggcgttgttgtttatttttcgtttttcgggcgtgcgtttcgtttcggagttcgtatttcgcgttcgcgtttcgtttggaagttttggggtatcggacgcgt

SEQ ID NO: 7344 - DNA, 588 bp, synthetic construct
  misc_feature 1..588: note = Description of Artificial Sequence: Synthetic polynucleotide
  source 1..588: mol_type = other DNA
cgtaggcggcggcgttttgtattgcggagtcgcgttttgggggagtagtatttttagtttcggcgtttcgtagttagatagttttttttagggtggtagtatttttcggttagggtgtagggattttcggggcgaggcggtcgcgtattattttttattttggtaagggttaggatcggattgttgtaggcgttgagcggggttattcgggtcgagtgtttttttatgatgagtcggtcgtttgtaggagcgttgtcgtcgatcgtttatattttggggtcggttggagcgcgtttttttcgggttcgtggtcgacgcggttttttgtcgtcggggagtattagcggttcgttttttttagtttcggttttttcggttgttcgtcgggtttcggttgtcgcgttgtttattgcggcggtcgttttgtagcgtatatttttttcggtcgcgtagttattttatatatacgcgcgtatagttttttatttggaggttgttgtaaattttaacgttacgtataagtgtattttttgtttttatttcgtagtttatttgtttcgttttttttttcgggacgtttagtttcgt

SEQ ID NO: 7345 - DNA, 878 bp, synthetic construct
  misc_feature 1..878: note = Description of Artificial Sequence: Synthetic polynucleotide
  source 1..878: mol_type = other DNA
cgggaggcgaaaacgaaatttatttttttgcgtttatttttgttagaggtttgtaggacgtgttttaatttggtatttcgagtttagaataaaagttacgggggttgcggtatgggtagggggaaggcgcgcggtggttgacgcggggtaggggttttggcgagcgcgggaggggcggttagtagtcgttcgcggggttggattgggagtttcgtgcgatttcgggtttggcgtttgggtcgggggtggttttcgggtttttttcgggggtcgtcgaggttcggtttcgatagttttgcggttgttgcgagcgtttttcgagttttcgtttcgcggtgttcgttttaggagcgggcgcggcgttgtgtttttttatttgcgcgtagagggtcgttcggtgaagttatggcggcgggttaggggtaaacgagcgttcgagcggggttggtaggttttcggggcgcgggaggatcgtgggattacggggatgaaaagttttgcggtttcgacgcgtttggagtaaatcgtggttttgcgcgtttttgttttttttcgtttttttttttttttttttttttttttttcgttttttttacgagtttattttttgttttggtaattagtaaagttttttcgttgcgcgtttttcggtatttttttttagaggcgcggggcgggagtcggggtgtcgcgattcggggttgggacgtaaggcggggtttcgagtgtttcgggcgtttttagcgtttagagcgcgcgttttgttcggtatttacgtttttttgggcgggttttagcggggggttgatacgattgtcgttcgggatagattgcgagcgaaggattggttttaagaaacggttgtagtcgcgggtcgt

SEQ ID NO: 7346 - DNA, 561 bp, synthetic construct
  misc_feature 1..561: note = Description of Artificial Sequence: Synthetic polynucleotide
  source 1..561: mol_type = other DNA
cgagtgggcgcgaatttttatagtagcgttaagtagtaggattatagcgttagcgtttggtttcggaggaaagataagttggagtacgtaagggcgattcgttttcgggggtttcggttaggtatttgtcgtatgtatttttttcgtggtggtggtatgagcgcgcgcggggcgcggggggtaggcgaggggattttggtaggcgtcgacgttttaggtcggattcgggggtttttttgtttgtagttttttgttttaatgatcgggttgcggggaggggagggtaggtttttttttaggtttttggtttttgtcgattcgatttgtttatttgcgtttttcggtagggtttatttgtacggggttttggaggtgtttgtgtagagtgagtacgaaggggaagtgttattagcgtggtttcgagtaatttggcgttgtatggtagtgggttttagagcggcgtttgttcgcgtttttgggggttgttttatttagtttaaaaattagtaaattaacgaatgagtaaagttggcgtcgttagcgattagcgtggattcgcgt

SEQ ID NO: 7347 - DNA, 1235 bp, synthetic construct
  misc_feature 1..1235: note = Description of Artificial Sequence: Synthetic polynucleotide
  source 1..1235: mol_type = other DNA
cgagttgagttgttcgcgaggttgcggtaggaggtttcgttttttcgggtagggttttttttggaggttttttcggttttttttagacgtattcgcgtcgcgtttttgtttttcgggagtagtttttttttagtcgtcggttttgggagttttatcgtttaaacgggagttgagtttgtaagcggttaggcggcggtgcggttggtgttgttgttgatgttagagttagaaagtagttgtgattggatttaattagacgttgttgtagtaaatagataagttttttgcgtgattggttttaaagtggttggtgttaaataattagtagaggcgtaaaagtagtttttttgcgttgggagtttagagtaggaggtagagttcgcgggaagttcggagtatttaggacgtcgcgcgttttttttcgttttttttgattagggagtagttcgttttaggcgtttagtcgaggtttttagtttagtgggagtaagttatagagaataattcgagagatagagagacggagcgcgtttttttgtttagttttgaaaagtgagtcgttttcgggtttgtaattttaagtttcgtagtagcggcggcggcggttgtcgggaaggaggtaggtgtaggtgtaggagggaggcggttttgggtttcgcgtttgggtttcggttatggtttcggttttggggagcggtagagggtttggagggttgagtagttaatttaaatgtaagtttaagaggaggaggaggcggaggtttaagcggaaaggtaaggatcgcgtggcgcgtcggtttttgtttttttttattttcggtttttttatttcggttttttatggggttttcgggtttgttcgttgtgagtagttttattttggggtgttggcgggatggttgtttcgtgtagggcgttcgggagtttagatttcgtggaaatgtttggggtttttttttgtttagaggggatagtgagtagttacgttgcgatatgtttgagggattcggacgaagtggggcgagggcggcgaggagtttttcggggatttcgcgcgttttcgggtttcgtagtttttagtggtcggtcgggttggtattgttttttatttttcggaggttatttcgttttttagtgttaaaggaattatttaaaaacgggggaacgagttttcgcgttagttatttttatttaaattgtttcggaggaagggataggcgaagttttgcgatcgt

SEQ ID NO: 7348 - DNA, 5964 bp, synthetic construct
  misc_feature 1..5964: note = Description of Artificial Sequence: Synthetic polynucleotide
  source 1..5964: mol_type = other DNA
cgcggtggttggttgtagtttacgtttttacgatttttgtagaaggaaattacgttttttttttttttttcgtatttttatttttattttaagttttcgggaagttttgcgttggtattagggtaagcgtttgtcggttttcgggagttaagcgaggtcgcgcggtttgggacgtaaatgggagggagtagtcgttgtcgttttgcggggttagggttattgggtaggcgtagcgcgggttaagagtgggaggtttagggtaggggattcgtattcggggttatttttgtcgcggcgcgttttgcgttttagtagtgtatagggtggggatttttcgaggatagtggtgcgtcgacgggtttttcggtttttttttttttataggtttcgttgtgtggtgaaggagttagaagaggcgatttgggtgttgagattcggggttaaatcgtggagagtgtttggagtttatattttagatttttggacgtcgtagttagtttagtaggttttatttggagtcgtttcggggtttaatcgggaggtagcggggtgtaggcgagagggttaatgcgttcggttcggttggtttgaggagtttttgtttttagcgatttatagggtagagagtttagggtttcggtttgatgtttttaatagttggggattggagagttggaggggtcgtagatttaggttagagtttaaagtgcgtcgcgcggcgagtcgttggatttttttgggttttacgtggtttttgtgttatatggagtgataggtcggcggaaggcgttttagtcgtcgtttagcgttttttaaggtgtaaggaggtaggatttttttatattggcggcgtagggggttttacggttgcggacgttcgttttggattttttagttcggtagattttttgggtggagaggcgttttttagggtcgcggcgaaggagagcggtttttcggtacgttttttcgtattttttttagattagtttcggttttatcgtttaggagagggttcgtttgaggatttttgtttgtgtcgcgcgtggttagtttcggtttttttattttatggttggtttttagttttttagagcggatatttttttttagggatgtagggcgaggaagggcgggtggagttgcgaatttacggggatttggaggattttttggttttttggagaggggtattatgagagggatttatgggatatagatttgggggattgggtaattttattttttttggtaattataaaaattttgagtaaacgtgtttattcgttatttcgtagaaatatataatgtaggtttatataggtatttttgcgaggttttttagttaagggcgtagcgtttttcggaagtttttggttttgttattagggcgttatcggttttttcgtattggggatatttcgtttgggttttgcgtagtcgttgtatttaaggttttgggagtttcgcgtttttttttaggcgttcgggataaagtgttcgagggtttcgtagacgtttagttttgttcggggtttacggtcgtcggggttttttaacggatcgtcgagggttacgttttgttggggtgtgagcgacgatttttttttcgttttatgaggttcgttattagttaggtgttttatgagacgtcgtggcgagtacggttatttggtagttcgttcgggtagttttaatttaattttttgtttttcggggtatttttttttcgaatagtttttttcggtttttttagttttgtttaaggggtttggaaatgttcgtagttttaagaaaggttttatttaagtataggatggggtggggcgggcggggttaagattgttttggggattgaatttattttcgtttttagcgattttcggcggataaagcgtaagtttgtgtatacggtcgattgagttattggaaatttagtttacgaatcgtagttagggaaacgggagtttgtttagttgtttttgcggaggggtgtgcggaaacgttcgcgatgggaattttttgtagattatgtatggagggagtttataaaaaggaggaaggggagcgcggtggggaggaggtcgcgtgggcgtggaaggttttagggttttgggggtgttcgtttgtttaggcgtagggaatggcgcggagttggttggggaaggagtcgattacgtttcgtaggttaattggtttaagaaattttgtaagcgttggaaaaggtcgttgaaggagttcgttgtacgcgtacgtatatatatatatatatatataaaattttaaaaaaaaaaaaaaaaaaaaaaaaaaaagagcgtcgagtatgcgtatagagaggatgttatattggaatgagttgtagtgggagtcggaggatcggagcgggcgcgcgagggaggcggcgggcggggagcgagcgggtaagggcgggcgagcgagtaagcgagcgaggtcggtgttttttcgggcggcgatcggggtttgggtttacgtcgagggtaggacgaattttattaggtaggacgtcgcgtcggttgttgttttcggcgtttaggttggtcggagagtagtttttcggttcgtaggttgagtgcgttggttaggggttttttttagtttaggaaaaaaaaggaaaaaaaaaaaaaggaaggaagtttgagggagttggggttggaggtggcgggtgggggaaggttggggagggtgtaggggagcgaaagagaagggtaggagaagaaagcgattgtatttgagcgaagttttaaatttttttgtgcgttttaggttgttatttttgtttttcgggtttttttcgtttgcgttttcgggttcggaaaagtcgagtcgtgcgggagttcgttcggagttgtaaagtgtttttttttttcgggcgtagtttgttttttttcgtcgtttatttttttcgtttttgtatttattttagcgacgtagtcgtcgttgttatttatttcgcgttttcgcgtttttttcgcgttggggtttttttttttttttggtttgggtgggagaaaaagatggtgaggacggggaatcggagatcggtatgggggtaaaaatcgtgtagatattcggaatcgtttttttggaaatatttgtttgagtaattgaaataaaattggtagtagtagttttggagcgtgttttagcgaggatggtttttttgtttattattttttttttaaagtaatattttgttatttaggggtttttcggttgtttttttttattcgatttttttttaaaattgttgatttgagttggttttggagtttattttttaatatgcgtgcgtgggtatgtgtatgtgtgtgtatgttttgtagaaattcgttaaaatgtaattgtaggaattgcgagatgtatttattgattttgattaggggcggtgggaaggggttggagggagttgggggattttggagggtgggaagtggttgattttcggtggtcggatatttatttagagtttgattcgtattcgtgtttttttggaagcgttataattgcggggaaggagtttttagaaatcgtgttagttttaatatggcgggttaaggtggtttttaaaaattgaaaataaaggttttgaggtgggaaaaaatttagttgaagtttttattttttagtttcgattttttttggttattttaggaagcgttttagcgaattaagtggggaaaaaaagaaggaatgggttgttcggtttttttttttcgtggttagagtttgtgtgttaagtttattgttaggggggaaagggatggagaagtgtttttggttcggattagggtatcgaaacgtaattgtcgtgtgtgtttgtggattagtgtgtaggtttgcgtgtgcgtagtttttttgggtgtgtgtgttaaagagaattatttcgaatgtgtgtgtgcgttttggaattagattttgttatgatttgacgtgataaattgcggatacgtggtgtaaagtatatgagggtagagggagtgatttattttgtttttttaggagacgagttagttttcgttttgtgtgtgttggattttgcgcgggtagattttcgagtaggtggggcgaggaggtgtttattaaaaggattaattgtttcgggtattgggtgtaatcgggttgtagacgttagtcggatttcgtgtgtgtagggggcgcgttgtatttaatagtgggtttttgtttttttttacgtcgttttggggtgggaggtgggggatcgggatcgaagtttggagaagattaaagtggtggtggtggtggtggggtggggtagaagggcgggagcgcgcggttttgggagataagtacgtagggtcgaggcgaggggttgttttttttatttttgggtttcgcgttttagggaaggtgggggatggggatagcgtttggggaagaaattgttttttgttcggtttaggaattttttcggcgtatcggagaggggtatttttttgttttggcgggtatggaggtcgggtagtcgtcgggggatgtgagtgggcggcgaagtgcgggggaaaggtcggcgttttagggcggggaggatttgggagtggagttcggagataaaatcggggttaggtagaggagttagagggaaagttagtaaacgcgagttcgggtgagagttatcggaatgcgggaacgtagtttagtcgggaatagggttttcgataggggtcgttcgtggttaggacgcggtcgttgaatagaggtcgcgcggcggtttttgttcgagggatttcgtgggcgggggttatacggaggtcgcgtacggttttcggggttggcgggggtaggtgggaggatttttttcgggttcgcgaatttgatttggtagcggttaggtgtttggaagcgtttttaaatgatagggttataaagatatgttggttaggtttgtagttagcgtagtaacgtggtttgtaggagcgtagaacgaggttagatagggttattcggacgtcgtgttgttagtgggtgggggtcgggagtaagcggtattggtttggagatttcgcggtaggtgattttttttatttgggtagcgaggttgaacgatggcgatacgtcggttaggacgcgttcgtggtttttttagtttgcgtttgggcgcgttttttcggggtcggtttttttatgggtttcgcgaggtggggagtagtttaaaatggttttgtgttgcgaagttgtagttttagtcgcgaatttttttttttgtttttttgacgtcgtcgttgataagcgtaatttgttttaaggtttcgaaattcgcgattttgtacgaggtcgtgtcgtggaagcggatgtatagttgattataaagaatattttatagggttttcgaagggtttaagtttttttttttggtggggaggagggaggagtcgagattgggtaggagttcggtcgattatcgttttggtatttaggggttcggggcgtattagtagttggggttggggatttggatgcgcgaaaagtcgagggagttttcggggacgcggatggggattattcggggtaatagttacggatatcggtgttcgtggttgatggcgtttgtggtgttcgagaatttcgggacgacgttggaaagtttgggagatcgtttttaaatttttggagattagttcgtagtttcgttttcggaatttttaggatttttgggtttttaaagttgggtgggattttaagaaggtaaggcgaggttcgtggttttgacgatcggtcgttcgatttttcgtttattttagttttttttattttgtttttttgaattttgtcgaatcgagtcgggtttggggtttcggggtttcgcgtattaattttagtcgcgttttgagggttttcgtagtatagtcgcggttgattcgaggttattggtgggaaattaatttagacgaggtcgattttttttggatttggttcggttgtcgt

SEQ ID NO: 7349 - DNA, 5964 bp, synthetic construct; identical to SEQ ID NO: 7348
  misc_feature 1..5964: note = Description of Artificial Sequence: Synthetic polynucleotide
  source 1..5964: mol_type = other DNA

SEQ ID NO: 7350 - DNA, 5964 bp, synthetic construct; identical to SEQ ID NO: 7348
  misc_feature 1..5964: note = Description of Artificial Sequence: Synthetic polynucleotide
  source 1..5964: mol_type = other DNA

SEQ ID NO: 7351 - DNA, 703 bp, synthetic construct
  misc_feature 1..703: note = Description of Artificial Sequence: Synthetic polynucleotide
  source 1..703: mol_type = other DNA
cgtttggggattttcgtgttgggtatttcgtacgttttggacgcgcgtagttttatcgggagcgaattttgtttcgtttgcgggtgttacggagaggggttgggaagtcgagttagttttggcggcgattgggggcgtttttggttttttgggggggcgggggcgcgtattgttgtttaggatcgggcggcgggcggtggcggcggcggtggcgcgcggtggtcgtttagtattcgatttagtagcgcgtcggggattggttcggggcgcgttgggcgtattatgcggcgggtcgggcgcgggcgaggggcgggtcggcggcggggtttattggcgtcgggttaggttcggcgcgagaggcgcgagcgggttatgggttgacgtcgagggtttgcggcgggggcggcggcggggacggggcgggggttcgttagttgcgggcgttaaggtcgtttagtaggttaagggttttcgttcgggcgaatgggacgttcgtttcggggtattagtcgtttgtagttagaagtttttcggattttttggaagcgtaaaaaataaaaggtaatgtgtttttgtttttcggtcgcggtggtagggaggcgattgacggtagtttttcgtttttcgtgtttttacgttgggtcggggaaaagggacgcgtcgttgtttttttattgggggtttggagtcgtttatttcgcgt

SEQ ID NO: 7352 - DNA, 1315 bp, synthetic construct
  misc_feature 1..1315: note = Description of Artificial Sequence: Synthetic polynucleotide
  source 1..1315: mol_type = other DNA
cgtgggcgttcgggggattcgcgggtattcgggacgaggcgagggcgtagaaaatttggagtttaattagtacggagttgagttttcgcgttttaatttttaggtgatttcgtgcggcggcggcggtagtagtagtggtagcggcgatcggagttcgtagtagtttcgagcgttttcgggaggataggcggcgagttcggcgaatcgttatttgttagtcgatcgcggcgtttcgcgggtcggggtcgggagttcggggcgagttcgaacgcggtttttttttcgttcgtcgcggagattttgtcgggtgggttgcgggcgtttttcgttgtcgtttgtgaacgttgtgggtgcgcggggttgcggttacggcggcggtggcggcggcggcgggagtcgcgagtcggggtcgttcgggttgtgtttcgtttcggtagtagcggtggcggcggcgtttgtggtttaggatgcggtcggggggcgtattgttcgttttgttcgttagtttgttgttgttgttgttgttgtgtttgttttggtgttcggtagacgcgttcggtcgcgttaggtaatttatttattcgtcggtcgcgtttcgcgtcgcgcgtttcgtttggcgttttcggatttttaagtcgtttatcgttttttttcgggcgcggagatttttggtcgcggcggggagtagtttacgggcggcgacggtttgagagtggagtgggggagggggtcgtagggaggcgatttttcgatcggtggacggcggttggggagtagagggatcggttagggttgcgggggttttagcgcgtatcgttgtgggcgaggtagttgtggagcgggatttgtcgtcgggtttcgtattaggattttatgttttttattttggtttttgttgttttttttttttcgttttaaggtttttttaattttggggttggggatttggtttgggagtcggggagtgcgagatttttttgttaggtaaggagcgcgatttttagttttttagttaatagttttcggcggggtgtagtaatttaagtttttttttcggttgtgtaggattttggtggaggaaagtagggaggttatttacggtattttcgtagcgttgaggacgtttcggagttcggcgatcgcggtatcgcgcgttattaataggtatagcggcgtttagcgcgggcggattggggttcgggagttgcgagtcgggtatggggcgcggttgtatcggtttggattcgttgggagtaggtaggttgggacggcgcgagtgagtgtaagagtgtgcgtgtgtttgaagagggcgcgg

SEQ ID NO: 7353 - DNA, 1316 bp, synthetic construct
  misc_feature 1..1316: note = Description of Artificial Sequence: Synthetic polynucleotide
  source 1..1316: mol_type = other DNA
cggggtttttcgaggtcgtttcgtcgtttaggatggagtaggtttggtttttggaagggcgcgcgggttgtttggggacgggggcgttttttttcgcgtttcgcggtttttttttttttattgtaggtagcgcgcgtttgtagcgttttgggatcgaattgatgtttttgggaaacgaaattaaatttttttgaagtttttagttcgggttttttttgtttttcgttattcggcgtggtttagttcgggcgcggaacgagggcggggtcgtggttatcgcggcggaaacgattcgggtcgggggcgggcggcgaggataagggggttttgtgcggtattcgtttagtttgcgttttggggattgcggtcgggcggcggggttggacgggagtggacggggttgggcgcgggttgggcgcgttgggtcggttaggcggcgcgttgatcgcggttttcgtgcgtttcgtaggcggggagttcgtatcgtcgcgttcgggtcgcgagtgatgataatttaagaggtcggcgcgggcgggcgtgagcggcggaggagtcgggcgcggcgatacgcggttatggagcgggagtcggcggggatcgaggagttcgggttttcgggacggcggaggcgtcgagagggtaggacgcgtacggtgcgttttaatttgttgtcgttttcgggcgtcgaggattttgcggttggcgcggttaagggcgagcggcgacggcggcgcgggtgtgtttagtatttggtcgataatcggtttaagattattaagtatacgttgttgttttttttgtttaagaatttgttcgagtagttttatcgttcggttaacgtgtattttgtttttatcgcgttgtttaatttcgtgtcggcggtgaacgttttttagttcggtttggtattggcgtcggtgttttttattttggttattacggtttttagggatttgtgggaggattatagtcgttatcgtttcgattataagattaattatttgggttgtttggtttttagtaggtgagttgggcgggcgggcgagcgagcgcgcggtggcgtagggtagggcgtttcgggaatttggtgttgggtatagtgattggtaggggttgggtgtttagaaggtagttttatttagggtggagggttcggttgcgcgggattcggtgtcgatcgaagttatagcgtcgttaaggtttttttgtgttttcgtcgtagttaaaggggcgttttggatgcggggacgcgtggggattttttgttatttcgtgtcggggttagaatgattttaaggttagaaatcgacggtcgt

SEQ ID NO: 7354 - DNA, 1110 bp, synthetic construct
  misc_feature 1..1110: note = Description of Artificial Sequence: Synthetic polynucleotide
  source 1..1110: mol_type = other DNA
cgtttatttcggttcggagcgtggttaggagagtcggtatcgtagaaagcgttgcgggaagcgggttttttttcgtttattcggatttacgatttttagtaggtttagtttatttttttgatttatgtttttttatgtgtttttttcgggaaggggcgaggagggttagttggagtaattcgggagaagtttgggaggattggtaggtttttttcgtttttttttattggtttttcggaagtagagaaaaatggaagtcgaggtagagttaggaaaaggcgtaaaggggtagggttttcggcgttaggagaggagtagagggtgggtaggcgacgaggggaggaggtgcgaggttagagatttttgtagtggaggcgtcgggagaattcgaggtcggtgttttgttcggcggtttataaaggaaggagaaggcgtcgcgttttcgttatttgtgcggcggtttcgagcgttttcgcgggagttacgttttttagtagttttatttggattttttgcgttatcgtcgtcgtcgttgtgggaggcgatttggatatgtttttttggattattggcgaaaagtcggttcggagcgaagtagttagttttcggcggcgggttttttttttttcgttttcgttttttcgcgttttgatcggttttgggggtcgtttagggtttaggttcggtcgttttcggcgtagcgtttcgtagcgtttcgggattcggcgttttgttgttaggcgtttagtgcgcgggacggggtcggggtatcgggcgaagcgagtcgttcgggaggcgggacgcgggggcgcggttgcggtgtttgggagaggggagtttttagcggggtagtcggggtcgggagagcgggcgtagcgcggcggggatcggagtcgcgggcgtcgggaaaggttttcgttaggaggggagggaatttcgggagcgcgagttagggggaggcgcgtcggaaagcgagagtgataagtagtttataagtcgaaaagtttttcgcgggaggcgcgcgtcgcgtgggtttcgatttagtcgttgcgcgtcgtcgtggtatataggttgaaaagtttgcgaagttatagaagttaggttcggcgt

SEQ ID NO: 7355 - DNA, 1655 bp, synthetic construct
  misc_feature 1..1655: note = Description of Artificial Sequence: Synthetic polynucleotide
  source 1..1655: mol_type = other DNA
cgggttttttatcggcgaattgaaattggttcgtgaagaagtggtaaagtaatataatttttgtagcggttaggtcggttttcgggaatttcgttatgtcgtcgtcgttatttttttattttattcgttagtttttcgtcggtgttcgggggttttcgatgtaataggtacgatcgggttaaacgttgcggatcggtttcggtaggattcggaggtttttgtaaatgtcgttgcgattttatagtagggaatcgagaagaggaagaagcgaacgcgagtaggagcgtagcgtttttcggatttttgaggttttttttgtaatttgttatattcgtagtttttattcgatattgaataataatcgcggggaggagaggttatttgtagtcgaggttcgtaaattgtcggttttattcgggtagcgttaattcggtgttcgcggacggtgattttcgagttttagcgatgcgttttattgggtttaaaatagatttaattttatagttagcgtcgttgtttgttttagatttattagggttggtcggttttgtaggaatttttttttgtttagggatggtttcggtaggaggtttaggtttgcgggaaggaggttgatgacgaaattttttcgataagttttgtttttttttttcgttcgacgtagggcgcgcgttttttttcgtagtcggaggaatgggtagttttaaagagttgagttttgggaaggttagggttgtagtagtttgaggttcgaagttaggaaaaaaatgtgtttaaaaaaaaaaaaaaaaaagaggaagaagaaaggaaaagggtggagtgggagggagttacgttggaatttatcgggagagggttttttcgggtttaggaggaggtggttttaagttttcgcggagttttaggagtttggtggcggaggaggcgttgtcgtcgttacgttttttcgcgttttttttttatattttgaggagggaaggtagttcgtaatttgttagatttgtcgtcgtatttttttttttttttttttcgttttttttttcgtttttttaggttttttttatttttttttttgaaatcggtagttcgtatagatttgtttaatggttgtatttttttcggggttggttgaggagtcgcggttaatagattaagtcgggggagtttagcgaaggggagggagagggttattttagtttcgtgcgttttaggtagtcggttgttttagagcgcggggagaggggataggtcggggagttatcgggggagcgcggggcggtattttcgcgtcgtcggggcgttattttcgtagtttgttcgtacgttttgggtagtttcgttaattgcgttttatatttatttggttttcgggtcgttttcgcgttcgattgcggggggcgatcgcgtttcgtttcgattttggcggggtttttttgggtacgaaagggttaattatagttcgttttttcgcggaggttggttttggtagtggttagggagtggagaaagtaaattagagtcggttcggttatcgattttgcgaagttttttcgattttagtttagcgcgggagggtggcggaaggtggtgtatcgtagcgtggttttcgtcgttgtcgtcgcggttttgtaaagtgttagcgggggcgaaagcga

SEQ ID NO: 7356 - DNA, 1655 bp, synthetic construct; identical to SEQ ID NO: 7355
  misc_feature 1..1655: note = Description of Artificial Sequence: Synthetic polynucleotide
  source 1..1655: mol_type = other DNA

SEQ ID NO: 7357 - DNA, 304 bp, synthetic construct
  misc_feature 1..304: note = Description of Artificial Sequence: Synthetic polynucleotide
  source 1..304: mol_type = other DNA
cgcggtgggtagggttttaggaggtagttttcgttcggcgatagttttcggggcgtaatttttcgtaggacgcgtatttgttaggatagttattaagaggatgcggaggttgggggttttttcggggataaaattagggtattttaaggaattttttgcgcgtttaggtttgtttgtgaagttggtaggcggaggataatgggagtaggggtaggtttttagaggcgagttcgtttttattttttttatttgttttttatttttgcgtcggtcgtatttatttcgttttttttttagcgttcgt

SEQ ID NO: 7358 - DNA, 1666 bp, synthetic construct
  misc_feature 1..1666: note = Description of Artificial Sequence: Synthetic polynucleotide
  source 1..1666: mol_type = other DNA
cgaaatcgcgcgagtggtaggagtaggttaggtcggaggttttttttcggtttttaattcggcggtttgttttttttttttcggggcgtttgtatagtagatatttgtagtacgggcggtcgttcgggttttcgatataaggcgttggtatttgagtttttgattggtaatgtattataaatcgttttttttaggtttttttagagtaggagtacggaggttatcgtgtttataaatttttttgtgttcgttacgttttttgggttttgggcgttcgggtttttagtcgtagagtacgtttgttcgtgggaattttaatatttgtgtttcgcgaggtcggcggggcgggggcgggggattgggattattttgtttttttttagttcggtttttttcgttttgttcgtcgttggtttatagagcgtagcgagtggaacgaattgggtgcgtcgtttttagacgttggcggaaattaaatgatgaggcgaggtgggatattcgtttttcgtttcgcggtcgacgtttagtttacggtaaaggtattatacggtgtttcgtttcgcggcgacgcgagcggcgggatgattcggtttgggttttggcgtagttaaaggttcggttcgttggggcgcgattttagttcggcgcgtatagtttttcgagttttaggttggattgggtgcggttgtatttgtggagtgggtggttcggtgattgttattcgggttagtgttgttagtagatgtgtatattttgggcgggggttggcggtcgagtgttattagtaggggcggcggttaggtagttattcgtcgttttttaagttcggcgttgcgcgtagggtttggagtattcggtgttgagacgcgaatgcgtataaagagaaaagtgtttttagtgtttttttaaaatggggaatagggaagaaggataagtattatgtaagattgttattgttatttgttttttgcggattatgttgttttttttttcgttggtttggttttgagtattgaaagtcggggagagggcgtcggttttagagttagtcgtattcggggatcgtaggcggcgttggttcgggttatttaagttcggtagatgagtttttggtttgcgggggatcgggtcggaggttagggggacggtagtgtcgtcggagggagcgcgtagtttaaggtcggtgtttcggtttcgcgcgttttttttcgggttcgtagggaattcgggttatttggggagtcgggttttgtcggttacgttggtttttcgcggttttagaattaattaaacgttttttttggttaagggaagttttgcgtcggacgggggtgggggcgtgtgggggcggtatgtgggtatcggaataattagttttatttttgcgtttttatagaattcgcggcgtagcgagaagtgaatagcggtcgtttgaatggcggttttaaaaggcgatatttgtaagcgcggtcggttgtgaattgaattgagttaaatgcggcgttcgttcgtatttgagtcgcgagttattagtgttaggcgcgttcggtcgttcgggcggggaagcgcgcggttaggtcgttcgcgttgaatgcggtaagttgcggcgcggtcgttttatgggaatgtcgttatttgtgttgttagcggtcgggagggggtgcgt

SEQ ID NO: 7359 - DNA, 5030 bp, synthetic construct
  misc_feature 1..5030: note = Description of Artificial Sequence: Synthetic polynucleotide
  source 1..5030: mol_type = other DNA
cgcgttatagtggtttttttcgtttagttacgcgtagtgaaattttcggtaatcgggttagttaagatacgggatttgtatcgtagttttttagtttttggagtcggagtcgagcgttttcggtagtttttttaattttttttttaaagtgcgaagggaaaagtttcgtttgttttacgattgtaaggtcggcggatttgggagtcgcgttcggtttcggaggattcggcgggttcggggtttttcggtagcggtttttttgttaggggttaatagtagttttcgcggtcgggcgggcgcggacgttttttttttattcgttcgggaacgtggatatcgcgttcgtaggatgttcgtcggttgggatcggtagttaggaaatatgagaaggtttcgttatttttgttttcgggcggcgcgcgtcgggttgggtaaataaagtcgagacgacggcggtggcggtggtgagcgcgttggagttcgcgtggagaatatgcggcggggatgggagtgcgtttagtttcgaggcgggagagttagtcgttttgtagtcggtcgtcggtttcgtagttataggtatagttttcgcgtcgtcgagttttagtcggttgcggcggaacgttaggttcgttttggtttttgcgttttgggcgtcggtgttttttcgttttttttttaatttttttttaaggtttggtggagaggcgttcgggtagcggttaaggttggtttaagggtttgcgcggagtttgggagtttatttggtcgcgttttttttgttttaaaattattcgtcggcgttgggggagggggatatttttgtagggagtgattttttcggttatagtttggagtgaatcggggtaagtgatttgagaagaggcgcgggtggtcgcgcgcgggagttttgggagggttagtaagtgtggtttatacgttttcggattttttgcgataggatagcgttcggatttttgttatcgtttgtttttgagtttgttgtttgtagatttatagcgcgtcgggtgtttgtgtttgcgatttttgcgtgggtttggggttgtcggggaagtgttcgaggtggttaatttcgtgatgatttcgttaggaaaaatacgtcgtcgtatttaggaggacgcgttggggtggttcggagaaggtcgggtcggggaagggtgttttgtataaataaagtagtatgaatatatatttttaagggtatgattttaaaagaaaatattaacgcgagttttgattgtagaataggggttgtaagtacgaaaattttttttgatatttattatcgaggttatgtgtatattttaggtacgtatttgtttgcgcgggaggacgtagttttaggggatatacgatatttagtagaggtttgattttatttttttacgaatatagatcgtagtcgtcgtttgatcgcggtggttacgcgtggttttaaatgttacgcgtggtttttgttgcggtggtcgaagggcggggcgggggcgttggcgagtgtgggcgtttggcgaggtaaagggtgtgtgtgtgtgtgtgtgtgtgtgtgtgtgtgtatgcgcgcgcgcgtgtgttagtggagtagtagtttatgtcgcggttggacgggtaaagggggcgttggtagcgaagttgaggtcgttcggaggaaacgggagttgtttcgaggcgcgaggcgaggagatggggcgggcgaagttcgtcgcgcgttttggggttgtaattttgcggtttcgcggtcgcgcggatttgtttttgacgtcggtgcgcggtaggtagaggtttagggttttcgcgattttagaggtgagttgttggtttttttcgatagtggtagtagtggttcgggaggtgcgtcgattaagttgttttttgttttgggtttttgatatttttatagtttttgaaagggttttcggagattttagagagaggcgggtgtcgaggggttacgagttcgcggttgatattcgcgttgcggaagagaatggtattgattgagggttttggggatttgggttttggcgttttggattttaggattatgtatttttcggggcgcgttgggggatgataggaagattttgggagagaagggggagaagtggtgttttcgttttgacgttatttaatttttttttgtttttgaatttaattttatttcgggggattttggcggatagaagatgcgggggttttaattaaattatttacgatttagaaaatacgaaaattttttaaatttcggtatggtttgggatttatgagttggggggttttgtggatacggttggtatattattttaaatttttttttttatttaattttttttgacgtttcgagttggggtttttagaggttttagttttttgttgtgattgaagaattacgcgcggttttacgtcggtcgcgtttcgtagttcggagtatgttttttttagatttaaattgaaatttagaggttcgtttgggaattcgttttttttgtttttgcgggtgaatgattttcggttgtagttttggggagtgaagggattggggggatcgatcgtttaggtaaggaagagggtaggtatttgttcggggaatttgtaggggcgggggcgtgtagttaattggggagagtcgtagggtttttgttagttgcggcggcgtcgttttttttttcggtttcgtagttcggcgattcggttaagtttaaggttttgaatttgtaggggtttgagtatttttagttagtaagtaacgagatgtattttttttttttagaagtcgagtttcgttgcggagttttcggcggtttagtttcgaggttttgcggtcgcgtcgcgcgtttttattaatcgatattatgaatattatcgtttttaataagtttagcggtgcggtgttgtttgaggacggaggcgtttcggagcgggagcggggtggtcggttttatagcggtgttttggatagtttttacgttcgtttcgaggtgggtattttcgacggttcgttttttaaggataatttcggtttgagatatcggaggatcgggtatgcgtatttttttgggggttttgttcgtttgcggttcggaggggtgggggtggtgagttgtgacggggtttcgtggtaacgcgggcgggtggacgggaaagggttcggagttttttgggagtgtaggtttgtttttttagggttcgcgtatttttatgttaaggggtttttattttaaaatatgagggattaattcgtcggggtagttttaaagagtttggtggagattaagggcgttaggagttgtttttcggtttttcgttgtttggatttcggagttgggggttatttgttttttttcggattgtgggtgtcggtgcgcggttgagggcgaggaaaaaggattgagttcggtgtagagaaataggcgaagtcgagtagtcggggagtttaggtttaggtttcgcggattttttttcggttattcgagtttttcgttagagtttcgcggttcgtttggtttaaggagtcgggaaggtcgtttttcgttagggagtttcgggcgtgagcgcggttcggttgggttcgcggcgaattcggagggggaggtttcgggtttgcggggtcgggtttgagtttagcggggtgaggggtatgttggggggggcggtagtttgcgggtgggttagttgtttagattgtcggtgagtggagggtaggttttgtttggttcgattcggcggtttttcgggcgtttcgtcggggaggggcggtcgttttagtcgtttttatttgaacgattgtattagttgtttgttttgcggcgtcgttgtttagtaaaatagagattcggtttcgttaaaatgttattattagtcgtttcgggtggaattgtattttaaagtgtttaaagaggtagaaatttaggaggtttcggcgtaggcgcgtaagtttcggggagcggttgggttcgttggcggtcgcgcgcgatatttttcggattcgtgagggagcgtagcgttttaggttacgttttaggtttttggttgtttttgttttttttttttttgaatgtgttttttttgaggtttttttattttatatgatgggatagagtttgtcgtatttttaatttttttttagtcgggaaacggttcgacggtgtttttgggttttgtagtttttttttataaattattaatttttttagaaagtttttttttttttttaaaagattaaaggaaatagtttaaagagagtcggggcggtaatgtttttttgttttattttttatgtttagtcggcgattttttttttgattataagcgacggaaagtttttgggagtagataagagattttcgagggaagtttcgagagttagtcgtatattttgttaggtttgttaggttagggttattcgagggtgcggcgttagcgggtgagggaagggtagtagttagtttcgttgtttagatacgcgattggaatagtagtattttttaaattatttgattttcgttttttaaatttttaattttggggtattgggtttaaggtatttttttatttaagataaatttatcgaaatgatttttttatttagaaattgtgtggtttttattttttgttttttttaaatattttgggcgcgcgtaaagtaggggcgtaaggtaggaatgcgtagtttggatgcggggttcgggtttggtcggggcgtggagcgttcgggcgggtaaacgcgtcgtttattagggtcgttttttttttttatgttttagcgttcggtagaatggcgggaaggtgaggtataagcggtaggttttgtaagatatggcgcgattttttaagtagtggttttataagtatcgtgataattcgtattttattaagatcgagaagatatttttggttttcggttcgtagatgacgttagtgtaggtaattaggatttattaatattttgattcgttttttcgcgaggggttgaagagcgggaacgtttagagttcgtgtggttttttacgtggcgt

SEQ ID NO: 7360 - DNA, 2868 bp, synthetic construct
  misc_feature 1..2868: note = Description of Artificial Sequence: Synthetic polynucleotide
  source 1..2868: mol_type = other DNA
cgcgtttcgtattttagaggggagggagaaagggagtttaggcgcggggggtggggttgggggagtacgagagagtttttttttaaatacgtattttttcgttttttcgacgttgtagcggttttattatagacgtatttattgttttttttttaaaagtcgttttaaaaataacgtaggaattaaagcgagtttttcggttcgaaatgtacgtgtaattttttatatagtttgggttgcggtcggcggtagggtcgttgtcgtttattattatataaataggtatcggggcggcgtaggcgggggttgttttttttgcgttttcgtcgttttcgggcggataagtttcgtttttttcgttataggaattgtttagataataataattagtagatatttcgttgttgtacgagagggagagaaagtatagtatcgtttcgagataattagaaatataattaatttataacgtttttttaaattggaaaaggcgattgtgtaattattattatatgtttaggtttcgatttttcgggttgtttttttttttttttaatttttacgttaggtagaggggtgtgtgttttttttggtatagtagtataaattaataaatattgtagttgcggtgtaagtagtagtttcgcgcgttcgtcggttcgttcgtttttttttttattttttttttattcgagatttagagcgttatttaagttttattattcggttttagcgtttcgtgcgttcggtttaggtaataatttttttaaaaatcgaaagagaaaagcgcgaggcgtacgtatatcggtttatttcggcgtagagatttcgtttgtttcgggagggggatttgtttgtggtgtttttcggtttttaagtttaggtaataatttcgtaaatatattcgtcgtttagttcgtttttattcgcgcggttttcggcggcgttaagtgggtattttttttgttttgtttttcgcgtcgtttcgtcgcgtttcgttaaacgtggattttattcgcggggttcgtcgcggagtttttaggtcggggttttgggtcgggtagcgggaggcgttagggaggaggggcgtttagggattcgcgttttcgcgtttttaattttcgttacgcgagcgcgttcggttcgcgggttttaattttatcgtcgtcggtcgaattttgttcgttcgcggcgcgtatagtcggcgttcgcgtatacgcgcgtataaattttacgtaattcgcggtcgtttcgtttcgtcgtcgtcgtagttcgtttgtcgcgcgtttatagttcggttcgagtcgcggggttcgagcgatagcgacggcgtcggtcggggtcgcggcgcgcggaagttattttgtacggttagcgtcgggtataagtttgtttcgcggttttcgggggtttgggcgttgagggagaatcgcgttgagggggttaggaggagggggagagggaggcgtcgaagggtataagagtggggaaaagtgcggaaagaagtaatagtcgttttattcgggattagaaaagtggttagtgcgtttcggtcgttcgttttgcgtcggggatgcggcggcgtcggcgtcggttaacggtttagggaggcggtaggggcggcgggagtcgttaggcggagagagattaggtaagagatataacggtttagggagagcgagcggtcgcggcgcggtttcggtagcggcggtagcggaggggggtagagagtattattttttatttttttattttattttgtcgtttttgtttcggttgtttttagttcggttcgttttttttattttcgggggcgtttcggttgtttagttttttttgatttcgtcgtttttcggtttttttcgttatttatcgttattgcgtcgcgggttcgtttgttttttgcgtttatatttggggttattcgttatgattttttcgtttgtgtttaaatgttcgagttattttttttttttttttttttttttttttttattttttcgtttttattttttttttttttttatcgtatttggtttacgatattttcggttttacgatattattttttttatatttagaggttttcgttttacggtcggaattttgttgttagggatcgggcggtttgcggtaatcgtgggtattgttgaatttgaattgaggggcgagggaaaagttttttttaggtgtggtggggagagggaggcggatgtcgggaaatcgtagggacgcggttagaaaggcgacgggttgtcggagttggaaaggtaaagttggaggttcggcggcgttttgttttcgcgttggttatattcgtcgcggttgttcggggtagggagggatttggttgattttttttgtattttgtgttttcggagttgttttttcgagcgtttagaggttttcgtttgtttgttttttggaggtagggttattattagttttacgtttcgcgtgttcgtttttcgtatttcggggttaaggaaagggatcgcggtttggatttttcggggagtttttttgatgaggggaagggtaggtttggggacggcgaggatacgcggcgatcggagagaggttatttgattcgcgtagttcggatttttttttttttttttttagggacgtttggtttttttttaagcgaatcgggatgggaagtgattttaatgagattgaattttagttggattgaaagagaggttagaagtttcgtttgttagtagtttttttagtagagcggaatgagtaatatttatacggtgtttgttttatttttttattcgtattcggtttttatttgttgttatttcggttttttatattcggttcgcgtttttcgttttttttttcgcgtagaatcgt

SEQ ID NO: 7361 - DNA, 2678 bp, synthetic construct
  misc_feature 1..2678: note = Description of Artificial Sequence: Synthetic polynucleotide
  source 1..2678: mol_type = other DNA
cgagaggcgatggcgtttgttttggttagatttaagggtaagcgaggttgcgcgcggttttcgtagggtcggattttcgagttttagggcgtttttttattcgggtgtagatttttcgcggattttttcgttttttcgggttttattagttgcgtaggaatggagttggttagagttttgggagcggggagggaggcgtcgttattagagggcgtcggagttttagcgttgcggtcggtgagcggttaggtttttcggtttagtttagtaaaggtttggggacgttcgacggttgttttttttattggattttattgtttttagttttttaagagtagggttaagttagtggggttttcggttttaagtttagtgtttagggtgggtgggtgggtgggtgggtgggtggatggatggatggatggatggatggagtgtcggtttatagttatttaacggttaaagtggttttggaaaaaaaatgtatagaagatatttatttttattagcggagtttcggagttttcgtagttttttgttgatcgttttcgtttaatgtagtcgttgatcgtttatttttcgacggttaggattttttagggatagggacgtgtttttagggtaggtttttggatggacgcggcgattgattttatttcgttggacgttgtgttgggaaggatatagagaggtggttggggtagtttgcggttataaagcgaggtttaaaggggcgttttttttatttttacgttttttgggtgtcgatttgtatttttttttcgttatcggattggggttatttgggatgtttcgggggtattcggagggttaagtatcgtcgagggacggtttcgtgggaagagttttttggatttagaaggtagacgttagtagtattgttttaggagtcggaggtcggggtgggggagtttttagttttttgggtcgtacggagttttttttgggtaaggtagtaagtatttaggtttaaaggatttatttatagttattatttattgagtattgtttgtttgttagatacgatgtagagaatttcgcggcgtggggcgggttttattgaatttttcgttttatttcgcggggtgggtttgtgattagtttattttattattgagaggtcggaagtataaaggttatattcgtttttattgagagtcgtcggcgttttttgttttgtttgtataggcgaggaaattgaggttcggttggtggcgtcgtgggtttggagttcgagttacgttgattgtaaagacgggttttattttcgtagatcgagttttgtcggcggttgcgtcgtaagtcgggtaggtggcgagtttgagtttttacgtatagaaagtaggattttttcggttgttttgggtcgttatcgttagtaggtttttcgttcgggattaatttgtttgttttttattggtttttatttagttttcgttatcgaaaggtttcgtttcgtagttttttacgcgcgttttattttacgtttaaggtttttagtttttttagtggggttttgttatagggataataagcggttttttagtcggcgtcgtttaggttgcggattttattgtagatcgggttagcggtgcggggtttagcggagtttgagaaggttaaaggtcggagcgtattgcgtttcgggagtatagagggagcggaggaggggcgaaggggatgggtggggggtgtcgtcgagggagtcgcgcgttagagatttcggttacggttagtattcggtttcgggttcgttttttatcgcgcgtttcgtttcgtttcgtttggtttttttttttaaagcgttcggcgcgcgttttttatcgtcgtatttttatttttcgttagtcgtattgttcgttcggcgttcggttttcgattcgcgttcgttcgttcgttcgttcgttcgttcgtgttatgaacgttaaggtcgtggtcgtgttggttttcgtgttgatcgcgttttgttttagcgacggtaagtgcgttcggcggggaggttttggcgaggttttgggtttcggttttcgttcggcgtagagtcgcggtttttttgtttgcgttcgtagtttgcgtcgttcgatatagtgggggtggaggtagttcgtttagttgggcgttttggtgcggtgtcgcgtttaaagttttatttttgcgtcgagggtttgtgatttgtagagagcgatcgtttgattttaagttggttgtagagcgaggttagtcgggataattgggtaggaacgttttaagagagcgttcgggattggcgcgggaaggcgcgagggtggggagtcgcggattttagatttttgtttgtttattttttatttattgttttttcgttgcgggttcggtttttataggcgaatgggtttcgaggttttgttgcgtatagtgttggaggtcgggcggtgtatggcgagagcgcgttttgtaaagttcgttttatgtcgcgatttgaggttgtgaggttcgatgtagtcgcgtagttttcgttttttgcgaagtcgattttttttttatattttcgcggggtttttggttaggcgcgggcgggttgcgcggcgtagttgtcgggtttgtgttattcgttaggtcgcgtttttgtatagtttcgcggttcgtagcgacgcggatttgggcgcgcgtttagtcgt

SEQ ID NO: 7362 - DNA, 2756 bp, synthetic construct
  misc_feature 1..2756: note = Description of Artificial Sequence: Synthetic polynucleotide
  source 1..2756: mol_type = other DNA
cgttttcgtacgtattaaaagggttaggcgggttgcgaggttcgtcgttttggttagatataggacgtttacgtaggcgtatcgtatcgtatagattttgcggtggtttattaagtagtatatcgcgttcggaacgggagcgcgttaggaggtttacgttgcggagtagtagtaagacgggagtatagagtaggttggttagttttatgttaaggttgagttgtttaaagtttagcgagtgtataatgtggtttgttattatgggttcgagcgcgtaggttatcgaataggagatgtcggcgatggcgtagacgttgttatagattgagatatggcgtacgtttattaggaaggcgagcgtgggtagtagtgttgtgtcgattagggttatgttaaaatagaggtcgtatagtgagattattagcggcgcgaaggagcggtaggcgggtacgatgtacgagttggcgtcgattatagttagtttaagcgcgtcgtatagttattgtaggtgtgggtagcgcgtcgttaggcgtacggtgaggtagacgtttagtatatgaggtacgaaggtcggtagttaggttatgtttattttttattcggaagtcgttatcgtatgttttatttacgtggtaatggtgggttcgaggaaggcgaggggaatgttataggtggtgagcgcgtcggttattacggtaatgtaggggtttagtatgaggcggtggatgggagtgtttattggtaggttggttcgagttcgtgtagtcgtcgagaagggtttggttattgttagtagtaatagcgcgttaaagagcgatacggtagttagtattaagaagggtacgcgtttgtcggcgaatttatagaggatgttttcgaagggcggggttattaggttttcgaagttaatgaaggttagcgttacgtttagtgtacgattgcgtttcggttttttcgggtatttatcggcgattatggttatgttagacgtgtcggcgaaggttgagtttaggttttgtaggttgcgcgtcgcgaatagcgtggcgtagttttcggcgaaggcgaataggattgtagaggcgaatatgacgtttaggtcgattagtagcggtacgtcgtagtttatgcggtcgatgaagggttcgtttaaggggtttattagtagttgtaggatagttttggaagtaaatagtatttcgatttttacgttttcgtttttcgtagggtagcggggtcgaagggttgagttcgttggttacgtagttgtcggggacgtcgaggtgttggtcgtgtaggcgttggtattggtcggagtgggtagcggtagggtgggtttttatatttcgggagttcgggtggggttttcgtcgttttcgcgtatgtgggcgatgtagtcgggtattatgggtacgatgattatgtatagtatgttgtttagtaatagcgttacgtatacgataataagtattaggcgtttttgtcgtcggggtttttgtagcgtcgcgtttatagttttcgatagtttggtggtcgtcgttcgggtttggttcgtaggtttcgcggattttatgtttttatttcgatgttttttcgaggacgttttcgttagggtcgagcgttggcgtttcgtagtgtagaggcgagggtacgggatttcggggaggttgttttggtcgagtagatttttttgtgttttaggtggtcgcggagtttatggtttagcgtttcgggaaaggaaaggatttcgttcggcgaggcgttgtagttatttttagtcgatttcgggattcgcggttgttgggtttaggggcggtcgggaagtcgggcgcgtcgaggggtcggggtcggagattgggcgtatttcgttcggggcgcgtttagagtagttttcgtcgcgttaagaggtcgttcgcgttggtcgagggatatgttgttgtcgttcgttcgtttgttcgttcgttagtttcgtcgttgcgttttttttttttcgcgtcggtttttgtttttttcgtcgtttttttttttttttttttttttattcggggttgtgacgcggcgagttttagttttcgagtggtgttcgggttatttacgtcgtttatgttaatgcgacgtcggcggggcgggggtcgggggcggggcgtggtcgggtaggggttcgttttttagatgttttagggttggaggtttaggaagggttttcggtgtggaagttttgaattagtttttgggatgggcgtttcgcgtcggtagttggttttttgtttttcgttttttgtttgtttttcgttcgcggttttaggattcgcggggttagcgttcgtttttttttttttggggaagggggcgcggtagtcggtttttcgaggttttttgggagaggcgggagttagaggtttgcgattttcgttttagtttggatttcggcgtatagcgagtaggaagttttcgaggtgagtcgtcgttgcgtttatttgttttcgtagttggattgtggagtcgcgttcggaggagcgttggatacggatatttttaatttttttttcgatttcgttttttggttttttgtatatatattttcgttaggaggggaggggaaggtttagtaattgtttggtttggttttgatttatcggttttttcgtagaatttttcggtcgcgaatcgcggtcgggagtttgtggggattgagggtagaagttgtcgcgttttagtcggggtcgcgaatattagtttggtcgttgtcgttttttcgt

SEQ ID NO: 7363 - DNA, 990 bp, synthetic construct; identical to SEQ ID NO: 7133
  misc_feature 1..990: note = Description of Artificial Sequence: Synthetic polynucleotide
  source 1..990: mol_type = other DNA

SEQ ID NO: 7364 - DNA, 829 bp, synthetic construct
  misc_feature 1..829: note = Description of Artificial Sequence: Synthetic polynucleotide
  source 1..829: mol_type = other DNA
cgtagcgatttcgcgtaggtgagggtattggggagttcgtggtttttttcgttcgtcggtttttttttattagtcgttagttagggttttcggcgtcggggaagttttttatagggttttaggttatttaagcgcggttaaacgtcggcggttcggtttcgtttatttgacgtagtcgcgcgttcgtttcgatttattaggcgcgtagggttcgttttcgaaattcgcgcgggttttcgtagtcggtcgcgcggtttttagtcgcgaagagagcgtcgcgtacggtggcgtcgttatagtcgtgggtcgtcgcgtttaggtagcgttttagttgttcgtaaagtttttgtagcgtcgtttcgtcggggtttacgcgcgtcggttagagtagcgtttatcgttcgagttttagattttaggtttcgtcgtcgtttacgtttagtttcggcggtagtcgtgggaagtagtgttttagaggcggttatagcgtcgttggttgtcggcgcgcgtcgcggaatttcgcggtcgagagtcggtcggtttagttgggcggggatacggcggtttcgggtttgtgttttagttttagtcgggttttttcgcgtcgttgcggttgttgcgcggtgcggtcgtgataagttatagtaaatttgtttttcgcgtcgttttaagttattaggaagcgtaatcggtgtttttggggatcggcgaagaggttttttcggagcggcgtttagttttttaggttgtcgggttgttcgttttttatggtcgtcggcggtagcggttttagggtttggcgggcgcgggtttgatttcgtcgtatcgt

SEQ ID NO: 7365 - DNA, 4119 bp, synthetic construct
  misc_feature 1..4119: note = Description of Artificial Sequence: Synthetic polynucleotide
  source 1..4119: mol_type = other DNA
cgggaaaggtggtagtcgaagatttcgcggttttttttcgtttaggtatttcgtttcgtttttagtttcggttttgtttttcgcgttttgttggtcgggtattcgggcgtttaggagttttttttcggggtggcgcgcggcgatcgtcggcgggtttggtagtagcgttagtcgcggggcggttcgggtaattcgttcgtttgtcggttcgtttacgtgcgtagagaggagcgaagcgcgagtagtcgtttcgttcgcgtttgttgtcggtgggtgttttatttaaggggtcggcgggggtcgtaattcgagttttatcgtagggattcgtatttgtataattcggttttttttcgttttttcggatttagggttcgagatgcgagtcggattttttttcgaggcgtcgttttgtttatggttagcgcgggggtcgcgggattcgttagagcgtaggcggagtgggttggcgtacgtggtaagaacgtagttatttttttttgtttttttttttttttttttttttttgagaaataggattttgtatatttttgttggggtggggtatttattagggtgttaattttgttgcgatttttttttatgttttttttatttttaattggaaaaaagcgtatagcgcgagcgagaaatttttttaaatgtgttttgggtgatttaagttagagagatggtcggtcgttggatatcggttgttttggagggagggggagaagtagcgttttagtggaagagtagagggagagatcgttttcggtagttttagggttttgatcgcggtgcgttgggttcggcgagagttggcgtacggttgtagcggtcgaggtaggtgagcggttgaagattcgtttgtagcgtcgcgttttttttacggcgtggcgtcgtggttttcgttcgtttcggtttatattaagttagggtcgtttcgggttcggggtgaaaaagggataggataggtttgcgaggttgattttgcgcgttatttttggttttcgcggttttggagcgggaaagggttttggggtagttcgtaatttgtataaacgattatgaatgagttatgtaggcggcggtgcgttggatttgggtattcgggattagttttttgtggggtttcggataggttcggttatttattgcgggttggggcgtattgggaggtagaagttttgcgtttagtaagttagaatttgttgttatttggattttggaaaagtttttaaaaattgttttgggaacgaaatagaagggtttttatcggggtttcgtaaagtaaaacgagtgggttgggggatggggatggcgttttgaaagtgattagagatgttttcggtcgttattgaggatcgcgttgggtttatcgaggtgttttttggggagggagagaaaatatttattttagtacgtgtattttggttcgggtgcgggtagggcgcggttttggattttgggttatgggggttagggggattttgtggttgtagggatcggtagtgaaggttaggttagtgtttttatagaattttttgtttagcgagttcggagttcgttttgtcgtcgggatattgttggtaacgacggcgcgcggacgtagttaatagggaggtgtgtagtgtaaggtgtgtgagcgggtgtgtgaagagggtagcgggggcgggagtgtgtagcggaagtggagcgagtgtgagtgtgtgtgtatgtgtgtttggaggggtagggtgagtgtttaagtttttatttggacgtttttacgtagtcgatcgtttagacgcgtcgggaagggcgttcgtttcgcgtagtagttgaaggggggcggggagcgcgcgggtagaggaaggagggtgttttcggttgaggatttttttcgaagttttttatagtaattttgttttttttagggtttatttttttagttttaaggtgtttaaaatatttaaataaataaataatttaaatttgtttcgttttcgtttttgtataaatagaatagattttttaaaaaagtaatacgtatttatttttattattagttatttttttttattaagtaatttagaaaaaagtagttagttttcgtgaatgtatgtagtttttttttttttcgttgtttttttttgtttgcggttttgagttgttaagaaagtgagtaggggtttgattgtagtgtttcggtttcgttcggttttttttcgaagtttaatttttcggaatggtttttaaataagggttagggaggcggagtcgtcggtatcggattttcgttttttttggaaagttttagagaatcggaattttttttcgtttcgggaggttgagtcgtagtttggagtagttcgtttttttgttgtggttgtgattgggtttatggcgcgttttttttttcgcgatttttgcgtttcggatttaggttgtagttagggtcgcgcgttcgggattttagcgattttcgtcgtttgcgagttggaagtcgcgagttcggcggagttcgcgcggtcgagttcgtgtatgtaaattagttatgtgacggtaaaagtcgtttggtttagttttgttttttagtttatatatgggtagcgacgttacgggtattgaagatttgtttataaatatttagagtaatatttttcgtttaattgagcgaggagtaattgattaatagttcggcgaggggatttattgattgttataataatattatattagtaatttttggttttttagtagtcggaatatagataggagagagttagtggtaaatagatattttttttattttttaaaaaatagtaatttgtttgttatttttatttttgttgattttttttttttggtgtgtgtggtggttgtttttaagtgtggagggtaaaaggagatattattttaggtttagtttaatttttttttaaaacggtttttttgatattttaggtagcgagggagttgggtttttaggttgtgcgaggagtaaatgatgatcgttaaggtcgtagataaaattttagtaatttttagtggttttgtgtattagttgtttgataatatttattcggtggaggatttcgtcgttacgtcggtgattattttttttaatgtcgaattgggaggtttttttgattagatgaacggagtggtcggaggtaagtcgcgtgttttcgtaggttcggatttgcgcggttcggaggtggtggatggggtgtagtgggtgtgcgggaatcgtaggagaggattggggttttaggtggacggtgttgattgtattggttttgaagattggaagtgggtgtaggaggaatttgcgatagttgagattagggcgcgcgggtagatgcgttaggtcgttagtaaatcggcgtgcgtgcgtttcggcgcgtttagtttcgggcgagcgtagggatgggggtggaagaggcgttttttcgggtttcgaggtttgcgtaggttttttggtcggtagtatttcgattttttttttttcggggtaggggtaaagtgacggtaaagttcggggttttcggggagagttgcgcgtttggagagtcgagcggcggagaagcgttaggggaaagcgtcggtagtttttttttgggtagagtcgatttcgggaaaatttcggagcgttttttttttgcggtttggaggcgcgtttttatttgttcgtcgttcgcgaagttgagggggttagtaaggcgggggtttcggtcggcggaggtagcgagtgggtggtggaggagggcgcgtaacggcgggaagtagttttcggattgtcgagggaggttcgcgggggtatcggcgacgtcggtttttttggcgatgttgtggaaagtcgtttttcgcggttttcgcgtttttttcgaggtcgggttattggttttgggttgaggcggggacgcgcggttgtcgggaaaggcggagaagattgggagggtacggaaatttacggatttttttttttatattttttattcgttttagtagttttcggttgaagcgtagcgggagagggagggagaaaaaggtataaggcgtcggggatggggagtagtcgggaaattatttatttttttttcgggtttttttttcggtttggtattattacgg

SEQ ID NO: 7366 - DNA, 1575 bp, synthetic construct
  misc_feature 1..1575: note = Description of Artificial Sequence: Synthetic polynucleotide
  source 1..1575: mol_type = other DNA
cggtttgggtttttgggcgcgtttgtcgttgcgcgggcgcggggcggttgttatattattttggtcgggtttcgaaagggaggagtggagtttgttcgttttcgcgagttttcgcgcgtttagtttttttttatttgttcggcgtgtttagggcgtttttagcgttggaagtcgggggcgtttgttcgaggcgggagtcgttgggttatgtttttgtttattaggtttttcgaatttttggtagggtagcgtttgttcgtgttttcgatttttttcgtaggtaattcgcgcgaatttggggttcgtagagagcgagcgttcgcggatatcggttgaatagtttggaggttgcgcgagggggcgtcgcggggagggataaaagttagtaataaagagtatagatttcgtttagtagttgattgattcgttttaaaatagtcgtttttatttgttgtttttcgcgtttcgtttttaggcgtagtattcgggtttgtagttcggtcgttcgaaagtgggcgagtaggttgagtgttagcgagtagagggttagcgttagtagttcgtacgattttggattcggtagtcgtgcgtcgcgtttcgttcgcgtcgttattagagttatcgtttcgggcgcgtttaattttttagggtcgcgggtatcggtggttgtcgttttgtgggtgcgtttcgttattattttttcgcgttttgagaattaataaataaataaatagaataaataaaggcgatagtcgttgttaaaaggttttatttaaattgcggggtagggggaaagggtttgtatcgttggaaaacgttttttttcgttgttttcggtaaagaggacggaaaaattagtagtaggagaggaagtgtcgaaaaagtataattagcggtaattggggtatatttaggtgagaaaaaagttatttcgaagaacgttttaagtttaggaaagttaggggaatttgatcggtttttttttttttcgtttagtttttttttttaagtgtttgtagagtagttggtgtcgcgttgttagtttttttgggcgtttcgtgtttttcgggttagttagttttagttttcgggcgaaggggcgtatacggagggttttatgggtagaggtgggtcgtggcggttggcgaggagcgtaggggtcgatttcggcgtttttgtaatttgatatattttttgcggcggtacggatcggatgagtaattcgtgttattttttaaattaatttttttttttttttttttttttttttttttttttcgttattttttttttatttttcgcggggtcgacggtttggatttgtttatttatgtaaattcgtttagggtggggggcgtggtgagtaggttcggcggttttagttcgtcggttcgggagtttttttgtcgcgtttttcgttttttttgaagtgatatttggggttatttataggtaggaagggggtgtggagtggagttggcgttgtattttttttttttttttcggatttatatcgagggttcgtttggttttttacggaggcggtgaggcgggtattattttttatggacgcgt

SEQ ID NO: 7367 - DNA, 2401 bp, synthetic construct; identical to SEQ ID NO: 7143
  misc_feature 1..2401: note = Description of Artificial Sequence: Synthetic polynucleotide
  source 1..2401: mol_type = other DNA

SEQ ID NO: 7368 - DNA, 1579 bp, synthetic construct
  misc_feature 1..1579: note = Description of Artificial Sequence: Synthetic polynucleotide
  source 1..1579: mol_type = other DNA
cggttcggtgtacgtcggtgttattttcgcggttaagtttggggttgatattatgtagtatacggcgttatttataatgtatcggtttttttttgttatatataggtacgtatatttattttcgcgttcggagggagtttagggttcggttcgtgggcgtttaggcgtcgattttttcgatttcgtatttatttagaagttgtatcggtcgcgatttcgttttggcgttttcgggggtttggggttcggtcggcggcggtcgcggcgagcgatttcgggtaggatttagttagcgtcgaataaaggttgcgcgtaggtagcgggcgtcgtttgtattttcgtttcgcgtttcggcggcggcggcggcgcgggggttcgggcgggttcggcgttcgttcgtttcgcgttgttcgtttcgagggcgtttcggttttcgcgttttcgttcgttgttgttcgttatcgtcgtcgtcgttcggttatcgtatcgtatatattaattatttatcgttcgtttttagtttttcgggcgaagttaattataggcggaggtttcgttaatggggtcgtcgtcgtcgtcgtcgaggaggtagttagtcgcgcgttcgggcgtaagcgatagttttttagggacggggatgggtcgggggcgcgcggggggcgggggcgtacggggcgcgtcggagaaattttttacggttcgcgttttgcgtcgcgttcgcggattttgcgggcgtgattatttattttgcgtgtgttcgcgtggggttgggggtttcgggggaggttaggttagtcgcggtggggggaggggagggaggaggaggaggagcgcgggaggaagatgaaaggcgagtagatttgttttggcgtttttagggagtttcggttcgcgcgcgtttttttcgtttcgcgagtttcgtcgttcgtatttcgttttttagttcgtcgttcgtatttattcgcgcgcgtagatcgttagtttagttatttcgttgcgagggagcgcgagcgagtatgaatcggaggtagtttatattttaaatttgtacgtaggggtggtgttggtgtacgtcgttgtcgagcgaacgtacgattcgacgagtagtattttagttttcgggcgggggcggcgacgaggtttttttttttttttcgtttaggtaattaattggaagtaatatttgtgcgagtggggttttcggagcgttgtcgttcgaggaggtcgtcgggaaggcgttggcggtggatgatttcgggtgtttttcgttttttagcgaatttttttaagtgggtatgttaatgagggtttacggcggggagggggtggaggagggagttgaattggagggggtttcggtcggggggaggggaggggaggggaggggagggcggggttaggtatttagattaaatttcggtttaaaggattttcggaacgggttacggggtggagaaggtaggcggttcggtattttatttttttgattttgggtgttttggtattttcgggatttttcgagcgaggggtttaggatagggtgaatacgcgtacgtacgttttcgtttttcgatttcgg

SEQ ID NO: 7369 - DNA, 919 bp, synthetic construct
  misc_feature 1..919: note = Description of Artificial Sequence: Synthetic polynucleotide
  source 1..919: mol_type = other DNA
cggtttatttatttcgcgcgtttttatatacgttttttttcgattttttacgagtatacgttcgtttcgcgtgttcgtttttttttgtttttcgtttcgattttacgtttttttttttttttggatttcgttttttggagcgcgttcgtttttttttgttacgtttttttttttttatttttttttttttttgttcgttgttttttcgtgcgcgtttttttttttgtatatcgttttatttttgtcgtaggttcgatttttgaacgtttttttttttttggtttttttttttggcgcgcgttttttttcgtacgattttttttttttgtcgggcgtttcgcgtttgtacgtttttttttttttgtcgcgttttttttattttgcggcgggtttttatttttgtacgttttttttattttgtcgcgttttttttattttgtcgcgttttttttattttgtcgtttgtttttatttttgtacgtttttttttttttgttgcgcgtttttttttcgttgtttatcgcgtgttttttgtttatttattcgcgcgtttttttcgttttgcggcgtttatattggtttttgaggcgcgagttttcgttgtttggtaacgggacgtcgtttttgggtggcgagtaggcgcgtgtgtaggggtgagcgtatcggaaaggttcgaattgtttttgggatttgtttttttagtttcgttgggttcggcgggtagaggcggttttgatcgttgggttttgggcgtcgagtaggatttatttgaggcggagagaggtcgtttcgcgtttggggttttcgaaagcggttagttgtttttttgttttttttgagcggggagcgttgcgttttttgcgggttgcgggagatttttttagattttcgggtgggaaaattatattgagcgtttcgg

SEQ ID NO: 7370 - DNA, 944 bp, synthetic construct
  misc_feature 1..944: note = Description of Artificial Sequence: Synthetic polynucleotide
  source 1..944: mol_type = other DNA
cgttgggcgaggttagggttgcggtaggggagtcgagtcgggagaggggcgtaagatttggcgttgggcgggacgttcgggtagggtgcgggaggggttgagggtcgtttttattgttttttcgttttggagttggggttaggcggtcggagattggttggggcgtacggcgaggttcgggttggagtttcgaggtgggaggcgttaggattagtcggggcgttcgtagcgtaggttgttatttatttgggcgatttttgcggcggcggcggcggcggttgggtagagttagggtcgggggcgtacgtcggaatatttgggtcgtcgggtatcgagcgtcggggggttgcgcggcgcgtatttggagagggcgtagttatgcgggcggcggcggcgggggggggcgtgcggacggtcgcgttggcgttgttgttgggggcgttgtattgggcgtcggcgcgttgcgaggagtacgattattatggttggtaggtcgagtcgttgtacggtcgtttttattttaagtcgtcgtagtgttttgatatttttgtcgatttgtcgttttgttatacggtgggttataagcgtatgcggttgtttaatttgttggagtacgagagtttggtcgaagtgaagtagtaggcgagtagttggttgtcgttgttggttaagcgttgttattcggatacgtaggtttttttgtgttcgttttttgcgttcgtttgtttcgatcggtttatttattcgtgtcgttcgttgtgcgaggtcgtgcgcgtcggttgcgcgtcgtttatggaggtttacggttttttttggtttgagatgttgtattgttataagttttttttggataacgatttttgtatcgtcgtgtagttcgggtatttgttcgttatcgcgtttttaggtagcgtcgtcgtcgtcgttttcgcgcgtttcgacgg

SEQ ID NO: 7371 - DNA, 1096 bp, synthetic construct
  misc_feature 1..1096: note = Description of Artificial Sequence: Synthetic polynucleotide
  source 1..1096: mol_type = other DNA
cgagtattaggaaagcgaagttatataacgcggttttttttagtttcggcgcggtagtttggaggggatgttttttttgtaaagcgagttttttaattttttcgggttttggcggagtttcgggatcgcgtaggggtaagtggagtgtcggggaaggggcgttggggttggggtgtcggggtaggggtgttttgttcgtacgtatttacgatagtgagtagtatgttgtttagtagtagcgttaggaatacgatgaataggatgagttttcgcgagcggcggtttttttgtagttagcggattagcgttagttcgtttagggttatggtttcggggtttcgttgcgggcgcggtgcgcggtgaggatttaaggcggtcgtggattttttattttttcgttttttaggtcgcggaagggcgggttagggagtcgcgcgtatcggtattcggggatattttcgggcgttttagtttcggtttatttgtttcgagcgcgtttttacgagagttcgcgttttttggaaagagcgttcgcgagcgtcgtcggggatttaatttggagatttaatttagaatttttaggacgttgttttgattttcgtcgtttttaattgtgttattttttaaattgtacgttcggtttcgtgtattttgcgttttgcgttttgcgtttcggttgtttcggggttttcgtagtttcgttcgcgtagttttgggggtttttttgtttttttgtttttttcgggttcgttttttttcggtatcgcgttttgcgagtagggaatcggggtcgtgttatttcggggtcgtttgcgatgtttgttcgggtttttcgtgttcgcgttaacgttcgtatcgtagtgggtttcgttagttcgggcggtttcgggtcgtagttttcgttttagcgtttcgtcgtcgtcgtttagtttatttcgttcggttttgacgttacggtcggagggagcgggggcggggggttggggcgtttcggttttcgttcgttcgcgtcgtcgttgcgtaggaggggttgtcgtttttttgttttcgtttcggtcgcggtcgcgtttttttttcggatttagcgcgtggtcga

SEQ ID NO: 7372 - DNA, 4048 bp, synthetic construct
  misc_feature 1..4048: note = Description of Artificial Sequence: Synthetic polynucleotide
  source 1..4048: mol_type = other DNA
cgtacgtttagatgggtttttcgcgttcgggtcgtagttatttgagttttcgtgaggttgaggttgtgtgttagttgttttttttcggcgtttattacgtagtgattttttttaaaggcgtgttttagttttagaagttgggacggggagaaggcggttcggattcgtttgggttttcgggttagcgcgttgtgtaaaaggaaattttcggggttagtgtcgttttttgcggggagtatagtagaaattttattagggggggttgttttgatcggagtcgcgtatttttttcgagtcgggttggttcggtatcgtgtttagggttttcgtatagtcgcgtcgttcgatttgcgggggtcggtggtttttttaagggtttacgaagggaacgtttgtttagttgttcggttcggaacgtcgggtttttatcggtgcggtatttaattagtcgttgtcgtagaggagttagtttttaggtttttgatttcggtcggtttcgtagtcgttttggcgtcgcgggtttcgttattttttcgtcgggcgttggaggtaggggagggagtcgtagagtttggttaggggattggcgtttataattcgaagaaattatttttttttttttttaatttttcggggaattttgatttacggtggaaaggcggcgggttgttttttagagtttttatggagatttatttttaaattatttgttttattgttttttcggaaaagtatagaggcggggcgagtcgttgaagttcgatcgggatagaaatttggtcggcgggtgtgtttggttatagtcgttgttgtttttcgcgaattgggtttcggggttttcggttttcgagaattagaagagaaacgcgagcgaagggatcgaaattcggggggttatcgatttgtagatatcgttaggatagtttgtaacgtaggaagattttagcggtttcgggtttggtgaggggattataagtatgattgatagcgaatgaggaagggtagttttaaattttttaagtaaagttttagagttttgggtttatttattagtataggaaatcgatttatcgaaaatttaaataaagaaaaataagtcgatagtttaggtaggatgtaggtaaatttagttcgggattaagggtaaaaggttttttgggtttttttttttttggtttgattttttaaaatatggggaggggggtgatatttattcgattttaggtttcggtaggaacgtaatgggttaatgaatggataagtcgcggagtattgatcggttgtcgtcggaggtaggttttttattgattttaattcgtaaattaattatttttttttttgaagttttaatttttttttttttatttcgtatttagagaaaaataaataaataaaaaatatcgtaagaaatgaaaatatacgaatagatatttttttttaagatagttttttgattaggttttttttttttttttttaaagaaagaaagaaaaataaaaattagatcgaatttgttttttcgttgtggttgttcggcgttttaattaagtaggtcgcggcgagagcgttaagttttggagtttttttttcgtacgggttttcgtttttttttaggttttcgaaaagtaggaaagaaaaaataaattttatatttttttttcggggcgcgaggattttttcgtttttagaagagggtggaagattaagaagtcgcgggtttggattgaaggggcgtaaagtgggtggtgaatagggtcgaacgtagtcgaaagtaagtttggcggtcgagttttgttcgcgtttttcggagttaggacggttgggggtattgtcgagggtattaggagtttggggatttcgcgggttttgggtttcgcggcgtcgggtacgtatagtttagtttgttttgattcgagcgtattgggggataattttttcgttcgtatttttttttaaagggttaagcggttcgtaggttattattttaaattagtcgtagtttcggagattggggatcgatattacgttcggtttcgcgtcgtttagttttttaatagggcgcgttggttcgcgagtcggaggaattttcgtttaggttttgttaagcgtttattcggagtaggtcgggggtagtgaaggatgcggcgggagcggcgcgttgtagtttcgcgacgtggtacgtattttggaagcgatgatttagatatcggtagcggtggatgagttaggggtagaaggtggacggatttcgttgttgcgaggcgaatagggggtgtggcgagtgcgaggagggtagggggtgggcggttagggcgtgcggcggcggtatcgggtgtattggtacggcggggttgggcgggtgcgagatcgtttcggcgaatattaagttcgggttggagtagacgtttttatcggcggcggcggcggcggtcgagtggaagtcgttgaggaacggatttatggggttggagttagcgtagttgagtgtcgcgggacggatggggttttcggagcgcgaggcgggtaggggattgtttttggttattagcgattcgatggtgaagtagcgtttgggcgtcggttggaatatgttgcgtcgaggagcgggcgttttgggtttttagtttttggcgatcgtcgtacgttgttttcgtcgttcgttgttcgcggcgaggacggacgagaattggggattcgtttgtttggggtgggggtgggggtggggggaaggaaaggaagaaagaaaggaaaggaaaggaaaaaggaaaggaggggggagggagagggagaggtaaagtcgaggatttcgagaattttgtattaaacgcgtttaatttgaagagaggggggaaaatttttttagaagaatttgtaggcgtggattggggtaatttttttttttttttttttttttttttttttttttttttttttttttttttttggcgagatggcgtggggggatcggagttagaggtagggaggagaaggggggaaagttttcgggggaggtaaaaaaaaaaaaaagtttttttttttttgtaaaaggcgggtagggcgttttaagtttaaggataatttatggaagtgttcgtttttttataagttgtgtaaacgatttgttagtttatgagtttaattagtgcggggattatataaatagtttttttcgaagtttggtaaatggtttgatgattggtcgttattattcgttttgaggtggaaggggggagattttttaaagtgcgttagagggaggtgagcgtttgggaattcggaggtttggattcgggtcgagagtggaacggagtcggcgtcgtcgtttcggttgagttttttgtcgtttatcgggcggtcgggttttttcgcgttttcgtttttcgtttttagtttattcgtttttgcggcgttcgttgcggtttttttttttttttcgtttttttttttttttttagttttttttttttttttttttttttttttttttttttttttttttttttttttttttttttttttatttatttttttttagttatcgtttttttttttattagtattatttttttcggggtatttcggtttttgtagagtttttggtcggcgtcgttttcgttgcggttttttgaatttcgagtttgtttcgtttaagttggtaggatagaaggatagatagatttttttagtttagcgtttcgtcgttgttgttttacgcggtttcgcgtcgggagaattgggatcgttttaagagtatcgcgagggtaagcgggtaggggttggttttcgggttaaaggcgtcgttcggttatattaatttttatatttagtaaaatttttagcggttttttaggttaggagggattttggagtgaggggtacggggtttttttattttattaattacgtttagtttcgaggttttagggtcggtgcgttcgcgatttttgattcggttcgttcgtttgcgagttgagatcgggagttgtcgatttcgtcggagtagtgggtttttaattttttttttttttcgttttacggtttttagcgt

SEQ ID NO: 7373 - DNA, 3292 bp, synthetic construct
  misc_feature 1..3292: note = Description of Artificial Sequence: Synthetic polynucleotide
  source 1..3292: mol_type = other DNA
cgcgtttaagttttagtttttgaaggtcgttggatttttcggcgttttcggttcggtttagtttttttcggggttcggataaggaggtcgggcgtttttttttttatttttttggggttttagatcggtcgtagtagcggtacggaagagattatcgggtgcgagtagtagacggggtgcgggaaggtgagtagcggttggttgattggtatcggggttttcgcggttgtagtcgtcgcgttttcggtcgtcgagttttcgtggtagaggatgggtattcgtacgatgcgttgcgtcgcggtatggtttaggttggtcgtttttagtttcgtcgttagttgtcgtttttatttgttgcggcggttttggaattagattttgatttgcgtttcggtgaggtgtagggacgcggttaggtcggttcgtttcgagttgtttagatagcgttttatgtcgaaggtggattcgagttggaagatttggttgcgcgagaagattgtgcgcgttttttttttgcggtacgtcggttttttttttggatttttagcgttttttttttagttttttgcgttcggagtggtcgtcgtcgtttttacgttcgtttcggtcgcgtttggcgtcgtttcgtttttttttttgtttttttcggagtcgtttttttttagaatgatttcgttcgggtttttggagtttagttttttgtgatcggggtcggttttgagtagtggtttcggagagtcgcggtttgtgtcggaggcgggggaggagttttttagtaaggtttttttcgaggttggggagatagatagacggacgtatatatatgtatatcgatatagttttgagcgaggttcggcgtttggggacggtaggtttaattcgcgtcggtttttaggttttaggttatgaggttttattattttcgcgggttgtttttttttcggttgggttagagaagggacgtcgagttttgggattttttttttttcgaggataggtaagtagatggtggtagcgcggttatttttttttatttttttagttttttcgttaggggtcggtagaacggttttttttcggtttaggcgtattggaattattttttttttttaggtcgtgttttaagtttcggtcgttcgaagtttttttatttacgttcgaggttatttttttcgggaagtatcgtgttcggggttttaattttatttttttttttattaagtgggattggattaacgggtagcgtaatttagcgcgagggtaggttaggggtcgaaaaaaattgatcgagtagagggtttgcgggtgttggggttttagaattgcggagggaagtagcgcggggcggggacggggcgggcgcgtagggggataacgaaagtttaaagagaggtcggtatttttaggtcgcgggaggtggtcgtcggcgggggttagggtgtaggggtattattaggttggggagcgttttaggtagtgcgcgggtagggtaaatttttgcgtcgggattttaaagcgagggaaagttaggtcgtttatttgcgagagcgcgaagttcgcggcgttttttagggtttttttggtcgttgcggtagcggtagcggcggcggcggcggtagtcgaggttggcgcgaagagcgttcgtgggggcggttgaggtttagggggcggtcggtggtggttttcgttgagtaggtttttgatggagaacggggattttttgggagcgggtggggggggcggcggcggttggggttgtgcgttggcggtgtcggtagcgttcggttcgggtttcggtatggttttttttttttcgggttttcgggagggagggagcgggataggcgggcggcggggcgagtaggcgagaggtcggaaattagattataaacggaatttaattacggggcgtaaagtcgggggtcgtttcgggcgtaaatttaacggcgggagggcggagtgaggatttagacgggcgggttcgtatgagggaggggtgcggaggggcggggagcggttttgtcgcggtatcgagggatcgaggcggttcggttgcggttgcggttttcgcggaggaggtagtaagagtagttttcggttcgaggttgcgttaattcggcgtcggatgttaatgatgaaattaaaatgttatttaagttaaatgcggggagtatacggcgattgggcgcgtataatggtaaatgggattaggtaggcgaaggtttagtcgagtttcggtttcgtagtcgttttcgttatcgtttttttttcgttttttttcggattttggcgttttggtttcgggttataagagttcgttcgttattggttttatatagtttaattaggtagtaaatgaggataagtttattagtataaaaggatattggttttcgttaaagaggtattcggagcgtttttgcgagcgtaggaggcgagcgagggacgcggagtaggcggcgtttttggtcgaagcgtattaacggtcgcgagttcggagatcgcgtttgttttttttttttgcggcgtagggattcgtttttcgtcgttaggtttgcgggaggggggaggggcggattaggttttttcgggttatttcggggttatttgcgttcgtagttgtcgttttttcgttttttggggttggataggggttcgtcgtttttacgtagttggagagttacgtagcgtcggtttaagaggtaggacgtgatttcggttttcggagaatttattatttttttattttttggggttcggcgatttcggtattttttttaaagtttgttaggaagggcgaggttaagaagagagggatttgggttttttatttattatttagtcgatagtaagggaatttaggtgtaagttttcgtattgcgttttcggatttagaaattcgcgtggttttggtttttagttttggaaaatcgaagagtgagttttttttcgggattaggagtgggtgtgtttgtgtgcgtatgcgcgttgattcggttaaaattcgcgcgttattcggtggggttgttggggtaatagtttttcggtatcgacggttgttttcggaagggtatttttttgttttggtcgtcggtgtttaaggttcgcggattaatttcgagtttgtgatttcgacgatagtatttttttttaggaagttttttcggttagttggcgtttggagttgtttaattaacgttttaatgggggtaaggtgaatcgaaggcgtagcggcgtagtttttttcgtcgcggtaagtagcggtattcgttgcgcgtttcgacggtagcga

SEQ ID NO: 7374 - DNA, 3753 bp, synthetic construct
  misc_feature 1..3753: note = Description of Artificial Sequence: Synthetic polynucleotide
  source 1..3753: mol_type = other DNA
cgcggttattttttcggtgtagcgtttttttagtttttgcgcggtcgtaggtgttagggcgaggaagttcgtgggcgttttcgtcgcgcgttaaggttttatttagagtaagcggtcgcgtgttagtcggtgatttagttatacgttgaattaatgtaaattattaataataaaagagtgtagggaagcgtttttgttttttttattttttttgtttggtttcgggtttcggattttttttgagtcgtagaattgttttatcgcgtttagtttttttttcgcgcgagatatataattttgttatcggtcgggtagttgggcgtagcgataagttggtcgcgttaagttcgcggcgagtaaagtggaggttttattaggtataagtagcgttatcgtttgttttatatttttggagaggaagtgcgcggtatagggtatgttatagcgggagttgttgtggttaagtttaaggcgagtttagtgtcgggaatatgtcgttgggtatttagttcgtttgtttttagaaggtaatcgtttaaatggcgaggtttgttttttagtttttgttttttttcgcgcggatttttgagttggattttagtcggggtgcgttttagttcgcgcgacgattttgggcgttaggagggagagtgggcgggtagttttagttacgtgtagtttgggcggcgttaaggtttcgatttttaatttttgatttcggttttattttttacgtggagcgagttaaatttttatagatagacgtatgtaagtttttttatcgaaaaatttgaaaatttttcgtgcgttattatgtcgggtaattaagtttattaaagttagtaaagatgtttaaaatgttttatttttttttttttttaaaaatatttatagatttgaattttttttttttcgtttttattattttcgggatgagggaaacgaaaagaagtaatttagtaattgtttaaagtttttgagggtttggtttggtcgagcgtgtatgtatgtatatatatataggtgtatatatgggggaggagtgtatttggttttgtaggtgtttttttgatttttttttttattaattatagtttgtttggttaaaatttttttttttattattattcgagaatattttatttcgaatggtttttaaagcgtattggttcggtttaggtaggaagtaggttttttgatttagggaatgttaataaatattcgaaataattaaaataaaaagtagggtagagattataaataagagttaatgaatatatatggtgtatttttttatatttttggaaatacgtcgttttgtttcggagttttgtttatagtatagtacgcgttcggttttgcgggtagttgggggcggcgcggggcggcgggtcggttagtagtcgagtttgttgtataggttgtagagaggtaaggtcgagaggttgtttttcgggtagtagagcggcgcgggaaaggcgagcgagcgcggtatcggtacgcgtagtagcgaattgtttcggaatattagcggtatgtttattagagtttgcgtcgacgcgtgcgttatgttggtcgtttttagtttagtcgagagttgtcgtttttatttgttgcggcggttttggaattaagtttttatttgggttttcgtgagttgtaggttggaggcgaggtaggcgcgtttcgagttgtttaggtagcgttttatgtcgaaggtggattcgagttggtatatttggttgcgcgaaaagacggtgcgcgttttttttttggtcgcgtcggtttgtcgtttagcgtcgtcgtttcgcggtcgttcggatttcggcgagggcgagttcgcgggtaggagttttttttttttttttttaaagttcgagtgcgaaggagagaggaaaggcgtgcgttttaagtcgttcgggttcgagttttcgttgtttttgggggtatttgaggagcgagaatagatagaaaggttatggagttggttggggagtttcggagatcgttagttttttttgggattaagcggttggtaagcgtttgtagttttggttttattttattaattttttttttttattttttttattggttttttaaatttagtatttcgttttttaaaagcgataagagagggatttagttatttggagtatggggtttttgtgtttttatttttatgaatgggttaggggtaatagggagaggaggtttggagggggaaatattagtatggttttaaaaggcgaatttgtttggtggtaattgagttggaagagtttttcgagttttatagggtggtattattttataggtcgtttgtttggaaattacgttaaggattaacgtaggattttttttcgttaaatgttgtaaagaggaatcgtttttgaaatgtattattgttaattattttggagtgttaattattttaaggaggagagagagagaaaggtagagatacggagcgagtgaggaagaagatttagaaagagattacggtggagatagattgtttagattcgatttgtagatttttatttcgtgttcggaaagaaagtattagatgtgtagtgattgaggatagtcgggtgtaaggtcggtcgcgtgtttttttcgttgtggtttatttttttaataatttaattttttttaggaagtttaagtcggtacgggtttgtgttcgtttgtttttaggggtttatcgggcggaggaggtattatagtgcgcgttttttttttcgcggtttcgaattttcggttgtcgtagttttggttagagggggttcggcgcgggagttttggcggggcgtttagttttttttttttcgcgttcgttcgttgttatattggcgacgtgcgatttttatttaggtaaggaaaagggatggggggatggtgtttggggttttgttttttagggtcgtgttggtttgggtagaagtaggcgggcgttttttagtcgtcgttcggttttttttttttcgaggatacggataggttgcgttttttggttggttagtcgacgggttttcgcggtgttttcgaggggttttcgtttaggatggattggatggtgaagttggagacgttatcggtcgtcggatattttttgttcgtattttttttgttgtttattttgggtttataagaaatcgaaggaaattaagaattttttttagagacgatttgggtgatttgggtggaaggtggtgtagtaggtaggtagtggggaggggcggggaggaaatttagggggagggggcgtcgaggttggtgaggcgtttttttcgcgttagggatatgtaggtatcggatggttgcgtaggggtttttgttcgtttggttttgggtgcgttcgtttagtttcggtgtaaatgtttttttttcgttcgttaattcgtcgggttttcggcggcgcggaggcggcgcggttttatttgtatagaggttattcgaacgcggttaatcgtagcgtcgtcgagcggtttcggaaaattttaaaacgtttcggttaggtatatagtatcggtgcgtttttagagcgcgtcgagggtttggcgggtattagcggcgtttaattaggggtagttagggttgaaagtagttgtagattttagttcgggtttttggcggttgcggtaatttcgattttttggattttttggatttttttttttagaggtaggggcggtgcgggattcggagttggagtggttcgacgttttcgtaggcgacgggttttcgcgt

SEQ ID NO: 7375 - DNA, 829 bp, synthetic construct; identical to SEQ ID NO: 7364
  misc_feature 1..829: note = Description of Artificial Sequence: Synthetic polynucleotide
  source 1..829: mol_type = other DNA

SEQ ID NO: 7376 - DNA, 1328 bp, synthetic construct
  misc_feature 1..1328: note = Description of Artificial Sequence: Synthetic polynucleotide
  source 1..1328: mol_type = other DNA
cgggcgagagatgtttttttgggcgtttagggtcgggcggggtcgcgcgtcgggttgtgggtcgcggtggagatttgattcgtatttcgagggtttttagagagtcggggagcgagtagtagagttatcgtttttagttttagtttgaaaagttggatcgtgtcgtcgtatgtgcgtttggtagtcgggcgtttcgggttttgcggttatattattttggggcggggacgtgtgcgtttcgggcgttcggacgttattgagttacgtttgagtcgtttattttcgggggtgagcgagtcgcggttcggggcgggattttggcggggggattcgagcggtttttaggattcgcgggacgtcgttaattggcgggggtgcgggggagataataatttgtttcgcggtaataagaacggtgattgttggtcgtggatttattttataggtttgtttttttttattaacgttttttttagttttcgggttaattcggatagtttgtttatttattgtaacggttaaggttggtttgtgttagaacggcgcgcgcgcgcgtacgtacgtatatatacggggggaaatttttttaaaaatgaaaggttagaagagtttagcggcggcgcgggcgttgcgcgagggtttcggagttgattcgtcgaggtaggaaattttttcggtcgcgacgttcggtttcggttcggcgttcgcgtgggatggtgtagcgttcgtcgtcgggttcgagagttgttgtattgaaggtcggcgacgatggtagcgcgttcgttgttcgtgtttttcgttcgcgtttttttgttcgttttggtcggtgttttgttcgcgttttgcgaggttcgaggtaagtcgtcgaattagggcggttcgttgttcgtttcgtcgagggtatcgtacgttgcgtttgggcgcgtcgaggtttagggttgtttcgaggggcgacgcgtttcggcgtattttcggagtttcggggtttgcgtttttagcgcggcgagatcgattttttttttttaggtgttaattttttggggaagggcgatatttggttcgtagttttataggagttagtatttgtttcggagggtatagtttcgggatcgttttttcgtttttatttttttgggtgatatttgtagatgtttttgtattttgatatttatacgtgttattcgggacgatgcgtgtcgggtttttttgttggttttatttcgtagtgaatatttttattttaggtttcgggttagttttttattaggttttttttttagtttcgtttttttcgttaatatatttaggggggcgcgtagcggtttcgt

SEQ ID NO: 7377 - DNA, 2957 bp, synthetic construct
  misc_feature 1..2957: note = Description of Artificial Sequence: Synthetic polynucleotide
  source 1..2957: mol_type = other DNA
cgagtcgttttcggttttgcgtttttttttagggtattaaggtttttaacgttaatacgtggggttgttattaggggaaatcggaggtttgagtttagtatttttggattcgtattcggttagtttttagtttttttttaaatttcggttttttttcggttgtagaggaggtgattgaggcggaagtcggcggtcgcggtttggtggttaggggcgaagttaggggaggggttaagggtttggggagcgtgggtggcgattgtcggtggtcgtttttcgaaagaaaagtcgttcgttaggttttcggggaaggtgttaaggtcgttagttagagcgtttatagtagaagcgaaatcggagaagtaggtggcggtttcgggtgcggatggagagggcgaggtttgtaggtttaggtaagtcgcgttcgggggttttagcgttggcgtttcggttttttttacgtttttggttttcgagcgtacggtcgcgttggttttagttttttttttttttttttttcggaagttttcgttgttaaatattttttcgtagttggggtttagggtttagtaattgtttttatttgtagaagaagaaatagtttagtttagaaggttcgagttttgacgggtcgtggtgtgagttagcgaggaggttagttttagaaagattttttgttggtttttatagagggtttgagttttcgtttttattttatttttgacgggtattttgtattcgatgggtttttatagtaggattgggaagaaagtgataatttagaaaggaggaggaagggagttttgggaaaggtcgagtttcgttaaggtgaaggaaggtttgcgagatgttaatggtgggatttcgttagtcgttttgttaaggatagcgtagattacgttaggtttttaggtaggttttagagttttttaaacgggtattttatttgttttgtttatttttggggtaggcgttgttttttttattttattaggtagggtattgaggtttagggaagttgagttatttttaaggttatttagtttgttggttttttcgttttttttttcgaaggagcgtatagagattgagagtttcgggatcgtcgtattgtaaacgcgggtttgtggtgggtttagtcgttgtttgagaatttgtttatgtttaagtattttttttttttttttttttttttcgggtatttttaatcgcgtagggagaaattaggttgtttaaggtgtttttattttcggagtgttcgcggttcggcgggaagatggggagttttggacggagcgagtcggcgcgtcgttgttatttgggtcgttttcgtcgcggggtatttttttgaagtagtcgttgagcgataggttgtggcggatggagttttgttagttcgttttgttgcgtttgtagaaagggaagttattagttacgtattggtagatttggttgagcgttagttttcgtagcggcgcgttttggatggttatggcgatgagcgtcgagtaggagtagggcggtcgtattagttttagtagtttttgttggtcggagaggtttagttaggcgaggtcggcgttcgttaggtcgttcggggcgtcgaggagcgggtcgggagtttcgtagttcggggtcgcgtagggcggcgtaggttcgggattcgaagcgtaggatttggggttgagcgttggcgcgtttatttataggagggggttttcgtttatcgcgtttagattttttggtttatagttcggggggtgcgcggtggtttgggtttggtcgggcggggtcgaggaggggtttaggtcgtcgtagtaggtggttatgtttagtcgcgttcgggtttgggttagcggtgtcgtatcgaaatttattggcgatttatttagtttggtcgttagtagcgttcgggtgcgattagttcggtttagtttttcgttttttaaatatcgtcggggttagagtttatggagagtgacggtggcgagttttttttttggtagttttggaggagcgaaatttttgttttcgttttggtgttagtttttcgtttcgtttaggtttgatacgttttggatcggacgtttttttgatttttttttttttttttgtgcgattcgtttcgagtttatagtcgttcgcggttttggttgtagggattttaagttcgtagtttcgtttggttttacgggtttcgtagtttcgattgttttggatcgtattacgattttttaaggtttttagggttgtggtttgggagtttcgtttaatgcgcggtttttttgttcggttcgggatatttcgttttaaagaaattcgtttcgtcggggtttttgggttattcgggattcggggttagggatagagggcgattatattgcgtaagagatcgtaatgaagttcgtagatttttaggttggagtcgtagagcgaggtggcgaggtggagaacgcggggttgggtttggatagcggttttggggtcgtttggagttttcgtttttttaattcggaaggtagcggattgatatttgcgtcgaagtcgcgcgtattttacggagggtcgggattttggaaatttcgaacgttttagtagtttagggtagttatcgttttttttaagtcggggagttcggggtttcgttaggttttttcgcgttgtgatttcgggcgcgtagagcggagagcgttaagttttttgttgggtgtcggaggacgcgtcgaaaatagggacgtttttgtagtgcgttcgatattagttttttagttttgttgtcgttcggggttgttgtagttcgggttatttcggttttttaagttgttcggttttcggttttttttgtttttcgcgttgtggggtggcggaggatggatttaggttgacgttgggttgggtatttggaaagagggttcgtttttcggatttcgagtcgggtatttgtgcgaaagaggcga

SEQ ID NO: 7378 - DNA, 1860 bp, synthetic construct; identical to SEQ ID NO: 7150
  misc_feature 1..1860: note = Description of Artificial Sequence: Synthetic polynucleotide
  source 1..1860: mol_type = other DNA

SEQ ID NO: 7379 - DNA, 1422 bp, synthetic construct
  misc_feature 1..1422: note = Description of Artificial Sequence: Synthetic polynucleotide
  source 1..1422: mol_type = other DNA
cgcggggagtagaggtgtttagatacgcggtttgttttcggtttttattttatagagttttttatttcggtattgagttcggaagttcggttattagttcgttattttataatttttttagtttgggagtttttatacgggtggtcgttttttcgtagcggtttagtttttagttgtaggattttcgggattttcgtatttattatgagcgttgtaaagttgcggaagcgtgagcgtcgttggaggaggcgtttagggggaggcgattaggtggcgttttgtttttcgttagtttttatggtttttggaaggttaaagttttagacggcggttaggaggtcgcgttttcgggtttttggttttagggtgatcgcggcggggcgggcgtagttcgggagttgtttttatttgtgaagatagcggcggttagcggggcgggcggagggttttcgcggagggtagttcgtagtttcgatttcgttagggagtagtcgcggtttttgtcgttttttttttttcgcgggcggtttgggggttgcgtttggggttggcggaggcggtgtcggtggggatcggtggggggttcggatcgaacgcgttagcggtagatgcgtttttttttttatatttaaaaattaatttgcgttttattttcggtttcggagttaaatttaattatttcgggttgtataaagttagaggcgcgtcggggggtttgtatcgggaatcggtatcgagtgattcgttcgttttagttcggtcgcggcgtttgttttgtttggatgtggttcgagtttcgggtcgggcgcgcggggcgggggttttggattattcgtggcgtttttcgttttagcggagtcgaaagttattcggagttgtttttttcgcggttagtgttatttcggggcgcgagtttttttgtcgagtcgcggtttcgcgcgtttttttcgtcgtttagattcgcgcgttttttttatttgttgtggtcgaagcggttgtcggggcggtcgggtcgcgttttcggagatagacgcgttgcgtttttttcgtcggggattcgttttttattcgcgagggtagcggtcgagttgggatcgagttattaatagattgcggggttgcggcgtcggtcggtgagttatagtttcgcgtacgagcggtttagttcggttagtagcgtcgtcgtttttgcgcgtatttttcgcggcgatagcggggattcggggtcggaggtaggcgcgtaattatggggatcggggcgggcgatggcggcgggcgggtttttgtcgtagggtggggatggtttttttagtcgggcggtcgtcgttatattgtagagcgtatttaaagagatatttcgtttcgcgttcgttttttagtattagattttcgttcgaaaacgtcgtcgggcggattgtacga

SEQ ID NO: 7380 - DNA, 1479 bp, synthetic construct
  misc_feature 1..1479: note = Description of Artificial Sequence: Synthetic polynucleotide
  source 1..1479: mol_type = other DNA
cgacgagtttacgaattttatcgtggtcggcggtagtcgttggtcgagtttagcgtttaggtttaggttatttttatgtcgtgcgattcgtcgggaacgggtttaggttcgtttgtttaaggttagaagtattttgttttcggtttaacgtcggatcgcgtttcgttttttttattttatattaaggaaaggaattagacgtttgggagaaaggatgagtagtattcggtgggattcggttttaattcggggtcgtttttaatttttaattttttagagtttttttcggtttcgtttttttttttacggtttcgaggtcgtcgcggttttttttcgttttgagtgtagatagttcgggaagtggagagcgtagttcggagttagggagtcgtttttaggagttttggcgatgggagcgtaggtggcgggcgtggtttttttaattttgttttagtcgattcggagtcggttttcgtgtagtagttatcgttcgggttttcgtttggttatagtattaggttatagtgcgttggtttttgattatttttttggttcggtggtcgtttttcgtttttttttagttcgcgtcgttgttttgttttaggtttcggtgcggttttaagttttagtttagggtttttaggtttttttaggcggcggtggcggtatttatttgggtcgcggagtcggggtttggtacggtttcgtaggtggtaaatgaaattttggtagttgtcgtgttttagggttttacgggtatagagttcggttagtagttgtagcgtttggtgatagagcgcgtttttggtttcgggtatcgttttttcgtattttcggatcgcgtcgggtaggcgggcgtaggagatagtttttcgtttgttagtttagagtcgtcgttttcgggtcgttcgcgtttatcgttagggatttgtcgagaaacggtgcgagtttgagttcgagttttagatttagtcggttcggttttttatcggttgtatgtagtttttcgttagtcggtcggttaggttttttttttttttcgttcggttttttcgtttttttttagatatcgaggagaggcggtgtcgtatagtttagagcgtttttttgtttgcgtttcgttcgttattcgcggtcgtcggggggcggggttaggttaggagtgcgcgtcgtagggtaggatagcggcggttttagatcggggatttggggtatttttcggtttttggtcgagcgcgagatttggtttgggatttcgcgtttagagcggtcgcgttttggtttggggagtgtgagtgagtgcgcgtttcgggcgttttcgttattttattttttatttttgatgtaaattaagtattcgtttttatcgtcgagtgtgtttaaagtacgtttttggatgtttagtgcgaaggttataatttgggtatattcgttagatgcgtagaatcgagtttttgtttcgaatttggaaagagtcgt

SEQ ID NO: 7381 - DNA, 446 bp, synthetic construct
  misc_feature 1..446: note = Description of Artificial Sequence: Synthetic polynucleotide
  source 1..446: mol_type = other DNA
cgtgcgtttcgcgtattttgtttttcgcgcgacgtcgttcgcgtcgttcgcggttcggtcgggagcggtagttcgtgtttcggtttcggtttcggtttcggttggcgtttgtatttgcgattatcgtgagtagttatggcgtattttatagtgtagagagtcgttttggtttttgggtttgttttggttttgtcgttgttgttgtttaaggtttttttgtttcgcgggaagcggtaggagtcgtcgtcgatatttgaaggtaagagtaggttagttttttttgagtttttcggcgtcgaagagtacggagaacgttgtttgagggaggggtgattttgagagtttgtagtttttatcgaaatatttattaaattgattggagagggcgggcgagacggcgttgaagggttaatgtttacggtttcgttgttattagcgggtggcgg

SEQ ID NO: 7382 - DNA, 2991 bp, synthetic construct
  misc_feature 1..2991: note = Description of Artificial Sequence: Synthetic polynucleotide
  source 1..2991: mol_type = other DNA
cgtttgtcgtttataggcgtcgttgagggatagttggtttagtttgcggattttttttcggattttatatttatgtttagggaaagtcggagttacggcggtataaattagcgtttttattttgattatttgagcgagcgttcgcggttcgttcgtttgcggtataaacgtataaattttttgtagtattatatattatgttttagagataaatatagttttaggggtttttgttttggtaaagtaatttttatttataggaatagattataaaagtattataaaaagtggttttgaatcgggaaacgggttgggggtgggttacggttatatttgttatatttgggatcggagtgtattgggttttacgtttttttaaataatcggtgtatttcggggtagggtttaggtttgcgagggttttatttttatgggggagggcgcgagaaagttgaatttagttttttaaggtttagttttggtttatcgaggaatacggagcggttatcgtaatgggttttcgagaagggtgttgcgtggaaaaaatcgcgttgtgtttttgttttgtggggcgggggcggaaattttagttttttcgttttttttattttaagagaggtcgtttttaaagcgttgttgggaggggggtatttaagtttaattttttgggcgcgagggattttaggggtattatttttcgggcgggtgggcggttattatttttttagagtatttggtatatcgggttggggttcgtattcgtagggtattgcggggcggcgttcggtgattgggtggggtcgtcgttgttttttttttcgttgggggcggtagttttttgtttgcgcggaggcgatttagaaggtacgttcgttagtaggagggcgggcgtcgtagggttttcggtggagatgcgttttacgatgttggataggtagtttaggttcgatatcgtcgtatttttttcgggtttgggttttgcgcggggagggttcggttagtaagtaggggtggggtcgcgataagttttttattttcgggtttagtattttgagatagattggaaattgaggattttagttagagttcgggataatttaaaagatagggagttatttgtttagtattttattttttgtattattttttaggatataggcgtgtgtgagtgggggtgggagcgttttagatagaggttaggatagttttatgaaggaggaggagcgagtagggagaggttcggaatatttatcgttgggcgtttcgttgtagtaggcgttttcgtagtagtttcgtcgtcgggcgtcgttcggggggtcgttgtagtttatttgtaaatagtaagggcgattgagttaggttcgcgggacggttcgaggttcgaatattaatttttgtagtcgttttttttttaattttagtttaaggttttagtttcgggtttagatttgttttggttgggggggtaattacgggtgggtaggagatgaggtttgtaatatgtagggttaaattaagggcggatagttattaaggggcgtaaatttatattttggaagtagggataagtagagaaaaagatttttacgttcgcgttgtagtgttttaatagcgtttttaatggggtagttcgaacgtttgttcgtatatttttaaaataggttattttagtgatagttgtttaggataagggggttttttttttcgggaaggattttggtttaaatttttcgtaaggttagtttttcgttttcggaaacgcgtttttgatatttcgagcgtcgttttaatttttttattttttggggtttcggttttattatgtcgtcggagtagttggagcgcgggttggacgcgtcggagtcgtcgttgtagtgttcgtcgtcgcggttcgggggtagcgggttcggcgtatagaaggcggttgcggcgttagggggcgcggcgttttggtcgcgtagtagagtttgtaggttttcgatatagcggatggcgttgcgtaggatttttattttgggtaatcgttggtttggattgttcgacgtgtagcgtttgagtgttttaaaggttttatttattttgtttaggcggcgtcgttcgcgtatggtggcggttttgcggcggtcggcgttggtggttttgcgtttgtacgttttgtaggtttatagtaggtagcggttcgtttggtggtgttcgttgggcgcgcgtatatgttcgtttttacgtgcgttcggggtcgggtgtatcgtcgcggggaagtgcgagtgtttttcgggttttaggagcgcgtttacgtgtattaggcgcgggtttaggttttcgaagaagcgtaggttcggggagtcgaaatacgggtcgttatagaagtcgttcgttgtggtaaaggagtagagagagtcgtcgggggtcgttaggtttacgtcgcggagcggtggcgatagtagttttatattttggcggtggcgcggtacggttttggtttcgtttaatttaagcggtagagagtggtcggaattttttgtcgttcgggagtttcggttgtagatagtaaagtgttggtagtttgaatgtttatttattgttttttattttttttttttttgttcggtttgatttgtggttaaggaaagcggcggtagcgttttagggtttttttatttttagtttttcgttaggcgttttgggttatttattcgtagtagtttaaacgtttcggagtttaggcgggtagttgggggagggggagttcgaggttaataggaatattgcggggcggggtttgggggggttttcggggtggtcgtaggggttcgtagattggttagttagttcgtttttttatattggcgtgcgcgttaggttttttatcgggtagggagggagggagcgatcggtagttttaggcggttgtatttggtttttcggtacgttttttttaaatttttttaatattcgattgttgtattcgcgggaaacgttggttgcgcgcgt

SEQ ID NO: 7383 - DNA, 928 bp, synthetic construct
  misc_feature 1..928: note = Description of Artificial Sequence: Synthetic polynucleotide
  source 1..928: mol_type = other DNA
cgagtttcgtagtttttttttttcgtttcgttcgttagttttttgttttttttttttatattttttattttaaagttaggcgtcgggcgtttttttttgtcgtcgttcggtattcggttaatttttttaaaatgcgtttttattttgttggttgtttcggtagggagtatggaggattgggggttcgaagtttgtaaagggtgattttagcgttgtagttttttcgaaacggagatttgttatttttttagagggcggggaagtttatattattttttgttttatagtgttcgtttcgtttcgtttgttggtttttcgtttattcgagatattttaggtacggttcgtattggagagggtcgcgttgttgttgcgatcgtacggcgttcggggtaggaatatgttcgtttttttttgcgcggggggaacgaaatttttagagtgcgtttcgatacgttttttttattatttaaggtaggtttcggtagttttggttatttaggttcggggagttttagtcggatttgttgcggtttttttcgtagcgtaggtaaggattttaaattttaaattagggatttcgattttttttttttttttttcgttttttttttttttgaaagagaaatagatagaaagtttagttttgagataaagaacgcgagtgattttttcgaaataaatttgaagataacgatataatagtgaatggtaggacgtataaaattttatgggtttaggttaaatggtattagttataggttttagtcgtagtcgtcgcgtcgcgtagttttttgggttatcgcggagtttgaaaagacgcgtttaaggagattatttaaagtaagattttttcgttcgattttttgtttttttaggatttatttttttttttacgggcggttagttttcgttttttcgttttcgt

SEQ ID NO: 7384 - DNA, 1267 bp, synthetic construct
  misc_feature 1..1267: note = Description of Artificial Sequence: Synthetic polynucleotide
  source 1..1267: mol_type = other DNA
cgcgggattttagggttttttcgtagttttttgttttcgtcgtatcgcgttttttcgggtttcggtcgcgttcgttagtcggaagcgttttttttgcgggtgcgattttcgtagttatttttttttagtttggcgggggtcggcgagagtggtttttatagtattttataagttcgggaattcggggtacgcgggttcgttttgttgcgggtttcgattttttgggacggaaagtcggttattagtagtaagagggtgcgtttattcggtcgcgttttttatttttgcgtttttgaggtcgggttttttgagaaggggtatttaacggggatatttttaagttcgtgagtttttatttttattttgttatttcgagtagggtaaagagattttaggaatcggtttacgttatcgtcgttttttagattagcgtaaagttcggttttaggtttttttacgtcgtcgtggtttgtgggtatttttatttttcggatttttttaatcgttatagttatgtttatttgttttggtagtgtatatatagaattatataattaaaattaaatttatcggtatcgttttcgagggttttcgtttagtagggggtatcgaagttaggtggaagtaaatgagtttggattttgaggcgcgtttggtttggagtcgttaaatttgttagcgggcggcgggggaggtggttcggtagcgtcgggtgttgcgttcgtatatgcgttcgggaaggtagtttcggtcgtttcgtttttagttcgttttttatcgttggcgcggcggcggcggcgtggggttcggggttcggtttttcgttgcggttgcgttcgtttgggagttcgggtaggagcgcggggtttggttattgtggtttgttgcgttttttattgggggtcgatttcgttcgtttttttcgttcgtagaattgcgaggatttggattgtaggcgtcgtagtcgttattattcggagtatcgaagtcggagttttaggatttgcggtcgaaacgagagagcgggaggcgtacggcgtttttacggttttacgcgttttagttttttcgagtcgtagtcgttaatgttgttttttttattttcgtatcgcggtgggggttgtcgaagttgttatagtttattttcgtcgagtcgaaaagtcgtcgagttttcgcgggtgggtattttttttcgggggaatttagatcgaggcggcgttatcgagcgcgtacggattttttcggaaaataattattcgggattcgt

SEQ ID NO: 7385 - DNA, 1225 bp, synthetic construct
  misc_feature 1..1225: note = Description of Artificial Sequence: Synthetic polynucleotide
  source 1..1225: mol_type = other DNA
cgtcggtcgttttttggtgttttcggggttggtaagcgcgtagttgaggaaagggtataaaggtggcgagttttgcgggagtagttgtgtagaatttgtcggattttagggtttggtcggtaggttcgttttcggcggttgggttttttttttggagtttagattttttagtcgtaggttgtttttcgggcgggttttagttagggcgcgtagttttgagcgtttgtcgttgcggttcggttggtaggtttcgaggggcgcggggtcgcgggtcggtcggtagggttttgtgtcgttcgttttcgggtgtgcgcgaggcgcggagtatttaaattgatattatatgtttttttattagttgtttcgcggtcgagttttaggcgtataattatcgttagtgggcgagagcgttagtagtttttagggaagggatataatgattgaggtttaatttttgaaggggaatttggagttgcgttttttttttgttatttcgatgttgggagtggcgttttggttttggcgttttttgggtaagtattagtcggcggtatttgcggaggtggttggtacgttgttattttttgaaatgagtgaggagggaggtttagatttaggcggttttacgcgttcgttttggtattagtagattgggaattgtcgtggttatgttcgaagtttggaaagtttttttcggtttttttttgggatagttttttttttttcgggaagttttttgtgtttagaggtggggttttgtagttggaggggtagatggaatttgcgaagtaaaggaaggtaataaaaggaagttaggagaaatcggaaacgtgggttaggttttgttttgttggagaagcggtgttttcgtaaagtttttgtttgcgttggtttcggtcggagtttagattttttaaacgtttgttattttttatcgagttgaggtttcggtttttattcgcgttttggtgagggtttttttttagttttaagttttcggttattttgaaaacgcggtttttttcgaaggggaaataagtgtagtttaatttcgtttgagtgatttataaataaggacggaaagggtcgttttattacggtttcgtttgtcgtgacgatgtaatttttcggagcggagtattgttataaagtgataaggttgttataagcgtttcgattgatttttttaattagttttttatgtatgattcggagcgattttcgt

SEQ ID NO: 7386 - DNA, 1627 bp, synthetic construct
  misc_feature 1..1627: note = Description of Artificial Sequence: Synthetic polynucleotide
  source 1..1627: mol_type = other DNA
cggttgtcggcgcgagcggcggttttttttcggttgtagaacgtttttcgttgtcggagaaggggtttagtaaaattgatttttttttatttgtttttatttataattgatggggagatgagaacgtaatatattttagtatcgagtttttgtcgtttggcggagattttgtttaagacgttttcgtaaagtatttttagtcggggaataaagtacggaaagttgttgggtagagcggtcgggaggagatatcgggagtcgggtgggcggtggggtggtcggtgggttgtttcgggttcgggagttcgttcgtagcgcgttttgttagtaaggggagagggacggtgggaagcggtcgtttttcgggtttgggtcggggatggggatggttaagttattcgagttttcgtttttcgtcggtaggtattattcgggggtcgtgtaattcgggcgtttattgataggtattttacgttcgcgaggggttgtttcggttttaattgcggcgttgcgttttttttttaggacgtaggttaatgttcgttcgttcgtttttagtcgggcgtagagttgttagatttcgggcgttttagcgttcgttttggggttaacgggcgggagggggcggttaagttcgtaggcggttttttcggttttggtttagtttttttcggttggtttttggagacgttgtgttcggtagagaagtaatttttgttaattttagttatgtgcgggggacgtcgagttggttttgtttggtaagaaatttttatttgatgtttttttcgttttttttttaagggggtgtatagtggaggagggtttttaagtttatttgtttttttttttaagtcgttagttttgttagttttgacgcgttcgttaaatttttttagttttttgcgcgttttttgtacggtaggtagagagagtagtttggaaaataaattaattgtttagtggtaatatatatatatatatatatatatatatatatatatatatatatatagcgattcgggattttaggtttcgatttttatcgcgcgtatatatatatatatatatatatatatagcgattcgggattttaggtttcgatttttatcgggcgttataagagtattagtaaattgttgaaaacggttttattttattggggggaggttggtaagaaaaaagaaaaagaaaaaaaaaagtttgttacgcgtaaggaagaaagaaaataaagaaaaatattgtaaaaatagatatttttttgtttttttaggttttggtttttttgatagaattttgaaattcgttattattttttgtagtagtagtagtagtagtgggatagagtaggagtaaaataaatcgatgtacggtaaatggtgtaattcgatttatttttaagttaatttattaggcgagtcggagtttggttttttttacgtattcggtagttttcggcgcgggttttattttcgggtacggacggtaggaggcgcggtcggtcgggcgcgttcgttttcgcgggtgaatcgtggttagcgtcgtttggaggtttttattttggcgtcgcggttttgttgatttttcggtggttttcgcgtttttttttttcggcgttttgttgcgt

SEQ ID NO: 7387 - DNA, 1857 bp, synthetic construct
  misc_feature 1..1857: note = Description of Artificial Sequence: Synthetic polynucleotide
  source 1..1857: mol_type = other DNA
cggcggtcgtatttggttttatagtgtaaaatgtgtttggcgaggaagtcgaggcggcgttgtagtagttgagcgtgggggtttgtaagggcggttagttcggggaagcgaggttcgtggcgtcggtagaggcgtagtagtcgggtcgcggcgttttgttcgcggtgtagttttaggacgcgtcgcgcggttcgttcgcggaatacgtatattgattgtaatagcggttcgttatatttgttttatatgtttgttattcggtagtcgtgtattaagttcgttttattgtttagaaagattagcgtttcgttcggatcgcggtgtaggttgttggtggtacgttgtatgacgcgcgggttttattgtaggttgaagaggttgtttacgagtcggtcgaagttggtcgttaggtagtcgaaaaggattaagtcggtttattgtattaggtttattagtttcgtttggttgaggttggttagtttattttcggtatttcggagggggcgtagacggtcgtttttcgagcgttagggcgcgggtattattacgttcgtgaggttgggtagttagcgtgttaggtttattacgttgttttcggtttagtgcgtagcgcgtagttttttttgtatttgcgtttattgcgcgtttcgagtttttattcgagttagtgttagcggcggtacgtggcgttggaggtttagtaggcgcgttagatagtaagatagggtttcgttttgaatttgtttcgggttgatgtcgtagcgtacgtaggcgcgggtgtcgtcggtaaaacgggttagtcggttggagttgcgttcgtaattttcgcgttttagggttattattcgggcgtcgcgagtcgtttttagttacgtcgtcgtttgggttttcgaaaagttcgggggtatttgtttttttaggtcgcggttttagaagacgttttcgtgtatcgcggcgttttttttcggtcggggttgtttggttgatacgtgttatttgggttcgtttcgggattgtcggggcgggtcgttcgcgtcggtcgttagggtgagtagcgttcggaaagtttttagggagtcgtcgcgggcgttttacgttaggggcgggggtagagggaagcgaggcgcgggcgcggggtcgtcgtttcgggtcgggcgtcgtgggagtcggttttcgggcggtcgggaggcgggtagttcggttcgcggcggtaggagttttttttatagcgttagtagcgagtttagcgttagtagttagagtttcgcggtggcggcggcgtttcgtatttttttgtttatgttttcgcggttgtgtcggtgcgtcgtcgtcgttttaagtcgagtttaggtattcgggtttcggcggcgaggcgggttcggtagtttgtgggtttcggggtttcgggcgtttcggttttatcgcggtcgcggggcgttgcggggttttgttcggcgtttcgttcggcgttgggaattcgagttttcgtcgttttttagttgtttttgtatttcgttgtgagatttttcggtgggcgcgatttataggcgttcggattacgtgggagttagggggatttttttttttttttttcgttttcgtttttcgtttttcgttttttcgttttttttttttttttttttatttaaagcggcgatggtttttttcgagagggagaggcggttttatattcggttcgggatttgggggtttggaggaagtcggattggttgcgttcgcgtcggggcgtaggagggggtggcgtagagtcggagtttggggtttggcgggagggacgcgttttgggttttcgcgggggtgttttggtcgtcgggtttttttgtttaggtagcgcgg

SEQ ID NO: 7388 - DNA, 2423 bp, synthetic construct
  misc_feature 1..2423: note = Description of Artificial Sequence: Synthetic polynucleotide
  source 1..2423: mol_type = other DNA
cggagcgtagagaacggttggagatatagcggtcgcggtttttttcgtagcgtaggagcgttaggtattgcgttgggttaattgcggttagggagttatttgttcgcgatagcgagcgcgtatttatattttcgattaatttaggttggtttttagtttattttcgggttttaacgtttaaatatttcgtattgttggtttcgatatttttttattcgtcgttaggaattagcgtagagggagatgcgttttttgtggcgggtgcggggcgaggattttgattttagttttgggaagtgaattgtacggaggagagagttttttatcgttagttttgttttcgttttttttgcggttttattttagttcggatgtcggcgatggggaatagattagggacgtaggagtatattggatcgggggtggatttatttggggaggtaggtaatcgattcgcgtatcggtggcgtaatttcgtttcggtgatcgaagtttgtggaggtagttttattttcggttttttggttcgatatttttttgttatttttttttttattttttcgagttttgggagtttggatttcgaaggtgtaaaaagttaagagtttggaaaattgtattgtgtaaatatattgattttatttgtttttttttaggagttttatagatatatttaggtaaaaagatcgttaaataaatgtttttagttatcgtaatgtaaaaataaatattaattttttagacgtagtagtagtcgcgttgcgtttaaagttttaacggttacgtttaataattataaaagtgtttagcgagagtgttggcgtgagtgtgaatgggtgtgcgttggggggtacggtggagcggtgtgtaaaatcggagttgtaaattatcggataagggtatggagtggttattcgtcgtcgatttagcgcgggcgcgttttttcgtatatatttatagtagagttcgtattgggaagagttaaaaaataaatatttataaggacgaggaaagcggtttcgttttcggcgttttcgggttagggcgagcgcggcgaggggcgtatcgatcggttcgtagcggggcgggagttcgagcgcgcgaggagcggcggtttcgggtttttgcgggtttttcgggagtagggcgcgggtattttcggggtttatacgtcggttttcgcgcggatcgcggacgcgcgcgtttttttcgcgggcggcgttttttatagggtcgagtcggagtcgttggagtttaggttgttttttagtttgtagttgttgagttgttttcgttgtagcgataggttttgcgtgttgcggcgtaggtattttaggttttgtaggaacgattttttggttttttttttttttatgggggatattttttttttttttattttttggatttcgtcgaaggttatcggttgcgttttgaagcgagattggcgcggtcgtcgtagtcggtttcggtttttgggtagtttggcgggtcgtacgggttgcgggaattcgtcggttaggtatacgaagtgcggtattatcgtttggtaattggagtagatgtttattagttcgtcgggtttggcggttatggcgttttcggcgtttgcggggtcgggcggcggggcgtcggggtttttcgagggcggtcgttgcgtcggggtttttcgggaggtagtagtcgggggttcgtcgggcgggggatttaaatttgttgcggggtggcggcggttttcgcgggttcgggtcggcgtttttcgggagggcgggcgggcgggcggattcgtcggggggtacggggttcggggggcgttgtttcgtcgcgtttcgaggcgttcgtcgtcgttgttgtcgtcgtttgtttcgcggcggttaggttcgcggtttatatagttcgcggttgtttatacggttttgagttcggatgatagcgaatgttatttaaagcgtgcgcgtttcgcgttttttcgtttgacgtcgtttcgtcgttttgggaaagtaacggtttttttttcggcgtcgttcgtttttcgttaatcggtttcggaaggtaggtttcgttcgcgggggtttcgggagaagtcgcggtttcggagtacgcggttggttcgagttgcgttcggatagggatttttaatcgtcgcgattgggcgggtattgttttttttgggatttttaagtttgtattaatcgggttggtcgcggggtcgtaggtttttttttttcgttttttggttttagatgtatatatttgaggcgttggttattttatcgtcggttttgcgcggggcgcgaggtagtttttagttttttttgtagtttggcgagtttgagcgttcggttttttagagttgagttcggaagaaggggtgggttttttttttggatttttgttattttttttcgtaggcgcgcgcgcgt

SEQ ID NO: 7389 - DNA, 1146 bp, synthetic construct
  misc_feature 1..1146: note = Description of Artificial Sequence: Synthetic polynucleotide
  source 1..1146: mol_type = other DNA
cggtatttgggtttttgcgcgtttcgtttcgcggtcgggtttatggtattgtgagtttgtaagggagtttcgtttagcgcggggagcgttcggttttttttcgttttatgcgttcgcggttttgaagtttgagcgggggtcgggggtcgggcggggtcggggtcgtcgtaggtatggcgttcgggagtcggtggcggtcgatattgtcgtcgttgttgttgttgttgttgttggcgttggcggcgcgcgcggacggtttggagttcggcggcggtttcgggtagtgggttcgttacgcgcgttgggcgggcgcggcgagtagcggcgagtttagttttagtttgcgtattaacgttacgcgcgcgttgttgttttatttggacgacggcggcgattgcgattttttggagttgttgttggtggacggtcgtttgcggttgcgttttacgttttcgtgcgtcgagtcggttacgttgtagttggatacgtcggtggtcgacgatcgttggtatatggtgttgttgattcgcgacgcgcgtcgtacggcgttggcggtggacggcgaggttcgcgtcgtcgaggtgcgttttaagcggcgcgagatgtaggtggttagcgatttgttcgtgggcggtatttcgttcgacgtgcgtttttcggcgtttacgttgagtatcgttaagtacgagtcgttttttcgcggttttttggttaatttgaagttgggcgagcggtttttcgcgttgttgggtagttagggtttgcgcggcgttatcgtcgattcgttgtgcgcgttcgcgcgtaatttttgcgttaacggcggtttttgtatcgtgttggttttcggcgaggtgggttgcgattgtagttatacgggtttcggcggtaagttttgtagcgaaggtgagtttcggggagcggtcgttcggtgtttgggcgcgggggtgagggtttggggcgtttcgtgggggtcggagtgtgtgtgggtttttgaggtacgggggttgggtacgagggtttgtgagtgggtgcgagcgttttagggttgcggggacgcgtgttcgggcgagggcgcgtggggttggcggtgggcggggcgagtgggcggggtcggtttgggcgtggttagcgtgagttttgcggcga

SEQ ID NO: 7390 - DNA, 577 bp, synthetic construct
  misc_feature 1..577: note = Description of Artificial Sequence: Synthetic polynucleotide
  source 1..577: mol_type = other DNA
cgttttttttattttgcgcgttttacgtgttttttgtaaataagagaacgcgtaggcgtcgtaaattagcgtttattggtcggcgtgtcgtcgtttcgttggagggaggatttaggtttcgttggtcgcgggttcggtattcggtgggtcggtggagcgtttgttgggttcgggtcgtcggtttcgttttcgttatggcgttttggttgtagtttttgtcgttgttggggttgttttcgggcgtagtggtcgttttcgtttagtttcgagtcgttagtttttaggtttgggggtcgtcgttttcggagttgttggcgtttattcgtttcgcgttggagatgtttaatcgcggtcgggttgcggggacgcgggtcgtgttgggttttgtgcgcggtcgcgttcgtcgggtgaggacgcgtcgggggcgggggcgttaggttcgggtttaagggataggagttttgatttaatattgggatggggtttgttcgttggacgaatcgatttttggtgatggggaatgggtagcgtcgtacgggcggggttttgggcgtcgttaagggtcgattgtgttcgt

SEQ ID NO: 7391 - DNA, 1721 bp, synthetic construct
  misc_feature 1..1721: note = Description of Artificial Sequence: Synthetic polynucleotide
  source 1..1721: mol_type = other DNA
cgtgagttttcgaaaggcgaagggtaggtagtagtcgttggtttttgcgtttattaggagtttcggatgttcgagttagggttgcgttaaggcggtcggagtagagagggagacggggacggggataggtagggataaagtgtaagaggtaaaattggttgaaaagtagaagtgtaggagtcgttaaggggcgggacgaataggttcgtgggtcgggcggagttaagggtgggggtcggggtttttttaggtggtattcgcggcgttagtttttagtttttttttttttttcggttttgattggtaggcggtttgcgattagtcgcgaacgttatagcgtttcgggcgtttaggagaacgcgaacggtttttcgcgggagcgggcgagtaggagggggcgtcgggttatatatatagcggttcggtttcgggcgggtttggcgtttagggaggcgcgtattgttttttagagttttagttttagtcgcgcgtttttcgttcggttcgtcgttttatgtagtcggggtagagttcggcgttcgggggtttcgtcgtttgtttttcgtattttttcggttgcgtatttttgttcgaggtcggtcgtgcgttttcgcgggacgttataggcgtagttttgttttttagtttttcgggcgtattgatcgtttgatcgacgtacggttttcgggtcgggatgtcggggttcgggacggtcgcggtagcgttgttttcggcggttttgttggttttgttggcgttttgggcgggtcgagggggcgtcgtcgtatttattgtatttaacggtacgttggaggtcgagttggagcgtcgttgggagagtttggtggcgttttcgttggcgcgtttgtcggtggtagcgtagtttaaggaggcggtcgtttagagcggcgtcggcgattatttgttgggtattaagcggttgcggcggttttattgtaacgtgggtatcggtttttatttttaggcgtttttcgacggtcgtatcggcggcgcgtacgcggatattcgcgatagtgagtggcgcggttaggcgcgaaggggcgggggcggggggtaacggtcgtcgggttaattcgtttagttatattttgagattttcggcgggtatttgttcgggggtttcgggaatcggggcggattcgggtttcggttttttttgacgcggggttggggacgtagatatttttggtttcggtagtttagcgtaatttttgaggtcgggcgtcgtttttcgtttttagaaattcgggtttcgagcgtcgaattttagcgttttcgttcgtgggtatagggcgcgcggtgtagttatagggggttcgagatacgcgtttcggtttggtttaggttggggaatcgttggggtcgggttcgcgtttgaaggttcgggattgggtgcggtcgtcgggggttttttatataggtaagttaatttgagttagcgtaggtttgggtttcggaggttttagagggtagtttgggttttggaggtttttgggggcggttgcgtcgggaattttggttttttatttttaattttattttagaaatagggttttcggaggcgaataagtcgaggggcggagtgggttagggattatttgtttcgtaatgatttgcgtttcgtttttaggtttgttggagttttcgttcgtggagcggggcgtggtgagtattttcggcgtggttagtcggtttttcgt

SEQ ID NO: 7392 - DNA, 1721 bp, synthetic construct; identical to SEQ ID NO: 7391
  misc_feature 1..1721: note = Description of Artificial Sequence: Synthetic polynucleotide
  source 1..1721: mol_type = other DNA

SEQ ID NO: 7393 - DNA, 615 bp, synthetic construct
  misc_feature 1..615: note = Description of Artificial Sequence: Synthetic polynucleotide
  source 1..615: mol_type = other DNA
cggagtttcgggtacgtatcgtcgagcgttttattttgagttttttcggtattcgtagtttcgatagtttagttttttttatttgaaagttttatttgaggttttttttaattttgtttttttgtatttttggcgtcgcggggagttaggggttaaatttcgtggttcgcgtggtttttttttttttcgtagttttttcgtttttattcggcgtcgcgtttggagcgttcgtttcggagattcgtataagagaggaggggaaaaagtgggtttgtttttcgggtggttaatttatcgagttcgcggtgttttagaggaggcgttagcgttaggttagcgttaggtcgggttgtttgtttttcgcggtaaagtataaatgcgttcgagcgcggcgtttgaagtttttggcgagtatagtcggttcgcgtttagttttttttcgcggtcgtcgcgtcgtcgtcgttgttgggatcgtcgtttcgtcgggttttaggttttcgcggttcgatttcgagtttatcgagtagggggcgtcggtcgtttttagttcgcgcgttcgtaatattcgttggtttcgcgcgtttcgttcggcgttgcgcgttcggtagacgtcgg

SEQ ID NO: 7394 - DNA, 1542 bp, synthetic construct
  misc_feature 1..1542: note = Description of Artificial Sequence: Synthetic polynucleotide
  source 1..1542: mol_type = other DNA
cgggacggtcgtcgcgcgtttttttttttcgttttttgtttataagatttaatgagttttttcgggaggtagcgtagcgagttaggttcggaattagtaggttgcgtcgcgcgcgtcgcgtcggggcgggagttgggtttgggcggcgggtaggagttggcgggggcgtacgggtagcgttgcggatagttcgggagtcgcggcgatggcggtgtaggcggcgttttttagtacgtattttttcgtgtttttcggtttcgggggtttttcggacgggttagggggcgttttcggagttttggataagggttgttgtttcgaggacgatgagatcggggtttcggcgggtgcgttgttgtcgggagtcgaaggaggggacgtgcgcgaggttattcgcgatttatttagttttattgattcggcgtttagtaatattaagttggcgttggataagtcgggtaagtcgaagcggaaggtgaattatcgtaagtatttgtagaagtagattaagcgttgtagcggttttatgggcgtcgcgtttttcggttcgtttttttcgagcgtcgtcgatacgttagttaaacggtcgttggtcgtttttagcgtttcgatagtcgcggtttcggtttacggtaaggttgtttttcggcgggaggcgtcgtaggtcgtcgcggtcgttagtttgtaaagtcgaagtttggtcgcgtttttcgattcgttgcgttacgttttcgggggtgtcgagtcggcggggggtgaggtggttgcgtcggcggtcgggttaggaggtgcgggtattgggggcgcgggaggggacgtggtaggtttcgcgggggttacggcgattttaggggttaggaaggtttcgttgcgggtacgtaatttgttttcgtttttttttacggagtcgtttcgggtaggcggcggcgggtgtggttcgtcggggtcggacgtgagtttgggcgatttggagaagggcgcggaggtcgtggagttttttgagttgttggggttcgattacggcgtcggtacggaggcggtagttttgtttgtcgtcgagtttttcgacgtgtttttcgtcggagttttcgtattgcggggattttcggagttggagttcggtttttttgagtcgtcgtcggtagtggtgggaaatttattgtatttcgagttttggagcgtttcgggttgtttttcgattaaaaagagttttttgattgtttttcgcggcggtttgattttgaacgagtttttgagttttttgtatttcgtcgttgcggattttttcggcggggaggacgggcggggttatttggtttttttcgtttttttttttttagattgcgttttgttttcgtcgtcgtcgttttattaggtgttttacgattatagcgcgggttatagtcgtatcgtttattttagtttttggagattcgacggggtttgggaaggggcgtcgggggaggagggggcgtatcgggattgatttcgaggtacgtttttttttattagagacggttgtggagagcgtcgcgttttcgt

SEQ ID NO: 7395 - DNA, 1542 bp, synthetic construct; identical to SEQ ID NO: 7394
  misc_feature 1..1542: note = Description of Artificial Sequence: Synthetic polynucleotide
  source 1..1542: mol_type = other DNA

SEQ ID NO: 7396 - DNA, 1768 bp, synthetic construct
  misc_feature 1..1768: note = Description of Artificial Sequence: Synthetic polynucleotide
  source 1..1768: mol_type = other DNA
cgcgtttggagtgggttttcgatatttagggtaagtgggggcggtagagtttttttttcggtcggtatagtagtttttgtcgcggtttcggtttgcgacgcgtttagttttagtttttcggttttcggcgtttgttgagtgttcggcgggagaggcgtagggagcgcgttatcgggaggcgcgggtagcggggattggttttttttcgggttagggttttcggggtaatcgtttttagcgcgtatttttggtgtaggtggaatagttttttgtttcggtagggttttatttatcgcgggagaggttaatttcggatttaaatttcgtagtcgtagagcgggttaaaatcgttattttatttttttttattttttttttttttattttaagataaaaagttttaggtcgggtaggatttgattatttttgtttttttttattgcgttaattttgcgagcgagaggtttcgtatcgaggcggaggttggtaaaggggagtggaaagggaggatggatggggtcggggggtggggtggtgatgagggcgacgaaggagggggtgttattttttttttttttttttttttaaaaaaagtatttttttcgcgagaaatcgttgcgcggacgatatttgaagaggtggggaaaggagggggttgcgggagtcgcggtagagattgtgggtgttataagcggataggagttatagttgggatagttgcgagcggagtcgagtagtggttgtagcggttacgattgggagtagtcgtcgtcgttttttcgggagtcggagtcgtcgtttttttagtgggtgtagtcggggtttcgacgggggtcgggcggttatcggggttggagttgcggttacggaggtttttgcgtttgcgtcgcgtcgagggtagggatagggattggggtgaggggttgtttcggaacgtttatagttggcgttggtttttttttgtttgatagttttttggttcggggtttttggtgtcgggtttcgcgttagatgttcggggggcggtggtatcgttcggagtcggcggggacggcgcggttggtttttagtttggcggagagggtaggttgaggagtggggcgtttagagcgcgtatcgcgcgtaattcgtgtcgttaaaaaaaataaatttagagagttcgttcggggtttaggatcgttggggatatgggtattttgcgtcgcgtttttttggcggggttcgggaggtcgagggatcggtcggggttgttgtcgtcgggggtttgggttttttagttagttgtggattaaacggtttttttttatttaaattaattgcgttacgcgtaggcggcgtacgggttgggtttgggaatggggatcgcgaggttttagtatttcgatgttttgaaagttttttcgtttcggggatttgtttttgtgttgtagttggtaggggtcgtttgaagtgggagtagcgtttggagaaggcgggaggagttcggttcgggggacgggcggcgggatagcgggatttcggcggcgcggtgcgttttagggcgtagcggcggtcgtagatcgagtttcgggcgcggtaagaggcggcgggagtcggtggcggttcggtattatgcgtcgagggcgtttgttggagatcgttttgggatttatcgtgtttttagcgttttatacgagttatggggcggacgttaatttggaggttgggaacgtgaaggaaattagagttagtcgggttaagagaagaggcggtggaggatacgacgcgt

SEQ ID NO: 7397 - DNA, 2656 bp, synthetic construct
  misc_feature 1..2656: note = Description of Artificial Sequence: Synthetic polynucleotide
  source 1..2656: mol_type = other DNA
cgtataggaattttagtcgtttaagtttcgggtgggcgcgtcgtatttttttaggtattgtttagatagttcgttttttttttttgggcgttttttttagtttggttggggtcggggcgggttgggggaggttttcgcgggtttgtttgatatttgtaaatggaagtgggatttaatttggaaaataaacgcgttagagtttgggggcggagaggagcgggaggaggggagaggggggaaaaagattttaattattatcgcggttttagcgtttttttttttcgtcgcggttgttgtaggttcgtttaaattcgaagttgagttttattgggcgcgcggcggcggcgggatggagttggagttttcggtcgaggcgttaggagtttattagatttcgcgtgttagagttatcggtcgtttacgtttcgggtcgtaggcgttattttttttcgggagttttttttagttttttacggagatttcgtagggttttcgtagttttttcgttttcgacgtttatttcggggatttttttttatcgtttggtttgagtttattattttagcgagttgtagttttaggatgttatcgttagtatatttatatttcgggagtatttttgttttttttatttcgagtaatttaagcggtttttttagttcgtagttaaatttcggttatttttgtatttttgttttaagtacgttttcgttatttttcgtttataagaggagaacggtggaaagtgaataaaagttgtttttcgtaaagtttaattatgtttaatgttaaattatttcggaaagtatatgtgataaaagttaacgagagaggagaggagggaatttagattatagtatagttaaaaatattcgggttcgttattatgtaagtcggggggttagatgtattttagtttagcgatttttattggcggaattttcgcgtttatcgcgcgtcgcgttaagatggtttaggttatttttattgttttttcgttagcgttttttagttttttatatttgttttgtatatatattggtttgtagaggggattcgtttcgaatcgttcgggagtggggtttgagttcggagttggtgtttttggcgttttcgtttttaattcggagatagttttttcgtatttttggggatggttagattcgcgttgttttttttttaaagataagtagtttttttatacgttcgttaaaaattatgtattttcgtaaagtatttcggttttttttttttgttaagatagtagggatagtttttgtttttaattatttcgtaaaggatgtcgtttttagtcgaagagtcgtcgtcgtcgtttattatattttattttgattataagtttcgtaagttcgagttaggcgtggggaacggattcgtagattggtaatttttttttttttttagcgaaagtggaggttgggttttttttttgcgtcgcgtttcgtttagcgatgatttaatttgtatttcggggttttttaagtgtattatttatcggtatttgaatattttttattgcgttcgagaggtatcggttgttaagtaggttcgttatttgaatttttttatttatttgtaggggcggttgggagtcggggatgggtgtattgattcgtaatttttttcgtaatttttttttagatttttagttttaaatttggttaatttttcgtgtaaatttttcggttttcgtcgcggggttaagttattttttttttttgtttgtagcggtagtaacggcggttcggggttgcgcggaggttggaattttataaggtgaaaagttttttttacgcgtttcgtcggttttcgtttttttagtttatttcgtagtttatttgtatttagtagttgaggttgtgtttcggtaggcgcgttttagtcggtgtattaggtagttaaattattacgttataaatttttacgtatttttgttttcgttggcgatttacggttttacgaggcgtttttttcgtggttttttttattcggtgttcggcgtttttgtttcgggcgagtcggtttttcggttgttgtcgtcgtagcgtttatcgcgcgttagtcgggattgaggtcgcgagtagaagcgttttgcgttcgggacgtcgtcgtcgtcgtcgtcgggggttcgtaagcggaggaggggagtcgagatgaagagaatagtagcgggaggagagggacgggaggcgcgagattttaattcgtaggttagtttatagcgtagtttgcggggaggagcgtcggtttttttgtttgtttcgagttgtagtcgtcgtcgttattgttcgtcgtttggttgtttcgggttttttattatagtcgacgtcgacgtacggttaagtttttttttagtttttttttcgcgtttgtttttcgtagttttttttttttaaatcgcgagcgaaaagggcgagggggagaggagtttcggcggcggggatgattagcgatttaggagcgtggcgtaggggagagggggcgcgcgggagggggcggcggaggaggcgcggcgaattggagggtattttcggcgtcgggtttggaagcggttaattttagagttcgagtttttttttagttttttggggttttaggatgatattaacgtatttttttgtcgcggggagagcgt

SEQ ID NO: 7398 - DNA, 623 bp, synthetic construct
  misc_feature 1..623: note = Description of Artificial Sequence: Synthetic polynucleotide
  source 1..623: mol_type = other DNA
cgatattacgcgagtgtgtacgcgttggggattgagttttcgaagcgaagttttgtcggaggagttttaggcgggagtgggaacggttgggcgtggggttagtaacggcgttattcggtagggtggggggagttaggtttgttagagttagagcgcgttatcgtcgtcgcgagagacgtcgcgttgtttaataggtagaggcgttttttagtagtttggtgggagtagagatataaaagtgttttaataaattcggagttggcgtgtcgatcgcgggttggtggcgggcggcgcggtgtttcgcgcgttcgggttttttggtttttcgggacggttttgtatgttgtgcgtttcgtatttcggttgcgcgtttcgattttagcgggaggggacgttcggttcgtaggtttttaggggaggggtggtttttgtaaaatggttttttattttttgttgttttgttttttttttttggtgcgagttatcgagttttacgagggtcgggtcgacgagtagagcgcggaggcggttttggtcgtgtttaatgtttcgtatttttttttttggaataattatatttttttcgattggtagaattttgtgggtaggaggcgttacggcgt

SEQ ID NO: 7399 - DNA, 1967 bp, synthetic construct
  misc_feature 1..1967: note = Description of Artificial Sequence: Synthetic polynucleotide
  source 1..1967: mol_type = other DNA
cgatgatggaaaggatcgttaggcgattttttaaaaggtttattaaatattcgggttttattgttacgtttttattcgggggcgaggatgttttaaaaatattttttttttttcgttttatgtggataggtcgcgtcgcggtatttacgggtatcgcggaaaggggtataatcggggtggttttcgtttaggtggtagcggagatttagggttaggcggattaggtttggtttttatttttttttttcgggttttgttacggtttcgtttcgtcgttagtagagttttcggttcgcggtcggtcggttagcgtacgcgcgtaggtgtgtttgttaggatgtttttttcggcgacgcgtttaggttcggatttcgcggcgcgagagtgagcgttggcgggggcggtgggatgttttaagtcggcgtgaaagaggcgagagtgggcgagtacgggcggtcggattaggagtattttcggtgattatttagtttttattttattttttcggaaattgtcgggtaggcgggggatcggtcgtagggcggggttttttttggcggtgagtgagcgagatcgttaggttgaagtatcgggagattgttttggtagtttttggtcgttattcgcgtcgtaataaaagtttttcgcggtttttcgtttagttagtttcgtattgattggtcgtcgtgggagggattcgagttggttggaggcggcggtcgagcgttgtttttgtgtcgttcgcggagggggcgtattgggtgttttttggttcgtttcgtgcgttttttaatcgggggtcggtcgtttagggtaggtataacggtatttggagttgcgatcgcgatatatagttttttcgttcggtttttttcgatcgttttttagtatacgtttttcgtttagaatgttcgtttaatttatttagttttttgcggtttttgttttttttttttttttttcgtttattagagttaaagcgtaaatttttgggtggaggtggggggatgatagttggaggggagggtgggtacgtatagaagaattttttagggaggtcgggatggaaatagttaaaatgaaatgtatttttttgtatattgtcgaggttttttgggcggcggcgtaattttcgttattcgcggtagtattattattgttttttttttagttttttattgtttatattttgttaggatcgggaatttcgtttaaagaaaggagatagggcgaggtgtttcgggcggttatttgttatttttttttcgtttcgtgtaatattgggtacgcggcgcgtgtaaagatatacgcgcgtatacgcgcgcgtatatattaggtagttttaattacgtttttttcgtttttcgttttttcgtatttttttttgttaaaacgcggcgttcgatttttttattttttagtgttcgcggtcgagggtaggttttgtaattaattagtaatttggtaaatgaaaaattaacgttatgtcgattggggtgtaataacggttatattaataataacggtcgtgcgattttgtttattttgttttattttgtaaatcgttatttttttggggcgggggaagtaaagtagcgattttgattttattagatttaggaatataacgatttggggcggttgttttagttttattgtttatttttttcggagtcggggttgataagttatttttttttcggaattcgagttcgtgcggcggtattattcgagtcgcgatttttttcgtttcgtcgttcgtttttggggaaggagcgttgtttattattagcgcggtcgttgagtttttaggagtcggtcggttttgtttttatcgtcgcgggcgtataaagtgggaagggcggacgcgtcggaggggcgtcgggcgttggcggttcggggaggtagtttcgtgtagcgtagttttggagggagcggggttcggttgggtagtaagggcgacgcgt

SEQ ID NO: 7400 - DNA, 2558 bp, synthetic construct
  misc_feature 1..2558: note = Description of Artificial Sequence: Synthetic polynucleotide
  source 1..2558: mol_type = other DNA
cgtttcggggtggggacggaggtcgttaaggttgggatgagtatttagtcgagtcgagttatcgcgtgttttttcgtagatatcggggtttttgagaattaggagggaatagttaaaagaatggaagtttggcgttttgaaataagttttttgggttttgagggaaatttgggcgtttacgggtagtcgttttttttattcgtcgttcggcgttcgcgattcggttggcgttggttgtagcgtttagttaggcggcgcggggaagagtcggcgataattcgttcgagtttcggggatcgatcgcgtttttatatttttttagtttttagcgatttttatcgagatttggagacgattttagtaaatttggggaagtaatttttttcgaggagttagatttttgaaagaaggagagttgagttagggacgagggaaagcgaaagagacggggaggaacggcgatagttcgggcgggttggatttcgcggcgagagcggtaggggaggcggattcgtttcgcggcgaaggggaagtataaaagtttcgtagcgagttgtgggaggaaaggcgagaaggggtttgttcgtttttttttttcgatttagggtcgtgattttttgggagcgatcggttgggttttaggtttttggttagcggcgttagcggttagcgcgttcggtttaagtacggtgcgagcgtttcggggaggcggcgagcgagtcggtgcggagcgtttcgtgcgttcgggtggtttcgcgggtcggcgggatcgtgcgtattttaagcgcgtgcgggagtgtgcgaggcgttgtgcgagttagcggcgggcgcgttagggtgggaaaggtatttcgaacgtattaggtgtagagatcggtatttatcgagagcggtcgggagcgtacggcgagtttcggtgttatcgtcggtttcgtcgagagtcgaggagggttcgtagcgttgtagattttttggagttttttttttttttttgtaaaaggggggtggggattaagtttaattaagaaaaagtttattacgtttttttaaagagaaataaaacgtaagtagttttagttttgttttttttcgtttttagatttattcgttagttttttcgattttagttttttagtcggtcggcgaataaatatataaataaataaattataattttattttgcgttcgcgtatcggttcgtatatataagagtatttacgggttttgttgtttcgttagtttttggcggtataaagttttcggattttcgatttttttgtttacgtttttagttttcgtatatcgttacgttttttattttttatttcgatcgtgttttgaagaggaagggttggggaggtagttgcgtttaggttgatagtcggggtttttttttttagtcgatttttaatcggtggcggcgacggttgtagcggtaggaagggaatacgttaaataaaaaaggtataagtttagcggtcgagtggtcgaagcgagcgcgcgttttttagatttttttagtttcgggaagtttcggcgcgcggcgttcgttgggcggtgcgttttttttcggttttttatttatcgtagtcgagtcgggtattgtggggtgggtgtgcgtgtttgtcggggggtgtgtgtttgtgtcggggaggggtgttgttggggaattgttgtttttcgtattacggcggtagcgatagtatcgttcggtagttcgtagtattcgtttttatcgtttttaatttttttttgttgcgaggttagtaaattattatcggttgttgcgttttcgtcgcgttttacgttaacgtcgagtttttttttttgtaaggtttcggcgtttttttatttttagtgttggcggtcgagttcggttttttgtttatagttgtttttttttttttttttttttcgcgtcgttttcgggtttagttcgtttattatttcgtattggtcgagttcgcgcgcgtttttcgttttatttttttttttttttttttttttttttttttttttttttgcgtttcgcgtttcgggtttcgtttgatatttagttgttgttggggcgtcggcggtcgttttttatcggtcgagcggagaggaaggaaggagttagaggataggagtgtatggggatttagaatttttaataggggaattgagggtgaagggcgcgtagtagtttttatttatttttaagattttaatttgtattggatacgggttttgttttttttttttcgtatttcggtgtttaagtacgtagttttgtttttttttttaatgtttgttttaatttagtgcgtgttatttcgtttttaattttttttttatggttcggggttgtagtttttttgatatttgttttaaaaggtcgtttttttagtttaaattcggtttttttatttttttggttattgcgcgtttttcggtttgagtattcggattttaataagtttttcgaggtagagttcgcgggcgttagtgaattaggtgttagaaggttcgcggggatttattgtcgaagcgagatattcgtttttagttgtcgcga

SEQ ID NO: 7401 - DNA, 2558 bp, synthetic construct; identical to SEQ ID NO: 7400
  misc_feature 1..2558: note = Description of Artificial Sequence: Synthetic polynucleotide
  source 1..2558: mol_type = other DNA

SEQ ID NO: 7402 - DNA, 1508 bp, synthetic construct
  misc_feature 1..1508: note = Description of Artificial Sequence: Synthetic polynucleotide
  source 1..1508: mol_type = other DNA
cgttttttagatagcggagtcgggtcggggcggtttggttcgggtcgtcgtttttgtttttgggtttgtggggttggggttcgtttgggtttcgggttcgcgcggcgtttattattcggggtgtcgcgggggggcggggagagcggtcgtttagtttagtttcgcggatgataggagtcggggagtcgaggagggaggagtcgtcgtcgtagtcgagcgttgggttgaggagtagagagagcggggcgtcgagtgcgggcggttgggagcgcgttgagcgggggagaggcgttgtcgtacggtcggttataggattattttttcggagaatagggtttttttatggtatgtggttggtaattttttttttgtttttggattttttatataaaggtgagatttgcgcgggcggttgggcggcggaggcggcggggttagggtggcgcggttggcggcgaggcggggtgttcggcgggttttaggtgcgtgggggaatcgatcggggtgtaaggtttcgggtggggcgtagcggggaggggtaggtattttgataggggtcgagtgagagttagttttcgatcgtttcgttagttattcgcgtttgtcgttttggggcgcgttcgtaggggtggtggtaaaggagttttttatttttttgttttttgtacggcggtagttttgttttggattttttttttagttttttgttttttttttgcggtttggtggtattgggatttcggagtgtttttcgagtcgaggggtttttaggtcgtgatttttgatttaggagtttttgtttatttaggtttcggattcggcggttgattttttcgttatgttcgtgcgtttttttttcgtcgcggattttagttttggcgcgaatgttggcgtatcgtatggcgtttattcgcgtattggttggaggtagggtggggatagtgagagtttcgagagttggaggtttttcggatagtaagtttgttttttaaatttagaggttattttttttcggttttattttatttttttgtttcggttttagtttcggtttggtgcgttatcgtggttatttcgggtagcgcgttttaagatgcgagatttttcgttttcgcgtttggttagttggatttggggataagtttttaggttggggggcgtgttttttttttcggagagagggggttgttaggggtgggtttaggtgttcggtatgtttagatttgcggttggggcgttgcgtatttgattcgcgaggtagtcgggatcgggaggttggaagagggtagatattttcgattgaagttatttgggtattgagtcgggattaggtaggcgtaggtagtttgggttttaggttatcgtagaggacgtgttttcgggcgcgtagatggcgggagatgaggcggtcgaatttcgcgtttttgcgtggtggagtatatacgttttaataagtttagcgttatttgtttagttttttaatttttttttttttcgtttcggggcgg

SEQ ID NO: 7403 - DNA, 1119 bp, synthetic construct
  misc_feature 1..1119: note = Description of Artificial Sequence: Synthetic polynucleotide
  source 1..1119: mol_type = other DNA
cggtggcgatatggtaggtagtttcgcgtggcggcggtcgggatagttgggcgcgttggtaggagagtaggtatagcgttttttataggtaggatgacgcgggtttcgtagttcgtttttttacgttgtttcgtattattgtttcggttttgacgtgcgtgcgatagatttatcgtaaatagtttttagcgggagtacgaggtcgggataggaggtgggcggttatataggatattttattttttttattttttcgtagtcggcggagtcgatcgtcggaaaagggaggcggtgggcgaaaggaaagcggggagttgggagaggagttgtaaataaagagttgtttttgtgcgaagttttgagtcgggtttagttagttcgttttttgtggtttacgtattgttcgtcggtttacgcgggagtttcgaggggcgaggcggaggttgggcgtagtttttgtagttagtagttattttcgcgcgtttcgtcgcggtttagttaattatttgttgcggcggcggtcgtgttttttagggtgtattagtattttcgtcgcgggcgttgttttcgcggcgtcggtatcgatgttcggttatttttaggttcgaacgattgcggttgcgggaaggcgggtcgaggggggttacggtattttagggagaggtcgggagtcgttcggatttcggaggggatggggttttttttgggaggtattcgttttttttttgggttttaagattttttttagttttgcgtttcgattttatttttttcgaaacgtcggggaatcgggaaaggagggttacgggtaaagcgggggcgggcgttttttgattagtatgcggcgtcggttgttcgggttcggattttcgagtttttttttcgcgagcgtatattaataagtttataaatggaattcggtggcgtcgtttgtaataaaaggtagaagttgcgtttcggcgttttaatgagagtattttttttcgtaataaggggttggatttagttgtttggtgtcgtttgagcggggcgagttgttagagtaattaaggtttagcgcgtacgtggggagagggagttggttggggttttagcgttagtcgtcgtttgcgcgttcgg

SEQ ID NO: 7404 - DNA, 1119 bp, synthetic construct; identical to SEQ ID NO: 7403
  misc_feature 1..1119: note = Description of Artificial Sequence: Synthetic polynucleotide
  source 1..1119: mol_type = other DNA

SEQ ID NO: 7405 - DNA, 653 bp, synthetic construct
  misc_feature 1..653: note = Description of Artificial Sequence: Synthetic polynucleotide
  source 1..653: mol_type = other DNA
cggaagtaaggcgggttagttatcgtttcgagttaaagtttttgtagttttggtaatttttcgcgcgtttttgtttaggagttttatattttagagaaatttttcggcgtttttagtttcgttgttttttttaggttttgggatatagttttaagggattgagcggttcggacgggatttgaaatttttggaggattagttacgttcgtatagttcgtttatgcgcgttggtattaggattcgtaggttgttagcggcgagttttcgtcgcggttttttagggtattttcggagaagggggcggttttgaggaattttttgtatttcggatgttttatttttttcgtttttagcgttttagggttttgttcgggttttggtcgcgcgtggtgttttttttagtcgcggagttttgttttttagtgtcgttgaaaggaaagagaaagaaaacgttttcggttttggaggttttgtttttttttgaagcgatgttattttttttttttatttttttttttttagattttttttggggtttcggtagaggcggggcggttgcgtttcgagttttttttcggcggtagcgcgggagcggggttggaaaagagggcgtcgggagtcgtttcgttttttatcgtttttggttttttcgt

SEQ ID NO: 7406 - DNA, 1768 bp, synthetic construct; identical to SEQ ID NO: 7396
  misc_feature 1..1768: note = Description of Artificial Sequence: Synthetic polynucleotide
  source 1..1768: mol_type = other DNA

SEQ ID NO: 7407 - DNA, 1101 bp, synthetic construct
  misc_feature 1..1101: note = Description of Artificial Sequence: Synthetic polynucleotide
  source 1..1101: mol_type = other DNA
cgttgcgaggattaagggagatggaatgtagcgtaaagttttacgtaaacgtgtcgtgtaatatgaagttttttattttgagttggggagcgggtggtacgcgtggaagttgaatgttattatttttgggattaggcgtagcgttttttagaagcgtttttggtgacgggtttttgtttttttttaggacgttttttttagaatgtttcggggttttggacggttttggagaggacgggagggaagggaaggagacgggcggaacggggacgtatttgtttttattgtatttttttcgtttttttatttttagttatttgcggaggaggaagcgttttcggcgcggggacgcgttgggtgtggagtagttggattacggggtgttttcgtcgttggagggcgtgatttcgatggacggtagttgtaggaattttttgtcgggggttaagacggcgggtaggtttcgggttagttcggtttttaggttttgtttttgtacgttttttatgcggcgtattttgaagcgtcggcggcgaagcgtgggggtcgacgaattggattagatcgggttgttttcgggcgtattttgcggttcgggtatttgtagggcgggtagcggtcggttttttattatgttggtcgtcggtatgggggtcgtcgtttttgcgttttttttgagtttttcgttagcggtttggttcgcgtttttttttggttgttttttattttcggtttcgcggtatattttttaattttggggtcgaaggaataagtttttttttcggagcgtagcgaggaagggacgcgaggggacgcggcgtagcgcgtcgtcgttcggagtttaatttttcggagcgcgcgtttttcgggtcgttagtcgtcggcgaggttattcgggaggggcgggagtcgtttgttagttattcggtagtttttttggggtttttttcgcgcgttcgtttgtttttttttcgttgcgttttttcgtttgttggcgtttttgttttagcgggattcggtagttaggggttttagggggcggtgtagtaaatttttagcggtttgcgtttagtagattaggttggggagtcggtttggcgt

SEQ ID NO: 7408 - DNA, 1101 bp, synthetic construct; identical to SEQ ID NO: 7407
  misc_feature 1..1101: note = Description of Artificial Sequence: Synthetic polynucleotide
  source 1..1101: mol_type = other DNA

SEQ ID NO: 7409 - DNA, 2341 bp, synthetic construct
  misc_feature 1..2341: note = Description of Artificial Sequence: Synthetic polynucleotide
  source 1..2341: mol_type = other DNA
cggtttttgtaacggaggcggtttcgaaggacgtaggattttttcggaggcgatagttttaggagttttggttttggagtcggcgtacgtttaggcgcgaagggcgggggttcggggcgttagggatttgtgcggacgggggttggggaaggtttttcgtcggagaggcggcgaggtcggtttaggagtttcgcggagtcggcggttttttagcgtttagagtcgggcgattgagtgtcgagaggaagggaaagcgttgatatgtaaataggggtttttatttggaggagttcgtttagatagatttttcgatatatttatttgtatttttattttcgtgtaacgaggttatttatttattttagggtttattaggtagggattcgagttcgggcgattgtagttttcgttttcgtcgtgtttcgtttttgcggagaggaagtttagtgtttagcgttggggttacgggagtttcgggtgtcggtgggagtggtggatttcgaggtttttcgtttttgatttcgtttcgtattttggggtttttcggtttttcgtcgtttttttttgtagtttcggcgggtagcgaggtgggaggggggtcggggttttattttgggggttgggatttcgggggagggtcgtttttaatgcgggcgtttggtcggttggttcgcgagtaggattcgttattcgagcgtcggaggagtcggcgcgaagtcggggcgcggagggaagggagagaggttacgtttttcgggacgcgggtttcgtatttattcgttcgtcgtttcgttttttcggtcggttttcgtcgttcgcgttcgttgtttcgtcgtttattttaatagtttcgtttatttggttaagtttgtagtcgagttttttaatattttatatattgattcggttatagtttgatttcgtagttttttcggattagttcggcgcggtttttttggcgttttgggttttttttgcgtgttttttgcgagcgttttgtttttatttttttgtgtacgtttgttgttgtagcggagcgaaagagatagttaatcggatgaaattttttttttagttaattttgggaagtgattttattttgcgaatcggggaggaagttttatttttttttttttttttttttttttttttttttttttttttttttttttttcgtttcgagtttttttttttttttttttttttttgtttttttttgttttttttttttttttatatttttttttttttttttgttggttttgtttttcgtattatatattatataaatatacgcggagatgtttagatatatttatgcgttgcgtatataggatatttgtttttgggagataagagttagtcgggaataatgacggggtttacgtttagcgttcgcgttttgattttcgaagtttgaatttttttttattatttttttttaaaatttaaagttaaagatttttggtttttttgttttttttgaggcggttggtcgaaggtggtttttttgatttatttatttttcgtttttttttatagatacgtttattaatgttttttttagtcggagataaattttttgggggtggggtagggggggtatggagggagagttggttagggttgcgggtaatttagcgtttattgtcggggaagattcggacgaaaatcgaggtaaattaattattaaaaagtgtatttaataagaatttttttatttaggtttttcgttgtcgagacgcggtagatttttagagcggtttatttatttatcgaagcggattttgggcggtttcgggttgattcgcgttgttagggcgcggattttatttcgggcgtattgttaggagaaggggtttttcggggcggcgcgtttcgattttgggttttcggtgttcgtagagggcggagattcgcggcgttttaggttatttattcgtattttttcgagttaaatttttagcgtttattcggattcgacggtttaagtattgatttttaggtaagagtcgttttttttggtttttagggaattgatattatcgcgggacgttttttttaggatagttagtaggttttaggagcgtagtacgtaatagcgtagagtagatttagatttttttcggggtgagattcggaggttcgcgttttggatcgttttttttatttagtttggaggtcggcgtttttcggtttaattcggagattttttcgttttttttttgggtcgtcgcgcgttttagttggagtagtttcgaggggttgggttttttcggtcggatttttttttttcggatatttaaaataggttattttgtttacgtttttcggattacgt

SEQ ID NO: 7410 - DNA, 3857 bp, synthetic construct
  misc_feature 1..3857: note = Description of Artificial Sequence: Synthetic polynucleotide
  source 1..3857: mol_type = other DNA
cgagtagaaattatcgtgtttttgggggtttttcgggcgtcgtggggcgacgcggtgtagcgtttagggtcgtcgtaggtcgggggtagggtttttagcggttttttcgcggttagcggttacgtaggaaaaattcgttttttcgtttttgtatttgttgataagtcgttcgaggtgtttgcgttgagcgtggttatatcgatgtagttttttaggaaatggttcgggagggggagggggcgagtgagggattaggttcggttttttttcgttttttttgcgtaaatattattattttttttttttttcggaggtatgaggtttttacgttcggtttttcgttcgtattttcgtcgattttttcggtttcgcgttttattcgttaggttttttttttgggagtcgattgcggtgaagtcgtcgttagtacggtcggttttgatacgtgttttaacgtatgtttgagttaaggttgtttttataggagatacgatttggtggcgtttttttattttttttttttcgttattttttatttttatcgcgttttttggtgtattttattttaggaggaaggggagagattagcgttttgatgtgttggttaagttggtacgtgtagcgggtatggcgtggttcgagttttttgggtatatcgaggtcgattgagtgttttttttatcgagagagggggttcgggtaggggcgcggagagttagtaaggcggggtggggcgcgggttgggtgagtcgtatattaggttttttgtaaggcggaggaggggagcgaataaattagaggtgtaagcgattaatttaggtttcggagttagtttttttaaacgagggtggggcggaaggggtggtgggggggaaaggaggggatatcgttttaaaagggtgaggaagagtttggggcgtcgttttttttttttttatttgtatagttaatagttttggggtttttgttattgcgcgttgattgttatcgggtagattattttttttttttttttttttttttttttttagtaggacgcgttttttattatattaaaaggaagttaagggagggcggagggagagcgggcgttggggcgggcgaaagttggggagaggttcggtcgttttcgattttattaatagtagcgggaatgagtattttattttttatatgtaaagaaaggggagggaaggggcgggcgaggaaaatgtttaattgttgtggaagttattagtttttaggaagaaaaaaagttcgttgaaaaatttaagttgtaaatttaaaatgaaatagtttagcgtcgcggatgatattcgggtcgaatatcgtgtatattcgtatatagtcggtttcgaataattatttattggttttagttacgttgggtttttcgatttaagtttttgagttatttcggataaggatatttatttatattttaagatttttataagggaattattttaattttatttaagttatttttgagcggattaaagaaagttgtagcggggagaggcgagagaaggagggagggcgggaggtatttttaaagtataaatttaattcgataggtaagggatagaggtcgtcggggtttttagtttttggatattatttgatatagttttgcgagtaaggttttttttatttcgatttcgtatattttttttttttcggggaaaggtatttagagttttgggtttttcgaagtgggggtagcgggggcgaggaagaagcgggtggtcgtttcggggtttagtttatttcgaggagaatgtttgggtggcgagtttttacgtttcgggagtgagtcgagggttttttcgttttttttttttttttttttttttatttcgttttgttttatagagaaattttagcggggaggggggtagcgaatgggaggggtagagagggtcgcggtcggatgtttttttttttcggcgttttttgtatttatggagattcgtaagttcgggcgtttttcgcgtggtaggttcgttttttgaagtttttttgtttattttttttttcgattattgattgttttcgagcgtgaagttcgttatcgaatttaattttcggtggttttgtagatttttatacgtggggtggggcgtgagagggtgcggaggttggtaggaatgtttttaggaggtttggattggaaattgagtttttttttttggtcgttattttagttatgtgttaaaattttaatgttttgttaaaatgtattttatttagtacgcgggaaaacgtatgttgttttttaggtaaaagtgtatatttttttttagtgtagatttcggttttaagaaaaagcgtaagagtttgtgttttggttttgaagtttaaattgattatcgtggcgcgggggtggggggcggcgggagggggtagattgttggtttttttttattttttttttattttttacggaaaaaaaaatatatatatatatattttatgtaggattggtgataaattttagcgaacgttagttttattggatttttatttttttttcggtcggttttttattttttacgttagcgttttggagtttcggttggaaagtgtataaagtttggaggtggagggtgtagtagggtgttgggtgtttataggtatttttttgtaggagtttgtagtattaagtatatatatttttaagtttatttggaggatgttttttagttaggtgatttcgcggtcggtttaaggttcgggagtagcgcgagttcgagtttcgtttttttcgcgtaggggcgtttaggttaggtggggagcgggtagtgattgagtttaggtttagaaatgggagttattgtttttttttcggtttttttaaagagtggagttgtgtttgtgttttttcgtggagggatggacggttaattaaaatcgaaaattcgattggtaaaatgcgaggggatatataaattcgaggggatatataggaggtatattaagaggaaggagggagtgtaggtaaagtagaaaaatgcggataaggagaagaggaaaacgtcgggaagcggagagtacgggggagtagggtgggtggggacgggtagtgcgattgtaggtgtttattcgttttcgggattttttggtcgtagtcgcgttcgtcggggcgttgggtcgttgcgttttggaggggggtagagttcgttaggtttgtgtattcgtatttttttcggcgaatttcggtttggacggggttggattattgaggcggtagatgcgataggcgtgagttaagaaggcgagcgtttgtcgtttgttatttatttagtattttattttttttttttcggaaaaaaaaaaaattaaaagattcgaatttttttttttttttgtttgatttagtttaggatacgttttacgcggtcgaaaatagttttggaaatatatttgttttataaaagtgaattttttaataagttttggggcggggggcgttcggcggtcggcgtcggggggttttgtttttcgggaggagaaggaatcggtcgttttcgtttttttttttttttaggcgttttcgggagggggtcgttgggcggcggaatcgcgttttcgttcggggagttattacgcggttttttcgcggaattttgacgttatttatacgtgggggaaggggttgggagagtaagaggaagcggcgggggagggggtcgcggttgggagagcgcggcggcggcgcggcgggtttggtattttcgcggtgggcgtagcgtcgggtagggttcgggttttgggtagcgcggtagaggaggtcgtgtcgcggatttcggagttagcgtcgcgattcgttttttttttcgtttttcgtttttcgt

SEQ ID NO: 7411 - DNA, 1439 bp, synthetic construct
  misc_feature 1..1439: note = Description of Artificial Sequence: Synthetic polynucleotide
  source 1..1439: mol_type = other DNA
cgcgggttttttcgttaagcgggacgtcgcgtcgggcgggtgagagaaagttcgggtaggagagtatagagtcggcgattggacgcgagcgcggggcgggtggagagcgttttttcgggcgtcgttgttgttgtttcgggtgttgaaaagtcgggaatttttcgggaagtagcggtatttttttttttggaaggtgggtgtgggggttttagattgcgtatttgttaaatttttttgggtttttcgggaggggttcgttagatgtgtttttttttagttttattcgggggagaaggatgggggcgggggcgtgggggtgagtatagtcggatatcgtaagtgggaatttggggtgttttttttcgtagttttcgggtagtcgcgcgtcgcgaatttcggtttatttgtaagtaaggcgggtcgggggtagagggcgtcgggttgtgcgggggaatcggttcgcgtttcgggattggggggcggtggaagagagagcgagcgggtatgcgtagtggggcggaggaggtggcgatggtcgggggaggcggggggattgttgtttatttgtagttgggttaatttcgcggcgtaggcggcggcggagcgcggggagttcgcggcgggtttagttgtcgtagtattatgttcgagttttttttcgggtagacgtcgcgcgtcgtcggggtttcggtaggggaggatgttagacgttcgggagaggttagggtagtagcggcggcggcggcgcgatggtggtgattatttttgttcgaggcggcggcggggatcgtatattttttcggcggcggggttgcgggttagcgtcggtcggggtcgcggcgttgttggtcggggtaagttgtttgtgttacggtcgttttttgtagggcgagttcgtgtacgacgacgtgtgggcgatcgtgaataatttcgacgtgcggttcggcgtttcgtttcgttggggtatttttattaacgatttttggggtaagggtatggtcgagaatattagttataagttttatcggtcgttttgcgtttttatttttaagtgagttttttatttcgcgttagtcgtcgttgttttttttatttttcgttcgtttttcggatcgggagaagttgcgggattgatttgggggtattttatttttgtcgttttttttttttacgttttttttttttttaggatgtgtatggtattttgtttcgggatttattgttcggttaatttgggttttcggggcggttcgggaggcgtcggttggggagttgggatcgagttttttaattgtttgtttttttagcgggtttttttttcgaggtagggttgggagcgggttggtgaaatcgttttcgtattttttcgtttgtcggatcgtgattaagtgggattagcgcggatttagagggtttcggaggggtggcggtggtggcga

SEQ ID NO: 7412 - DNA, 1288 bp, synthetic construct
  misc_feature 1..1288: note = Description of Artificial Sequence: Synthetic polynucleotide
  source 1..1288: mol_type = other DNA
cggagagggtttttcgggttaattttgggtaacgatgagtattttcggtttcggtaggggcgtcgggtcgttcgtttttttttttttttttttttgcgagttttttttttagaggacgcggggagtcgggtttgcgcgtttcgtcgtttgttatttagcgttcgcgtcgggttgcgattggacgcgtcgtcgttaggtattcgttagaaatattagtgcgttggggagaggaggggggcgtgtttgcgagtcgagggtttgttttggtttttttacggtttttttttttttttagtattttatgtcgggtttttagttttagcgcgtttcggttcgttcgcgcggcgggagagttggcgtaaatttcgcggtagtcgtagttttttcgcgcgttttttttttttttacgtttttcgttttcgttatggggttaacgtggggtttttaagagttgtcggtttttagcggcgtaatttttagttaaagttatcgcgggcggattatggtttagggcgttagaggggttagaggtacgggaagaggaaaagacggttaattgggaaaaaaagagaaaacgaaagaaaagttaaacgatgagtttttataaggaggacggagtgaatagtttgtgttagaaggttttgtatatcgttatcgagttgtgtttcgtcggttaggtggagtgggagaagtgttcgggtattttttttcgggataggggtagttagggcggaagtagtataggtaatcgggagggtttcgttcgcgttttcgcgtttcgttgggatttcgcgcgttaggttgtaagtttcggggttttgcgtttttcgcgtcgttttcgcggtatatttggggcgttacgtttttttatttcgttttttttttcgtttagtttttgacgatttcgagggtggggcgtttgggttttgtttttttttgtttatttgtcgggttttttttattttttggttcgtttttcgtttttcggcgtcgtttttcgtttttagtttcgtcgcgttttttcgcgtttttttacgttttttatttttttttcggagtggagaagtgagtgcgggcggtgacggcgtcgggacggttcgcggtttggttgtttgtgggggcggtttatttgtgggattagggttgttttcgttcgttttatcggtcgttggtttcggttttgttgatgggggttaggcgggacggataagttatgtttggacgtagaatttttttgtagaggtggttgttttggttttcgaggtaattcgcggttgtaatttgtcgg

SEQ ID NO: 7413 - DNA, 1006 bp, synthetic construct
  misc_feature 1..1006: note = Description of Artificial Sequence: Synthetic polynucleotide
  source 1..1006: mol_type = other DNA
cgagttcgggtttttacgttttatttggtagggggcgcgcgggtttcggagttgtttagtattttttggttaagttttttgcgtttttcgcgttcgggaagtttttcgcgtcggggaagttttttagcgtttcgttttcggtagggaatttttttattaggatattcggggttttttaggttcgttattcgtttttattagtttttatttattttgtttagttttatttcggtagtgtagcgtgttttggtggttttttttcgtacgttttggagggggagtgttttgtatttcggggttgtttcggagtttagtgtacgagtgtatatgggttttttttttttgtttaaagggtaggcgagcgttattcgttttagttttgttttttgtagttgggtggtttttttttttttttgttttttaagatacgcgttcgaaatcgaggggtgagagtaaagatcgtttattaatttagtattttggatttagagtttttaatttcgaaaggaggttggtattgttcgggttatcgagagagggagggagaagagttgaggttgtaacggtttttgggttttttagatcgggtttggtatttaggagatcgtgcgggagatcgacgttgagcgtcggtttcgttttcggcggttttttttttttttttatttcgtttttttcggttcgtttttttttttttggaggagtagttttttcgcgcgtttttcggagttttttttattgtttttgtttttataataggttcgggcggcggggaagacgggggggtgcggggtcgttttagttcgggtttttttggggtcgttttttttttatcgggtgtgcgagtttttggttgtttttattcggttcgggagttaatttttcgacggagtcgcgtcggggcgagttcgattttttttttcgggtttttttcgggtcgcgttgtcgtttcggttttgcgtgtgggaatgatgtgcgtattggagggtttaagttttttacgcgt

SEQ ID NO: 7414 - DNA, 1185 bp, synthetic construct
  misc_feature 1..1185: note = Description of Artificial Sequence: Synthetic polynucleotide
  source 1..1185: mol_type = other DNA
cggagagttagggttcgtttaataggagtacgcggagatattttagacgatagcgcgttttttttatttttatttcgtttttcgggcgttttaggttagcgtttattagattttacgtttgggggattgtttgggttttagcgagagtgttacggttttgtacggtagcggggaggtggcgagcgcgttcgatttacgtcgtttttacgtttatttttttttattacgagttttttttttttgttatagtattatttttattgttggtcgcgtttgttattttgtggggttggtgatatgaatggatgggttggatatatttttcgttcgtttagaaaaaaataaaaaataaaaaaaaaattcgtttagatttgtatagagagggggaaagatttttttttgcgtttttagagtttacgttgtcggttagagaaatttatagttttttttttttatatttattttttttattttttaaaaaaacgtttaacgtaaataaataatatcgttttaagttcgtcgtcgtttcgggtggttttttttttttgtttggtttcgcgcgttttagttttgcgggaggcggcggcgagaagttgcggttttgggtgcggtgcggggcgttcgggcgataggcgggcgtaaggcgggcgcgtagtagatcggttggcgtcgtattatgttttttagcgcggtcgtagtttacgtcggtgcgtattgggacgttgtggtttttttcgcgttttttaattttttcgttgcgttcggttttggtaatttgggtaagagttttttgatcgagaatttgttgcgggtcgggggcgttttaacgtttaggttgtagtcgttcgcgttttacgattcggcgatcgttttggttatcgcgggcgcgtagtttcggtttttgtttgttagtttagtttttttaaagttgtgtttcgtagtcgaataagttagtttcgtcggggcgttttacggaacgcggtgggttttttaagtgtttagtttttttgcggatagtgcgaggttgtcgggtcgggtttcgggggatcgagattgtattttttagtttttagcgttaggtgagttagtttttttttttttttttagtcgcgttcgcgtttttaggtcgggtggtttagggatttgggagcgtcggcggtgcgtattgcgtttagggagagtcgg

SEQ ID NO: 7415 - DNA, 409 bp, synthetic construct
  misc_feature 1..409: note = Description of Artificial Sequence: Synthetic polynucleotide
  source 1..409: mol_type = other DNA
cggttttggttttacgcgggtagcgttagttggtcggtgttacggagttttcgcgtttttcgttcgtttagttttcgcggatttatttattggggttgtttcgtagcgcgatttttttttatttcgggggagggttaagggcggcggtggggggcggggtgggggggaagcggcgggagggggcggtgcgtcgtcgttttatttcgggttcgcgaattcgtagcgtttttcgtagtatttttttaggttcggttttttttttttttcgcgtcgatggtacgcgtcggttcgtttggttcggttgtagtggatgttgttagaatttacgcggaggaaggaagagacgtaggtaggttgcggttatttaagcggttattcgggttttagggatttttttttcgagagacgg

SEQ ID NO: 7416 - DNA, 1813 bp, synthetic construct
  misc_feature 1..1813: note = Description of Artificial Sequence: Synthetic polynucleotide
  source 1..1813: mol_type = other DNA
cggggtcgttgcgtttttttgattattgacggttaggacggttttagtttcgttttatttgtaagttttattttaggttcgagttttcgagggtagggatagtttttcgggtttcgaggtttgattagagtttgaaagtttttgtcgggggttgtttcgatttagcgaggcgttaggttgttcggcgcggttgggggcgtttagcgtcgggattttagttttgtttcggtcgttcgttggtttagtgcgtacgtttcggtagtttagtttttttttttacggcggtaggagagttttcggtatttgtttggggcgggggcgggggcggggcggggcgggcgtcgcgtttttttgtttgattggtaggaagatagattaatcggaggggtttttcggggggaggggcggtgtcgtgtttgagtcgggcgcgggcgatcgagggagttgtagttattcgcgtgcggtacgcgtcggtcgtttgttcggatcgcggttattagtgtcgcggtttttcgattttcgtttcgtcgagtcgcgcgcgcgattgttattttttttaattgttttttacgattttttttgtgtatgtatttattttttgtttcgttttgttttttttaaggcggtggcggcggcgatagcggcgtaagttcgtagcggggagggggcggtcggaggatgcggcgcggggttgcgttcgttacgttcgttgttgttgttcggttcgggtttgagcgtcgagtaggtgggtataggtgcgtcggggggcgggaggcgagcgttggttagagggaattcgtggattcggcgatcgaggggcggatttggcggtaagggacgcggcgatcggtgtcgtttcgttttatcgtttatttttttttttttcggttatcgcgttttttttgggttttttttttattttcgtattttattttagtggttttttatttttttatatttattttttatttttttttagatttttttgtaaaattttttagtcgttgcgtcgttttttttaatattttttttcggtttcgtttttagtttttagtttttttttacgttatttttatttttattttttttcggatttcgtttttaagttaaggagcgggagggggatttattcggtgtttgtcggagtggcgcggggggtgtggtcggttcgtttttttcgtgtttttcgtagggtaggttatagttttttagattttcgtttaggtggtaaagaagatggagttgggggtcgcgtttcggcggcgcggggttcgaaggcgaggtcgtttagttcgtattttattttacgtacggtatacgtcgtcgcggtttttgttacgtatattttcgcgttgtttcgtttacgtgggcgtcggggaggaggttcgagagatgggaagaaaggttggtatttatttttttgtcgggtcggcgcgttttgggcgtattggttttcggagatggcgcgtaaggattgattttcgtggtgttagatattttgtcgggcgttttgcgtcggggttagcggtttcgttggtttgcgttagtgcgttgcggtttcgttttttagtttttcggtttttcgttttattttttttgttgtgggtttttgagtattcggtttgggtagtttagatagaggtcgtttacgaggttggcgttttttttcgttttagaagtatttcgtttttatatattttagttcgtcggttttttgaaggttgggttagtttcggtttttcgttagtttttgttcggttttttgagttttagcgatattgtatttaatcgttagttttttttcgtcgttcgt

SEQ ID NO: 7417 - DNA, 1294 bp, synthetic construct
  misc_feature 1..1294: note = Description of Artificial Sequence: Synthetic polynucleotide
  source 1..1294: mol_type = other DNA
cggttggagaagttttcgttagcgttgtttgtggttagattcgttttttgttttttttcgggcgtatatatacgtttatttagatatttcgcgcgttttttcgcgtttttgtttgttcgttcgtcgtcgtttgtttttttttttttgttttcgtcggtcgttttttttttttttttttttttttttttttttttttttttttttttttttttttggtattatagagttgttttgaaaatagaagatagagggagtttcggagttcgttatttttagcgatttttatattgggaaaaaatatggagttagtttcggtagttttcgatttcgtcgttagcgagttaggtagtagcggcgcggacgcggtcgtcggttttagggagatttcgttgaattaggaattcgttcgtaagagcgagtcgtttgtttcggtgcgtagatagagttattttagtattagtagaggtaggaggttggagaggggttggggagggggcggcgggagttcgggcgcggagcggggggcggtcgggagcgggcgttcggggcgcggggttcggcggtcgcgcgcgagtttgcggcggcgtttcgagttcggaggattttttttttttttttttttcgttttttagaaatgttgtaaatttttgtagttcgttttcggtttgcgggagtagagtggggcgggggaggcggcgggaaggttgatagtcggcgggtttatttttttggttttgatttttttgtaaatattggaggaaagttgcgttgttttaattaaatacgtttttttaaaatacggagatgcggggagtgggggttcgggaaagaaatttttaaagcggtagtgtttttttaagaaggggtaaaaaaatttgtttatggttatttttttttcgttttattttttttttttttgatagtttcggttttggttgttcgagtcgggggtgtgttttcggttttttttagatttgggcggggggcgggaggagtgagcgatttgggaagtttcgggggtggagagggggcgtttcggggtttgggggcgacgtggatattttttttggagtacggcggtgcgtttgggatttgaaggaagggtcgaaggaagcggggtgcgggcgggcgagttgttcgttaagttgtttggcgggcgcggcgaggggagatgcgtaagtttgtagatcgggggttcggagttcggcgtttaggttggcggggggcgtgtgcgcgttaacgcgtagagggcggcggttttgtggggcgttttacgcgtattcggagggagcgt

SEQ ID NO: 7418 - DNA, 939 bp, synthetic construct
  misc_feature 1..939: note = Description of Artificial Sequence: Synthetic polynucleotide
  source 1..939: mol_type = other DNA
cgtcgtaaggttatgggtcgaagtggtgtaggggcggcgttcggggaagcgattggtagagttgtgcgtattgggggtgttgtaggcgttggggagagtgtggagaggttgcgtggagttgcgcgttcggggtgggggttgtatttttaatgaagcgcgtgaagggtaagcggtgatgggttttgcgttagtggggttgggagttcgttcggggttgtatatggggttgcgcgtaaggtgaggattgcgtatgtgggtttggggtttgcgcgtatcggaggttgtaggcgttggggagggtgtggggggttgtgcgtggggttgtttttatcggaagttgtacgttttgggaagcgtagaggcgggggtgttgttcgcgttggggagtacgtgaggggatatttagggattgttcgcgcgaatggtttttaacgtatgcgttttattttatattttatagtcgttatgacgatcgggaggttcgtaacggttgcggggataagttcgttgaggttgttaggcgagttaggtttttttggatttcgtttgattcggttgggttgtgtttgaaattgatttagttttattatattttttgattatgagaaaataaggagtaagtttaaagcggttgtaatttttcggtcgtagttagtttaaggggcggcgcggggtttttttcgttcgggagtcggaggtagaggaggagatggaaaagtcggttttaggcggcgggaaattgttaaggggtttttggaggtttttttcggggaggatttaaagtttgaaagagcgaaaaggtttggagttagaggtggtggttaagattttttttttcggttttttttagttcgttcgtaattttttggcgtagtttcgggaaaaggtgtaggaattgtaggcgcggcggttttttagtagaattattttcggtatcgg

SEQ ID NO: 7419 - DNA, 939 bp, synthetic construct; identical to SEQ ID NO: 7418
  misc_feature 1..939: note = Description of Artificial Sequence: Synthetic polynucleotide
  source 1..939: mol_type = other DNA

SEQ ID NO: 7420 - DNA, 899 bp, synthetic construct
  misc_feature 1..899: note = Description of Artificial Sequence: Synthetic polynucleotide
  source 1..899: mol_type = other DNA
cggtttttgagggttcgggtagttattcgtattttttcgttacgcggagaaagtcgagtatataggtcgtagggtgggggttcgcggggagagggtggaagtagcgggtttttcgcgtttggggtggtcgttgttttatttaggttttcgtttgttttttatttttttagattaatcgttttttgtaggtgttaacgcggtgtttcgtattaggtggtacgcggattttttttagagtttttcggtttagacggagttaggttaaggtagaagcgcgggtagtttcggcgttattttatagcgttttatttgtagttttggggtttttattcggttttagggtgtatagtagtcggggcgcggttcgggaaatgtagttgcgttttttgagtatattgtttaggatggtgtttacgtcgtcgttttgtcgttttaggtattttttttcgcgttttagagattcggttagtttgttttgtcgtattcgagagcgtttcgggttttggtacggttatcgttcgtttcggttttcgttattttattcgttgagcggttgagttcgcggagttgggtgagtgtttgcggttgatcggttcgtgggagtagggagcgtatagtcggttggtgttggagggttacggggatttacggggtatcgcgggagtcgtcgagcgtagggaagttagtaggtatttgtagtgcggagtttgtaaggttgaggtaggagatcgttcgaggcggggagggcgggagcgagcgagcgagcgagcgcgtgggagacggaggcggcgtgttcgtttttaatttcggtatcgtcgtgcgtaggcggggtcgttttagttttttcgtgtttagaagcgttagagatagggagttagtgggcgcgtaattgcgttcgg

SEQ ID NO: 7421 - DNA, 899 bp, synthetic construct; identical to SEQ ID NO: 7420
  misc_feature 1..899: note = Description of Artificial Sequence: Synthetic polynucleotide
  source 1..899: mol_type = other DNA

SEQ ID NO: 7422 - DNA, 547 bp, synthetic construct
  misc_feature 1..547: note = Description of Artificial Sequence: Synthetic polynucleotide
  source 1..547: mol_type = other DNA
cggcgttttggcgaattcggttattttagttttttacgtggtgagtatttagggtagcgggtcgatttttcgaggttttatatttgggtttgaggggcgcggttcgtagcggcgggtgtaggggcgattgttagtttttatttcgtttcggggtgcgttcggaggtcgatatttggaggacgtttttagttttcgcgggacgttacgtttgcgcgttagggattcgggataagaagtgcgcgtcgggtttcggttgcgcgtcgcggggttattagtttgcgcgtagggtttaggcgatcgtgcggttatggatacgttacggggtatcggtattttcgtggtgtgggattacgtggtgttcgcgggtatgttggttatttcggtcgttatcggtatttattacgttttcgttgggggcggttagtagatttttaaggattttttgatgggcggtcgtagaatgatcgtagtgttcgtggcgttgttttttatcgttagttttatgttagtcgttattgttttgggtatttttttcgaggtttatcgt

SEQ ID NO: 7423 - DNA, 2505 bp, synthetic construct
  misc_feature 1..2505: note = Description of Artificial Sequence: Synthetic polynucleotide
  source 1..2505: mol_type = other DNA
cgtttcgtttcgtatcgggggcggaatttcgcgttttcggatttgggatagtattagtagcgtgaaatacgcgtattcgagtgtaggagtaaataggtaattttttgttttggttatttttagttcggtcgtttttttagcggtttgggatagtagcgcgtggttgggaagacgcgggagggggacgcgaggtaaatttgcgttaagagttggttaggttaggtgagagggagtggtattcgcgtagatatttatcgttggcgtttttttcgtagattaggtgttggtagggttgtaggagattttagattttcgagtcgttgttgatcgtgtgttttagggtttttacggtgaatttgggcgtttcgtggagcgtatggtggtggtgatggtggtggttggcggcggttgtcggcgggattgcggcggtcgcggcggtcggcggggcgtaatagttgttgttttcgttggcgttgttggttgcgttgtaggcgtcgtcgttcgtcgtttttttttcgggcgtttttcgttttttattcgtcgcgggggtcgtattagggttcgagttcgggtttgggtcggagttcgagtttgatttagggttattgtagtttcggggtatttcggaggttacgattcgcgagtagatgtttcggaagaggttttttatgtaggttgttaggtagatggcggcgtgttcgtggatgcgtagcgttacgcggttgtttattatttagcgatatacgcggtttacggagaaggtgaggtcgtagcgggtcgatttgtcgcggtttaggcggtcgtcgtcggcgttgtttatgttgtagagggatagtgcggttagcgtagtcgtcgtatagtgcgcggttaggttttaggatagtacgatttttatggcgttttggatttcgtatttggtgtatttggcgaagcgtaggtttaggcgttgcgtttttttggttatgcgtattagcgttcggtttattagcgtcgatagtttggttagcgcgtttttgggtaggtcgtcggggatcgtcgggtttgttcggggatttcgcgaacgtagtagtagcgtttttagtttttggagagtttaggggatttcgtttaggttcggtagtagtcgcgagtagtgttggtcggcgtagtttagtttttcggagttttttattagggtagtgttgatagtgttaaagttgttgtgtcggttgtgtatggagttagttagaggcggttagtagttttcgttatacggggacgtcgggtgcgagtcggaatagtataaagataagttggaggagcgtatcgagttcgtcgcgttattataattcgagtttagcgttagattttttagcgtttttattacgggttttttattttttttggttatcgttgcgttattttatgttgtagtcgtttgggagttaaagggaaggagcggcgaggagtagcgagtgtcgcggggcgcggggagagtcgagttcgcgtcgttttggtttatttttttattagtcgttgttattaattgttagtattttcggttgtttttcggaattgtcgtcgttggaatatatagagtagattttggagttattttttagagttcgggtcggagttgggcgtaatggggagcgagttaggtcgggaaggaagttttcgtcggggtttgttttttttttttaaaataaaaagtgtttagatcgtttttttttgagtttcgttgggcgtagtagttatcgggcgtcggttacggtgttcgtgggattgagattattttagatgtcgtcgtcgtcgtagtttcgcgggtagttggttttcggttttcggtttttagttttcggttttggttcgttcggcgttagtttgttttgtatcggagcgtagtagcggtcgtggcggttgtaaattttgtcgaattttagtaaatttcgggtagttagtgggacgggcgtatgtaaagtaggggcggcggagagttagtggaatcggagaatgttaattatttcgttttttttttttttttttaaattttttttttttatgcggtttcgttttttatatacgttttcggcggatatcgaggttgtaggaagtggggagtagtggttagggatttggggaatttttgtaagcgtagagacgtggatgttgttttttgttgttgtttttgttcgtattttttcggagggtggtgggttgggtcggtgatttttttatttaggtgtgttttttatcgcggtttataaggtgtttgtttgacggtcgtttttttttttgcggttcgtattttattttttttttttcgtaatatttgaaatatggtttttttttttttttatttttatttcgggtacgtaaattaattagtgcggtttttttttagtcggggtttgttttagtatggagggaaataagtttgtcgagcggaggttcgtggcggtggatattattgggaggtcggattttcggttattcgttatttgttattagggcgcgttaattcga

SEQ ID NO: 7424 - DNA, 1587 bp, synthetic construct
  misc_feature 1..1587: note = Description of Artificial Sequence: Synthetic polynucleotide
  source 1..1587: mol_type = other DNA
cgaggagtggggcgttcggaaggacggggattgggaagcggttaggacggggagaaggcgcgggtgttggaattatttattagaagaaatttaacgagatttgtcggcggattaaaaaaaaaaaaaaaagtgggtttttttttatttttagattgatgatttcgcgtttttcgcgaatgttacggttaaggtaggatgttttaatcgttttgttattcgtattattttttcgtttttgattttcgtcgtattcgtcgagattttgcgagattttaaggttggggggttttgttaggcgcgttcggggtatttcgggaaagaatagaggtcggagtcgcgtttttacggtgcgttttttgagattttattttttagtttcggtttttacggggttcgtagagaatatttttaaatttaggggaggtatatagatttttataaagggaggatggggagaaagtgatggggtttcgaagagtcgttttagggaaggagagagaaagagtagggaagagaggaaagaaatagaagaaaagtagagacgggagagaggagacgaggggagtagcggggagaaacgtaggaggtagaataagtaaggaaattttttatttaaaagtttttttgggttcgagggttgggagttatttgttttgcgtcgttttcggttttttatcgttttggaggtaggagcgtaaatttgcgagcgttcgggtttatttttatcgttcgtttgtatttagatttgggaaggggatggaaggggcgggggggtaaaggtaagaagtaagacgaattttaagatttcggttcgaggagaagaggtttgtcggcgtttgcggttagttcggcggcggcggttttggcggcggcggcggcggttttcgggtggcggcgcgttcgggttgcgtagttaggcgggcggcgaaggttgaggtgtcggcgagcggcggggcgcggagtcgttttttcgttaatttcggtttttttttttttttttttttttttttttttttttttttttttttttttgttcgttagttttttttttttttcgtcggagttttagtcgggtgcggattggtaagcggcgcgtttcgcggttttttcgggcgtcgcgaagttgggaggcgcgtaaagtgcggtttaggggggatcgtcgggggttttcgttagtagttttttgttcgaggtcgtagtttttgtttttttcgtttttcgttcggtcgtttggtcgttcggtcgtttcgtcgatcgagggtttattagcgtttttttatggtcgcggtagttaatcgatgattgaatcgaataaagagtagcggcgagattaatttttaatatttatcgatgggtagcgggcggtcgagtttcggcgagtttcggtagtcgtcgttcgtcgttttagggcgttcgtttgttcgttcggggatttttttaatgcgtttagggcgcgttcgggggttttttacggtcgcgcggtcggcgttgttcgtattaatttggagtcgtcgtagattaaatcgtttttaatattgaaatatcgattttatattggcggttattttgggggttatcgagacgcgt

SEQ ID NO: 7425 - DNA, 5693 bp, synthetic construct
  misc_feature 1..5693: note = Description of Artificial Sequence: Synthetic polynucleotide
  source 1..5693: mol_type = other DNA
cgcgcggagagggtttaagagcgtttttttaaaggtttagtttcgtttggagagagtgggcgggtatcgggtttttgggggaggggttgtcgtaggtttgggagggaatttagcggggttggtcgtagtttgggtaggtcgtagtttgggtcggcgggaattcgttattggattgaagaggcgtttggtcgtcgttgacgtcgttgtttttttttcgattcgttcgttcgtagtgttattttgtacggatcgtagtttgttttcggatttttaggacgtattgtaggacgattttaaagagacggataattcgatttcgtcggataaggagacggttaataacgagaacgaggagtagaattcgggtattaagcggcgcggttttcgtattattattaaggttaagtagttggagacgtttaaggttgttttcgtcgttacgtttaagtttacgcgttatattcgcgagtagttggcgtaggagatcggttttaatatgcgcgttatttaggtgcggttcggggcgggtatagttttttagtttcgttggtttgggagtcgggagtttcggaggagtttttcgttaagtttttttggttacgagcgcgtttggttttggtttgggagtagatcgtgcgttcgagtggggtatttgttcgaggtcggggattgtgaatcgaaagattttatttagttttgttgtttttttggtattgcgatttgggggcgggttattttatttttttgaatttcgtttttcgttttgtttatggaaggttgtaagtttttttggggttcgggatttttttttatttttatttttcgagtagagaaataggcgatgttttttttttttttgcgtcgaagcgcgggtagataaacggttagaggttggtttcggagtcgaggggtcgaggcgagagtcgtgtcgggagggaggtttttatagagtcgttaggtcgcgggcgagtcggggattaggaagtttaagtttttatgagtcgttttacgggttcgcgaaattttttatttttggttggttcgtcgaagtttttttttatttttttcggtttaattcggttcggtttcgtttcgggggagttttggtgcggaagaggcgtaaggatttagtaggggtagtttagttagggaagggagaagagggggggagaggatatttttgattttgggtttatagtttttttttttgttttaggtgtggttttagaatcgacggtttaaagaacgtcggatgaaatagttgagcgttttaggcgttcggaggtacgttttttttcggagttcgcggcgtatgcgttcgttgggcggtcgtttggacgagtttgagatgttggggtttatttcgtatatttattacggaggtaaggggcgtttcgggattcgttgtttcgtatttgttttatttcgggagttgagggcgaagggtttcggttagtacgtttttcgtcgttttagaatatcgtttattcgttggatatacgattatagatatatgtatatttatttatatgttttggatataaaattagatatatggttttatttatatagtgatgtatatagaagtatatacgagatatagtgatatatttatttacgtagggtataaggtgtatttatatttgcgtttagagattttagggatatacgtttagatacgatcgtacgattacgtataggtaaattttatttttttatatataggtatatttacggagatataattttatagacgcgtatatttttattagttatattgaggttagtattggtaaatttatatgtatgcggtttttacggatagacgtatagtttttttgtcgttttgtgtttggtgtatttggtatgaggtggatttcgagcgttggagggtagtgtgaggggaggggatgggggtttggatttattttaagtcgtttgtttattagtatcgaaggtagtaatttttgttttatgtggcggggtgtgtgcgtatagtatttggtagtgttagtttaaatgtcggtagttgttttgggtaggattgtagtttattttttagtttcgagatttttggggtttttatagattgggggtataagtgttgggttaattttagatttttatcgtttttggggttgtagagagcgaggagttttagtttataaagggttttagatggtggtattaggtttgggtttggggtgagttgtttttttgttattttagttttttttttttttattttttttatattggattggtgagttattttaattttttttattcgatttttttagttttttattttgagtcgtattgtttgagtttattaagtttattgttttgttttttttagggttgagggtttaagaaagtatttttttttttttattttgaagtttttgaatttggagagattttaggattgtttatgtttgagaggtatttgtatttttgagttgtaacgtaggttaggaagaggtaattttttttagaaagtgggtttagtggtagtgttagtaaggtaggagttaggtatttaggtagacgtagaagggaagggaagataattttattattaattttagtatattcggaagtttgaggggggattagattttgagatcggatcggggtttttagaaattgtgggtaaaatgttaggttgtgttttttagggtagagattttaggtagtggtagggtttaggttggagcgttttagtcgtttaattttggatagttttttaattttggatagatttttaatttcggatagatttttaattttggagagttcggatggtgggcgtgtttttcggagtttttatttatcgattttttttatttaaatttgtttttttttttataaaatttgggttcggagtagcgaggtagtgggggcggtatcggttcggaattttttttcgtttggataattaattaaggttttttcgaggattatttcgttttcgtttcgatttattttatcgttttttttttttgcgcgttggatgaggtggggagttggatattgggggtttttcgtttttcgtaatggtggggaagattttttagtttttagcgaggtagtttcgtttaattcgcgttgggagatttcggcggtggcgatcggtagcgggcgagaaaggggtcgggcggcggggtcggcggtttttcgtgggagcgcggataaagttttagttgcggtttttgtgttttttttagacggcgtttgttttaattattttcggttcggtcgttatatgggcggaggcggcgcgtacggcgcgggggtagcggttttcgttggtttttcggttcgtcgcgggtcgcggtcgttttttatttttgtttttttggggttttaaatttgtcgttttttatttttttttttattttcggggagaattaaattaatggttttaaaaagtaattggtaatcgttttagttgttgtttaaattgtttttaagttacgtttttagatattttttatttggatagattttagggtttggagagggaagagggtggtagggggtattaggaattcgttttttgattgagattttaggatttagtagggggagtggatttgtagaagagatttaggtttttggattcgttggttttttcgtcgtataaagcgggtgtttggtataaggtggttttttcgtgacgttttttacgttagttttttagggttttatttggtgggggaaggtaggatatttcgaaggttttggaaaaggggttatgtggggcggttagagagttgatatagatttgttgaggtagaatgggtttgtaattcggagtttttatattttttgaatttatgggtaaaatttttatttttgtattttttttgagagagagtttatagttattattagttttttaaaagattttaatgtttttagatgttttagaatttgggggtgttggtaaaattaattcggggtaaggttggaggatcgagtttttattttaaggagttcgcggagttttggttatgatttagagaattttcgtgttttttttttttttttttaagtcgttggagtttagtttttttttttttaggttaggttaggtcggtataaatggttttatcgggatcgacgcggcggtcgtatttggcgaggcgaaggatttggattgggttggtagggcgtagggatcgagtttagggcgttaaggtcgtttcgttcggtttaatttattagtcgtttttgtcgcggttcggatttagtttttttcggttaggtcgtttttcggttttaattatttcgcgttttgttttgttcgttggtttgtttttgttcggttttttttttcgggtttgttagttttcgtttttttggaggtttttgggatttatttttgatttatcgttttgcgttttttgggcgtatcgatttttttttattttcgggtttatttttgattttttcgttgtcgttttcgggggtttttacgcgtgtttttaatcgcggtcgttttttttttttttgcgttttttcgattttttcgcgatttttcgatgtttcgggttttcgggttttagtcgcggatttcgtgtttttgggtttttttttcgtttttttttttgtttttttgtcgattttttcgtttgtttttcgttgtttcgtatttttgtgttttttatcgattttaagatatttaggaattattgtttgtttttgcgtttttggtcgtttttgtttttttttatttttaggtgttagggaatttgtgattgaagttttcgagtttttgtcgcgtgtgttttttacggtttcggagtttttttcgtttttgtgtgtggtttttggtagtttgagttttttgttttttcgagattttttattgtttttttttttaatttttttcgtgagtttgcgacgtttatcgttttaaggggcgtcggttttcgtaggtttttttaattttgggtcggtgtcgcgcgtttttttttttcgttcgttcgggtttttttttcgggtttcgggtttttcgtttatttcgtttttttttatcgcgttttgtttttttttcgttttttttttgtagattattaaggcgattattacgcgtcgggaagtaattacgattttttcgcgtacggttcgttttcgtaggcgtagttttcggtcgattttagttttttggcggtttttggtttcggttcgacgtcgttgggagcgttggaatcgtcgttcgtcggttcgtacgtcgcggataattttaggtttatcgatatgatttcgtattcggatatatcgagtttcgagttaggtttgtcgggtacgttgtattttatgttcggcgaggtatttagcggcgggtttagttcgttttttttaatgagcggtattagcggttatagcggatttttgtcgtattttaatttcgagtttaacgaagtcgtcgtgtggtaaggtcgtcgggtcgtttttcgcgttcggttttcgggggtttcgtttcgaagtagttttttgaaattaaaacgttcgacgtagacgcggtgggagacgtgggtgtttttcgggggttttttttcgggttcgtatttaattggtagttgtttttcggttgggcgtcgagggggggtcgatttttatttttatttcgcgggttttttaggagttttagtttatcgttagtatttttttagtaatcgcga

SEQ ID NO: 7426 - DNA, 589 bp, synthetic construct
  misc_feature 1..589: note = Description of Artificial Sequence: Synthetic polynucleotide
  source 1..589: mol_type = other DNA
cgtcgcggaggttttagcggtaggtgcgttttagtaggtagtagtagtcgttattttgggtaagtagtaaatttcgtataaatttcggagttattatgtttgttttttcgttttatcgtcggtttttttgttaggagtagtagaggatgtggtgaatgtatcggttttatcgaacgaggtaatcgtttcggtagatggttcgggaggtttaggagggagttcgtcggtcgagtcggttggggcggcgggaatggcggattttagttcggttttgtattttgtagagtatagtttgtagagattttgcgcggttcggagtttttcggtaaatggagtttgggaggtcgtcgcggttggcggagcggtattgaggtttgtagaagtacggtttggttttgttaaatcgtattttgttcgttttcgttagtttagagtttttcgggattttggcgagggcgcggggtaggatttttttcgcggtcggtagtgaatgggagcgcgtgtaggggcgttagttttgtttttttttgttgtgagtaggtagcggggttttagtcgtcgtttttttgaagtttcgagaacgaggcga

SEQ ID NO: 7427 - DNA, 1294 bp, synthetic construct; identical to SEQ ID NO: 7417
  misc_feature 1..1294: note = Description of Artificial Sequence: Synthetic polynucleotide
  source 1..1294: mol_type = other DNA

SEQ ID NO: 7428 - DNA, 1373 bp, synthetic construct
  misc_feature 1..1373: note = Description of Artificial Sequence: Synthetic polynucleotide
  source 1..1373: mol_type = other DNA
cgattttcgttgagtttacggtttagtttttatatatttatgtcgcgtttttagtcgttgggtgaggagttatttagcgtcgcggttttttcgaggggcggtcgggtagcgagtagcggtcgagcggacggggtgagttaggggcgcgcgcggggcgtttagtattgcgtcggggaagttcgtagttttcgtttcgaatttgggttcgttgaggttgagggaggggacgtaaggggagggaagaagagaagggaggagtgggggttaggggagagggggtggggagggattttggaggtataaagcggaggggaaggggagggacgcgcgcggtttttattaggaggcgagtgggtgtaatcggcgttttttagtcgcgcggggcggcggattcggaggatttagaattcggagcgcggcggtcgcgggcgttcgggaggaagaggaggagtacgaggcgggcgggcgggtgcgtagcgcgaagaggtagtttcggcgttgttcggttcggcgttaggtgagtttttgatttaggcgtttcgcgtttttttttcgtttttagggtttttcgttttcgttcgagtttttggtgtgcgcggaaggttcgggttttgttgcgcgttttaatttggttcgggcggttttattttttttttagcgggcggttttaggtcgggggtttcggttcgggggtttacgcgtttaggttttaattttgtaagattttagtcgttttttagtcgcgcgtttggtttcgagttgtgcgttggcggtaatggcggagtttttggtatagttcgttattttttcgcgggtagttcgggttgggggatgttagtttttggggatcgttgtatttgtttaagtttaattttacgtttttttcggtgttcgattttgcggtcgaatcgtaattgcgagtcgtaggtaatggcggagtttttggtattgttagttgttcgcggttgggggttcgaggttgggagggtttcgttttcggaatatcgtttcggtttggtttttaattttgcgaggagtttttttgcgtttttttttcgcggttatggcggggtcgttcgtattttttatttttttcgtttgggcgagattggggtgtaagagcgtcgtttttaaaatttgggaaagttgtgtttttttcgtaaaggaggttttagggaggtcgaggggcgcgtttcgttacggttcggggttgggtagtggaaggagcgttcgatgaggttgtttttaggtggttagggttcggagtagggttttcgggggatttaatttttagggttatttaggggttttgcgttcgaggtttcggaaggggttttttcgggattgcgttttagaggacgttagacgttcgt

SEQ ID NO: 7429 - DNA, 1524 bp, synthetic construct
  misc_feature 1..1524: note = Description of Artificial Sequence: Synthetic polynucleotide
  source 1..1524: mol_type = other DNA
cggggaaaggcgtggaggggggttgagcgggttcggggttcgttcggaatttggggggttgaggggtcgggcgttgggcggtggagggaggaggtagggggatgcggggagtggtgggggagtttttttaggaagtgagtgtgcgcgcgcgtttgtggggagatgaggtagttgttggtgcgttttggggttttcgattcgagttttgtggcgggtcgtttgttttttttttttttaagtttcgatttttttttttttattttttttttttgtattggcgggcgggcggcgggggcggttggggttttagtttttttattttagttttttagttttttcggtagttcgggggcggttttagttttagaaatgtcgtcggttttcggtttcggtttttcggttttgtcgtcgcggtcgttggggttgttgttatcgtcgagtcgggcgtcgtagcggttttttttggggtttatatttgtttcgttagttcgtgttcggagtttttttcgcgggttatataattaggttttcggtcgagtgggcgaagtttagtatatttcgggggcggggggtaggggagggtttttagatgtttttttagtgttttcgaagatatcggaggggagtatttcgcgtagagcgtagttggattttcggggtgcgggtttttttttttgttttgttttttagtatttttggtaattgcgtaaagttgtttgggttgtaatggtggggtgtagggggcgttcggttgttgtatttgttagtgttgggtttaggttgagaggcgatttttagtttttataataatgtttcgggttttttggtttgggttttcgtagcgttcgattgatcgttagcgatacgacgagaacgaggatttgtcggacgtggaggagatcgttagcgttcgcggttttagtttggaggagaagtttcgtagttagttgtattagggggatttcgtgtacgttatggagggtaaaggtgaggcgtttttatttcgggtcgttttttgcgttgcgggtcgagcgtacgtggggagggagttgtcggtggttgggttcgtatttcgcgttcgcgttttttattttaggggattcggtgacgaaacgaggtcgagtattgggggggtggggtggggtggtgagggaggagggtaggtagtaaggggggtcgggtatgggtttaggttcggttcgcgtttattattagttttagggtgggtagagttagggggtcggcggatagagggatttggagatggataggcggatcgagggagggcgggagcgtcgcgtttttttttttttcgagtcggtcgcgttttttgcgttgtttgaggtgtcgtcgtttggttggaattgggtttagggcgtttttggggtatcggggtaaggttttttaggttcgaagtttttttaatttcgttttcgtttggggtttgttagtgaggaattggtgatgggggcgcgtcgggtgtttgggacgatgtttttttaggtttggggttcgtagagtcgt

SEQ ID NO: 7430 - DNA, 1009 bp, synthetic construct
  misc_feature 1..1009: note = Description of Artificial Sequence: Synthetic polynucleotide
  source 1..1009: mol_type = other DNA
cgaagtggcgggtcgtggttattttttttatttgttgtattttttggagtttcggggcgtaaatagtcgttgtatttttttttattttcgacgggatgatattatagttttttttttagatagcgcgggtttttgtttcgtttttttttagcgatcgtagcgacgattttgttttagggcgggggagtagttttttaagtcgcgggcgtttattttttcgttcggatttcgggcggtgttggtcggggcgcgcggggaggcggggattagggattttttaggaattagtttgggttgttgtatcgttgttagggtcgttttgcgtttagtcgagtttagggcgtcgtcggttggacgttcgttaatttttattgcgttcggttttcgagcgcgttcggttggattcggcgcgttttttcgttttaggcgtcgttaagttttagtattatgcgtttttttagatgttcgaaagcgtttttttagggtagtttatgtttttttgtgtttttttcgcgacgggtcgggtttattattttatatttttcgggtttttttatgtttattatcgtgtgtttttttagtatttttttttttttttaagttttaatatagtatttttttatatatttttcgcgtcgttttagaggtttttttagttattgtttcgtttttttatttttttagtttttttagttttatcgaggcgcgtttttttagtacgtttttatttttttatttttttttcgcgtttttgtatttttttttcgtatttttgtatttttatttcgagtttttttgtgattaaatatcgcgtttttttaagcgtttttttttcgcgtcgttttaagatttttttttatattttgtatttttttcgtatttatttacgtatttttgcgcgtttttattcggcggtttttttatttttagattcgttttcgcgatttagcgcgcggggtattgggtagggatatttttcgtttttacgcgagtttttcgttgtagacgt

SEQ ID NO: 7431 - DNA, 961 bp, synthetic construct
  misc_feature 1..961: note = Description of Artificial Sequence: Synthetic polynucleotide
  source 1..961: mol_type = other DNA
cgtcgtcgttgtgagcgcgcgaggattcggggttttaagtggtgagaattattcgagggatttttcggatgtttttttttttttttgtttttgagttttgtagtatagcggtgtcggtcgtcggtagggaaggttgtattttttttgcgtcgttaaatcgtgtttattatcgcggtgattgtcgtttaggtcgtatttttgagtcgtattcgcgcgtaggggcgtacgggtacgcgtatagggaggtcgtatatatatatatatatttgtatagggacgagtcgggggtttttgacgttcgtcgtttatttcgtttcggtttggagttttttggtttcgtaggtgtagcgacgtttagttttcgtgcggttagcgcgtcgcgtcggcggattttgtagtttagagagtttagggagtttagggaggggagcggggcgcgggcggggtagtgtcgtataatcgtaggcgcgtttcgcgtcgttttcgtttcgggtttattttttttcgtcgcgttttttttagtttatttacggacgagcggattttcgattttcgcggtagggatattttaagagttttgtttaggtttgcgtcgtttagtatttcgttcgtgtcgggggttcggcggtttcgggcgagagacggaggttacgcgtagggttgggcgtaggggtcgtcgttcgaggattatgggtgggttagcgtttcgtcgggttgttagttggcggggatcgtcggcgtttgtgtcgggtcgcgttcgaggttgcgtcgttcgtgtcgtagcggttaatgcggtagtattcgcgaacgttatcgcggcgggtttcgttggttcgggttgcggcgtgggggcgggggatcggttttgagcggagtttcgcgggaggaggagcggacgggaggttgggagggattcgtaatattacgtaggatcggggtttttaggtgtcggggaaggcga

SEQ ID NO: 7432 - DNA, 961 bp, synthetic construct; identical to SEQ ID NO: 7431
  misc_feature 1..961: note = Description of Artificial Sequence: Synthetic polynucleotide
  source 1..961: mol_type = other DNA

SEQ ID NO: 7433 - DNA, 980 bp, synthetic construct
  misc_feature 1..980: note = Description of Artificial Sequence: Synthetic polynucleotide
  source 1..980: mol_type = other DNA
cgtttttttgtttcgttcggtgtaagttcggggtcgtcggttggggtggggcgcgtagcgcggtaggtaggtagggttattatgtagtttttagttttttggttttttcgtttttcgtttcgcgtttttgggtcgttttcgtttgttcgtattttagagtagttttgattcgtgggggcgcgcggtttcgcggggattttgcgggcgggcgggcggtcgggcgcgcgcggggcgggggcggcgcgcgcgcggggagcgtgtgggtcgggcgggcgcggcggggaaagttgggcgcgcgagtcgaggttgttgtttatttgtagtcgcgtcgtttatttgtcgcggagtgcgcgtttcgcgttttttcggttcgtttcggagttcggtcgttttttttttgttatagcgggtaattgcgtcgatatgcgatacgagtagtttacgcgtttcggaagtatcggaggagttttttcggtttgggcgagttaaggtgattttttcgatgattttttcgttttcgcgggtcgtttgttttcgtattttgtttgtttttttcgcgttcgattttcgttttcgtcgttagggaatcggtagtagtgtatgggtatttgtttgtttgtttgtttcggtatttttattgtatatatttttttttcgtggttttttcgattgtttcgtgcgtacggggggagtttggagtttttttttgtttcggtcgggggtgcgtttgaggatgtgtacgcgcgcgggggatgcgtttggagggtgggagttcgatggaaataggcgatttaaatattttatcgaggatggcggtttttggttcgagatttgtcgttgtcgcgtggttttttcggtagtagtttagatgttaaatagttgttcgtttttagtatgtaagatgtgattttttaatgtgtatttttagcgttgttgtaaatagatcgtcgcgagttcgtgtgtgtttgtttcgtttacgt

SEQ ID NO: 7434 - DNA, 408 bp, synthetic construct
  misc_feature 1..408: note = Description of Artificial Sequence: Synthetic polynucleotide
  source 1..408: mol_type = other DNA
cgcggcgtttttttcgaaatatttgagtataagtagtcgtaagggcgagcgtaggacgcggggcgtggacgtcgggttgggaagagtttcgattaaattcgcgggtggttttgattttttttttcgggaggagttttgcgtagaggtcgtggttcgcgcgggtaagttatttgtggtagtttggtagggtagtttttttcggtaaatagcgatatgttttcggtttttgtcggttttggtttggtagagtcgtttttcgttttttggtttttggtgcgttcgaggcgggagaggagtttcggtcgcgtggattttagtttgcgcggtaattatcgcgttttgattttaggttcggttgtttagggaaggatagtttagggcgcgtttagcgagttttagggggtacgg

SEQ ID NO: 7435 - DNA, 2190 bp, synthetic construct
  misc_feature 1..2190: note = Description of Artificial Sequence: Synthetic polynucleotide
  source 1..2190: mol_type = other DNA
cgggtgtattaatgcggtcgaaaaagatacggatacgtttttttgggatttgagttggttcgtagtttttttaaaggtgttaagtaagcgttagttttttttaggcgttttaggtttagtgttttgtgtcgagggttttcggtgtttttttagatttttcgggatagtttgaaggggttaggagcggcgggatagcgcgggaagagtaggtaaggggagatagtcggattgcgttttagtttttcgtgttaagaatatcgtcgcggaggcgcggttagttttttttggatcggatttttcgtttttagggttaggcggcggagttttagttttgttttttttttagtttcgggcggtttttagagttgagtaagtcgggtggagggagtttgtaaggattttttgagcgcgatgggtaggaggaggggtaagggtaagagggcgcggagtaaagattttgaatttgtcggggtcgcgttttcgggttcgcgtcgttagtatttttttacgcgcgttcggtttcgggttattcgttttcgtcggttttcgttttttttcgtagtcgtagggaagcgagtttgggaggaagaagagggtaggtggggaggcggatgaggggtgggggattttttgacgttattagaaggaggtgtcggggtaggaagtgggttggggaaaggttataaatcgttttcgttttcggttgttttttatcgaggttcgcgggaggttcggagcgcgttaggcggatatttttttcggttttttttcggtagcggcggcggttcggagcgggtttcggggttcgggtgtagcggttagcgggcgtttggcggcgaggattattcggggaagtggttgttttttggttggagtcgcgagacgggcgtttagggcgcggggtcggcggcggcgaacgagaggacggattttggcggtcgggtcgttggtcgcggggagcgcgggtatcgggcgagtaggtcgcgtcgcgtttattatggttagttattgggatatcggggttttgttgtgcgcgttgtttagttgtttgttttttataggtgaggcgcggttgggggtcggggtttgaggcgggttgcgatggggcggtcggagggtagagttttcgaggttagggcggggtgtacgcggggagacgaggttgtagttcggagaagttggttacggcgagaatttgggatattagttgtagcgggtacgtttggggtcgttgcgtttttttttcgagggagcgtttcgaggagtggttggtttggattcgcgagtattagcgtttagatcgggttcgcgttggggttgttcgtttgcgataggatcgttgattttttatttagttgtcgggttggggttttattgtcgaggttttgggtattaggagtagtacgtatcgggatttgtttggtatttagagtttatttttagaggatttggggtaggtacgtagggtttttcggagtcgggagtagaggtttttgaaagtttgttaggttgttcggggttgggttgaggtcgggattttggtgatattgggtattggtcgcgatttcgcgttacgagagtgtaggaggggagtcgatttggaggggattcgtgtttgcgggggagtaggaggattttaggagagggttagcgtcggtattttatgattcgtttgagtttttaagtcggattgtttcggggaacgttcggcgagcgttcgttttttttcgtcgttttcggatcgcggggttttagtgcgttgcgtttagttattcgggtggggtttttgtcgggagtaggcgtggtgcgcggtttagttcgtgtcgcggatattagtgattttgatttataagggtagtttagggtttaaatatcgttaatttattgatttataagtttagtttttaaaattcgagcgaagagagggcgggcgattttgattaaacgatgtggtttgaggaatcgatgaggttcgttcgttatttaagttagttttcgttgggcgtttgggagacgggcggtggaatagttaggggtcgggggttttattagtagttagatcgtcgttattgaggggttaaagtttcgaggaatttgagggttcggattcgtagtttttgtttagtggggttgagtggcggagatttgtgtttcgtttttttgggcgtagagagttagatttcggagcgt

SEQ ID NO: 7436 - DNA, 2190 bp, synthetic construct; identical to SEQ ID NO: 7435
  misc_feature 1..2190: note = Description of Artificial Sequence: Synthetic polynucleotide
  source 1..2190: mol_type = other DNA

SEQ ID NO: 7437 - DNA, 679 bp, synthetic construct
  misc_feature 1..679: note = Description of Artificial Sequence: Synthetic polynucleotide
  source 1..679: mol_type = other DNA
cgtcggtttaggtttcgtgcggtaatttttcggttttgttgtttatttcgttttatcgttttttattttttagtttttgtttagttcggggaagtcgcgtcgtagcgttttagatgttatttatttttttttgcgaggggtttgtgatagtttagggtgttgtgtattttgtgcgattgtttatcgttcggtttatgcggtggtttgagtagtttcgcgtcggtattttacgtatcgaatttcgggattacgtgagtcggcggagggcggggaggtggcgttcgggcgtcggcgtgaattcgcgtttttcggagtttagcgtcgtgtttttaggtttcggttttgattttagggcgtttaggtggaatggtttcgtagttgcgcgttgttttcgcgttttcgttttgtttcgcggaaatcgttttcgatagttaattcgatcgggcgcgcggcgttttcggtcggttttcgttcgatttcgcgtagggtatagatcggggcgtacgcgttattcgtattcggttattcgcgggttaggtcggtcgagcggttgggtttagggggtatttttacgtgcgtagtcgttattcggtttggtcgtttagacgttttcgggggttcgcgtcggttagtttagttcgagtttggcgtcgcgttgcggtcgttgttttttattcgg

SEQ ID NO: 7438 - DNA, 2013 bp, synthetic construct
  misc_feature 1..2013: note = Description of Artificial Sequence: Synthetic polynucleotide
  source 1..2013: mol_type = other DNA
cgttacgtagtttagggcgtttagtttatatcgtcgtatatttattgtcggtttagaggtttggtcgttgagcgttttttggatggcgtggtttgatcgtttttttttttgatttatttttagtttcgagggtcgggttttacggcggcggagagggcgtcgttcgtacggtttcggttgtgttatcgtttcggattgttttcgcgtagcgaggtttttttttcggggttttcgggtggggtcggtcgagtcgggtgcgttatttttttaagttcgggcgagatgagagttgttagcggtagtcgaggttagcgcgggacgtcgttattttagcgttaggtcggagttagtagtcgcggagtcgcggagagcggagggggcggcggggtcgggcgtggcgggttttttcgtcgtttattgcgcgttcgaattttgggtttcgcgagcggcgggcggtattcgttgtaatgcggagaatgtgagaggtagcgtagggcggtggggaggaaggggcgcgggagagggcggcggcgagatagacggagagtagcggggagaacgaggatcgggttgggtaggtgggataaggtagggaggcgtcggagaggtcggattggaagggggggagaagggcggcggcgtcgcggagggggtcggcgtttttcgcgggagtgcgagaagttcgagtcggtatttgggtttaggttcgggttgggagcgcggtcgcggttcggttaggtagggtgcgggagtcgggtcgttcgcggggtttttacggggagtagcggggtatttaaggtcggcgggtttcggaggggtttagggtcgcgtttcgtaggtttcggtcgtttcggtagggggtttttgtgagcgttttaggagggcgagtcgggagtgcggagtcgggtgtgcgcgtttgggtgtgcgcgtgtgtgcgcgagtgtgggcgtcgggtagtgggggcgcgcggtagagattttgtcggtatcgtatcgtggcgagtaggaggtaggagcgggacgcgtaggggagtcgggattttttcgcgtatacgtatatgtatacgttgcgcgtttttacgcgtatatatacgttttttttgtcgcgttcgtcgtcgcggttattatcgcggagtcgagttttgcggagcgggaatcgaggtcggagcggggatcggaggtagtcgagtcgggggatgtcggttcggagcggagtcgcgcgcggacggcgcgttcgggacggtgagtgtggtcgggtcgggacgttgtagcggggttagggtcgtaggggcgtaggtcggggagtcggtgtgtttgttcgtcggcggcgcggcgcgcgcggtttttgattgggcgggagtttcgggggtagcggcgggggtggggtgttgggtgcgcgttcgtggggggcgtgtacgtttggggttgggagggggcgtgttcggtagtttaggtcgcggtttcgttttatttttatttgtagttgtagtttcgacgatttgtagtaagtttgtggagtttttggggcgcggcgggtcgggaggggtggggacggaggcgttttgagggtgtaatttcggtttttttttttagagaagagaacgcgaggggagtggggcgggggcgcgggtcgggtcgtttggcgggcggaggggtgcgtttttagttttttagtcgcgtagtcgttcgttttttgggatatttatttaggttcgcggcgtcgcgttggagtcgtttcgggcgttagattattatgatttcgttagggttaggtaggatcgcgcggggatagtttttaggtttagggtttgggatgtttttgtaggtaggaggaagatattaaggtttagttgggggagtgcggcgacgtgttcgggcgtgtatgtgtgtgttttcgcgttttttgttttttaggacggtggttggaagaagggaatttgtcgtaaggcgcgttttattcgatttggatttttaggagtttttaagaggtcgggggcgtttttaggtttgtcgg

SEQ ID NO: 7439 - DNA, 1501 bp, synthetic construct
  misc_feature 1..1501: note = Description of Artificial Sequence: Synthetic polynucleotide
  source 1..1501: mol_type = other DNA
cgtggtttttcgtttggtttttcgtatttattaggaggaggttgtgcgttattaggtattcgagtcgcgggttgtttcggatgtcgggggttaggcgttcggtggcgtagtcgtgttaggttattacgtaggggttgtcgatggtgatttagtatttgatttgatcgtcgaagtggcggaagtagagtttcgcgtaatttttgaagtggtcggttagggcgcggttggtttagtcgtcgtaggcgttttgtaggcgttggggtaggttttagtggtatagggtgattacgggttgtacgtttagttttcgtagtcgttttagtaggcgtcggtagtagcgtagtttttcgcggttggggacgttcgcgttgttattggggagtattcgcgtttacgagatggagaagcggtagtgagtgatttcgagttcgcgtagcgttttcgtgtcgcggaagacgttgttgtagttgtcgttggttacgttttcggtggcgggttgtagcggcgacggggcgtttaacggtagattggcgtttcgggagtttttcgggggtgttagggggtggtgggtgaacgtattttagatggacgtatttttgtcgtgttgttgttagtcgttttcggtttggtaggcggcgttgtttacggtttagaggaagtcgtcggggaaggtgttttggaagaggttcgcggtttcgggggtaggaggtcgcgagaaacgggtttaggtttgcgcgtcgtcgttcggtttcgtacgtaggcggcggtcgtttaggtttagtagtattagtagtagcgatagcgacggcggcggcggtcgcgggcggcgcggcggggcgttggcgggtatgttgcgcgggagttaggtttcggggtttcgcgtcgcgtttttttatgttcgcgtttcgtcgcgttcgttcgtttatcgtcggcgcgtttattttcgtttttcggcgggtttcgttggtaataattatttgcgagtcgggattgttttcgttttggtattgggggcgggggtaggggcgtcgagggcgaggggtgttcgggaggggcgcggtagcgggtaaggtgcggtaggcgtcgttcgcggacgtcggagaaaggtatttgttttttttagttttcgggagtcgtgtaggacgtttcgtggacgtttaggtttattttttttgtttgtcgcgcgttttttgagagtagttttggagcggtttcgtcggggagaaaaggcgtcgattaatttttttcgatttgggggcgggattttgtcgggttttagcggagcgcgtcgttggggaagtatttgtttttattttttttttattcggaggtttaaagaagtttcggttggatattgttggagttaattagggattggtcgaaattttagagggattgttaggtgggatagtcgagggggaatttcgtcgtgcgttgaaagggatttttttttaggtgagatgttcgcggggagacgcgtttattcgcgtttttttttcga

SEQ ID NO: 7440 - DNA, 668 bp, synthetic construct
  misc_feature 1..668: note = Description of Artificial Sequence: Synthetic polynucleotide
  source 1..668: mol_type = other DNA
cgaggttgttgcggtgggaagagggcgttgggagggaggaggatttggggcgtagtcgtggtgggtgcgttttgttaagaagggcgggggcgacggggcgcgtacgtggaggaggaggaggaggagggagacgggagggcgtgtgagcgagtgagataagaaaagggagcgcgttcgtcgtcgtcgtcgtcgtcgtttttttttggagagagaggttggagtgaggttgtgcgaagcgtcgtattttaatgaggacgggtcgaggtatatttttgtattagtggtcgtaatcgaggcgtcgcgttttagtagttgttgtcgtttagttcggtttcgtcgtcgttttttagttttgtagtttcgtagtttcggtcgcgtttagttcggcgaggatagtattaggaggcggtttttagcgcggttataaagattttcggcggcgttttttcgcggatcggtgcgtggtttgttttttttggggacgggagttgcggggagggcggtcgggggatttcgtagagttcgtttcgttcgtagtcgcggggcgtcgagggtagggcgggcgtttagtttggtttcgtcgtttcgttcgtagtttttcgaaaggcggtcgttttgttttggttagtttggttcgattcgggggcgttgcgtgcgggcggtttcgg

SEQ ID NO: 7441 - DNA, 1006 bp, synthetic construct
  misc_feature 1..1006: note = Description of Artificial Sequence: Synthetic polynucleotide
  source 1..1006: mol_type = other DNA
cgttatagtcgtagagtttttatttcgagttcgcgtttttttggtcgcgtcgtgttattttgtttatttattgggcgatttgggtacgagtatcgcgatttttcgtttcgcgtagttttttagtatcgtggttttagtatatttgtagagtagttaggcgtaggaatcgaaattcgtcgggtggtgggcgggaagggaaaggtagatgtttaagtgaaggcgtttatttttttttttacgtgaatagaagttgatttttaattttaagtgagaaatgatagggagaaaaagtatgtaattattattagaaaaggtgagaggttagtgttgttttttagcgaagggacggggtgagatttaaatttatcgttcggttaggggagttcgtttttagagtatcgagaagttggggtgcgtgggcggagagagagtagggtgcgttcgatagttttgcgttaggttgtttttaaatttaatatttttttttttttttttggagttattttttttttcggaatatgtaagttttgggtggtttagttttgtcgttagatttagtttttaagtgcgggggaaggagatgggcgtttttagtcgcgattttttgggaaggtggttatttatttgcgttttgaaatagaagaatagggcgacgttgtagataatttggtttagttttagttttaggagggttacgaatatggagcgggaggcggtagggggttggtgcggcgtaggcggcggcggggcgtgtagggggttttcgtgcggggtttcggggtcgtcgtttatttttttcgagttacgtaggtatttggtgtagtttttgttggcgcggcgtatggcgttcggttttttcgtttcggagtttttttttttttttcgtttttttttttttttgtttgcggttaatttcggaggttgcggcggagtttcgacgtggggcgtcgatttggagttcggttttgggttttggggcgcgcgggcgagcgggtagggcgttcgg

SEQ ID NO: 7442 - DNA, 867 bp, synthetic construct
  misc_feature 1..867: note = Description of Artificial Sequence: Synthetic polynucleotide
  source 1..867: mol_type = other DNA
cggaagtaaagttcgtagtgaggtgggttggaagcgggttttgtagtagtcgcgagttcgggtttaggtttttaggcgcggttggagtagaagtgtagggatcgttacgatttatcgtcgcggtcggtttcgtttcgttagaggagatttcgtacgcgtagtcgattggttcgggttgatcgaggggatttagacgttgttattttttttttttaaggtagttttcgtggttttgtatgtaggaagtgtttcgattaatttttttttcggttttcgtagagattttaaattttgcggtttttatttttcgttgtatttttttttcgtttttttttttaatgtttttgttagtaaaagtttttatttgtagtatcgggtatgttgttcgtttaacgcgtttcggggatttgttggttcgtgtttttaatttaggggtggttatacgtttcgcgtttttgtttttgggtagatttttttatttgtgtattttggtttttttatttagtaaagagatgtgcgaagtgtgcgtttggagacgagtcgtttcggtgatttttattcgttcgtagcggtggttttggtttttcggattcgcgttcgcgttttgcgggtttttcgcgtcgtttttgttcgtcggattattcgggtttagagggtcgttcgtttttagcgtttgcgagcgtcgttttcgttcgggtttggggagcgttagcgcgttttttttacgtcggattttgtagagtatgtttagtgtattttatggaattcggtttttttggggttaggattagattttcgggttttcgttgttgtcgagggggcgcggaggaggggaggttgggagatagttagcgttttgtttcgcgt

SEQ ID NO: 7443 - DNA, 1072 bp, synthetic construct
  misc_feature 1..1072: note = Description of Artificial Sequence: Synthetic polynucleotide
  source 1..1072: mol_type = other DNA
cgcggagaagattgtttggtttcgtcggtttcgttaacgtgacggttagtttcgtcgagcgttcgtattcgtttatatttatgattattcgtatattcgttttaatacgtgttaaggcgcgatcgcggggtttttggtagttttcgttgtatttttttttttataggggtatttatagttgttatttgtatagggggtaatttttttcgatttagttgtggtcgtcgttttttttagttttttttggtttttcgtatttttcggtttgggttcgcgtcggtcggttttttttttttttttcggttttttttttcgtcgtttttattatatttttttttggttagtggcgtacgtcgggggacgagttagagggagcgggtcgcgggggtgtgtatgtatttttcgttttttttttgtagcgtatattgtatatggtagtgagggggcgagtaaaggtggtatcggtttttcggttgttttagcgaaggcggcggttgtagtttttgcgttgtttttcgttttttagcgtagcggcgattatcgcgttgggatttcgtcgacgttgttttcgcgtcgagttcgtcgtcgtcgcggtttttaattagtatttgagaggtttttgtatttttttggtagttttatttttacggtgtttgtagggtttttttttgtattttttttttagatgcggcgtataatcgttattagttggaattttttattatcgatattttttggggtttttgggggaaggggggggcgggtagtaatcgcgtcgttttatgtttgtggtttgttttggtagttcggtggttttaaaaaaaatttcgagaaagttgcgtttttttttcgggcgtcgaggaggtggtaacgcggtaagtaatatcgggtttttgagatagttgtttcggagcgggtgtagggtttagtttagtgtatttgtttattgtcgcgtttttggtgcgagttaagttgtagtagatatgatgggttcggggcgaagcgggcgttcggtggtcgatagatggtagtcgagggcgaaggcgtttttgggttagggcggcgtaatcgg

SEQ ID NO: 7444 - DNA, 1633 bp, synthetic construct
  misc_feature 1..1633: note = Description of Artificial Sequence: Synthetic polynucleotide
  source 1..1633: mol_type = other DNA
cgatacgttttatttatagagttttagagaagttcggattcggttggagttaagagtcggaaaataagtatttagattgtcgcgtaagttgtcggagattaagtgttatatatattggcgtcgagagaaagggtgggcgtttttaagtttttggtggagtaatgttagtggtcgggtatgcgggggatacggggttttcgaattcggattcgaatttttagttgagttattcgttaaagttggttgttcgttggtagacgaggtcggttttagatcgggtggtagggtgttttcgggttttgagtggttaatagtaattggggaagtattgaggaattttaacgggaaagttcgttttatatttgaaataggtagttcgtgaagtttttaaattagttttgaaacgtcggcgtttagaggttaggttttcggcgagggttttttttagttttgttcgttttcggttcgagcgtcgggcgttttgtcgttcgaaggacggataggggagagaggggttgggggagtttttcgcgtttttttatcgtttttgtcggcgtaagggcgggagtggagaaggcgttatttagattgtggcgttgggtaaattgcggtcgtagtttttttaagtttgttcgaattagaacgcggagtgagcgttcggttcggtttttcgtttgcgttttgtagtcgtttcggagtgattcgggttttttggttagtcgggtttgagttattaattaaggggtagaagggcgcgagagtagcgggaggcgggagttagggtgttttcgcgtgtgtatataatgaggcggcggagacgtatattttttttcgtcgaagaagtcgtaggagtattcgtcgtttaatacggagacgcggagttttatagcggtggtagaaagtgagtattaatttagtaatagggggaaggaaggggacgtcgggcggttagtgggacgtgcggtagtcgagggttgtagtttgtttttgtagcgcgttcgcgtttatttgcgattttttggtaggggatgttcgttaggttgaattttttggtatcgtacgtttggcggattttttcgtagtttcgagtttttatattcgtttcggcggggagggagagtagtagttttaagaggggaagaattatagtttcgatttaagaaggtatggtgtaatatataaatttagttcggtaaattttacggtcggtgcgttttttattttgttttttaagtcgaaagttcgttagaggtagcggcgcgtttttcgtcgttgtttagcgttatttttttttgttagtcgaggggacgagtagcgtagttttttggattgcgtttagtaaatttttataagttagatggacgatggtaagttaataagggttggttgggaaggttgttgttttgtttttttagtttttagatggaaacggtgtaattaaaacgaggaagagaaggaaaagaagtgtttaaaaaattattatgggggtttagagttgtaattcgagtttcgagtcgtagaattttggagcgttgcgggttcggttcgtcggagtgtgcggtaaaggtgggagcgcgcgtcggttttttcgggagggagatggataagcgagagcgagtgtgtatgcgcgcgt

SEQ ID NO: 7445 - DNA, 1143 bp, synthetic construct
  misc_feature 1..1143: note = Description of Artificial Sequence: Synthetic polynucleotide
  source 1..1143: mol_type = other DNA
cggtatcgtgtatagtttgattttacgttcgtacgttgggttttcggttttttggtagtgtatttaagtgtatttcgcgtgtgttcggcggattttcgtgtatatcgtcgtcgtgttgttgagtacgaaagattttcgagaggagttcgtagatgagagtttagttgttgttgtgagattgattgcgggtggtagtcggtaagaaggaattgttagtatcgattttggcgttttttattaattgcggcgtagttttttttgcggtgttcgtttttcggtattattgtagtttttgtagtaaagttaattttaaaaatttaaataaaataataattttttaaaggttcgaaaatttcggtttttattttttttttagtttgttcggcggcggcggcgtttagtgagtgatacggcgagcgtgagtcgcggttttagtcgggtcgagcgcgttgtttgagttgagtcgtcgtaggtgaggggttcgcgttttcgttcgttttgggcgtcgcgtttggtattgattttgtcggtcgtttattgtcgtcgtcgtcgtcgttcgcgggtattatgatagttttgagcgttggggttataggttggttatcgtcgtcggtgttcgggaggttgcggcgcggtcggtttcgtgttttgcgttcgaggttcgcgatgcgcgttcgttagttttttggtcggttcgggttaggacggtttaggggcgttggggttgcgagaggggttgttagaggggttgcgggcgggggtttcgcgcgggggaggggtggggaggggcgtttttattcgagagcggggcggtggggtttttgtcggtttggtcggggcgcgggagtcgcgatgcgttttttttatttttgcgcgtgggtgtcgggggcgtttgtcgcgggatgtttttgggttggtttgggaagtttagggtcggcgatatttcgggtttgtttcgtttgggtatttagtaggtgttggggggtaggtggttgaggacgaggttattgggtattattatagcgttgtatttgttttttcggtattagggtcgttgtttgggtaaatttttgggttaacgcgcgggtggggaggtgggggtgggtagtttggttttagtaggttttcgcgggggtttcgcgg

SEQ ID NO: 7446 - DNA, 1143 bp, synthetic construct; identical to SEQ ID NO: 7445
  misc_feature 1..1143: note = Description of Artificial Sequence: Synthetic polynucleotide
  source 1..1143: mol_type = other DNA

SEQ ID NO: 7447 - DNA, 1371 bp, synthetic construct
  misc_feature 1..1371: note = Description of Artificial Sequence: Synthetic polynucleotide
  source 1..1371: mol_type = other DNA
cgttttttttacggcgttcgtttagttcggtggttttaattttttgcgggagttgtatacgtttcggaaatttgggatagaaattgagttttttttttttttggtggtggtgatagtatttgtttagatttggtcggacgtcgtcggtcggagtatttagttcggcggagaaggagttcgttcggcgttggggattgggatttggagtttttttttttatcgtacgtacgtttcgtttcgcgtacgttcgttcgttcgttcgtgtttggcgtagttttatttcggatggtttttgttttttcgcgggttcgagggcgttggaaatttagcggcggcgaagcggagaggagtttcgcgcgttttcgttcgtacggttttaggtttggggtttgcgttggagtcgcgcggggagaggtcgtttttgcgatcgtcgcgttcgttttcgatcgttcgggttcgcggttagttcggttattagttatgggttttggttcgttttcgttgtttttggtgttgtcgtcgtcgcggttgttgttgttgttgttgttgtttttgttgttaggtacgcgtataggcgttagggtttcggagggacgggcgttcgagaaggggcgcggggttcggaggggttgtcggcgagaatatcgcgcgggcgagcggagagggttggcgtcgtcgtcggggattcggaattcgcgtagattggttttagttcggcggcgatttgggtggggtggttttttttttttcggtttattttttatttttagttattattaaatttgggagttattgagcgggcgttggtacgcgtcgggtgatggggaggtcgagatcgggtttttcgttttgggcgtaggagttggggattcgcgttttcgcgttgttcgtcgttttgtttcgcgtattggtttttaaattggcgcgtttaagtttttcgttttatcgtttgtatttcgtttatttttttatttgacggagatggttgaagatttggttaaggttatttcgggaagaggggagtcgtttcgggattggggttggagttggagcgttagtttttttttcggttgtagttttttagcgtttttggttgcgtcgttgagggattttttatcgggagagcgttttttgtttttttttcgttttttagaggagtttgttgggggaagtcggttttggttcgtcgttgggaggtttttgggtgtttgggagggttggtgggtagcgagagtcggggatcgggtaaggttgtagggaatttttggagggtttaggtcggcggtttgtcgtgcggttgtgagtttagagcgtttttcgttttcggtgtcgaggtttgtattatttagaacgttatacgtttttaatcga

SEQ ID NO: 7448 - DNA, 1545 bp, synthetic construct
  misc_feature 1..1545: note = Description of Artificial Sequence: Synthetic polynucleotide
  source 1..1545: mol_type = other DNA
cgcgttgtgagagttaggttatttaaatgttacgtttttcgtatcgtcggcgaggggataaatgattattttgatggattcggtagtttaaggaaattatcgttttcggagggatggcggtagagtaggtcgggtatgttgtatttgtttgagttggatcgcgtgtgagcgagtttacgtttttcgcgggttaggtttagttttcgtgttttttgataggtgaagttgagtatttttattaaattttcgggaagaataacgattttattttatattaacgtgattggaaattttaatttaagaattggatgtatcggtcggtttatttggggtttgtttagttttttattttatttcgcgtttttgatgtgttaggttttttgtatagatagtttatatatttaatttttaaaatatcgttttttgaagcgatgtttaattaggaaaatttgttttaaattgtatgattatttttcgtggttttttttttcgaatttttgttttgtttattaggtgcggtttcgtttcgtattcgtatatatttttttcgtcgttgttttgagcgtagcgataagggtttttatattttcgcggttcgtaatgtttcggggttaagtcgaggtagggaggcgttttcgtagtttttgattttataattcgcgcgcgtgtgtatcgagtcgcgggtatatcgcgaatatatatatatatatatatattcgtgcgttttcgtttttcgttcggttcgggtttttcgaatttattttcgaggcgtttcgggcgtagggttcgtttttttttgcgggtttttagcggttgttcggtagtggttcgtacggttttcgatgtcgcgttttcggtaggttttagagttagttggttattgttattcggtagttcggatttcgcgtttagggttgtatttcgcggatggagcgattttcgttttcgtcgttcgagtttaggtttgcgtttatacgcgcggcgtttatacgcgcggcgtttatttggttgtagtttcggttagggttagcgcgtcgcggttgaagggggcgttcggatttttttggggcggcgcgtagtcgggatagtttcgtatgacgttcgcgttttagcggtttcgggacgcggttttatttttaatttttggcggttttagtttcggtttttgtgtttcggtcggcgtcgttacgttatgggtttgtaggttgggagtagcgcgggtcgggaacgcggttggggagagttgggttgggtttttttatcgtcgttcgttcggggcgtttaagttggcggggcgtacgggtagtaattgagcgtattttgggggatcgagggggcggtttcggggaggggcgcggcgtcgcgttaagggggtgttttgttagaggttgcggcggaggaaagtgggagttagagcgtcgtcggagtttcgggaaggcggtgttcgttcggttttaggtcgcggttgtagcgtcgaggggaaagcgagcggaagttgcgcgttggagggagtttattattcggagttattcgcggggttcgcgt

SEQ ID NO: 7449 - DNA, 1545 bp, synthetic construct; identical to SEQ ID NO: 7448
  misc_feature 1..1545: note = Description of Artificial Sequence: Synthetic polynucleotide
  source 1..1545: mol_type = other DNA

SEQ ID NO: 7450 - DNA, 1027 bp, synthetic construct
  misc_feature 1..1027: note = Description of Artificial Sequence: Synthetic polynucleotide
  source 1..1027: mol_type = other DNA
cggtgcgtgtataggggcgtttcgggaggggtggtgatcggtagtcggttttttatttttcgcgtttattttttcgtttttgttttttttttagttggtggcgggtagtgtggtgatggtttttgaggaggtttgttcggagcgtatcgatttgatttataaaaattatcggaaattttgtaatttgttgatcgacgtggaggagtggggttaggtggttattattagtatgtttattcgttacgttcgtacgtagtttttgagttttatttagaacgtaagtgggtttagtttaggtagagcgggtcgaagtgtgtttcggggaggcgtttatagattcgtcggttttttcgtttaggaatttttattagaggagaacgcggaaaaagttttttacggtttagaggaggacgaggttaagggcgcggggtttgaggagacggtcgtcgcggtcgttttttttcgaaagttttatgttatggatttcgattatcggttgttgttgcgtaatattaaatttttgttgtagagtcgtagcgtcgcggtggtgatggcggtggcgtagttttatttttatttggcgtttaaggcggaagtgggcgttatcgttaaggcgttggtgcgtttgttgcgtagttataggtgcgtttcgtttttagtttcgttttttttttcgttttttgtttcgttttacgggttgttcggtttcgtttttttacgtttattagtcgtttttatttttgtttattcgttttatattgatcgtagttttgtttttcgtattggtttttttttcgtaacgatttgttttattttttttttttattcgttgatttttgttttaatcgaggggttcggggtgttttgattcgtttttttcgtagtgaggtgtagtacgttgtgttttagaacgtggttattatgtttattaagcgtcgggtgagtttgcgacggcgggttgttttcgttgttcgagggtcgtttttgcgggtattggaggcgttgtcggggttgggatcggggtcgg

SEQ ID NO: 7451 - DNA, 693 bp, synthetic construct
  misc_feature 1..693: note = Description of Artificial Sequence: Synthetic polynucleotide
  source 1..693: mol_type = other DNA
cggattcgttttatttgaggatttcgggtttatataggcgatcgtttcggttttagattggaagcgatattttagggattaaagtttttagttcgcgttcggttttagtttttgttttcgttttagagtcgtagcgagtagggttttgcggtatcgtttagagattggtttaggaggttttagtttttagcgttagtatatatttatcggttgtagtagttttattagttttgttttttttttcgggtttcggttatattaagagtttcggaaacgtcgagaattttgcgggtttagaacgttcgcgcggacgttttttttacggcgtcggaagtcggcgtcgagtttgttatcgggtatttttttgttgttttgacgacggcgggcgttgtaagagtggagaagttgtaggtgttgaggcgcggtgaaagaaattttgggagttaagagtacgaggagttggtgtttgtgttatatttgtatttgcgggtaagaaatcgttggtgtagcggcgggttagggtttgggagtcgatttagggtttaggtgtacggagcgggtttttcgggaattttgagagtggtcgtttttcggagatgaagggacgagggcgtagcgattttcgtatttatttcgttttacgaatattcgtttcgtattcgtcggttattcggggataaaacgtttgttcgt

SEQ ID NO: 7452 - DNA, 1496 bp, synthetic construct
  misc_feature 1..1496: note = Description of Artificial Sequence: Synthetic polynucleotide
  source 1..1496: mol_type = other DNA
cgttttcgaattcggagaaagtagttcgttcgtttttttattcggtagttagtttagtttattcgagagttgagttcgagaagtcggtttttgacggtgttggcgtggcgtttgttaaaatatgttttttgtattttaatttttttcggttattttttttgtacgtatagttcgttcggggttatttcggttttttagcgtagttttttcgatttttgtttttttttttttcgatttatgtttgtttaaggtcgaatgtaaaatttatttttaagaaagcgtagcgggtacggggggtatttagcgtgttatgtttcgtagtttttttttagttaagattagagttttagattttagattacggaaatgagtgttatttagattaaggattgcgcgtttgcggtttcggttttcggttttgggtgtttttttggggtgtttgtgcgtttcggtatttttcgtcgtcgttcgtgagtttgcgttttttatttatttaggtttgggagcgttttttatttaaggtttgggagtattttttaattattttcgttacgtttattttattttttatcgcggttcggattgtagtaaaatcgggtagcgcgagggttaaaaagtggaaaggagagcgttttttcgtgtcgtgtagttagttcgttaattttttttttttagtttcgattttcgtaattttaaatgtaatttttttttttcggtttcggtttttttcgggttgcggttagcgggcgtcgcgttgcgaggcgtggagcgggcgggttgtcgcgaggttgcgggtggcggtgtcggttatagtcgcgagttggcgagtgggtgggtgggtgggtggggaggagggagaggataggcggggagagagacgggtgtggggaggggagggagggggagatttcgtttttttgtcgtttttagttcgggcggggggcggggggaggaggtcgcgatgagggaggggaggagggagggaggaagggagggagggagtcgaggaagacgtttcgataattcgtgcgtttcgtaaggttcggagtatttgtatatttttgtagtcgcgcggcgagttattcgcggcggttgttgtagtttttattgtatttttttttttttttttttttcgggtttcgggtgtgtgtatgtgtgagagtgagtgtgtgtgttttgtaggtgcgtggtgtgttcgttttaattttgtttagtaggtgggatttggtgattttagtattattttttttttttttttttttttttttgtttttttatcgtttgttgtaattttgtaaagtttcggagtcggagagcgcgtttcgtttttagagttttcggattcggcgagttagcgatcgtcgagtcggttattatgttcggtagatcgcgttattaggcgtttttcgcggtttttattcggcggcggcggcggcggcggcggcgttcgcgatggttttagacgttgaaggattttgtatttgatcgttcggcgt

SEQ ID NO: 7453 - DNA, 5820 bp, synthetic construct; identical to SEQ ID NO: 7206
  misc_feature 1..5820: note = Description of Artificial Sequence: Synthetic polynucleotide
  source 1..5820: mol_type = other DNA

SEQ ID NO: 7454 - DNA, 699 bp, synthetic construct
  misc_feature 1..699: note = Description of Artificial Sequence: Synthetic polynucleotide
  source 1..699: mol_type = other DNA
cgtcgcggtttttaaaggtcgttgttgtgggtgcgtatattcgggttggagaaatttcggcggttttgtatcgcgcggtttcgtttgggttttggagggcgtattcgtttcgtttgggttgtttcgcggtttatggttaagcgttttttgtttagttcggaatcgggcgttcgagttagcgaataggtcggttcgttttagttggtcgagttcgattcgtcgcgcgttcgggttaggcgagcgcggcgcggcggattagttttgagttcgtagtttcgagggcgcggggcgggcgcgtttggggtatgagggcggggcgggcggcggtcgcgtttttaatttcggcgttgcgtgtgggagcggtcggattagggaattagcgttgtaatttcggattagtaacgttcgttaaatgagtgtttaatttcgattttttatgttttttagcgtcgcggttgagttttaggaggttttttggttaggtttttttcgcgttttggttttatttttcgggaggttcggtcgcggtcggtagagaatttttcggtttgtggagattcggttttaggtcgcgtcgtagttttttttcggtagcgtattttattggttcgggtagaggtttatgtagttttatagcgttcggagttgggagttcgtggattagagaaaaggaagtttcggatgtttcgtttattacgg

SEQ ID NO: 7455 - DNA, 1845 bp, synthetic construct
  misc_feature 1..1845: note = Description of Artificial Sequence: Synthetic polynucleotide
  source 1..1845: mol_type = other DNA
cgtacgcggcgcgggattcgagaagagcgtttggtagagtataaattttatagaagaagagattttttgttttttttgagattttattttttttttgtttagggttaggaagtttttttcgggtttttttagaatttcggttgtttttttatttgtcgtttatcgttttttggaggtttcggagaggggttcggttcggcgagtcgaaggttgcggggcggggcgcgagttttagtttttgggatatatagtcggtgcgtttcgcgttttaagtgcgtattttaggaagttcggagtcgggaggattcgggttcgcggttttattttatttttggcgaggtcgggagaaaaaaagcgttagatcgttcgtttgagggtttagaagtttatcgggcggcggtatagattttttcgaaatgttttcgttttcgcgttgcgagcgtataggaatttagggtcgtcggggttgtcgtggtttggttgaacgtttaaagttaggcgagggcggggggttttagtttagttatgcgagtttttttttagtggtgttagtttttacgtcgggttttcgggtcggcgggaggcgcgtgtgtttgtttgtgtgtgtaggggatatttcgttttttagtagtttatgtagaatttcgtttttcgtttcggttttaggaattttttttttagtttagagatttttgcgcgttttttgtttattttgttaaggcgagaaagcggtcgtgttggagataaagaaatttttgtttttttttattttcggttttttcgttcgttcgagatatttttcggcgttttttttcgatttcggcgatattgcgtttggatacgttaggtaggggggtagggtgggcgagttcgtttttcgacgcgggttagttgggggtttttcgtgaatttcgttcggggatattttatagtagtcgcgtttttatttttttttttttaaatcgtttcgggtttttgtcgtcgttattttttgttaaatcgtttttatttttttagcggagttatagcggggcgcggcgtatataaagggggtcggagggtggagagtatagaaggagggagagatttcgttagggttcgtggtacgggtttgggagtagttatttattcgatttttttttcgatttttgagatgtttgcgaagatgaggaagattacgagtagcgtgagcgcggttagtatttagtttcggaattgtagttgtatggtgggttcgcgttcgtcgggatttacgcgggtcggcgcgaggagtaggggtcggagggcgtagcggcggacgtcggagttttcgcgcgtcgcgcgtagttgggtagatattttgcgtttcggacgagttcgggtcggcggcggtagcggtagcggtagcggtagcgataggtaggggttgtttaggcgcggcgagttcgttcgttttttttcggttttcgtttgtttttttttttttttttttttttttttcgttttgcgttcggtttcgcgcgtagtttgatagttttgtttcgcgtttttgttcgtttttttttattaattttagcgtttaggcgttagtttttgtttttttcgtttggttttatttagttttcgagggcgcggggatgtagtcggacgttatttttggtttagagagattgggttttggttatcgcgagcgatcgggtacggagttgagtttagggaagtgcgcgtatcgttcggcgtattttttaggttggtaaacgttttttttcgttcgttttttgtttagttttttcgttttttcgtaaagttttttcgatataaagattaatatttggggatagtttttagcgcgcggcgagaaggcgg

SEQ ID NO: 7456 - DNA, 1844 bp, synthetic construct
  misc_feature 1..1844: note = Description of Artificial Sequence: Synthetic polynucleotide
  source 1..1844: mol_type = other DNA
cgattagagattcggcgtacggagcggagtttttggtttttatttgtattaatttagttcgcggtcgtagtttttgttaaagaagtggggtttcgtgtttaaggttcgtacgttcgggtgtattcggataaattttagtacggttcgggtgttttttttttttacgtttataatgagggtttggggtaatcgtttggtatttagtttgggtgagtcggagtggttggaatcggagaggcgaggggcgggtacggcggcggcgggcgcgttgggagcgttgggttcgttgggcgtcggttcggagggattataggggcgggatttttggagaagtttttggtcgttcgcgttggggtcgcggaggtagcgaggcgcgtcgaggaggcggtttcgatttaggtcgtcgtagtagtataggaagttgtaatataggtaagtgtaggagagcgagagcgtgaaggcgaagagtagtttgcgcgtttttcgcggttgaggtggtttcgcgcggtttaggattttataggttatggttttatgggttcgcgtcgggggttatggttttcgagggggtatcggcggttgagttgttgtggttttgcggtcgtttagagggttcgcgtggcgttgttacggttacgcgggtcgggcgttgggggcgtcgtttttttcgggggttgttgattagggtgcgtatagtgttagggggtttcgggggtagcggtttttcggggaataggcggttgtatttttagtatttttcggttttaggcgatggggtttcgggtagtcgggcggttcgggcgtttttaggtttttacgtgcgtcgggttcggagcgcgtttagcgttcgaagttttatttttgattttcggagcgtcgtttacgaaacgttcggcggcggcgcggttgtgcgggttggcgggtggatcggacggtggcgttggcgtcggtcgcgatttggtttttcgggaaatgtcgagcggagcgcgttgtcggttttatttaaggagtggtttgacgttagtcgcgcgggtttttcgagttcgcgtcgcgtttagggatttggttcgttttttgcgtttttatttttttattttttttagaaatatagtacgcgggttttttttatgtaggttattttttacggagttttaggttagttttggggcggtgaaacgaaggtgttaaggtatagtattttttcgggaggttggatatttttattacgttggtttttcgatatttagggatacgaatttaggtcgagatcgcgtcgatatgtagattagatagatttagacgtagacgtaggtattttgttttgatgcgcggttttattattttgattcgtatacgtacgtataggtatagaagtatacgcgttttagttcggatatatttttatatttacgcgggggtggggaggagaagttttttaatttgggtttagatatatcgataaggatatttttttcgttttcgatatttcgttaaatggatatatatagttcggaatcggatatcgagcgtacgtacgttttggattgggatacgcgttgtagacgggatgggtggaggagtcgagcgtgagtgagatttcgtgattatttatttagttttttagtttttagcgcgttgatttatatttcggcggttcgttttgtttcgtatttatgaggtacgcgcgtattttaatttattgttattttattttttttcgggtttgtcggagagcgagtttcggagcggtagatttcgcgttaggagggttttttttttagtagtcgtcgtttagcggtagattgtttttcggggagttgtttagggtattagagggtcgtcga

SEQ ID NO: 7457 - DNA, 1480 bp, synthetic construct
  misc_feature 1..1480: note = Description of Artificial Sequence: Synthetic polynucleotide
  source 1..1480: mol_type = other DNA
cgttttcggcgggttttgttgttttacgttcgtcgtggggatttttttttaggagcgttttgtttgggattttttttgcgttttagatttttattttggttcggatttttttcgggggcgtttttttatttttaggttttcgttcgcgttcggcgtggcggtttttttttttcgtgcgggcgggtttcggaatagtgtcgtcggtcgtttgtaggtgtttttttacggaggggcgcgcgtttttgcgtcgtggtcgttgttaggcgttagcggtttttagtcgaggtgtattcgcgtttcgggtttcgggcgcgtcgtagtcgtttttttatcgtcgttcgtttcgttagttcgtttcgtacgtttttcgcgtcgcgtttttatttcggggttggggggggtatgggttcgcgtcgcgttcgtcgtcgtcgattttaggtattcgagtttcggggcgcggcgggtagcggtcgttgacgcggggcgttagttgttaatttcgcgcgcggagtttttcggcggtgtagtttcgtttcggcggcgcgggcggtatgaagattagtcgtcgcggtcgagcgtttttggtcgtggttttgaatttgttggcgttgttgttcgttattatcgttttttttattacgtattggtgttagggtacgtagcgggtttttaagtcgggttgcggttagggcgggcgcgttaattgttttaattcgggcgttaacgttacggttaacggtatcgtcgttttcgtcgtcgtcgtcgtcgtcgttatcgtttcggggaacggtttttttggcggcgcgttttatagttgggagatcggcgacgatcgttttttttttaggaatttttatatcggtatttggtattcgtgcgaggaggagtttagcgggtttggtgagtgcgcgcgggcggcggttagttcggtttcggttttttcggggcggcgcggttatcgaggttcgagtttcggattcgttcgtttttttttcgtcgtttgggtttagtttttagcgtttcgtttggttaggggcgacgtttcggggtagggggcgcgcgtcgtttcggggtcggggattagtatggggggacgtgcgggacgtttcgtcgtggagaggtgtaaggtagagtttttattcgttgcggacgtttcgcggttttggggacgttttcgcgtttcgggaaggcgtttattttcgttgtcggtcggaggggcgcgcgttgtttttcgtttttgaatttatttttacgttcgttttttttttttttttttttcgcggggtattagatgtttttatttatttcggaacgtttttgggggtgggggtgatgtagggatttttgttattagtcgttttttttgtcgtagatttatagattcgggagttttttatttttatcgttaatttacgtcgaattttttagacgggagtggggagtgggggagtttcgcgggttttcggaaagtcgtattcgt

SEQ ID NO: 7458 - DNA, 5065 bp, synthetic construct
  misc_feature 1..5065: note = Description of Artificial Sequence: Synthetic polynucleotide
  source 1..5065: mol_type = other DNA
cgttaagcgtttttttcgggtgcggttttttttcgttagtgaggtcgcgatttcggcgtagttgtcgttttatttcgggttatttttattcgttattgcggattagtttttaagtattaggttttttggcggaatttgtaagtttaaatttcgttattcggattttttagtagttttttttttattttatttttatttagagttaggagggtgttatcgtacgtagagcgcgtaggtttttggggtgagtagggcgcgtggagggattttaggagtggtattttattttcgttcgtcgtttattttcgattcgtataaaaataaagaataatttttattttgtttttgtttttattgatgtatttttttgtatcgcggtacgcggagtttcgttagcgttttgatattgtagcgttcgtattagcgaattacggaatttgggatcgagataatggttcgtaattgatgtattgttattaataataaagattaattttttttttttcgttatttcgattatttttttttttttattttttttttttttattttttattttttttttcggggttatcgagggaaagaaaataaataagaaattagcgggggacgttaagcgtagatcgaaacgttcgtttttacgtcgtcgaggacgtaaaaaaacgaaaaaagttattaaagtttggattttttaatttattcgtttttgttcgtttatttttaattaagtatcgcgtagttgtttttcgtatgtttatttcgtttggttgtttgttgtggtgtttttttggggggggggaattttttttttttttatatttaattttaaattatacgtagattaagtaataaatacgtgtgaagttattttcgggagttttttgttgcgtacgcggcgcgtattaggagaaaagttttgcgggatcgttagtttcgttaggtttttggttgtatgcggtgttcgggaggttcggatttttaagaagttaagattgttagagaaggatgcgggcggttttaaatacgggtatatttcgggaaaggagtgtgtaagtgtatataaacgcgttcgtgtatttgggatagtgtggattggtgggtgtgcgaggatttttgtttgtgagatggaggcgggtgcgggatttatacgtgttttcgtatacgtttttcggggtttgggagatgcgagtcgtttatattttaggagtgcgtagatttatttttgtcgagggatttttttaaatatttagtgagaaataatggtatttgaagtattatttatggaaatattattatttttattttttaatattagttttattgatagtttcgtttgtttttttattaaaatttattgtatttattaggatttggcgagaacgggagagcgaggcggagagggtgtgaatgtgtgtgttagggagtgagcgagggtagaagataagtaagagaaaaggtggaaaacggacgagtagggagagagaagggagaagttatattaataaaaaaaaataaagttagtagatgaaaaatagaaatatttatcggtatatatatatatttatattttaaaagaaaagatttaagaagttaagagaaagggaagggttttttatcggagcgtagtataggttcggagtatacgaagtcggttcgggagatcggtgtttatttcgcgcgaatcgatcgtggtatcggttagatttaagggcgttcgcgaattggggcgtttttatgagttttttttttttttgatcgtgagatagggtagggattgtgtatttgtatttttttttttttttattatttagtcgaagtttagtttagtttagtttttcgggcgtaagatttcgagaattttggagcgaggagatttcgaggcgcgaggggaaagagttaggttgagtcgcgtatcgagttttaggttcgcgggcgtttgagttcggtagagggatcgggtttttggttttgggttttggggcgagggtagggaggttgtattttagtttgagggagatggtgatagagcgaaaagttcgggcgtcgcgttcggtaagtgtttaaaaagtggaggcgagtttcggcgtcgttaggtagtttcggatagaatatttttttatcgttttttttttatttcgtttttcggttttgcgtcgttatttcgtttcggaaggttggggcgcggttttttttttagggcggggtgtttaggggttttagggattggtttagtttagtgtcgggttcgttcgggttgtgtttttttaggtcggtgttcgttgttgcgtttagtgtgagtcgtagtttttttttttttttcggtcggagttgaattcggagtttaggtcggttttcgtttttcgttcgttcggggttttgcggcgttatcgttgtcgtcgttttttcgcggagtgacgcgttttgtagttaatcggggtagtcgggggggaggttcgggaggggttttgggcggagtcgggtcgtttttttattttacgggttcggggttgtttttttcgaaaattttagttttaattgttttgggaatgttcgaggtagagaaagggagcgagggagtaagtaagaagttggaggattagtgtttttggcggggaggggatggggtggcgggagaattgtttttttttttagttataaatttattaggtttttaaattttttttggattttttttttcgcgttttcgcgagttcgggatttaggggatggagaattcggggcggaggagcgtcgagttaggcgggagggaggtcgagtcgtgggcgggaggcggatcggcgtggggttggtttttttttattcgtttatttttttttttaatgggggtgggggtgggttgttttttggtagtttttaaagaaacgaagaaatatttacgaaacgggacgtttttttttttgatttcgtcgcgggatttttttttttcgcgggtcggcgcgtttcgttttcgagttgggaagttcgtagcgcgtcggtagttcgggtttttagttttcgtcgttcggttttattttttattcggggcggtttaatttcggggagggtatgttaatttgggtcggtttagttcgggattgtgggggggggcgaaggagggagggaagagggaggggagagggagagagcggggggcgtttgtcggggcgtcgggttcgtagtggagaggaggtcggttttcggcggtcgggtcgcggagtttcgggcggtcgtaaagagggttaatttagtgtcgggcggcgcggcgcgtagagttagtttcgcggtcggtttattgggttagcgcgcggagagataggggtttgtagtaaattacgaattaattgattaaggcgagcgggtttgaatagcgttggttcggtgttaatcgttttttaaagagtttttttatgattaatcgtaatgtattattgataattataattatagtaggatatatgcgcgttgcgttcggggtcggggagtcggggagggggcgggcgggtcggcgggcggggggagtcgtcgtcgtcgtcgtcgttcgattttcgtaattttgagaagatttttttttagtaattttttattttgttttagttgatgtttgagttagtatgtcgcggaggaagtaagcgaagttttaatatttttaattcgatttcgaagtggtttcgttttttcggcgagatggtgagtgtttcggttcgcgtcgtggatatatatatacgtatttatatttacgtatattcggatttatttatacgcggttggttttcgcgttttttattttatcgtcgtcgcggtttcgattgttttttttattcggcgtaattttttttttttttttaatttttaatgtgtttttgttgggttttttttcgttgtttcggggaaagcgagtatatttttcggtaggattttttcggagttgttgggttttttcgggggaaggagggcgggtatgtcggtttggttttttcgtttttgttttttcggggattttagtcgcggttaagattcgggagttttatgaggcgtgggtgcgggtggaggtcgtttcggtttgatcgtacggggtttttagcgttttcggcgtcggttttagggtattcggttcggttttcgtcgttcggttttgttgttagcggtaaggaagtttatttcgggcgttgggttgaatttcgagcgtgggggagttcgttgcgtttttttgtttttacgtatattttttttcggtttgcgaggtagaatcgggtgtttttggaggtttagagttgtaagaagatggggattggtgtcggggcgttagcgtttgattcgttggggttgcggtcggggtggagagtgttgttggtcgttagttgtttcggagacggtgtaaacggacggggaaagtgtcggggtttggttcgtaaaatttattttcgtatttttttttataatatttgtattttttgttttttaaaatttttttggtcggtatgcgttttttgcggatcgtggtgttttttatttttaggggggttagggaagaagttatagaatagttttttaggtttgcgggtggttagttagagtggaattttttttgaaataggggtatttgtttttttcgatggaggcgataattgtgggtttcgaaggggttgaataagtttagaataaagtttgtgtgtgggggttatggtagagagtggaagagattcgggtagggagttggggtataaagggaggatatttggaatttttttttgtttttaaaggtgttttacggtatcggttttaaagtttttaggtttagcgttcgaggcggtgtagcggcgttcggattcgggttttcgggtcgtttcggtacgatgttggtttttcggttgtgggaggacgtataaggagtaatttcggcggggttttagcggtttcggatgttattcgggatgtttacgttttaggcggtattttggggtgtgaaggagggagttgggtttcgatagagtttcgaagcgtgattttgatcggtattttagtttattaagttgcggtcgttcgggtttttaggttttcggttcgt

SEQ ID NO: 7459 - DNA, 2372 bp, synthetic construct
  misc_feature 1..2372: note = Description of Artificial Sequence: Synthetic polynucleotide
  source 1..2372: mol_type = other DNA
cgagggacgtaggatgaaagaagttaagagtgtcgttagggtttgcgttagcgtcgttagattttcgggatgggggagttttagggtacggcgttagcggatttacggagaaggagaaaagttttattgtcgtgtagaagtttaggttcgggtgagacgtttgcgaaggttgttagtagcggaagagaaggggcgtttttcgtgttgcgtagtattcgttcgcggtaggtgggcgcggagtttagagttgggagttaaacgtaaacgttggcgagaagttttagtttttttcggtagtttattcgttgcggggaggggttttttacgtttttagtttttgggagattgtatcggaggtcggaagtaagtcgggcgaggatgaattatttcgtttaatttttttttttcggttttttagttttcgtacgtcggttttttttagagattttgtagtcgcgagcgaagattgttttatttttagattttatcgaattttttgtggtttgcggagacgaggagacggacgggtttggtggttaatgagagtttcgattttttgtttttcgtttaatgggtcgttgtttatgggtcggggcgggattaggagggtaggtaggggcggttcgggttggcgcgcggcgcggcggttacgcggttgcggtttatagagttagcgtttttttgggtgttcgtgttagtgttgcgcgggaaggtattattattatagtcgtcgtcgttggttagggtgttggataagacgggttcgtcggttatttcgttagtttaggtattcgttgtagtcgtcgttgtttttttttagatcggtttttatggaggagatggaagaggagttgaaatgtttcgtgtgcggttttttttatcgggagtttattattttgttttgtttttataatttgtgttaggcgtgcgttcgtaatattttggtgtagattttagagtttgaatttttttagagttatcgggtcgcgggtttcggggttttcgattatgattatttggatttggataagatgagtttatatagcgaggcggatagcggttatggtttttacggggggttcgttagcgtttttattatttcgtgttagaagttttttaacggcgttcgcgtgtttttttcggttatgtcgttatcggttatttatttgttatcggttttggtttcggtgtttcgtaatttttgtattatttgtttttagtgttatcgtagttttattttggatgatcgggggtttcgcggtttttttaagaatcgcgtattggaaggggtaattgatcgttattagtagagtaaagtcgcggtttttaagtgttagttttgcgagaaggcgtttaaggaagttatcgttatgtgcgaatagtgcgatgttttttattgcgattcgtgtcgtttgcgttgttattcgtttcgggggtttttagttaagtatcgtttggtgttttcggtttagggtcgtgtgagtcggaggttgagtttacgtaaggtttttatttgtatagattacgagttggagaattatagtatgtattgcgtgtaatgtaagatgttcgtgtgttattagtgtttggaggagggtaaatattttagttacgaagttaaggttttgggggttatgtggaaattatataaggtgagttttaagaaaatttatttttaattttttgcgttttcgattattcggttttgtagtagacggttttcgttttttgcgtatagcgtattttagtgggggcgtaatgtaggtgttttcgatgtttatttttttggtttggtgtattgtaggaggtatgggggaattttaatcggcgtacgggggagttgaatgtttttatagagttgttgcggggatgttttagagcgggtttttcggggcgcgttgtttgcgagcgggatttagggcgtttttttttcgcggcgggtttgtagttagtggtcgcggttagtgtgtgggaaagtattgtatagttgggtagagtcgcgttagtgtttagggtcgttaggtacgttcgagggtagggcgggttgcgaattttcggggagggattgggatgggggcggtggggtcgcgcggacggcgggagtttgtcgttgttggataggcggatttggtgaggtacggcggagggtcggggagacgtcgtaggcggaatattgatgagttcggttttgggttagatttggttttcgagttggagagaacgcggggttttggtgttacgtgtttaaaagatagagcggagagggtagttagcggtcgttatggtaacgcgacgtgtaggtttgggtttgaattttttcggagttgggatttgagattagagtgttaggatcggagtttgcgtagtcgcgg

SEQ ID NO: 7460 - DNA, 2372 bp, synthetic construct; identical to SEQ ID NO: 7459
  misc_feature 1..2372: note = Description of Artificial Sequence: Synthetic polynucleotide
  source 1..2372: mol_type = other DNA

SEQ ID NO: 7461 - DNA, 2372 bp, synthetic construct; identical to SEQ ID NO: 7459
  misc_feature 1..2372: note = Description of Artificial Sequence: Synthetic polynucleotide
  source 1..2372: mol_type = other DNA

SEQ ID NO: 7462 - DNA, 2142 bp, synthetic construct
  misc_feature 1..2142: note = Description of Artificial Sequence: Synthetic polynucleotide
  source 1..2142: mol_type = other DNA
cgtagttggtttcgaggttgtgcggtttttagttttgcggagtagtttaggttatcgttttcgtggtcgcgggggagggtattttcgacggtcgtagtaatgggtaagagattagggtttttttattttcgcgattcgtttttttttgtttggtaattaagcgggatgttttattttattttttaaacggagcggattatatatagtagtattttatggttttttttgttgcggttttttcgggggaaggtatttttagagggtggttaagttttttttagcggtcggttttcgggagggggatagaatttaggagttagttttttgttttcgtataaaggttcgtttttttttagggcgtttttgggtggagcgaagcggtcgaggggattacgataatgtttttttgtttttcggatcgatggttaggtttttagagttaggagcgttcgggattttagggtagggagtaaagtttatatcgtaatttcgttattcgttcgcgttttgttagtttgttggggttatagcgcgtaggttagtagtcgtattcgtcgttgcggggttttttttgcgttgagtttattttttgtaacgtcgttgttttaaattttgcgggttatttggtttcgggggtggggttttttgggggtcgcggggtagttcggatgagaggatgattcgggagttttttgggggcggagtggaaggggtagttttaggtagttttggttaggagtttttatttcgttagtttcgttgttttagcggtcgttgttttagaaaagttaacgagaattagatgtggtggttattgtcgaatttttttagagtcggtgattggtttttagtcgagggttttagttaattagtttgttgggtgggtttggagtttcgtttcgtttaggcgttcgcggagatttaggttcgaggttggcgcggcgcggagagtgggttggaggtcggggcgggacgcgttgtgtagcgggtaagcgtacggtcgagcgagtatggagggggatcgggtggtcgggcggtcggtgttgtcgtcgttattagtgttattgttgttgtcgttgttaatgttgcgggtcgcggcgttgtatttagacgagttttttttatacggggagtcgtggggggattagtttttgtaggaaggcgacgacgaaagtttagtcgtggtgaagttggcgaattttttgtatttttacgaagttcgatttagtaatttttacgtaagtttagtttttttttggtatttttttcgtagttttttttttggggtcggttttacggaaattttgtttttagaggggaggaaatagattttatttttggagttttttagtatttttgcggtggtattcggttagagagcgatgtcgttgtttgtttcgttgttgtaggggagtaagaatgatttggaggggagagtaagaattgttcgtagttacgtacgcgttttaggtagaaaaggtggcgttgttagggcggttagcgggttttgtagttaggatcgcgagaaggttgtgttcgtttgcggagttggggtgttttttttttagatttggaggtttttttttcgaggatatggggtttcggggttgtgaggggagtgagaagataggtgaacgagttttagggtttttggatttattgtagcgcggagttgggatagtcgtaaaagttgcgtttgtttttttgaatttagattttttggttagtggggaaggagagagaggttttttgtttaagttagtttttttttttttttgcgcgaaagggtagcgtttttgggtttgagcgattgttatttttttgtttttttttttttttaggtgggtattaacggtattatttttatttaggatttttttagggaaacgtagtatgtggattatgatttttttatcgatttttcggttatcgttttttttttggcggatatcgatacgagttacggtagaggtcgagttttgtatcgagaggatatttttttcgtagtgttgggtttggtcgttcgttatgtgcgcgttggtttttcgcgttttgcgcgttttatttttatttacgtttttttggttatttgggagtaggtaggcgtttacgaggaggttaagcgcggggcgttgttttcgg

SEQ ID NO: 7463 - DNA, 544 bp, synthetic construct
  misc_feature 1..544: note = Description of Artificial Sequence: Synthetic polynucleotide
  source 1..544: mol_type = other DNA
cggtttttagtcggttttgtgttgttcgttgcgaatatagttcgtgggttatcgggtagtcgagttatgtaagttattttgatttttaaaaggtagacgtataaattcgatttagaattcgaggcgaattttgaatttatagcgttaaaaacgcgtagtgttttcgtttgttcggttcgttgaaggttggttttgggtttgggggtagtgttcgcgaagggttgcgatggtaggtttcgttgttatacggtatcgagggttttttcgtttcggcgttaggcgtacgtttttttgttatatttttcgcggggcgcgtcgttagggttatttgtttttttaagtttcgttaggtagttaagggtgaggagcggagagggattcggtcgttgttgtcgcgagttagtataaaggtagcgtttgaaatcgaattttttattttgggtatcgcggtttttttttatttttggttttcgcggtcggagcgtatttattgttagtcgttatggtcggacgagggggttgttcgacggtcgtttaggttcgg

SEQ ID NO: 7464 - DNA, 2002 bp, synthetic construct
  misc_feature 1..2002: note = Description of Artificial Sequence: Synthetic polynucleotide
  source 1..2002: mol_type = other DNA
cgttttcgtttcgtgttaagcgggtttaaggttcgaggttttttcgtttataatttcggtgttcggaatacgttttcgaggggtcgtgttgtcggggttattattcgcgattggatttcgcgtcgtgttgtttttttcgggtttcgagttcgtttagcggtttgtacggtttaggtttgagttgcgggttttttttgtggggcgcgttgggagtgagttttatttttaaagtttattttaacgttttaggtatgattacgacggtagaggtcggtcgtttattttcgttttttttttcggttagagcgtttttgtcgggagtcgacgatcgcggtttgatttcgggttttatcgtttattttcggttttcgttttttttttacggttaggggttatatatagcggacgtttcgtttttagtcgtttttttgatttttgaatttgggagttagcgtgttcgttggggtatgtattgttacgggtattgggatttttttgttgttgcggggaggagtttcgacggtaggtgggaagatttagtttgttcgcgttttcgttttttagtttttgcgattcgggtcgaggtttttagtttttgggttttttcgtttcgggtttgagggaggggtcgggttttcgggtttgtagattcgttatcgcgcgtgcgtatgcgtcggtcgcgagttttcgggtgtaggtttgggcggtttcggttcgcgtatttgtttaggcgttgcggtttagcgcgttttaatttttagttcgggcggagagcgggggcgggattgaagtatcgtgttttttaaagtattttttcgtcgtcggtagttttggtttcgtaaatgttttagcgcgtttaggcgtacgtagagattggcgcggtagttttcgggttaacggtacgcgagtaaagttggttggcgatttgggatacgtagtagaagttgaggttgtatcgattttcgtcgtttcgggggaggtatgggttcgggtaggtttaggaggaagttgtatagttcgaggttcgggcgggagtggcgggtcgcgggtaagggaacgtatatttggaaggggttaggatttcggttggagtttggttttttatggcgaggaagtcgattgggaagggttttttggcgaggtttttttgttgtgttattttttttcggtagcgtcgggcgcggggaacgcggggttgtatcggggcgggggagggggttttattcggcggtttcgaggattcgattttggggtcgggttcggcgggtaggtttgtttaggagttagttggtaaatgtagcggattgttacgttattttattgttattatttattgtaaattattgttttaagttttcgggagaattcgtcgaatttgagaggggggagggggatgggggtgggcgcgtaggaagttttataggtattagggattggtgatttaggatattagtttttcgagttttttttgggaatttttagtatttagattgtttttgattgtagggattacggtggggcgttttttttttaagtttttttcgggatatcgggcgcgtttttttcgtttttgggttagcgtatatttttttacgcgatgattagtatagttattgtgaggttcggttttggtcgcgtttgttttttgcgagtgataataataaaaattattggaattgtaaggaagtttttggtttcggttttttagtcgttgttgttttgggtgtttcggttgcggaaagatttcgtagtcgggttcgatttacgagtggaatatcgggttgcggatttagtcgggtttataggattggcgcggggtttcggggataggtttcgtagggtttttttgcgtatcgtttgggacgtcgattttgttaatttggaggataatttttgtttttattttattagtagatttttaaaaatttagtcgtcgttgaaacgtgttttttattcgttcggtttgtttgtagtttttgacgagtttcggtatagttttcgg

SEQ ID NO: 7465 - DNA, 983 bp, synthetic construct
  misc_feature 1..983: note = Description of Artificial Sequence: Synthetic polynucleotide
  source 1..983: mol_type = other DNA
cggtgtcgcgcgttcgtttgttgtttggagtttttaattcggcggaatttaggttaggacgcgtcgtcgttttgacgtgttgtcggtcgggaggcgcgggcgttaggttttaacgattagggtgggtggtcgcggggtaggggttggatttgaattcgtttttcgggggttttggatgcgggatgcgggatgcgggatgcgggttcgattttttcgttgttggtcgaggagcgttttgagagtttttttttcgcgcgcgaggataaatatgcgcggtttgttagttagtgcggcgttgttttttagttgatagggtgacgtttcgtttggaggtttggagattggttttttgatttggtttttttcggtagtttaatgggtaaagtttttcgttcgtttagaaattagttttttcgcgcgttttttttgcgcgcggcgaggtcgagacgtttttcgcggtgatagcgtgtaaggcggagattcggcgcgtttttagtttagggaaagtttaggcgacgcgatcgtaagttcgagtttaggtttttcggagtcgttagggcgcgtcgggttgtttgtttttttgtttttttttgtaggaatttttcgtcgttcgcggtcgggatttcgggtttttttcgggcgtagattttagttatcgttttgggtcggggtttttttttttttgaaattcgtgcggaaggatttttttcggggtttttcgttttggttttagatatttttttttttagatttcgcgttttagatgcgttgtttcgtagttttttgatagttgcgagtttacgaatttcggcgggagggcggcggcggcggattgatatgtttcggacgcggttgcggtcggcgggtagttcgcgggggcgatgagtcgttgcgatcggtgaggcgtcgggcggcgggggtatcgcgtattttttttattttttttttttgtttatttcgttcgggaggtcgagaggaaacgg

SEQ ID NO: 7466 - DNA, 947 bp, synthetic construct
  misc_feature 1..947: note = Description of Artificial Sequence: Synthetic polynucleotide
  source 1..947: mol_type = other DNA
cgttcggtgtttattttcgggattttgaatttcgttttttttttattttttgttagattcgcgagggttaggaagggttttgggaggaagcgggagcgtagcggcggggtatggaagaagagggttgggggcgcgcgttatttgtaaaggttttcgaggtttttttttagttttggtggtaatttcgtttagcgtcgcgtttttttttagatttaaatttttgttgggtttttcgggtggcggcggcggcgacggcggcggttgttggagttaagttttgtcgttcgtagcgtcggggcgcgggggtgcggaggtcggagttttagagcggcgcgcgttttttcgtagcgggtcggggtcggggcgtttagttcgtttcgtttgttttcgtttacgttttttacggagttgcggtatcgttttttttcgtttttcgttattatcgtttttagggttcgggtatgttatttttttttggtttcggtcgtcgcgattttcgtttttttttttttttcgttttttttttttcgtttcgttaagttaacgaattttaaaagaagtatagcgagcggggaaggcggtagaaagttgtttcgcggcgtcggagtttttcggatttggaggatttcgggattcggcgggagagttaggcgggttttttttcgacgcgtgtgtgcggatagttcggagtcgggcgtgcggcgttgcgcgggggcgggcgtagggttcgttttaagtgttgcgttcgttcggcgtgggtttggaggttgtttagattatattattgttttaattcgacgcggtcgggttaatgtaggcgtcgcggtttttatttttattttttttgatattttcggatatgtttatagtaatgaattcgcgggatcgttttcgtagttttcgcgtttttttttttttttcgtttttcgcgttttggcgcgtttcgt

SEQ ID NO: 7467 - DNA, 1362 bp, synthetic construct
  misc_feature 1..1362: note = Description of Artificial Sequence: Synthetic polynucleotide
  source 1..1362: mol_type = other DNA
cggttttcgggttttgcgaagggagttttgttcgcgaggcggagggtttggtttatcgagaagcgtattcggaggcggttgaggggcgcgcggggtacgtagtagagtcgtagttcggttcggattcggagcgtcggagtcgtaggaaggcgaggagaaggaaaaaaaggaggttgtcgtcggtttttgttttattttttcgggtagcgttgattcgttggtcgtcgtcggatagggttggtcgtcgggcgcgggatttcgtgcgcgttgtttatgttttcgtttgtcgttggttaggtgtgcgcgtagtttgttggtttttgggcggtattcgggggttttttatgtttcgcgtcggggttcggcgggaggatttcggagaggtagcgcggagggaaagagagagagatagtatgagaacgcgtagagttgtatttcgcgggggtcgggcgttagtagtatcgcgttgttttatttacggcgcgtttgtttttcgcgttgcgcgtttagcggggcgtcgagttttagaaattttagtatatggtcggttcggcggttacggtggtcgtagttgttttgtttttcgagcgttttttattgttttttgttttaagttttagagcgtagtttattagcggcgatcgcgatcgtagcggcggggcgtttattcggtcgtaagtatagtagtgcgtatttgcgggaaaggaggaaggggttggcggcgtcggggtttttataggggaggggtatttcggcggtagtaatcggcgtaggttaaggtattttgggtcggggttgcgcgcgagttaggtggtggtaggtcgggattggggagggtttttgcgtttttcgtttcgcggcgtcgttgttgatgacgcgcgcgggttttttcggtttcgcgtttgcggagttagtttcgttatttagcgattcgtttcggggagttttcgttgacgcgcgttgcgagtcgggttgcggtagtcgaggggcggggagggaggggagggggagttttagtgcggggagggtcggcggttgcgggttaagttttttttttcgttttttttttcgcgttggggagggggttcgggaaagacgtggttttcgtttggttttggaggatgggaggttttcgcggggcgggggggacggagggaggtattgagtgtttttgttttcgtagtggggatgtagtagtaggtggcggttatgtggtttgtggaggttcggtatttagaggcgcgcggtgagttcgtttcggcgggagcgtggcgaatgtggttttgggcgcgcgggtgtgtgggatacgtttttatttacgtggcgtatatggggatttggggacgcgggtgaaagaggcgt

SEQ ID NO: 7468 - DNA, 1092 bp, synthetic construct
  misc_feature 1..1092: note = Description of Artificial Sequence: Synthetic polynucleotide
  source 1..1092: mol_type = other DNA
cgatcgcggcgcgtcgacgtttggcgggttacggttataaagcgggttttagagttttttttaggcggcggtaaagggggcgttcgaggttatcggtaagagatagattattggcgtttcgggaaaatagagtggggaagggcgagattgtgtgtttatttacgttcgcgcgggtttgagttggttcggttttggagggtttcgggattttagaagggggatagtagtgggggatgggtagaagggggcgattcgggttgtttaggtttttcgtagtttttttgttaacgagaggggttcgggcgggaatagttcgagtcgcgggggtgcggggcgcgtagttcgttttatttcgggagagtcgcgatcgtcgttttcgacgcgtgtattaagtgggggtgttcggttcgggataaaggatcgggacgcggatcgcgggcgggcgttattgtttagttttagcgtggagggcgagatcgtggtttcgaatttttttaaatttggcggttcggggcgcgtgggggggacgtttcgttatttgcgcggttataaaggagagatttatggtgtcgttgtagttagcgttcgagttttcgttgttgtcgttgtcgttgcgggttagtcgtttgtatagttggcggggatcgggttgagtagcgagcgttcggagatcgtacggcgtattcggttgtttttgggtttttggttttagatttttattaggcggagggtttcgagtgcgggggcgggcggggcggggtggggcggggttcggcggacggggcgtttttttacgtgattatttttcgttttattttcggggcggggttcgttagaaattttaagcgttcgtaatcgttttttttcgtgggcgggatggggaaattgaggttcgaggtcgtttcgttggttggtgtaagaattagtttgtaatttaagttttgagttgttggcgtttcgtttcgtgtagttgaatttaatttattcggggttgtgggtagcgtttttttggggttgatacgttatttcgagtttgaggattaagatcggagtgatttggttttttacgttaacgttttttttagagttcgg

SEQ ID NO: 7469 - DNA, 1092 bp, synthetic construct; identical to SEQ ID NO: 7468
  misc_feature 1..1092: note = Description of Artificial Sequence: Synthetic polynucleotide
  source 1..1092: mol_type = other DNA

SEQ ID NO: 7470 - DNA, 1092 bp, synthetic construct; identical to SEQ ID NO: 7468
  misc_feature 1..1092: note = Description of Artificial Sequence: Synthetic polynucleotide
  source 1..1092: mol_type = other DNA

SEQ ID NO: 7471 - DNA, 580 bp, synthetic construct
  misc_feature 1..580: note = Description of Artificial Sequence: Synthetic polynucleotide
  source 1..580: mol_type = other DNA
cgtgtttaggggagttcgatagagtacgcgggaaaagtcgggtgtttacgttttcgcgatttaggttgtagagataagagaaggttaggttttgggaggacgcgaggtcgtttaggaatggtagggaggttcgttggggtttgattttggttttaatggattaaagtttcgacggagtaaggtcgggtgttcgtggtggtattttttattagtggacgttggcgaatgattatggaaataatatttaatagtagtgttttttatgttaggtatataatcgttttggcgtgggttgataattatgtttattttatcgcgtggtattgagtcgatcgtatatttagggtttcggtttttagggttcgtttattcgtttattgcgtgaagtatttattttcgtaggagtcggagtaggaatagggttgggttttggggcgcgcgtatgcgtaggtcgtgttttaggaagggcggggtattgagtcgagggtcggcgcggggcggagggtagggggtggtcgtattttttagggtatttgtgcggtgattgagaatcgattcggtaattcgcgggttcgggcgg

SEQ ID NO: 7472 - DNA, 888 bp, synthetic construct
  misc_feature 1..888: note = Description of Artificial Sequence: Synthetic polynucleotide
  source 1..888: mol_type = other DNA
cgattcgttttttggtcgtttttttcgcggttaggcgtattttgtagcgtttagatcgtcgcgtttttattcgcgtttttaatcgcgagcgttcgtttgggtcgggtcgggcgttcgagattcgggagagattaggggttcgtaaagtagaagagtagatttagaaagaaaaaaaaaaaagcgagaagtgcgagaaaaatatattgaatttagttaaatatacggtagatgaaaaaaatattttgtttagaagttaaaaacgagttttcgagtcgtgagatattgttgcgttttcgttaggcgtgtaggtcggatgttaggggggtaatttcgaggttcgatggtggtttcgattttagggcggatttgcgtttatttttagtttttgtaattgcgggttaggagaaagggatttgttatggcgaagaaaatcgaattttttttaattaggtttttttttaaagagagaaaaagtaggtagttgggtaatttaatttaatttgggattcgggacgtgtgtttgggcgtttttcgggtagttggtcggagcgtgtgggttcggagtttttagcgttggtttcgcgttgtttttcgatgttattagtaaattcgtagggcgttttggcgtaggttcgcgtttgtagagtcggtttgggaagcggaatttttttcggtttcgatgattaggtttttttagggttttggtttaggttgtttttgtgggatagagttttatgaagggatatagaaatagagatagtttttgggcggcgttttcgggatgtggcgtttttgtgtttcggggagggggtattatttttgtttatgcggagcgattcggacgttgtaggggtgacgtcgggtagcgttcgttttgattttttacgg

SEQ ID NO: 7473 - DNA, 1483 bp, synthetic construct
  misc_feature 1..1483: note = Description of Artificial Sequence: Synthetic polynucleotide
  source 1..1483: mol_type = other DNA
cgcggttttgggcgttggtagggggaggtttcggtaacgtttgggggttttaggttagtttttttcgggttggaaggtatcgtataggggttttcgttaatttcggttttcgcgcggtcgggatacggttatatttgttcgcgggggtttgttttttaggtcgtcgtaggtttttcggagtttaagaggattttataagtagttaaagttagcgtcgtttgttttttgtagaatattgttttttataagttttgtagattttttcggttttttagacgtttttacggttttcgcgaagttattttcgcgttttgaatgttttcgaatttttgtagagttttcgcggttttttggaagttttcgcgttcgtggagtttttttttcgttttcgggggtatcgcgggtttttagtttagttttttcgacgttggtcgttgttattttttacgaggcgtcggtttcgatttattttattgtcgttgtcggggacgggcgcgtcgggttaggggcgattcggcggcggcggcggcggcggcggggcgcgggacgcgggcgttagcgggggagtcggtttcgggcgcggcggtttcgcgtttgattgggttgcggggggtagcgggggtttatttttttcgggtgggcgtcggggtcgttagttgcggggaagggtcgcggcggcggcgattgatagttgggtttcggtttttgttattttggcgggcgcgtgttcgggtcggcgtgtgcgcgggcgcgtgtttgggggtcgtcgtcgggggatgggggggcggggggcgagtcggttggggttcgggcggcgggaacgcgtgcgcgttcgtttgagattcggggcggcggtttttggcgagtgcgcgggcggtttcgagttttcgagggagaggcgcgcgggcgcgcgggttagttttagtatagtagttaagagttagggtacgcgcgttgttgttcgttttatcgtttttcgaggggattgcgcgcgcgtgcgttttttcgttcgcggtcgttgaggtgaatgagcgcgcgcggcggttaaagttcgatataaaaggcgcggggttttatcgttcgcgttttcgggagcgttgagtttgaggttgcgaggggcggggcggacgagagtggcggggttgaggggcggggttttgagggaagcgcgaggggcgtggtcggggtgggggcggggcgtcgggcgggtacgtggcgcggtgcgttttttttcggcgcggacgtttttttagttttcgtttgattttagagtttatagaggttatcgggggagttagggttcgtgttcgatggttttatgatttttattatttggttttgttgagtattttgttcgttcggattcggggtatttttgattcgagggtcgtcgaggttatcggcgattgattttttttttttgtatataaggagtcgtggcggggtcggagagttgtagttttggggcgatattagtattcga

SEQ ID NO: 7474 - DNA, 3714 bp, synthetic construct
  misc_feature 1..3714: note = Description of Artificial Sequence: Synthetic polynucleotide
  source 1..3714: mol_type = other DNA
cggcgtggttttgttcggaggggtcggtttaaggaagtgttatttattcggagggtggtttcgggttcgttgattagtttttacgtttgtcgtttgagttttattagtttcgtgtggtagtggcggtattagtcgttttcgtcggtcgagtggttttgttttgggtcggtttcggcgttttcgggagtagggcggttgtcgtatgggttttggtcgggttcggcgggtagtttttttcggggggatatttttagtagcggcggcggttcgcgggtcgggtcgttttcggttatttgtagggtgtgggggcggaagcggatagtgagtttgggacgttcgtcggatttagatttttgcgcgttttgttttagcgtgacgtttttgttaaagttaggagttttgggtacgattttggcgtttatttattttttttattttcggaggtttcgtttgcgggttcgttatttttagtaggaggttcggtttttagggatttagcgtatatcgcgagtattttcgtcgtttcgggttttcgtcgttcgtttttttttttaggtcgggtcgcgcgtatcgcgggttgcgtagcgtatagagggacgtcgcggtcgattatggtcggggcgcgggaagagttcggtaggcgttttcggttacgttggtttttcgggggcgtcgcggttacgtgattcggtttcgaggcgtttttatggttcggtttagtcgttcggaagttcgtagagtttgcgagtgtcgcgaggagcgcggtggtttcggtgggcgcgttcgggaggcgagggcggggtcggggaagggcggggttcgggttttcggggcgggcggcgaggggcgggagtttagagagtgtttcgtttttgtttagtgttgggcggcgcgtggggggggtagggttttcgtttttttacgcggtttcgcgtattttaaggattttaatttgttaggtgagtttttgtttcggggaggggcgttgggggcggcggcgaggatttagttgcgcgcgcgtatgcgtttttcgtttttttttcgggatattagggttgcgcgttttttaggaggcgtcgacgtttttttttttataggcgggaaaattgaggttgcggaggggacgtttttgtttaaggtttacggcgaggtgggtcgaggaaggggcgggatttcggtttcgagatttttaggcgtttttttagtaagtttagcgtattttgtgtgtcgcgggttattttaggtttaattgtcgcgcgtgggttagtgtcgtcgcggtgtgcgtttcgagtcgggtagcgatcgcgtcggcgtatttgtgtttcggcgcgtttgcgaacggtacgtgtttttatagtcgcgcgtgtgttcgtaagtgggtgtgcgcgtcgtgtcgttcgggaagcgggaggttttgcgggcgtgcgtcggatttgttgttagtaggtttggtagatgggaatttagtttcggaattaattgtttgtttgttttcggttgggaggtcgttttttcgtttttttttggcgattagttgttttgtgtttagtcgggttttaaatgtcgtcggtattcgcggtcgtaggtagtttcgggttaggtttcgggttagttttaaagttcgggttaagttaggcgggcgcggcgggcgggtttttcgtgacgcgagtgttttttgtcggtcgttgcgtatacggtttcgagattggggagatagcgtcgcgcgttttaggtttgaggcgtattcggaaatttcgaaggtcgtgattcggcggagattaggatacgcggttgtcggtatatacggtgaggttttcgtagagatttagtacgttaaagtgatttttttcgttttgtttatttttttttatttggataagttttttcgtttacgtacgtattttttagaaagtggggtgggtgattttttttcggtttttcgggtcgttgatgattttaggggttcgaaaacgtaagggggtatggaataaagtggtaggggttttttattttttttgagattcgtaagtttgtagtcgttttttatttagtttggggggtcggaagcgttttttttattcgttttttcgtagtttggagaatgaaaacgggcgttagtttatatttggatttgggtattgaggataatatttaaattttatttcgtattgtcggtagatagtatcgtttttcgtcgttttattgtttcgggatatatattttttatatttcgtttttttatttatatacgtaatatagaagtacgtagcggtcgggagtatcggttttgcgtttttggttagttatattcgtaattttagcgtttttatcgtcgcggcgtttcgggaagtataagtttatattttatattcgtagaatacggggtgtataaggttggagttatttcgggggtttacgattagttaggggtttcgattttttatttcgtttattttagtaaggcgtaaggtgagttcgagaatttttgcgttgcgtttttcgttttagttatagttttcgggtgggttcggttgggatatagttttgaaggtagagggagatttggataacgttaatgggggaaagtgcggtagcgagttttagttcgggttgcgggacgcggtttcggatttgtcgtttttttttcggcgtagtattttcggtcgcgcgagtcgcgcggtaaagtaacgggacggcgtttacgtcgttcgtttttttttcgatagtttttattttgtttcgtcgtcgtaggaggtggttggtgaagtttaggatgattttcgagtttaggtagagcgtttttatttttagtaggttgggagttttgcggggcgcgtcgcggggcggttcgggcggttggggtagcgttatggaagagggaagcgcggggagcggtttttagtgtttttcgttatcgtcgtttcgttcgcgcgtttattggtcgcgcgttcgtcgtcgtcgcgtttcgtatcgcgtagggtcgttcgttaagttttcggtttttcgcgtttcgcgttttcgagttttgcgttcgtttcgcgtcgcgcgttttcgcgtttcggtttcgtttgtttgcgtcgatagcgtttttttcgtttcggcggcgagttagatattagttacgcggattggaggtgtggggcgacggtttcgcgcgttattgggcggaggttggaagttagaatcgggtcgcggttcgcgtttatttgtttcgttagtttttagacgtcggtgtttattgtcgggtattcggtagggagagggtagcgcggttgttgtaaaattttttcgattggggtataatcgtagttttttttttttttaatttgttttgaggatacggcgcgttggggttttggtttatggaaacgtttagagtttagtgatttgtgtattttatttcgtttacgttttagagttttcgtttaattttggtttatggatttttaaggtttattttaatcggattacggagcgtgcgtagcgggattcgtagtttgcgtttttattttaggatttcgattgtgtcgttattcgtggttttttttgtttcgatttcgattttttgagggttggaagattcgggttggttgtcgggtacgacgattttatttttagggttcgaagttaggggcgggggtgggcgttttgtttgggtgtaaatttaagttcgggtttcgcgttttttttgtgggttgttttagtttcgcgcgt

SEQ ID NO: 7475 - DNA, 1266 bp, synthetic construct
  misc_feature 1..1266: note = Description of Artificial Sequence: Synthetic polynucleotide
  source 1..1266: mol_type = other DNA
cggttcgggcgttaggtagaattttagttcgatgttgtcgtcgtcgggggagagggaattcgttgggagggatagtcgggggttggggaaggaagagcgggtgttgggagggtttaatattggcggagttttaggtggcgacgcgggcggcgagagttgtttcgaggcgggggtttcgggtaggtcgttttttacgtagtatacggagtagaagatttgttttttggcgagggacgggcgtcgttgatttagtacgtttaggattagttcgtcggcggtttttacgcgggttttgggttttagtttttcgtcggggggcgttttttgttgtttatttttttttttttttcgatttttagttttttttttttttttttttagttttaattgtagtggtaaggtttggggattgagaggttcggtgagtgttagtttcgtaggttgcgtcggtgttcggtttttattttagttcgggggttttaggtttttcgcgggttttggggcgttggtgttcgcgtagttttagtcgttttcgtagttatcgtcgttcggtttcgcggaggcggcgcgtagcgggggcgttcgggcgttgtttttttgaggtttcgggggtttagggtggttcgtagtgttattggttagggtttgcgatttttggggttcgtcgtcgtcgtttatcgtgttttgtttttcgtttatcgtcgttcgcggttcgcgtcgtcgttgtttatttagtcgtcgggatttttattcggcgttcgcgggtagcgggggtagtggttcggttcgattcgcggtttcgtttttgttttcgggtttttttttttgggttgggacgttttaagtttttttcggggagttcgtgtttcgaggttgcggcgcgtggggagtttggttcggttcgtcgttttttttcgtattttggcgcggcggggtatcgtttcgggggcgtcgagggtcgttcgttttgggttcgggcgcgttcgttttatatgtagttcggggcggcgtcgtagttttagcgagttttaggcgggatagaggggtttgggaggagacggtcgttagtttcgcgttattatcggtttcggttgtcggacgcgcggttcgagggcggtggttaaagggtcgaggggtttgtggcgtcgtcgcggcgcgtattaggaggtgtagtcggagcgttggttagtcgtagggtttttgggggagaggtcggagcgggcgattttttttttttcgcgttttatttatagtttttttcgtcgt

SEQ ID NO: 7476 - DNA, 1316 bp, synthetic construct; identical to SEQ ID NO: 7353
  misc_feature 1..1316: note = Description of Artificial Sequence: Synthetic polynucleotide
  source 1..1316: mol_type = other DNA

SEQ ID NO: 7477 - DNA, 10783 bp, synthetic construct
  misc_feature 1..10783: note = Description of Artificial Sequence: Synthetic polynucleotide
  source 1..10783: mol_type = other DNA
cgagtcgggataaaggtttttaacgggagcgggatatttgtttatatttcgtttattgttcgtagtttagtaatcggtttgtatttgtgtttgttcgggttcgattatttaggacgcgtcgacgaggggtttgttttaatttgggttattgttatttacgttatatattgggggcgaggtagttagggttgtagaaagtcgtcgagcggttcggggagaggtgtttttatttagcgttggtaattcgggggtagttggggcgcggcggcgttcgttgtagttgcgcgcgaggaggattcggtgttcgcgcgtttagtttggttcgcgcggaggagtttaggttgtgggaagattagatttggatttcgtaggggtggttttttgtgttttttttcgtttttagataaagtttttttttgatatttttttggggcgaacgagtattaggtagttaatttatatttttgtattttttttttaaaaaagttttaattagaagaaggggtggtaaatgcggcgtggttttttttaattttagcgtcgaggaggaagtgtaagtttcgggaaagtttagtttttagagtcgagagtggttggaaattttatattaatttgatttaatttggaaacgtggagcgcgtatttcgaacgtatttaaggcgtttaaaaagagattatattaaagaattcgcgtgggagaagaaaattggggagaaaacgaggtatcgtcgggttatttagcgatttttttttttcgtagttttttgggtttttatttaggttggagatataatttttatttttattttcgtaatttcgtttcgtcgttttttcgttgttttatttttagttagaggttggagagggagggggtcggagagggagggataatagagggtaggaaagagtagggtcgtttgtttttttttttattcggggaaagaggttcgtagagtttagaggtagtagggttagggttcgattttagacgaagttggagttttttatttttatttcgtttttttcgggatcgttcgtaaagtagaaagtgaattgcgcgttttttttggtcgtagagaggtggaggcggggggttgggggtgggaggtggggggaggcggagtgaaggaaataaatgagtttttagtaaataaagggcggttggaagggggcgggtcgtttggtggtggttttggtcggttcggagcggagtttttttttgggttttgggttttttcgcggttaattggaattaattatttgttttgttatttttagtatttatttttaagttttaattaaaatattgatttaggaggtttatagaagttgggtttttgttatttgaatcggattttgtttaggtaattattaacgatggaaaggagagattttcgtagttcggttttcgtttttttttttttttttaaaggcgttataaatcgttaatttttcggtttgtcgggggtgggcgcgcgggggcggggaggtaggaatcggtgaatgttaaagaggattttttttttttttttggtttttgttttgtttttttttttttttttttttatttttattttttttaagatgtaatttgttaaaacggtttttttaagtgtgtggattcgcgagcgacgcggtggttttttgtatgtaaatattgggtttaaaaaaaaaaaggttcgtttcgtttttgtaattaattgatacgttatattttttattttgttttagagggtcgttggttgggagcgcggagttttttaaaatttataattttatatttgtaaatattgtttttatttatttgatttttaagattcgtttatacgtggttaatttttgcgtttttaatgtttttttttttttttttttatttttttttcgttttttttttcgtttttttttttttttttttttttttttttttttttttttttttttttttttttttcgtttttttaggttcgtgagtggagtttagttttatatggattgatcgttcgggtaatggtttatttttttttcgttattagtcgttatcgcgcgtcgagcggtcgtcggagttcgagttgacgtcgttttggtattttttttggagttagaaattaaggtcggggttcgcggcgttcggcgcgtaggtcgttcggttttttgcgtttattttcgcgtgtttttaaagaagatagagagaggtattgggttgggttttattttttttttttttatttttagtttttttttttttttaaaaataataattattttaataattaaagttaatttttttttttttttttttagtttttttttttaatttttttttttttcgttcgttggggtaggggagcgttacgaattgattaagtgaagttataattttgcgatataaattttggggtttcgaattatgtcgttgattaatataaagacggggttttcggttaaggatattttagatttgtcggatattaacgatgaggagggttttgtggtcgaaggttcggaggaagagaacgaggggttcgagttagttaagagggtcgggtcgttggggtagggcgttttggacgcggtgtagagtttgtttttgaagaattttttttacgatagtagcgataattcgtatacgcgttggttggttagtatcgagggtttttagtattttcgtaagtagtaaaatttggttgtcgaggtcgtggttttttttatttttgtagtcgtagttcgggttggacgttgggagtgaaaggggaaggggttatgtaagttcggatttttttattcggattcgtagaaagatttttaatatttgtataggatgttttttgtttttttttttaagtttttttagtttcgggaaagaatttggtttttaaaattttttttaatgcgagaagttaaggagaaagagggagaagggttatattttttaggggttggtatatgatgttaattcggatcgatggttttagtcgtagttttcggatttcggtcgttgggagggattggtttggcgttttggaggtagttagcgagtttcgttcgggtacgggtggagggtggggaggtttcgggtggttcgggtataaatagtttattttgttttttgcgcgattatagaggacgttttgtgtagtgtagggggtgtttagaaggttcgaaagtagaaacgaaagtttttaaaaatttgttttaaatggtcgagtcgattaatgttgggattgtggggtattttttttaaaaatttgtttacgtttcgtcggagaggaaatcgtttaagggcgtcggagtttttaattcgcgatgatttttagtgttatttttttttttaaatttttatttatattatgtgagttttttgaaaggcgagtttttagtttttatttttacggatttttttttttattttgggaggtttcgacgttttcgttaggcgtagaggaaggtaggggttatggtaaaggtagcggggttgggttgttaggcgcggaggtttagggtcgtacggaggatttagggtgtttcgagtttggtgtaggttgcgcgcggtttttagacgtttgacgcgtttttttttttttttttttttagtgtacggtttggttgtcggggcgtttttttaggatttaagttttaagttttcggagttttcggtcgacgagttatcggataatgataaggagatttcgggcggcgggggggacgtcggtaagaagcgaaagcggcgagtgtttttttttaaggcgtagatttacgagttggagcggcgttttcggtagtagcggtatttgtcggcgttcgagcgcgaatatttggttagttttattcgttttacgtttacgtaggttaagatttggttttagaattatcgttataagatgaagcgcgttcgggtcgagaaaggtatggaggtgacgtttttgttttcgtcgcgtcgggtggtcgtgttcgttttggttagggacggtaaattatgttacgcgtttaaagtttaggatttggtagtcgttattttttaggcgggtatttttttttttgtttatagcgcgtagtcgttgtagtatatgtagtataacgtttagtatagttcggttagtattttttagtattcgatagtatattttttggtttaggtttagtagtggatttggtgagcgtcgttttaacgagattcgcggttttaggtttaggttttatttcggcggcggtggcggcgaggaggtttcggtttttatggtggttattattattattataattattattatggagtcgagttgattttcggttttattagggaggcgtcgggaggttgtttgcgtttttttggagtggtagattttatttatttagttttgtttatgtttttttttttgaattttgggagagggttgaattttacgtcgtgtttatagaatgtttgcgtagtttcgtttttttgttttttttcggggggattaaatcgttttagcgttaatgtcgttatttgaaaacgagaaaaagatcgattttttatttttgttttcgtgtattttgtaaaatatgtttgtgtgagtagcgatattgttagtcgttttttaaagtaagtggagaatattttaaaaatatagagaatttttttttttttttaaaaaaaaataagaaaatgttaaatatttatggttatgtaaacgttttgataattggtggtagatttcgtttttcgttgtaaatatcggtggtgattgttgttaaaatgatttttaggatcggtttgtttttcgtttgggtttaatttttttttttgtggtttgtttgggtttgttttttgttttgtttttgtttttgcgtttttttttgttttttttttttttttttttattttattgtgtaaatattttttaaatatggaaaagaaaattttgtaggtagggagttttttgttttgtttttcgggtttttagtttcgaatttggagtttagttattcggcgcggttttttaatagcgtcgggcgtagaaagttttcgattttttaaataagaattttaataaaaattttgtgtttaaaaaagaaaaaaagaaaaaatttttgttttttcgtttgttttattgcgtcgggtcggaggtttgggtttgggagtcgggttcggtcgttcgcggggtttttataggcggtttttttcgggcggggaggtcgggggtatcggggttttggggcgggcggggttttcggtgtaggttttttcgattataggttgtatttcgcgtttaggattggggcggggaggagaacgttcggttttcggtttgcgagcggtcggtcggaagtttagggtcgtttattttttttcgtattttttttggtttcgcgcgttgtttgaatttcgggcggtagcgttcggttacgggaggaaaagtgatttcgggagtcgtaaaggcgaggagagtaaatttttttcgttggtttaaatttatgagtggtttttttagtttgagaagttgttgaagttattatattcgatgatttttattttgttatatttgatttattttacgttaagaaagtgggtgggtgggggtttgaggttaagattggttgttttttttttattttttatttttttttaaaatttgcgggttggtgttgatttaggagatcgttaaggttgggggtgggaacggttagggcgcgcgaggttttggtttagggggtttgggggaagtacgcggggttttgggttcgggggagggaggggatattgtagttttttttaggatttttggttttaggaagttagggagcgagaatttttggtaattttagtaaattatgtttttttttttttttacgtttttatttttttcgggtttttaggttttttttcggggattggatttcgggtttttttttttttagcgttcggcggttcgaattagggtgtgcggtttttttaggttagtttttgagcgtggaattgggtggattgttaggaagtagaggtttgggggtggggtgagtttttcggatgggaagtgggtatatagtttcgggtacgttcgggaagggcgtatttattttttcggcggggaacggatttcgttttatttttgttgttggaggaagatttttttggtagatgttggcgtatatttggttacgcgggggagcgttttaggaagtttggttaattggaggatgagttttttttttttatttcgcgggtttttaaaaatatttgggattttagtttagagtttagcgggtgttgtagacgttgagggattgaacgtcggcgtatttggaaattgtatttttgtttttttcgaagttgtattattaaggttggggggttgggtggtagtgaggaggtcgggtaaaaggagcggttttagttgattttttcgttttttgtagttgatgattaggtttaatttaatatttaaagtaaatatgattattcgtgcgattaaatttgtgcgtcgatagtattttgcgtagtagtttagggacgcgatgatattttattttcgcgttttatatcgtttttggataattgagggttcggaagtttttttaatattttagtaaaggtttttttttattttcgggtttattttcggggaaagggtagtttttttaaatgttaaaaggtttttttttgttttttatattagtttggtaatgtttgggggtttatgttttattgtttttaaaggttaacgaattttttttaaatagtttgttgtgtaataattgaacgtttaatttgttttggtattaattatttaatatttatttgtaattttttttaattttaaaatttttttgggaggaaaggtgagggttttaagttttttggagcggagttgttagaaggtttgaggttattttgatttttttaggttttagggtttttagggtgagaatgattataagagatttttaggtttttagagaggaagggggaagcgtggaaggtttttattttggtaggtttttattatttgtttattgaggataaatttggagttgtggttaggatcgcgggtttgtaatttgggtgtgcgtttttgtggtcggtcgggagttcgggaggtggattcggcgttcgtttttttttgttttcgggtttttatggagttaataaaagcgtttgcggagttttgtgtggttttaattttagcgttttgggagcgtattcggcgcggggttcgttttagtagtttattttcgtttaatttatagcgggcggtataaaatcgtataatgggaaagttgggagtcggagatgttagaggcgtgtatattaaaaagggatagagaaaggatcgcggggatagagagaggggaagaaggagaaggggttcgttttttatttttcgttttatttcgtattatttagcgcgtttatcgtcggtagtgaatttcggagttaggtagaagtttttttggggttttgttgggtttgttattgggtttttttgttatttacgggttttatgttggattttatatggttagttgggtcgagggagcgcgaggagggattcgtataaaatttaaattgtgttcggtttttaaattttgtattgttgtttgtgaaaggaagacgtattaaaaattcgtgttatatttattggggaggaggttggaggaggggagaaaaagttatttttgtttttgatggtttcggagggcgtttgtttcgtttaggtttcgtgatattgaaagttggattttttttattttgttttttttttttaaaatttttttttttttttttttttataatttcgtttttataatttttttttttatttttataattttttttttttataattttttttttttttttatttttttttttttttttttttgtttttttgattttaacgttgggatgggagttcgcgaatttgcgtttttagggtttggtttatttgtgcgtattttgtttattgttgtgtgtgtattaggaaattaatttttgtttgggagttttgtattatcggatcgttttggggtttaggaggtaatttagggtatttagggtttgggtgatgttcggttttttacgggtttagcggtttttgggtagatgaaaatttattttttgatttcgtaatcgatcggtttcgaagcgttcgcgcgcggagtcgtttttttatttatcgcgagaaaggttttgagaggttaagggtgtcgtttagtttcgggtttagttagatttgggttgtagtcggttttaaggcgatttgcgttcggtcggattatttggttattaatttcgaagagttaaagacgcgcgcgtttttttgaattatgcgcggggatttattttattggttttttggtgcgatgggaaattattttagaaattttttttaatagcgtttttttttatgttggaggagggagatattttttttttaatttttaatgttttttgtatcgcgtgtttataaaatttagtattagggagatatagtagggtttttaaggaatttgtttattttttgttttttttaagcggtttaaattggcgcgaggtagtcggaaataatttgggttatgtttttttttttgtaattgttaggttaaaatttttataagtagtttttaaataaattatatgtattaaataaaaatagtttatgttgagttttgtggaaataaaaattggaatttagatatgttttttataaagttattcggtttttaatgagtagaattgagttggtggaaatttcgattaatgggaaatttggatgcgtttttttttttatttagtataacggttatatttagtagaattagataatttggtaagagtggaagtttttttttttaatattttttattttagatggggaaataatttatttttttatttattgattgttgggtttagttgagatttggtgtgtatttttcgagtttttttaagagtttggttattgaaaagttaatttaatatttatcgagtataaggatagtttttagacgtatttattaaggtttatcgttaagtgattatttggattgaagataaaggttaggggagggggcgtttaggtatattagattttttttatttgggttttttttatttagaattaggaaatcgggagcgcgtttgtgcgttgttgaagtttttttttcggtgttaagtggcgggcggattagatattgtgttgggcggtattttaggaaatatgtatttgtggttttttgagaggttaagcgtagtgatattttaaatcgtgtcgatatattattttttatttaggatttgtaaataaatttttgattttttcggcgtattatagtcgtcgttatttcgttaaggaagcgatttgagttttattgtttttattaacgtttcgagatatatatatatatatatatatatatatatatatatatttttttttcgtattttgatttttaaaggttttattttttttttttcgaggtatcgttattaataaagaggcgaataggttttagcgtcgttattcgagtaagcggggaaatgtgggttagtagtttaggttcgcgcgcggatttcgcgtacgttttacgcgttttttcgggtcggagaatcgagcgtgtgtcgcgtgttgtcgtcgttaggaggcgttcgagtttagcgttttcgagcgtttttgcgcgcgggttcgggtagagttcgggagtcgtcggaggtagttgcgtattagcggattcgcggttcgggtcggagttcggtgagtggtgttaagaggtggcggcgagtcggaattttggggagagtcgcgagttagacggcggcgggtgtttgggaggtgcgagtcgatttgtgttcggttgtggttttttcgttatgtttttttttttttacgtgcgtattatcgttcgttttagtttcggtttttatcgtgtttgggtatagattatagtcgattggtttaggagcgttttggttattgggagggttttattaggcgttagggcgcgttgttttcgcgattttagggtttttggcggcgtcggtcgcgcgggtggacgcggagagggcggtgttgcgagggttcggagagtgggtgttcgcgtggggaggcggttcgggagcgcgggagcgatgcggaggagggattcggtttggttgtaggttttcggggcgggggtttcgggaaggagagattttcgtttttcgttcgttttggattcgggtttcgtcggattttcggtttttgtcgttcgtcgtttggaagcggggtaggcgtatagtttagacgttagggagagacgtttcgtcgatttagatcgtggggttagggttcgggaggtaagaacgttttatatatagtagggtattttaggtaatttttatttcgtgttgaggtttcggttagggtgtaaaggtgttcgggaatggaagggatacgagggtgtggacgtttcgtattttatttacgtttggtgttttttgagaggttgggcgtggggtagagggtaggggataagggggtgatattttttaaggttttttttttaataaaagtagggtttgtagttttagtttgattcgttgattgttgggtggaatcgttttatattaaaggtatcgtggttttaaatattgttttttttatttttttaagttttcgttttaaaattagttgtcggtgggtcggtgagggcgtttgtagtatttaggtttttcgcggggcggcgcggttggataagaaaaggtttttcggttggggcgcgtagcgtagtttagatatttgcgggattcgagatgttttcgcga

SEQ ID NO: 7478 - DNA, 810 bp, synthetic construct
  misc_feature 1..810: note = Description of Artificial Sequence: Synthetic polynucleotide
  source 1..810: mol_type = other DNA
cgagtgtcgattcgtttgggcgggattttttgagcgtatttttttcgagcgcgttagtgtttttgggagaggtttgtttgggtgagggattggacgtcggttttttcgtaagtcggtcggttgagggtgggggtcgaggcggggtcgggaatagttttcggattagggtttagataatttcgttcggcgtttgttttttcgcgcgtatttgtcgggttcgggggttgttagaagaggtcgtagttcgcgtttttcgggtttttacgtttcgtagcggcgttttttttttcggcggtacggattggttgcggcgtcgttttaagttcgtttcgcgttgtcggcggggggcgtcgcggattagagcgcgttgcgtcgttatcgtcgtcgttatcgtcgtcgtcgtcgtcgtcgttagtagtatagcgcgtttcgggtttcgcgcgtcgttagtttttggttcgttcgtcggtttcgtcgcgttcgttagtttcgtagcggagtttcggttcggtttcgggtcgtcgttattacgtcgcgcgtcgtatttcgcgttaagaatggggcggttaagttgtttaagtcgttcgtcgtcgtcgtcgtcgtcgcggtcgaggcgttcggcgtcggcgcgggtatggagcgttcgtagagtcgttttagtttgttcgtttttttcgaggcgttcgttatttatttttcgtgtatgaattttttcgacgacgaggacgtaggtaagcgcgcggttcgttttttagattttcggggtgtttcgggatttaggttcggtagtttttttttcgattcgtgcgt

SEQ ID NO: 7479 - DNA, 1142 bp, synthetic construct
  misc_feature 1..1142: note = Description of Artificial Sequence: Synthetic polynucleotide
  source 1..1142: mol_type = other DNA
cgcgtggagcgcggtttcggggtagcggagagtggggttttaatatttagtatatgtagattttggggcggtgttgttaggggcgcggattcgggattatcggagtatttgtatcgcggggaaagttgatagggcgcgcgattttaggaggttgtcgcgtcgtttggtgcgtgaagttttagggtagcggagcgcggggattttgaaggttgtcgcgtgtaggcgaaggggtcgtagggtggtcgtttttgggagagtagacggggaagaaggtaacgggagggagggcgtagcgcgagtagtttcggacgcgggtttaggaattggtcgcgaggagcgtaatttagtaggcgcgttagggttttcggatttaaggtgcggggtttcgattgggcgtttggacgtttcgtgacggtggcgtcgttgttattgtttcgaagcgaggcgaggttaggcgttgcgttttcggttgttcgtttttttttttcgtttcgcgtttagtttttttttttcgtttcgttttttgtttcgttttttttttcggcggttgttgcgtcgcgttttcggcgtattcggagttcggcggggatcgggaggtagagacggggcggtcgtggtttcgagggcgggagttgagtcgggtttcgggatcgaagtttggcggcggtttcgggaggtagagcgggtttttcgggcgatttttaggtttttttcgcgttttcgtttcggattcgtgggtagtcggggggaacggaagtcgcggtcgggttaatttcgaggcggggacgtcgcgacgggaatttgaggtgggaattttgcgcgttgtagtttcgtcgggcgttattaaagcgcgaatcggatttcgagtttgtaaattcgggttcgggggcggttgtacgtggtcgtggttttgaattttttgcgggggtttcgaaattcgtttgcggggaggttagggcgatagaggattcgggagttatcgttggtgcgtggcggcgtggagcgcgtttgttacggttaaggtgcgggttcggtttcggtttattttaaggggttatcgggatgcgaagttcgggacgttcgtcgtcgcggtgatttcggcgggggcgtatttcggttgtgggtcgaggtttttttttcga

SEQ ID NO: 7480 - DNA, 2885 bp, synthetic construct
  misc_feature 1..2885: note = Description of Artificial Sequence: Synthetic polynucleotide
  source 1..2885: mol_type = other DNA
cggaggtttcgggaaagtttattaagttttacgcgtttcgttgatagatgtttaggaagcggttggtagggaagaggcggttttgtagtttatagagttttttttttattttcggggagttttaggtcgcgttgttttttattttttcgtttttttcggtttgtaacgttcgtggcgttttttaataggttttagaaatttttttttattttgttttttaagtttggttatagggcgtttcgagtagggagtgtgcgggtttcgggtatacgttgcgtcgcggttgtattagagcgtttacgattttgatttcgattcgaagcggttttttagcgggatagggtgttggcgttggcgttgttgttattgcggcgcgttttttcgttttggtttttgcgtgtcgttagggatttttgcgttagggttagatttaaagacggatcgaggcgggtgtttatttgggacgcgtgcgtttggtggcggaattttcggggcggtcggaggcggcggtcggggagtcgagaagtaagtattagcgttttaggatcgcgcgcgtcgtttcgcgtcgtttcgcgtcgtttttcggtttagagtttttattttcggtttgtgagtttgcggcgttggtggagttcggttttaggaagaggagtttattcggttttttttgattggatagtagcgaggttttatcgggcgttttcgcggtttaaaatcgaagcgggggcgagggggaggtagagttcgttttttgcgcgtcgcggttgggagggagaggaggtgggagagaaggaagaggcggaggaggtagcgggcgtcgaggttttgggattcgtaggtaagttagatcgacgcgtagagtcgggagttttatcgtagcggtagcggtagcggcgggttcgggtcggtttcgggggttgtttatttatatgagtattcgtttattcggcgagttttcgagtttaggcggcgcggttatggtcgagtttaagtcgttgtcgggggacgcgtatttggtattaagttacggttacgcggcggcggttgcgggtttcgtttacggggcggcgcgagaattcgaagcggttcgcggttacggtatttcgggttcgggcggcgattttttcgcggcgtttgtatttcgcgttttagtttaggcggcggagagtagcggcgaatagagcggggacgaggacgacgttttcgagtagcggcggcggcggcgcgggttagggagcgcggcggacgggcggcggcggtcgcgagagtagcggtttttgcggtttagtattaacgcgcgcgagcggcggcgtatgtacgatttaaacgacgcgttggacgggttgcgagtcgttattttttacgcgtatagttcgtcggtgcgtaagttttttaagatcgttacgttgttgttcgttaagaattatatttttatgtaggcgtaggttttggacgagatgcggcgtttggtggttttttttaattagggttagggtttggtcgcgttcgtaaacgtcgcgtttttgacgtttttcggttaggttattgtgtgtttttttttcgtaggcgtcgttttggggttttgttttgataagtgcgtcgtttttttcgggacgtttttcgcgttttgtaaatattgttacgagaagtcgtgatcgcgcgggttttcggttttttcgtacgcgtttttcgatcgtttttgtgattgtttttttgttcggataggaaaggtttggagggattttgtagattaggaggagggggttcgatttcgtttttagtttgtgcgcggtggatagtttagcgtagcgggaagcgttaaggtcgtcggggcgcgggattgagttcgagagtcggacgttggattttgcgttcgggaattcgcggtatttattgggtattgtcgggatttagtaagtttaggaacgggggtgggtagagtatttttcgggtattgtcgttcgtttttaaaagaagattatcgcggggttttagggttacggcgaggacgggtattggttagatttcggataggcggttttggtttcgggcgtacgaaaggtggagacgaagaaaagtcggatttattggtttttgatttttttgtagtgggtttcgcgttttcgttttagtcggtttttcgtgttaaattgtagggtagtgttttgtttttgaggacgcgcgtggtcggtattttttatttcggtgatttcgagatttcgtagttttgcggagagtttacgatggtcgtttgtagaggagttggatcgcgggcgtaggaagatttcggggaaggttttttttaagtaggagtttgttttatttatttgggaattggacgtcgtcgtcggttgtttcgaagtttgaggaatttgttttttaaatgttttttggtttttttttttcgtcgttattcgttgtttgggacgttcgcggggtggagttggatggagatcgttttgcgggttttttgtttcggggggttgcgtggaggagggtttttatagttcgcgttttatttaattttgacggttaggggagggtttcgtttagttttggtgtttagtaaattttttttttatcgattttttttttttttcgagggaggaggtcgggttacgggtgagtaagttgttgcgggtttcgtgtttcgtcgggtgtgaacggagatgcgttgcgtagtgttcgttttgcgtagtttttagttttgttattattcgggatttagggagtcgggtagggtgttttcggggatttatttgttcgcgtcggtttgcgtttcgcggtttcgtcgtagtattcggttttattaatttaattttttcggttgtcggtaatgttaaggggagagggtcgtcgttttgtaacgcgtttgtttatagcgt

SEQ ID NO: 7481 - DNA, 1460 bp, synthetic construct
  misc_feature 1..1460: note = Description of Artificial Sequence: Synthetic polynucleotide
  source 1..1460: mol_type = other DNA
cgcgtttagttggaatgtagagatcgtcgttcggttacggcgtataggacgattcgttcgttcgtcgcgattgtgtatgggtttcgggatacggggtcgtcgttgatacgcgcggtttcgtcgtcggtttcgtcgttttcgtcgcgttcgtcgcgttcgtttcgtcgtttagttcgtagcgtagtttttcgcgtagtttcgagtcggggcgttatggttttagttcggtcggtcgcggggaacgttaggcggtagacgagtcgcgtattcggcggtttatgaacgtttttatggtgtgggtaaaggacgagcgtaagcggttggtttagtagaattcggatttgtataacgcggtgtttagtaagatgttgggtgagcggcgggagggcggtagagaagggggagagggcggggggggttcgggtcggggtggggcggggggggtaggggtttcgggtcgcggggtgcgggggttgcgttaaattttcgcggggcgtttcgggcgtacggagggttcggcgtttattcgttcgacggcgttttatttattggcgtttacggttcgtaggtaaagcgtggaaggagttgaacgcggcggagaagcggtttttcgtggaggaagtcgaacggttgcgcgtgtagtatttgcgcgattattttaattataagtatcggtcgcgtcgtaagaagtaggcgcgtaaggttcggcggttggagttcggttttttgttttcgggattagcgttttcgtagttatcgttcgagttttttttcgcggcgtttggttcggttcgcgtttttcgcgagttgttttcgttgggcgtcgagttcgacggtttggggttgtttacgttcgagcgttcgtttttggacggtttggagttcggcgaggttgttttttttttatcgttcgcggcgttcgaggattgcgcgttgcggttttttcgcgcgttttacgcgtttatcgagttgtcgcgggatttcggcggttgttacggggtttttttggcggaggcgtttaggatcgcgtttttcgcggcgtcgttcgttggtttgtattacggtattttgggtacgttcggttcgtatttcggttcgttgtcgtcgtcgttcgaggtttcgtcgttggagagcgtcgagtcgttggggttcgtcgtcgatttgtgggtcgacgtggattttatcgagttcgattagtattttaattgtagtcggattcggttcgacgttttcgggttttcgtattacgtggtattggttaaattgggttcgcgcgttatgttttgtttagaggagagtagtttgattttcgcgttgtcggacgttagtagcgcggtttattatagcgcgtgtattttcggttaggtcgtcggcgtcgttcgggtttttgtagcgttttttttcgtagttttcgcgatcgattcgatcgcgtcgttgtcgttttgtttttttatacgcgt

SEQ ID NO: 7482 - DNA, 1560 bp, synthetic construct
  misc_feature 1..1560: note = Description of Artificial Sequence: Synthetic polynucleotide
  source 1..1560: mol_type = other DNA
cgttttttaatcgaatttttttttttgggaatcgtagtttagcgcggtaattgagttatcgtaatcgggcggtggggaggaagggtggtttaggaaatcggcgagggagaaaagcggtggaagggagagttttttttttggagcggttttagtagtataaagtgttggttatagcgtttttttcgtttttagattgacgagtagtggcgtggagttagcgcggaggttgttttttttttttttcgagttcgtagcgcggagcgcggtttagtattaacggagtcgggggcggcgtttttgggatggaaaagggttaaaggggaggagtggggtgggggtgggggttttattggtttattataaaaggatcgttcggttgttcggtttttgtattcgttggaaagcggtttcgagttaggggttattgtaaagttagggtgcgttatcggacggagaggggagagttttgagtagagtgagtaatatcgtagttaaggcggaggtcgaagaggggcgttaggtattaattttcgcgttgttttagtttcggaggcgttttagagcgttttttgttttagtagagttattttgtttgcgtttgttttttagtgtttttaattttgcgttggaagaaaaatttttcgcgcgtcggtagaattgtagcgtttttttttagtgatttcgggagtttcggttgtagtcggttttgcgcgtttttttaacgaataatagaaattgttaattttaataatttagagtaggttaacgaggttttgttttttcgattcgaattaaaggtttttcgtttcgtgcgttgttacgagcggtgttttttggggttttaatgtagcgagttgtgttcgaggggttcggaaggcgtaagttgggtagcgatatggggaacgcggagcgggtttcggggtttcggagttttgggttagtatttacgttgttgttgttcgtcgcggcgttattggtcgtgtcggacgtattcgggcgttttttcgaggaggacgaggagttagtggtgtcggagttggagcgcgtttcgggatacgggattacgcgttttcgtttgtacgtttttgattagtagttggatttggagttgcggttcgatagtagttttttggcgttcggttttacgttttagaacgtggggcgtaaattcgggttcgagacgtcgttttcggaaatcgatttggcgtattgtttttatttcggtatcgtgaatggcgattttagttcggttgtcgtttttagtttttgcgagggcgtgcgcggcgttttttatttgttgggggaggcgtattttatttagtcgttgttcgtcgttagcgagcgtttcgttatcgtcgttttaggggagaagtcgtcggtattattatagttttattttttgcggcggaatcggtagggcgacgtcggcggtacgtgcggggtcgtggacgacgagtttcggtcgattgggaaagcggagatcgaagacgaggacgaagggattgagggcgaggacgaaggggtttagtggtcgtcgtaggattcggtattgtaaggcgt

SEQ ID NO: 7483 - DNA, 5118 bp, synthetic construct
  misc_feature 1..5118: note = Description of Artificial Sequence: Synthetic polynucleotide
  source 1..5118: mol_type = other DNA
cgttttttttcgcgatagagttttcgagtttagcgtaggttagttttcgttttttcgcggtttttggtttttttgtcgttagaacgcgtcggcgttagtcggtttatttggcgtcggaggtgaggcgcggtaggttgtcggcgtttatagtcgatacgtggtggtgcggcggcggtatttggtatatgttgtaggggtagggtatgtcgttttagtgttggaagttttcgttcgttttattgtcgtcgttttcgttttttagcggggcggtcgcggtagtagacggagatttgagtaggtcgtgcggtggacggatggagtcgatcgacggtagttcggattcgggtagagaggcgttggatatagtcgcggttgtagcggcggtagtagtcgttgcggcggcgggcggtaggatggggtggtgtatcgcggggtgatgtgcggcgtgcgttgttgttgtcgggtgcgcggtggcggcgggtaggggcgcggagtgcgttaggtcgtcgtaggtcgacgggtggaagttagcgtggtggttttcgtagatttcgtttattagtcgttttattttttttagcgagttggtgagtatgaggatgtagttgcgcgttagtagtagcgtggcgattttggaaagtttgcgtatcgaagggtcgtgtgcgtacggtatgatttcgcggaggttatttatggcgatgttgaggtcgtgtatgcgtttgcgttcgcggttgttgattttgagacgtagttgttgtagtttcggttttgttatttgttttttgttttttttggtggacgacgtagtcgtcgacgacgtagacgacgaggtgttggacgaggatgatttgaagttattgttttttagtttgtttttaggatgcgcgttcgtagagtttatagcgtcgcgtagttcggcgtttagtttcggcgggtagttattcggggtggacgaggatacggtgtttttagtgaaggcgttgtcgttgttgtttttatttcgggtcggtagaaaaaggttatcgggttttggcgacgacgggcggttggatattaggttggcgttcgagtttatggttttaggggaagatagtcgtcgtagttttcgtagggttttttttttttcggattcgaaaatttttaggagaggaggagaaaagagagagaatgagagagagagagagggagagagagagagagtgagttagtgagagatagaaaagttgttttcgtttgtatcgtagtattatagcgcggggtttcggtataggtggttcgtggtttttcgtttttttcgttattatttttggttttttttttagttgtacgcgggtatttataattaagttttttttattttttttttgtttttatgtaataggttattttagggagcgttggtgattttcggggtgcgggtggtattttagaggtttcgggtttttagttaggtgtgggaaaattgagttttcgggttggaataaacgagtgggaagtgagggtttttttttggggagaatggagatttagatagagaattaatgatttggttttttaaacggatttattttatttttatcgatattacgtagtaaatatacgtatacgtatatgtatttagagtcggcgcggggtttagagtttatgtgttgtatttggagattacggggagtttattagttgattggggtttgggtagaaagagttgttgtcgtttcgatttttcgtttttggtgagggagatgtagcggtgagtgtggggaggatagaagagtaaagtcgttttggagaaatggttcgtagagtagggatttagattttttgtatcggagtattttgggttatagtcgagttgaggagagtttgtttttgggatttaggttgcggttgttgtggggcggggatatttattttggatgcgatttgaggagttcgtttcgaaaagttttaggggagaatttggtatcgggcgttggtgtcgcgtcgatttataataagtattcgtatttttaggggttcggtcggtttttatagttcggtggtagcggcgacggcggtagcggtggcgggggcgggggcggggaataatgtgcgtgttttggaggggttgtttcgttaatgagttgggttcgtcggggggttgggaagttgatgttattcgggttaatttcgtttaatgaaattcgttaggtcgggtatacgttttttttttgcgtataattaatgggcgttcgtggtcgggagatttttggggagggattggaggagggattcgaggaggcgagggggaggagaagggcggtttaagggggatggagggagggttgagcgcgtttgggattaagggagaaagggaacgtggttaaatttttgtaaaaaatacggttattatagagttaggttgggggatgggatggtttggagattttgtagagtttaataaattaatttgatgttttacgtagtcgtattttttgggatgcgcgcggaaaattttggcgatttaggattcggggttggggttttttttttagttttttttttgtttggtttttcgtcgtttgtttttattttattggttttattaatacgtgggtatttggcgttttaaatgtaaacgatgtttaggtataaagtttttattattttggtgttttattcgcgcgtttaggagatggtcgtggttgtagtttcgacggtagtcggtagcgtttttagttgggggtagggatttgaggggtagagggcgggtaaggagggaggggacggattttagaagagtgttttgaaagaatttataatttttttttaggttgaggatggtgtgggtatagggacgagttattttcgtacggtaatcgcgttagtataagggtagggtcgtgtttgtagttaaatatttttttatttattagtaggggagtcggatgatagtaagtatttttagtgtcgtttttgtgattattatacgttttggggtaggggtaacgttggtatttgtagtttaagtagggtttcgttgtaaaaggttagtaaagagtttttcgttttagtcgtttgttttttggaattgtaaagagaagttttaggtttgggtaaggtttttttacgttgtgggttagatagcgagatggaattattcgcgatcgcgttgggatatgttttatcgattgtaggttggttttgaaatttgaaaatttttgacgatgaggaattaagttcgaattggagaagtattttacggaggtagttgaggtacggatgtatttatttattttatagatgggaaaagttagagatcgtgtgtagtaagtttatagaaaaaattgttaagtttttatagagtagttttgtttggattatagatgttggcgttggcggttttttatagtataggtagttatttgttttttttagtttttaatttttttttcgagttgaattttttatatttatatatttcgaatttagatatttgtttttgtagatttcggatgttagtatttgatattgtgagcgtacgcgcgggtatatacgtatatagttttttagggagtgtgaggaacgtcgggttattttcgttgttggggaatttttattgtgtaagtacggttttaaaaataagtaaataaattagtatagtaaataattggtttttaagtagtaaagttataaaataaataaatataaagagaaatttacgttattgtttttagttttgagatatgtttttttttgcggttttcgttagaagtttagttcgttttcgttttcgttttagtttcgtgttttttggagtattattttttaattcgcgtgttttttagttggttttgtagttattcgttaaatatgtatttaaaatatgaagaattgaagcgtggtgttatgtcgtttaacggttataaggatgatttataatcgtttaattagtagaatttgttattcggacgacgtagggagcgggggggtggggattagaaagggttcgggtatttgtagatgtttttttcgggtttatttcgttaatagtagcgaggttatgtgtggtgcgcgttgtggggttattagtcggggcgcggagttgtgcgtttgttagtgtagttaataaatattagtaggcgtaacgtgcgcgttttttggttgtagtcgttgaggttagtttagtcgtcggtacgtgtttcggaattcggtttttttttttgttgttgtttattggtgtttgttttgcgatcgatttgcggcggtgagagtaagcggttttaggttttttgcgcgttcggtttagtggttggagttgggagttaggggtgaaagtcgaggggttcgttttggtatggcgcgagtttagagtttggaaggtaaagtcggaagttttgtgttgttgttggttttttttttatttggtaggttttttttaatattttttcgtcgtcggagtagtttgggaggtcggggaggtttgtgtcgtttttgggtttttttggttttggtgttaatcggatgttgagtatttttcggtgtgttttttatgtttttttatttcgttttaggaataattagaaattagatttcggtgtttaagtttgttttggtgcgttttggaggcgtttttaggatttgttcgggttttgcgttcggcgttcggggtgggcgatttgggcgggttttaggtattgcggtttttattagcgcgcgtagttggggtttttttttggggaatggagtgtttatttgtagaggttaatgggtttcggtttcgggagtttttggttggttttcgcgttttggtgttgttggtttttttcgtgttttttttttttttttgtgttttttttttataaaagatcgggtgcgtgtcggggtcggtttttgttggatcgtcgggcggttcgggaggagttcgtgttaaatcggcgggttttcgcggggttttagggcgtagattttttattgtttttcgggtttttttcgggttttttttttgatttttttttttttttttttcgagtttttgtttatatttaggttgcgtttcggtttggttgttaaatagaacgacgtttttgcgtagagttgattaggggtggcggcgggaggtaaggttttcggtatcgg

SEQ ID NO: 7484 - DNA, 1423 bp, synthetic construct
  misc_feature 1..1423: note = Description of Artificial Sequence: Synthetic polynucleotide
  source 1..1423: mol_type = other DNA
cgttgcgggataggtttttagagatcgtttcgggacggtcgtgacggttttcgagggatatgagagaagaggagcggcgtttaggtaagttggattttgcggtcggaattcgcgtagaaacgaaaatttttggaaggggtttagtttcgagtttcggaggcggataagttgagttttttggttgtattttttggaggttgttggttgtagacgtcgtcgttttttaagggcggttgttatcgcgtgcgtcggttagattaggtcgcggtgttttcggtattttcgcgtttcggcggttgtattcggtttttttttacgatcgaggtttcgggtatcgcgttttttttttcggacgttttgcgcgacgtcgttttagtttttattagtatcgagggtagttcgcggttattttataaacgttttagtgtcgtaatcgtttttatttttattatttttaatgtttgtaacggtttttaatgaggttggaaaaatattatttttcgttaaaagcgatttcgagttaggaggagcgcgtattttcgcggtttttttttttatatttttttttttttgattttttttttttttttttggttttttttttgtttttcgtttttttagtagtcgcgtgttgggttttttttttgttggggtcggattttttttttcggtcgttttagtttttgttttttcgttttttttttttttttttttttttttcgtttttttttttttttttttttttttttttcggagtcgttagtcgcgttttaaattcgagtagggcgcgtagtgtttaaatttgttcgcgcggttcgcgtttttggtttcgagggcgcgcgtacggatacgcgagtatatttatatttacgcgtatacggatacgcgcgtattcgaagattttcgcgcgttcgtatttacgcgtatttggttacgcgcgtgtattttcgtttacgcgtttttgtttcgttttcggcgcgtatttcgggttcgtaagtcgcgcgtcggggcggtcgttttgtttcgcgattggcgggagtcggagtttttttgaattcggcgtttatattatgggttgagttcgtcggcgtcgagggagttagtgcgattcggttcggcgcgtacggttaaggtacgcgcgttggtatacgcgggcgcggatacgcgcggatatatacgtgcgggatacgttttttttcgacggcggcgttaatttttcggtaagtttagcgttttacgcgatttgttcggtttttacgttggttatagcggttgcggggacggggaggaaggtagcggggtggttttaggggtttattttgtagggttttttcgacggcgtcgggataggtggggcgtttagcgtcgggagggacggttcgttagtgcggggttttagggaggcgcgtgtagtcgggtgcgg

SEQ ID NO: 7485 - DNA, 1384 bp, synthetic construct
  misc_feature 1..1384: note = Description of Artificial Sequence: Synthetic polynucleotide
  source 1..1384: mol_type = other DNA
cgagcgttttttgaagtgacggggtcgggacgcgtagggaggcggtttaagaagcgcgttttaggttagtttagaatgcgttcggtcgcgattaggataacggcgggtggggttgggggcggttgtcgggcggggagcggtttcgcgtttttagttattttttaagagtcgttgtttttttaattttagttgttagaggttttgtgattggttgcggtacgatgattcgcgtacggattggttgtttcgggtcggggggtcgggttcgggggatagaattcgttttcgaatttttaaagagggtatttttcggtaggagttggtagatttaggaggtgcgatagattcgcggggtaaacggattggggttaagagtcgggagcgcgggcgtaaaggtattagggttcgtttagggcgtcgcgtagtacggttttgggggttttgcgggttttcgggtgcgcgtttcgtttttagttatggggttcgtagcgttggagattttgggtttggtgttgtgtttggtgggttgggggggtttgattttggcgtgcgggttgtttatgtggtaggtgatcgtttttttggattataatatcgtgacggcgtagattatttggaaggggttgtggatgtcgtgcgtggtgtagagtatcgggtatatgtagtgtaaagtgtacgattcggtgttggttttgagtatcgaggtgtaggcggcgcgggcgtttatcgtgagcgtcgtgttgttggcgttcgttgcgtttttcgtgattttggcgggcgcgtagtgtattatttgcgtggtttcgggttcggttaaggcgcgtgtggtttttacgggaggcgtgttttatttgttttgcgggttgttggcgttcgtgttattttgttggttcgttaatattgtcgttcgcgagttttacgattcgtttgtgttcgtgtcgtagaagtacgagttgggcgtagcgttgtatatcggttgggcggttatcgcgttgtttatggtaggcggttgttttttgtgttgcggcgtttgggtttgtatcggtcgtttcgattttagttttttcgtgaagtatttagcgtcgcggcggtttacggttatcggcgattacgataagaagaattacgtttgagggcgttgggtacggtcgggttttttttgttagttacgtttgcgaggcgttggataagtttggggagtttcgtatggatcgcggttttcgtcgggtagcgcggcgcgtaggtttttcggaacgttcggttttgcgtttcgacgcggtttttggattcgtttttgtttgcgttcgtagttgatttttttttgttattagttcggttttgtttttaatagacggaatgaagtttttttttttgtgcgcggcgt

SEQ ID NO: 7486 - DNA, 1361 bp, synthetic construct
  misc_feature 1..1361: note = Description of Artificial Sequence: Synthetic polynucleotide
  source 1..1361: mol_type = other DNA
cgtcgaggatgtggttttcgtttttcgtagtcgtcgtaggagtttttgtttttaaagcggtaggtaggggttttagcgggtttattttaatttgggaaggtcggtgcgtttttttatagatttcgtagggcgttttttttggggattattgaagttttggtatttttaattttagttttttcgcgttacgggaaacgaagacgatatttttttgaataatttcggatgtgttattatagaggggtattttatattggtttttattttaatttttatttagtatattgtttgtttattttttaaatttcgtgcggattgcggtatttagtttcgggggattttttagttttgttttttcgattcgcgtaggtgcgttcgtttatttaagggtagggaggtatgttttttcgggttttttcggtcgtatggtttgtttgtttttttggtttttttttttcgtattaggaggggcgtgagatagttaggtcgatttttatttcggtagtttgcggcgatcggtcgtttcgagcgtagcgttagatatttgggttggggggtgttagtttgacgcgtaggaagggcgtagcggcgggagggggttttattttagatttgggaggtttgtttggcgtcggttttcgttcgtttttcgtcggtggaggtcgcggttggcggagatcgttaagttagaggaggggattcgaggtttcggttgggcgaaggttttggagggggagaagacggtcgaggcgtggaggggtagtcgcggcggggcgatttttatttgtttattgcggggtttgttcgtggggtcggggtagatttcgtaaaggacgcgtagtttgtaagttcgcggttcgcgcggcgcggggatggggagcgtgtgcgtcgaggagcgcgcgtcgagtcgggttttcgcgtttgtgtggtcggttggcggtcggggttcgtgtgtttttgcgcggcggcgtgtgcgtgtgcgtacgcggggattacgttcgttcggagtcgtcgtcgtcgtcgttattttttgttcggggtcgagcgtagcgttttttttgttcgtttcgcgcggcgcggtagtttagtttggtttcgttttgcgggagaggcgtcgttttcgtcgcgaagttaggttgggcgttggagggaggcgatcgattatcgtttttttttgtttattttataggttggggagggggtgttgtaggttaatgagcgttcgggggcggggttagatcgagggcggtgcggtggggggcgcggtggggggcgtcgggttgtttaattcgattttattcgtagtatagattggagtaggagttgcggcgggaaattttagcggcgggggtcgggggcgt

SEQ ID NO: 7487 - DNA, 1175 bp, synthetic construct
  misc_feature 1..1175: note = Description of Artificial Sequence: Synthetic polynucleotide
  source 1..1175: mol_type = other DNA
cggagagtcgggatttcgaagtttttattgtttttgtcgaggcgtcggcgtcgttttttgtgtttttgattacgttagttttcgtcgaggaggcgatattttttttcgcgtttttcgatagcgagcggtcggcgtttagcgtggaggggttcggaggggttttgtacgcgcgcgtggttcgacgcgaggttcggtcggttcgggttcggggcgagattgggggtttgtcgttgtcgttatcgttcgagcgtaggaaatcgtcgttatttgatttcgttattaagtttaaggtgttttggatttacggtaagtatagcgtcgttgtagttggtcgtgcgtttttattatcgtcgttaggtttcgaggtcgcgtttagttttagtaagaggaaacggacgtttagcgataaatcggcgtatacggtcgaatacggtagttttcggattcgcgatttaacgtcgcgtttttcggggttgttcgaggaggcgatagttttcgttgcgttttcgtcgtttagggttcgagcgcgcgtcgcgtttcggttttttggagtttacggacgtcggcggtttttcgcgaagcgcgtcgaggttgtttttatgttggtcgttgacgtgcgcggtaagattcgtagtttgggtcgcgtcgaggtggttttgggcgcgtagggttttagggaaaagtcggcgtttttatagaaagttaagcgtttcgtgtcgttagtttcgttcgttcgcgcgtttttagcgatcgaaatttcggggtttgagaaggcggcgatcgatttgttcgcgtttgagatttttcggaagaagatttttatttagaagtcgtcgcgtaagaagagtcgggaggcggcgggcgagttgggtagggcgggcgtatttattttgtagtaggttgtggttcgttcgcgcgtagtttttttagtttcgtagcgtcgttcgttattttatattttttacgttatcgggtacgggcggttttttattggtcgggtatcgcgcggttagcggaggttgcgttttattggtttaggttttgtagtcgtttttggattggagtagtgtgttttggcgggaagggtttatttcgttggtcgaggtttgataggcgtttagcgggcgattttttttttattggtcgagttatggagcgtttcgattagatagcgt

SEQ ID NO: 7488 - DNA, 1087 bp, synthetic construct
  misc_feature 1..1087: note = Description of Artificial Sequence: Synthetic polynucleotide
  source 1..1087: mol_type = other DNA
cgtttgtagttcggtcgcgtggaggtgatcgggcggaatttcgagggggcgcggggagagttgggcgggtttatcgttttagcggttgttgttaggggtcgcgaggttttttttgaagatgtagcgtagtatattttgtatatgagtttagaggaagaggaagtgtagtcggcggacgcgcggcggcggcggcgggggcgcgtcggggttggagtcggagcgcgtcgggcgttgggcgtagcgagcgagagcgcggcggtcgcgggtttcggcgagggatagacgtatcgatcgtcggagggatagatatacgattacgcggcgttatcgtttacgtttttatttatcggcgtttaagtttttttcgcgtcgttttttttgtatggtataaatttttttttcgggacggaatacgttgttttagggagttcgcgatcgcgttttttttttcgtcggttttatacggtaggcggcggggggggcgcgatagggtttggggtgtcgatcggtataggttttttcgtttggttttatggatcgggtttttggcgggtagtgggaatcgcgcgtggcgtttttttgtaggttgttttttgtcggggtttcggagttgttagagtagtattttttggttcgcgtcggatggggatttgggttgatttttgggacgtttggattttgggttaatttttttttgcggggaacgggtgtaggggagttatttttggagcgatgtagggagaggtatttcggagtagtttgttgggggtcgtaggttttgtaggtttagaagcgtttaggaaggacgtagaggtgggggagtttggaggttataggtgggtttaggatatattgtcgttggggttttcggaaaagaataggagggagttggtcgcggagtttaggttttcggggtgcgcgcggtttgggtggggtagggtggaggcggtgtttgattgtttttttgcgtgtgttttgggaggtgggtttgttttggggatagaggtgttggacgtgtaggagtagatatgtcgcgcgtttcgaggaagcgtcggaattattagaagtatagggacgcgggtgtcga

SEQ ID NO: 7489 - DNA, 693 bp, synthetic construct
  misc_feature 1..693: note = Description of Artificial Sequence: Synthetic polynucleotide
  source 1..693: mol_type = other DNA
cggtttaggtattcgggtagagggatgatttcgcgttttgcgaaaagtaataggcggttgtattttattttgcgttagtttcgggtcggggtggttgttttattttcgtggtttagggaggaggcgttgggtgcgtatgtttaggggtgtgttcgttgttagggttgtagcggtcgttatttttaattagttgtaagtcgagttgtttatttgggatcgggtcggttcggcgggtttggttttcggcgaaggcggcggcgttggtgcgcggcggttggggcgcgggacgtaggtagtgcgtggcgcggttggcgttttcgggcgtcgttatcgagcgagggtgcggtttcgggcggtcgtgcggggtacgatttggttcgcgttgttgcggcggtcgttgtagattttgttttaggcgtcgtagttttgtaggaagagtagataaagataggagagaggtaaagcgtcgtttgtttagagatgtagtcggtttagttaatagagggaaatcgtttttaaatttaggttgggaatgagggaggaggggcgaggcggttggggattagaaaaagtagtagggaattaacgtgatagttagagtttagttagtgtttcgtcggcgttgttttttcgtttcgcggttgcggggttcggaatggagagaggaggcgggggttgagcgttggttgtcgg

SEQ ID NO: 7490 - DNA, 5065 bp, synthetic construct; identical to SEQ ID NO: 7458
  misc_feature 1..5065: note = Description of Artificial Sequence: Synthetic polynucleotide
  source 1..5065: mol_type = other DNA

SEQ ID NO: 7491 - DNA, 307 bp, synthetic construct
  misc_feature 1..307: note = Description of Artificial Sequence: Synthetic polynucleotide
  source 1..307: mol_type = other DNA
cgttttgggggcgatatcgtcggggaatttgatgatgggcgacggcgcggcggcggcgtggtttagtaggtagtttaggagatagagcgtttttaggggattcgtgagcgcgtttcgggttattagcgtttttatcgtagcgttttttggtttcgcgcgtcgttcgggggtcgttggttcggtgcgtgtggtcgtttcgtcgtttggttggagtttgtttcgcggcgtagggttgcgtttcgagggttcgttggttcggtggtttggggtttgttcggtttagcggtttatggttcggttttcgcgt

SEQ ID NO: 7492 - DNA, 1563 bp, synthetic construct
  misc_feature 1..1563: note = Description of Artificial Sequence: Synthetic polynucleotide
  source 1..1563: mol_type = other DNA
cggtgttttcgtagttcggacgttagcgttagggattcgttataattttaagttttttttcggggttgggtttcgtatataaataggtagtataaaattaggatttagttggggttcgtatttttttttgtttagattcgagtcgttttagttttcggtcgtcgcgttcggagttcgttttaattcggaaagtggcggtcggttgcggggtaggcgggcggtatttgtgagtagttttagtcggtgttttagtatttttatttcggcgttcggcgcggttcggttttgggtggcggcgtcggggtagcgcgttcggtcgagtcggggagaggagcgcgggagattcggagcggagcggtaggagagcgcggagcgaagcggtaggagtagtttatagttaggagcgttttttcgtttttaacgtcgcgtttttttttttaaaacggtttaaaaaaatttattaattgtatggtcgcgtatttttaaaaaggtattcgtcgttatttggtttcggtgaattttaggaggcggaggaagggcgcggggtgggtgcggtgatatcgtgggaggtggtttttcgtgttcgtcgttcgaataaagagatttcgtcgttttcgggcgtcgcggtggggggtcgcggacggcggttgggggtttttagcgcggtcgggaaggcgaggaaggagagcgggagtcgcggggaggagggggcgtcgttttcgcggaggcgaaatggggcgggagcgagtcggtgcgggattcgcggggttagggtcgtgcgtggggttggggtcgtgttcggggttgggttgggttgggcggggacgcgcgtagtagtcgcggcggcgagagaagttggttttgggtttaggggcgagggcgtcgtcgatttatcgcggagatgcggacgagatagacgcgtaggcggggagcggggtttcggcgtcgtcgacgcgcgggtgtaggtgcgggtagttaggagttttttcgcgtgttcgcggttgtaggggcggaggtcgggttgggggcggtgcgtcgcgggggcgtgttcgcgtgggtttggcgggtgtgggcgttcggttcgcggggcggtgtcgggtttggggttagtttcggacggatcgcggtttttcgcgcgtggttttcgttttttgcgcggttggggtgttcggtgggcgggcgggagggcgagcggggatcgcgacgcggagtttgggggatatttcggtcgattcgcgttttcgtcgattttttattcgtttcgtcgcgcggattgtgttgggtgcgttgcgaggttttgttcgtttttttaggttttttgtggtcgcgcggcgtcgggttttcgggggaggggacggcgttgtcgtagtttttgtttagatttttaaggggaattttagatttgtagagatatttttattttagcgtttttgcgtttgttgtttcgcgttattcgtcgtcgtcgtttgggaatcgagggagaaaagtttttagggtcgggaagaattaggggtttaggggtttttggggcgtcgttttttttttttcgttttcggagttcga

SEQ ID NO: 7493 - DNA, 512 bp, synthetic construct
  misc_feature 1..512: note = Description of Artificial Sequence: Synthetic polynucleotide
  source 1..512: mol_type = other DNA
cgattcgaggttgtttattcggtttggtatgtttcggcgtttttggggtttttgtatttcgttggtttttcgttgtggtgtttcgtagttcgattatttttgtgtttttaggagtttattttgggcggtagggaggcgttgcgtggggtttacgagttttacgttgttatttttattagtttttattttttaggcgtttgttttttcgtattgttaggttttgttttcgtagtatttggtagatttgagttcggtttttgttattttttcgcgggagttttatagtgattttggaggagaagtagtaggagtttataggttatcgcgttcggtcgcgcgtgaagtttgtgtagtcgtatggtcggttcgttggtttcggttttttgtcgacggatacgttgttgtttatttagaggttgtttcgggtcggtttagtcgtggatttagtgttttgtttagtttcggagtttggattgggtagggagtcggcggggtgcgttgatttgggtcgg

SEQ ID NO: 7494 - DNA, 1070 bp, synthetic construct
  misc_feature 1..1070: note = Description of Artificial Sequence: Synthetic polynucleotide
  source 1..1070: mol_type = other DNA
cggcgttcggggttcgattggtgggaggggttcggtagaggtttcgtttcgagattttagtacgtttcgtttcgttttacggtgtagtatagatttcgcggagaacgcgagtatggtcggaaattatcgtttttattttttggcgggtttcgagggaaggtcgggaacgggcgggttttgttggtttagagggcgttaggggtagttatcggcggttcgggatttttttcgtcgcgagcgcgggggagtttaggttcggtttgtcgggggttgggtgaggttgcggattaggtttttacgtttttcgcgttcgttcgcgtttgttttaggtttttatcgcggttttttttgttttcggggtcgttttgttttttatagattttattttcgggggtcgtttttaggattttcgttcgtttttttttgattcggtttttgttcgtttcgtttttttttttcgggttttttatttttttttcgtcggtttcgatttcgggggcgtttcggatttgtttttcgaatatttttagtttcgtttttagtttgcggagaaggggtcgaggagataggaggaagagagcgagagtttaggggacgaggaggaagttatcgagacgcggagattcgacgacgtcgagggaggtataggtcggggaagcggtagtcgggggcggagcgggggatttgggcgggttttttttcgttttgtttttgtttttttcgtttattttttttttttttttttattcgttatttatcgttatggcgttttcgattttaggcggcgagtgtagtcgtcgttttatttttcgtagtttggcgcgtattagtttttttgtcggtgggcgggcgttaggggtagggtcgaggttcgggtatattttttttttttcgtttatttggcgcgggaggtttatttttcgagagtagttgttttttgtttttttttagggtacggatttttcgggttagtcgttgttttagtatttgcgaggataaagaggaggttttttcgtttggtcgtttttttggttatacggttcgtttttttttttttgtgtttttcgcga

SEQ ID NO: 7495 - DNA, 766 bp, synthetic construct
  misc_feature 1..766: note = Description of Artificial Sequence: Synthetic polynucleotide
  source 1..766: mol_type = other DNA
cgggaattttacgtttttgtattagttcgggggttcggacgagttcgggagtcgttggtcgttaattatcgcgcggtggagaggcgggcgttcggtttcggcgcgttgggggagttagttggcgttgttttttttatcgttttagacgtttatatcgatatagatagacgtatagacgggcgggtagatatcgatagttttttaatcgtttgcgttttagtttcggtttagggagtttttcgtattttttggggtgtcgtaaattgtagttcggtaggttcgcgtcgggagaagggagggcgcgtaggcggtcggaggaggggaggttttagcgcgttttcgttgcgatgtgaacggcggcggtttttatttggagtcgtatttggggcgtcgagtttcggggtcgcggaaagaatgcgcgtcgttcgtgcgtttcgtttgtcgcgtttggttattcgtagtcgtcgcgttcgtatttgattatggagtgcgtttttttgttcgcgtgtgttttttcggttgcgggttcgggttcgtcgaggggtttggcgggattggggcgcgtggttaaggtaggtgtcgtcgagcggagtttcgagagcgggtggtagggggcgttcgacgttagtttcgtcgcgttttttacgcgcgatgttatttttttttttgtaggcgttttagttgtgttgtttttgttgtgcgtcggtcgtcgcggttttagttagtgatagtagtagcggcgttagcggattaaatgatggttcgt

SEQ ID NO: 7496 - DNA, 363 bp, synthetic construct; identical to SEQ ID NO: 7269
  misc_feature 1..363: note = Description of Artificial Sequence: Synthetic polynucleotide
  source 1..363: mol_type = other DNA

SEQ ID NO: 7497 - DNA, 2919 bp, synthetic construct
  misc_feature 1..2919: note = Description of Artificial Sequence: Synthetic polynucleotide
  source 1..2919: mol_type = other DNA
cgagcgcgtaatatgagttttaaaggttaaatttcggttagttaggagtcggaaggttgagttcggttgatttgattttgagttttttcggagttatttcgtataggcgttcgttttgtttaagggtacgcgacgttagcgggtagtcggttttcgtgaagaatggtttttaaataatttattttatttcgttgtaaagagagggataaaatgggttttttttttttacggatgtttagttttttgggtaggcgtatggtcgggcggcgtttagttcgtagtttcgattcggatattttattgtattttttttttttcggtttttttttcgtacgggcgttcgagagacggataaagagttggggttaagtttgagcgtcgggtacggttaggtttagggaaggaaggttttcggtagatatttgggtattagagttggtgcgaggaggaaaagttgggaggcgaatttataattttgggggtggagggtaggtaggggaggggaattaggttaattttagtcgagtgagtttttagcgagttggggtttcggatgggaggtttgtttcgcgttttaaagaaaagtaaatcgtttttttaggttcgttcggattgtcgaagtttttttggaaaaattttttttttttttatattaaattttgcgtcgggtttcgttttttttcgggtaggtagcggcgtaggaagggttaagttagttcgttttagttgatagttagttgattgggttttgattgatagtttcgaaaagtttttttgtttttatattattatgttaatcgcggtcgttttcgtcgttttttattggttcggagtgttagttaattttttatttggatttgacgttacgagtgttataaaatttagtaattgttttaaattttttttgttggattagaggttttaaaatttttttttattttttagttgtagttcgggttgtttgtcggtttggttttttttttttttttttgttttttgtttcgtttttttttaggatttcgttattttgtttttttaaaaaaaggtaagaaagaattaaattttttttttttttttttttagtcgggttgtatttttgttttgtattttgtatagaggtagagagcgcgcgagggagagagaggaaagaaaaaaaataataaagagagttaagtagaagaggaggcgagaagtatgaagtgttaattttttcgtgttaaggttcgcgtcgttcggatagacgttcgtcgcgtttttagtttcgagcggacgtcgcgcgcgttttgtttgtagttcgggtcggcgaggcgagtttttttttatgtaaagcgcgtagcggagcggcgagcgggggacgtcgcgtatcgggtcgggtttttttagtttcgtcgtcgtagttattatcgtcgttatcgtagttcgcggaggattttttcgagtttgaagtcgtcggtttggcgcgtaaggaggcgagcgagtaaggaggggtcggggcgagcgagggagtatattggcgtgagtaggggggagggagggcgggcgcggggggcgcgggtagggcgggggggtgtgtgtgtgagcgcgttcggaggtttcgggttagttatcgtcgcgtaagttagaagcgttttagttcggtaagttggtttattcgttggttatttagtatagttcgttggttttttttttgtagtttatttggcggagcggcggcggcggcggcggcggcggtaggagaatggtattagaattggtaatgagtaatttcgatttgtttattagttttttggttatggaatatgttaatgatttcgatttgatgaagtttgaagtgaaaaaggaatcggtggagatcgatcgtattattagttagtgcggtcgttttatcgtcgggggttcgttgttttttatttttatgagtacgtcgtgtagttcggtgttttttttttttagtttttcggcgtttagttcgggttcgggtagcgagtagaaggcgtatttggaagattattattggatgatcggttattcgtagtagttgaatttcgaggcgttgggttttagtttcgaggacgcggtcgaggcgtttattagtaatagttattagttttagggcggtttcgatggttacgcgcgcggggcgtagtagttggtcgcggcggtcggggtcggtgtcggcgtttttttgggcggtagcggcgaggagatgggtttcgtcgtcgtcgtggtgttcgtcgtgatcgtcgcggtcgtcgcgtagagcggcgcgggttcgtattattattattattattattacgtcgtcggttattattattattcgacggtcggcgcgttcggcgtcgcgggtagcgcggtcgtttcggtcggtggcgttgggggcgcgggcggcggtggttcggttagcgttgggggcggcggcggcggcggcggcggcggaggcggcgggggcgcggcgggggcggggggcgttttgtattcgtattacgtcgtcggcggtttgtatttcgacgatcgttttttcgacgagtagttggtgattatgtttgtgcgcgagttgaatcggtagttgcgcggggttagtaaggaggaggtgattcggttgaagtagaagaggcggattttgaaaaatcgcggttatgtttagttttgtcgttttaagagggtgtagtagagatacgttttggagtcggagaagaattagttgttgtagtaagtcgattattttaagtaggagatttttaggttggtgcgcgagagggacgcgtataaggagaaatacgagaagttggtgagtagcggttttcgagaaaacggttcgagtagcgataattcgttttttttcgagttttttatgtgagtttgatacgcgattttagttagttattttgataagtgtttcgcgggggttcggttcgg

SEQ ID NO: 7498 - DNA, 2267 bp, synthetic construct
  misc_feature 1..2267: note = Description of Artificial Sequence: Synthetic polynucleotide
  source 1..2267: mol_type = other DNA
cgggcgggggagggggtttgtcggtagagaaagtgcggagagggtagagtagcggttcggggcgtttttgtaggtggatatgaaacgtacgatatgtaaatgaatgtaaagtgtatgtaaatgatttggtttcgggattcgcgggaagcgagggtttcgtatcggattcgttcgggaggttgagcggggggagcgcgatttttgtcggttacgtacggaggtggttttgggtcgggttaggcgtcgcgttgggggcgagcgcggggtagggggcgggggcggcggtcgaaggagcgattttttttttaattttttatttttttattttttttatattttttaattttcgtttagtttttcgcgcggtcgttagaagtcgcggttttaaagttgcgaggttcgcggtcgtcgattgttgcgaggtgggtgtgcgcggtttgcggagggggagagggtgggcgtaggcgggggtcgttttttagagtcgcgttttttttacggcgttcgtattttttaattttttcgttcgttttcgtttgcgttttttcgcgtcgtttttcgtaggaggcggcgcgttcgtcgtttttttttcgcgttttttttttttttttttgttttcggcgtttcgtatagtttcggtttttatggttagtttttagggcgtcgtttcggtggcggaggcgttgggggcggttttcggcggcggggagtttttttttaggtcggcgtttcggggcggagttgagcgttatgggcgtcgggcgggaggtaggtggcgtagcggcggcggcggggggtaggaggcggaggcggagcgcgcggggcgggggtcgcggggtttcgtgagattttcgggcgagcgcgcggcgttggagttataggcgcggcggttggattcggcgcgggtcgcggaggtcggagatcgtttcgggcggggtgcgcgttttgttttcgcgcggggtggtcggagtcgagttttcggtatggtttaggcggtcgtttcgcgcgttttagtttcgtcgcgcgtttgagttcggtgcggcgttagaagatagcgcgtagtcgtttttgagtcgtggaggcggggattaagttggaaggagtagcgattttcggatcgagtcgcgagtgtgcgtcgttcgtcgttcgtcggatttttcggatttttcgatcgtaagtgtcgtgttcgtttcgcgcgtcgtcgtcgttttatttcgatttcgttcgcggttgtcgttttcggatttgcgtcgtagtcgcgtcgagcgtacgggtcgtttttaaagttggtgtttacggtagggtggagttaattcgtttagcgtttatttattcgggttgagcgtagtttttcgtgagtagagtttgatttgcgggggttgcggcgaaatttcgaggggaacgacgcgttcgggcgttgggagtttcgcgggtttttttggggtcgttcggtttttttaataaaggtttcgcggttcgcgtgacggagattcgggagtggggaggtcgagggcggttttgggagaggtagaggtggcggcggtcggtttggggaggggggtttagagtttttttttgttttttttttttttgttcgggttttcggcgttgtttcgtaggttaaaggtggttcgcgttgggggttttggattttgtttggtatgcggtttttggggttttgacggtcgcgggtttcggtatagtcgggtggtagcgatggcgcgtatagtttttgggaagcgtttatttgtgttgggtaggtttcgagttaggttgtgggaatagcggggagggaggtgtgagtttttgtggagggatagatggttggaaacgtagttttagacggttgattttatttacgtggagtagaaggcggttaggttggtggcggcgatttagagtcgttgggtttcgaatatattgcggggttggcgttttttcgtttttgcgttcgttcgtgtgtgttggggtcgcggtcgggttgtgtttattttttatttattttgtgggttgaggtcggttgattttaggtttattttagggtttaggaagaaaaattttttttttgaaaagagagtacgtcgcgtgtttttgtgggtgggggtttgtcggtagttgttaggtttgtggttttagttagggtgcggtttttgtgcgttcggttcgggtgtgcgtttttttttttggacgaggaataggaggtttttagggtagttatttcggcggacgggtcggtcggggataaggggcgggggtcggtttttcgg

SEQ ID NO: 7499 - DNA, 265 bp, synthetic construct
  misc_feature 1..265: note = Description of Artificial Sequence: Synthetic polynucleotide
  source 1..265: mol_type = other DNA
cgtagtttgcgatcgatggagtaggaggcgcgggtgttgagagttgcgggcggttttggtcgggttcggcgtttgttggttttcgtttcgtgggtattttgtatagtgttggggttggtgttgagtttcgaggagttgtttatcgcgtagttcgcgttttattgtcgatcggattttacgttgttgtttttagcgttgcgcgttttgcgcggattcgcgttgttggacgtcgttatttcgcgtttggggtttacgcgagtcgcga

SEQ ID NO: 7500 - DNA, 374 bp, synthetic construct
  misc_feature 1..374: note = Description of Artificial Sequence: Synthetic polynucleotide
  source 1..374: mol_type = other DNA
cgaatagcgttttgaaacgtagaaacgtgtttattcgaattgttaacgcgagcgtagagtttattgataaagtaaaataagataaatcgggagttagaaaatttagcgatttataggatttatcgtgatgttttttataaatgttatcgcgaaaatagtcggatttgaaaataaacgcgatttatttggttttcggaaggggagaaggattcgggcgaaaggcgttagttttttttcgttcgtttcgtagacgtagcgtaggtttcgagttttcgagcggcggttttagaattcgcgggttattcgggagtttttttcgtagtattagtcgaaagtttttagcgtcgaggagggcgggcggttgtttttttcga

SEQ ID NO: 7501 - DNA, 1133 bp, synthetic construct
  misc_feature 1..1133: note = Description of Artificial Sequence: Synthetic polynucleotide
  source 1..1133: mol_type = other DNA
cgaatagcgtttttaaatttagaaacgtgtttattcgaattgttaacgcgagcgtagagtttattgataaagtaaaataagataaatcgggagttagaaaatttagcgatttataggatttatcgtgatgttttttataaatgttatcgcgaaaatagtcggatttgaaaataaacgcgatttatttggttttcggaaggggagaaggattcgagcgaaaggcgttagttttttttcgttcgtttcgtagacgtcgcgtaggtttcgagttttcgagcggcggttttagaattcgcgggttattcgggagtttttttcgtagtattagtcgaaagtttttagtgtcgaggagggcgggtagttgtttttttcgatttcgtttcgttcgcgcggacgttttcggttttacgcggggattatttcgggattttcgtcggatttcgcgcgttcgcggttaatttgcgtgtatttgcgtttcgcgttacgttttcggcgttttacgtttagtttttattgggtttcgttttttagtggttttaagtttcgttttttcgttggttatcgtaagtttcgtttttcgaggtttcgtttttgtaaggttcgtttttttacgatttaggtttcgtttattacggttagttcgggtttaggtttcgtttcgatacgatttaggtttcgttttcggttagtttcgtttttcgcgcgtttcgtttagtaattttcgttgaattcggcgcggtttttttagcgttgttttacgtcgtagtttagcgtttggagttcgcgcgtttcgagtttttgttcgtttatgcgtagttgggttatttaggtgtatttatttttttgttgtttcgtcgttttttttgtttttatttcgtttaggttttgggtgttttttttttattttttttggcgtttttgttttaggttatttggtcgtttttttgggtttttcgttcgggggcggtttttggttcgacggtgtcgtagacgcgcgcgtataggttagtttcgcggagaggttgtttttaggggttaggcggggggttgagttagaggttggggtttgttaggagcggggcggtttggggcgtagtagtattggagttgaaggcgagggcggttcgcgtcgg

SEQ ID NO: 7502 - DNA, 2358 bp, synthetic construct
  misc_feature 1..2358: note = Description of Artificial Sequence: Synthetic polynucleotide
  source 1..2358: mol_type = other DNA
cgggattcgttttttaagcggcgttttttttatttttcgcgaatttttcggcggggtttgtgtggattaagggagattagagatttttcgtcgttattttatttaggcggagacggtttattcgaattcgtacgggtttttttttttttttggaatttgtagttggtttttttcgaatgtttgttttttttttttttttacgaaagaatagtgttttgggattcggggtgcggggtagtcgggttcgttggagttgtttagtgcggggaagagtcgtcgagattgggagaaggggcgttggttagggaggagacggggtagggagcggattcgcgattcgtattttgggcggcggttttcgcgttttagtcgcgtttttcgatgatttttagtcgcgaagggcgagcgggcgggggttgggttgcgggttcgggttttaggaggtttgcggggtcggggaggggcgtggagtggttcgaggatcggtttggggattgggggtaggtgtttggacggacgcgggtcgagtatttttttcgggggcgggcgtagtgaaaatattttgggaggcggcgtcgcgcggttgagcgttgttgttttgggaataggacggcgttcggtattgcgagttgagagtatttttataaattttgtatgggaggcgtttcgtgagcgggggcggggagcggagcgagagggagggagttagagagtaagggagggagggaggaggagaggagggggaagtcggggggaggaagggaggcgtttcgtttcgtcgatcgttcggttttgtaaacgcgcgtcgggcgtttttttcggagttcggcggtgcgtgcgagcgtttttttgttgtagtcgcggcggcggtggttcgagggggcggagaggagggggttgcggtcggtcggttagggggcggcgtttttttttaaaatcgtttgcgaagtgtttcgggtggtagaagtaggtcgtcggtttcgcggagtaagtcgttcgtttcggggttgagtaagcgcgcggggttgtcgggtagtattacggttgtttgcgggcgtcggtgttttcggcgcggggttggagtttattatgtttttgcggggtcgggttatcgggtacgagcggattttcggtttgttttcgtttcgacgcgttcggattagttgtagttggcgtttagggatttgaatttggatttcgggagggagtgcgtttaggtcgatttcggagcggcggtttcgtggttaatatgtttcgtaaaggtgagttggagtcgtaggggtaagttgaagttgaatgcgtttcggaaagagtcgcgagttcgggcgtcgttcggcgtcggggttttcggtttgggaagtagttttcggcgggttggtgggttttgtcgggcgtattcgtcgaggggttgttgttggggtttagttttcgttagcggttagttgtgagatacggggttttttttatggatcgagtggttaggtttagagattcggttcggaggggttagtcggagattagagtgagcggtcggtggtggaaggggagtcggttttttgggatttttgttttgttgggataaagttttgtatttgtagtttttattttttgcgcgggtatacgtttttgtttttgtcgttttgtggaggtcgagttcgtacggcgttttcgtgtagttagcggttagtgatcgcgcggttcgggcgtttttcgcgcgttttagttttttagacggggttcggacgcggacgttttttttgtagttttgttttgatcgttagggatgggttttgggtatttagcggttgagggtggggagcggttagcgtttgatgtttagttttttaaatttttattatgttgggagcggagggacgcgaaagtcgtgtcgttagtgtgcgcgatcggtgtatagtttaatttgaggatagttggtttcgcgattatcgtagttagacgttttagtagttcggttcggtacggagcgcggtaaagttggtgcgggtatcggggaagtttcgtcgcgtttttacgtggttgttacgcggggcgtcgtttttcgggttttgggagggtaggtgattacgtcgggagtttacgggtttcgttattagttgttttagtttttgcgtttgtttttttttttttaggttcgagtaggttgtggcgtttcgtcgggatttttttcgcgtttggttcggttaggaggttgagaagtcgcggcgtttgcggttggttgtttcggttttgcgggagcggttgaggcgggagtttaggtagtcgaggggtttgatttttgcgttttacgttttagttttaattcgtttttgtttttatggtaatagatcgaggtgtcgt

SEQ ID NO: 7503 - DNA, 1050 bp, synthetic construct
  misc_feature 1..1050: note = Description of Artificial Sequence: Synthetic polynucleotide
  source 1..1050: mol_type = other DNA
cgggcgggtagttgcggttgttgaggttcggtggggtttttttaagacgcgtgttcgtatttgttcgtcgggcgtttgcggggtgtagcgtttattggagcgcgatagtttttgggatagaggaggatagtggtttcgtttttttgtgcgatcgtttaggagtttcgggtcggagagtgcgagcggggaaaaggggttttgtatttagagtggggcggacgtggcgaggaagttaggggggatcgggaagcgaggttcgcggtgcggagggcgcggggcgtggggggatatttttcggagagatatcggaggggcggaagtaaggagatggaaaggagagggagatcggggagatagatttgagagatttagaggtttgtagagagttttattcgggattttttagagtttaggaaagagtagatgcggacgcgggagggcgttttacgttaaagcgggtagtattagtgattaaaatacgtttcgtttggtagtttcgggacgtatttttgtttcggtagcgtaggagaggtttggatagcgcgagatgttagggtttaggttgtttttagagggttggttcgaagcgttggagtttaaagacgttttttatcgtcgtcgggtggtagaattgggggtaggcgcgttttatagatttcgaggggtggtttcgttttagggtcgcggggaggcgttttcgtgcggggcggagttgttatcgttttttttttaattttcggggattgtggtttttttttaagttcgcggcgtttttagttgttttttattcgtttcgttcgttagtttttttttcgcgcgatggtttcggcgttgagttatgtttttaagtttaagtttttcgtgattttgttcgttatttcgtttttgttgttgttattcgttattttgatgttcgttaaggttagttgtatttttaggtagtttttcggatattcggcgttttgtgtttattaacgggtatcgatttcgggagttttgagttggagcgtacggatttcgcggggagtatagttttttcggggcgcgcgt

SEQ ID NO: 7504 - DNA, 1731 bp, synthetic construct
  misc_feature 1..1731: note = Description of Artificial Sequence: Synthetic polynucleotide
  source 1..1731: mol_type = other DNA
cggtcggttttagttgttatttaggtaatttcggagtcgtcgtagatatcggatttattggaagggggcgaagtcgcggggaggaatgggggatattggggaaggggcgtcgtttttgtcgttttcgttttttttagtgttattgggcggttgttgcggagttcgcgttattttttttttattttatttcgttcgtttggtttcgtttggtcgttggttcgcgtttcgttgcgttcgttcgggggttggttcggttcgggtttttgacgttattagtaagtttgttgttttcggcgttttacgtgtggcggcggttagcggcggtttaggaggtagtcggtgagcgtttgcgagtagagtggcgggggtcgttgataggtttcgcgtagtttagtttagtttagttacgcggtttataggtggggtttaagagtagtttggagtaattcggcgttacggagaggggtggacggttttgtacgggttttttgtttttcgttcgggtagagggattcggggggatttcgttttttggttgagagaatttgaattcgggcggagagaacgcgtttaggcgggtaaggggattagagaaagtcggggttggaagttattgtcgttcgttattgtttggagcgtacggagcgtagaggttcggtagtcgcgcgtgtttttacggggatcgagttagtgatgtaggatcgttgagcggagattcgcgtcgagaagtttttcggggtcggggttgagacgtacgttttcgatatcgttgttaagatttcgatttcggcgatttttgcggggaatcgaggggttaaggttgttttaagtttaggatttgggcgagtttaagacgatggttttttaagtacggattcgcgttttttttttcgttttttcgattggaggtagggattttgcgcggggttttcgggatttcgttttttcgcggagtttcggtcgttgtttttcgggatagttcgtacggttataggggcgtacggcgatgtggttttcgtttagcgcgttggttcgtcggggggatgttttggtatttgtcggggtttaggtttagtatggtcggcgcgttgttcgacgtcgttttcggttaggatggttttttcgggttcggttagtgttttttttatttcggtcgagtcgttgtttcgtagtatttttcggaagtttttgttgatgttttgttttttgtttacgtttttttacgttttttattgtttggtcgagcgttgttagattttgttcggtttcgtcgtggggttgttcggcggcggcgaggaggcgggggtttttggtggcggcgttttggtcggaggttcgagggagttggcggtgtggtcggcggcggtatagagaaagcgttttttgtaattgtcgtagtggcggaggcgtcggtcgttcgcgtttcgcgacgacggcgaggaggcggtttgggaagaagagttttttggtttgttagggggttcgggcggtttcggggtcggaagtatcgtggtcgaggtttcgtcggggattttggcgttgtttttggacgaaggtagtaagtagttgtcgtaggttattattatcggagtgaagaagggcggtacgcgggcgttgttggagtttttgcgcgtgtatttcgacgtgcgcgtcgtgggcgtcgagttttattttttcgatcgtagttacgataagggtttcgtttggtatcggtgagcggggcgggttcgg

SEQ ID NO: 7505 - DNA, 3535 bp, synthetic construct
  misc_feature 1..3535: note = Description of Artificial Sequence: Synthetic polynucleotide
  source 1..3535: mol_type = other DNA
cggtcgcgttaggagttgttggtgtagtttaggaacgtagtgtttggggttagttgcggtatttatagtgggttttttcggtagttcgattcgtcgggttatcgtttcgggttttgtgttttttggattcgggagttttgtttgttagtttagggagatggttcgggaggacgaagaatttttcgtttttcgcggtttagttaagtttttgcggtcgttcgggtttagtcgttatgcgtggtcgttcgtagcgtagttttcgggcgtaagtcggtagtcgaatttttcgggttgcgttgttcgttgtaggcgcgcggcgagggtttttacgcgatttcgttttttatttagcgttttttagttaattaaaaagaacgtggtaggtggagggtagtcgtttaagagattgcgtgagtttttttgtggggatttttatagtttgttttaggtgttttaaaatcgtttgatattaagggtttagttttttttttgttagttttttttaattcggtttaagtgtgtttgattttagaaaattttaggttgtttcggggttttggcgggttttatttggaagggcgttagttatagtttgtcgtttggttttggaattattattttaggaggagggggagtggtggtggtagaagttataataatataatcggtgataatagttaacgattagagaggtttttacgtgtttgcgaggtattttatcgtattagcgtatttattttttttatttttgtttagaatttgtattatttttattgtatagatgagagtattaaggtttacgcgattagttaggacgtgaatttaggcgtcggattttagagattttatttttatttattagtgtttcgagaatgggttatagttcgggaacggtgggaaagatgattgttacggttggttaaatttcgagatttgggtaatttttgataataataaaaaattattaaggataaaggggaaggggtaggacgaggttgggaagggagtcgttttaattcgcggggttagtttttttttattttttaatttatttaggtttcgatagtggggtgggtatagggagaggggtttagttattttttttttttttgtttttttaagttttgagcgtttgtgaagttaattgggtttggaggggtgtttgaatgtcgtgttggttggggttacgggtggagattttaacgaaaatgtgggggtcgttatttgggtttttagtcgaagatagttatcggaggtcgaaatttagattttttgtttattcgcgttttattcgaagttcgggtaatttaatagtttattttaaagattagtagttgcggaaagtagtgggtagaggtagtgattgtgatttcggggttattgtttttttggaatttgattcgtaattcgattcgagaatagaattttcggaagtcgcgatttcgaagtaatttttattttttaattaatgggtttcgaatattttttgtttcggacgtgtaaaagtttcgcggagatacgcgtttttgttttttttattttagtatcgagggtagggaggcggaaacgggcggcggtgttcggaggttcggacgtttttaaagtttcgcgtcgttttagtcggttgtagtgcgcgtttttgttcgatagggattagtatagttttacgtttcgcgcgtcgttcgttcgttaggcggaggcgtcgggttattcgttcggtttattttttcgagtttaggcggttcgcgagcgaggcgggtttgatatttttggggtttcggtaattaggcggattgtaataaaaagttaatagattttgcggtttcgtcgggacgtcgcggtttttattttttttttttatttgggaagtagaagttgttttagaagttttttgagggcggagatcgattaaaggggtttagaatatttttagcgtttcgggtttcgggaggaaaaaatttaaaacgagttataaaatacgattcgagtcggatatttttatggttagagggtggttcgttttgttgagggcggttttagtcgttgttttttttttttgcggcgaggtcgtttgatgaatttaagggtattagtgtttcgcgagaattttttgtgggttgtgacgagaattaagcggagcgtaatttttatcgtattcggataggatgcgttgcgtaatttgtcgtagtttttttgttttatttcgggtggttcgaagttgtaattttgttaattttttattatacgttatgttttttttagtttagggtttgaatcgacgatggagattttgtttttggtagggaaatttatcggtattaagcgaggtttttgtcgtagttgcgatcgaagaaatggggttcggcgtttacggcgcgtacgtcggggtgtacgcgtagaaattttagtagcgttcgcgtgtcgtttttttttacgtcgatgatgatggtttgcggtagttgtttgtttttagatttattgaaaaagttggagatggggtttggggagttcggtatttcgggattttgttttttcgggttcgtagcgttttcggttatttttttgtttgaagttagtggggtggttggcggcgttcggaacggtagtttggggggcgtttcgttcggagttgtggttagggttggcgggtcgtgtgcggcgcgggatttagagtttaggagtagtagtttcggcgcggcggcgtaggagtcggcgtacgagtataggaatatatagagttagacgtagagtatggcgaagagtagcgcgagttttttttttatcggcggcgggggcggcggcggttgcggtaggagtcggtcggggatatcgaggtaagatttgtcgttatttaggcgttgttttatgcgttgttcgcgggcgcggttagggatatggtttagtatatggcgtgggtttcgtcgggtagtgagcgtagagagggtttttcggtacgttggacgttcgggtggttcggtttattgttttcgtgtgttcgcggtcgtcgttgttgttgttgtttttttttaggtggcggcggtagttgtagcggcggcggtttttgatatgttgttcggtaggagttgtaattggaacggaaagtcgggacggcggtaattgttgggcgagggtttgttttcggggcgcgacgacgcgttcggggttaggaggacgttgtattttcgcgttttggttattttagattgtgcgtatcgtcgtacgtcggggttgtttttttgtagttttaagaattgagtttcgagtagtttcggtattttttcgtagaggttgtagaggcgaattgcgtaggaagagagttgtggatcgaggtggagtgggcggtttcggttttttagagtgacgggttgttttatttattaaaaatttcgaacgttatgtaaatataggcgttttttcgagagtttagtagttaattcgtttttaggacgagggggtgtggaaaggtttttgggcggtgtagggcggttaggggttgttattggtttcggaataaggggcgggtttaaaggggcgg

SEQ ID NO: 7506 - DNA, 2896 bp, synthetic construct
  misc_feature 1..2896: note = Description of Artificial Sequence: Synthetic polynucleotide
  source 1..2896: mol_type = other DNA
cgattttcggtcgcgaatttaagtttgtcgttttcgtcgcgtttattttttagttttttttttgtttcggcgttattttaggtcgacgtttttaattaaaataagttttttttttaggagttttttttttttgttcgaggtttagggttagtagttttaggagggattttttttttattttatttttttcggtagaggtgcgagattttattgttagtttggttattcgatcgcgcgtgagattggggcgtagggtaggggggttattgggtaggttttcgtgcggggagtggggaggggtttttaggggaagtgtttgaagttatttttgtagttttgtttagattcggaagtcgtcgaggaagggaggaaggcgggggtggggagagcgcgattttaagcgttggcgggcggcgaggaggggtcgtagcggttcgaggaagcgtttggaggcgttaggggcgtcgagtttttagggaggtcgcgttttcgggaagttttttatcggttgttcggagtaggatcggacgcgcggatcgtttttttcggttcgattagtttcggggcgtagattgcgaatttgaatagaattttttttttttttggtatttttcgtttttttattcgtggttattagtttcgttattttagttttatgtttttcgttaatattatattcgttaagatcgtttattaatgttttgtggaggaaaggggaggggggaatttttagtataattaaattgtggttaaaagcggttaaaaaaaaaaaaaaaaaaaggaaagaaagaaatttttttttttgagatcgatttttttaattagcgtggaaaatttttaaatatgtaaattcgtaattttagttaagattttggcgtcgcgggaggggtgttcgcggcgggcggcgattttagtttgtagtttcggatttcgggtaggtttgcgcgcggcggcgggtcgggggttcggggagttttggcgtttatagtagttcgtcgaaaatataaagtttcgtcgttaataatatttgcgggttttttttgggtttttcgggcgtcggcgttgcgcgtttcgtcgtttttttttttttcgtcgttttttttttttcgcgtacgttttttttttcgttttttttagaacgcggtggttagatgagatttttgggagaaataaatgtgagcgttcgtacgaattttttttttcgttagtcgtttgtaacggttttaggttcgtttttttttttcgcgttttcgcgcgcgtcgcgtttttcgcgtttcgcgttttttttttagtagtttttgcgagcgtttttagtagttattatttataggtcgtcgggggttaggaggtaattagagacggtttcgtggtcgtatttattcggtaagcgcgatgttggcgcggggcgcgcgcggggaggggcgcgcgatgagggggtttggttgcgcgtagttcgcgttttagatttgggggaagggaggaggaggagggggtagggaaggaggaggcgggcgggggggcgagagatgagttcgggaagggagcgggaggagggggcgtcggggagacgtttttttggtttttatcgcggggtttcggggttattcgttgcgaggtttcgacgcgtttagggacggggggtgtgagtgtaagagtgcgcgcgcgcgtaggcgtgtgtatgttaaagatagaggaggggagggagggaacgttttaatatttttttagtgatttacgagtttgcgggtgaggttttggttgtgcgtttaggttcgtgtgtgtattaatgtggttgtatatttttggtttgttttacgagtgaatgttacggggtttgggggggggggtttggatataagttagtgaatgtgtttttgggttttagtttgattgaatgatgtggcgttgcgtggggttgtgtttgtgcgattgtttataggggggttgtgtgatttcgtgaggtattgcgtgggtgggattgcgtttgtgtgcggttgtgtgtatatgggattgtgtttgcgtggggttgagtgtttagagggtagttgtgtggttatgtgggtttgtttgcgagtgggttggtgggtgtgtggggtcgtggggttgcgtatgtaggggtagtgcgtttgtacggggttttgggttaatttaaagggttgtggtgggtatttgtaggcggttgcgtgtgtggttggatttgcgtggggtttgaggtttggcgggtgggggttagtttttttggcgtcggggatcgtatcgcggtagaagagtcgtttaaggcgttaataggtagcgtcggggtcgcggcgtagcgcgacgtgtagtagcggtggggcgtagagagaaggcggagaagaggggggtttttatcgcgcgttttttttagtcgtattagagacgtagtttggagattttgtcgtttgtcggtttcgcggttttagaagtatagggtttgggggattttttttagttgggggagacgtttattggtcgggaaggtagcgagaattgagattcgatgattttggcgtagtatagaagtatgcggtaaggatcgttaggagaggtgggtcgcggttcggagatagtcgagaattaggtcgagataaagaagagcgggatcggggattttggggttaaatcgcgtttttaggtttttcggcggtcgaggggagcgtatttaaggtcggcgcgtggagtttggcggaggtggcgcgggttttttttcgttgtagttttagtagtcgttttagagttttgggggtacgtaattaggcgttatagggtagggttacggtgaggggggttttgagtgtagttggcgggcgtcgagtttcggggttgtgattgagcgtttagttggttcgtttttttttcggtcgtttatcgtttacgt

SEQ ID NO: 7507 - DNA, 1017 bp, Homo sapiens; identical to SEQ ID NO: 1
  source 1..1017: mol_type = unassigned DNA

SEQ ID NO: 7508 - DNA, 166 bp, Homo sapiens; identical to SEQ ID NO: 2
  source 1..166: mol_type = unassigned DNA

SEQ ID NO: 7509 - DNA, 125 bp, Homo sapiens; identical to SEQ ID NO: 13
  source 1..125: mol_type = unassigned DNA

SEQ ID NO: 7510 - DNA, 508 bp, Homo sapiens; identical to SEQ ID NO: 24
  source 1..508: mol_type = unassigned DNA

SEQ ID NO: 7511 - DNA, 396 bp, Homo sapiens; identical to SEQ ID NO: 35
  source 1..396: mol_type = unassigned DNA

SEQ ID NO: 7512 - DNA, 173 bp, Homo sapiens; identical to SEQ ID NO: 46
  source 1..173: mol_type = unassigned DNA

SEQ ID NO: 7513 - DNA, 97 bp, Homo sapiens; identical to SEQ ID NO: 57
  source 1..97: mol_type = unassigned DNA

SEQ ID NO: 7514 - DNA, 208 bp, Homo sapiens; identical to SEQ ID NO: 68
  source 1..208: mol_type = unassigned DNA

SEQ ID NO: 7515 - DNA, 647 bp, Homo sapiens; identical to SEQ ID NO: 79
  source 1..647: mol_type = unassigned DNA

SEQ ID NO: 7516 - DNA, 282 bp, Homo sapiens; identical to SEQ ID NO: 90
  source 1..282: mol_type = unassigned DNA

SEQ ID NO: 7517 - DNA, 32 bp, Homo sapiens; identical to SEQ ID NO: 101
  source 1..32: mol_type = unassigned DNA

SEQ ID NO: 7518 - DNA, 56 bp, Homo sapiens; identical to SEQ ID NO: 112
  source 1..56: mol_type = unassigned DNA

SEQ ID NO: 7519 - DNA, 44 bp, Homo sapiens; identical to SEQ ID NO: 113
  source 1..44: mol_type = unassigned DNA

SEQ ID NO: 7520 - DNA, 211 bp, Homo sapiens; identical to SEQ ID NO: 124
  source 1..211: mol_type = unassigned DNA

SEQ ID NO: 7521 - DNA, 141 bp, Homo sapiens; identical to SEQ ID NO: 135
  source 1..141: mol_type = unassigned DNA

SEQ ID NO: 7522 - DNA, 25 bp, Homo sapiens
  source 1..25: mol_type = unassigned DNA
cgtgcaccctgaggtctggttggcg

SEQ ID NO: 7523 - DNA, 498 bp, Homo sapiens; identical to SEQ ID NO: 157
  source 1..498: mol_type = unassigned DNA

SEQ ID NO: 7524 - DNA, 186 bp, Homo sapiens; identical to SEQ ID NO: 168
  source 1..186: mol_type = unassigned DNA

SEQ ID NO: 7525 - DNA, 97 bp, Homo sapiens; identical to SEQ ID NO: 179
  source 1..97: mol_type = unassigned DNA

SEQ ID NO: 7526 - DNA, 82 bp, Homo sapiens; identical to SEQ ID NO: 223
  source 1..82: mol_type = unassigned DNA

SEQ ID NO: 7527 - DNA, 51 bp, Homo sapiens; identical to SEQ ID NO: 334
  source 1..51: mol_type = unassigned DNA

SEQ ID NO: 7528 - DNA, 431 bp, Homo sapiens; identical to SEQ ID NO: 374
  source 1..431: mol_type = unassigned DNA

SEQ ID NO: 7529 - DNA, 258 bp, Homo sapiens; identical to SEQ ID NO: 385
  source 1..258: mol_type = unassigned DNA

SEQ ID NO: 7530 - DNA, 84 bp, Homo sapiens; identical to SEQ ID NO: 396
  source 1..84: mol_type = unassigned DNA

SEQ ID NO: 7531 - DNA, 62 bp, Homo sapiens; identical to SEQ ID NO: 407
  source 1..62: mol_type = unassigned DNA

SEQ ID NO: 7532 - DNA, 50 bp, Homo sapiens; identical to SEQ ID NO: 418
  source 1..50: mol_type = unassigned DNA

SEQ ID NO: 7533 - DNA, 1017 bp, Homo sapiens; identical to SEQ ID NO: 429
  source 1..1017: mol_type = unassigned DNA

SEQ ID NO: 7534 - DNA, 166 bp, Homo sapiens; identical to SEQ ID NO: 430
  source 1..166: mol_type = unassigned DNA

SEQ ID NO: 7535 - DNA, 125 bp, Homo sapiens; identical to SEQ ID NO: 441
  source 1..125: mol_type = unassigned DNA

SEQ ID NO: 7536 - DNA, 508 bp, Homo sapiens; identical to SEQ ID NO: 452
  source 1..508: mol_type = unassigned DNA

SEQ ID NO: 7537 - DNA, 396 bp, Homo sapiens; identical to SEQ ID NO: 463
  source 1..396: mol_type = unassigned DNA

SEQ ID NO: 7538 - DNA, 173 bp, Homo sapiens; identical to SEQ ID NO: 474
  source 1..173: mol_type = unassigned DNA

SEQ ID NO: 7539 - DNA, 97 bp, Homo sapiens; identical to SEQ ID NO: 485
  source 1..97: mol_type = unassigned DNA

SEQ ID NO: 7540 - DNA, 208 bp, Homo sapiens; identical to SEQ ID NO: 496
  source 1..208: mol_type = unassigned DNA

SEQ ID NO: 7541 - DNA, 647 bp, Homo sapiens; identical to SEQ ID NO: 507
  source 1..647: mol_type = unassigned DNA

SEQ ID NO: 7542 - DNA, 282 bp, Homo sapiens; identical to SEQ ID NO: 518
  source 1..282: mol_type = unassigned DNA

SEQ ID NO: 7543 - DNA, 32 bp, Homo sapiens; identical to SEQ ID NO: 529
  source 1..32: mol_type = unassigned DNA

SEQ ID NO: 7544 - DNA, 56 bp, Homo sapiens; identical to SEQ ID NO: 540
  source 1..56: mol_type = unassigned DNA

SEQ ID NO: 7545 - DNA, 44 bp, Homo sapiens; identical to SEQ ID NO: 541
  source 1..44: mol_type = unassigned DNA

SEQ ID NO: 7546 - DNA, 211 bp, Homo sapiens; identical to SEQ ID NO: 552
  source 1..211: mol_type = unassigned DNA

SEQ ID NO: 7547 - DNA, 141 bp, Homo sapiens; identical to SEQ ID NO: 563
  source 1..141: mol_type = unassigned DNA

SEQ ID NO: 7548 - DNA, 25 bp, Homo sapiens
  source 1..25: mol_type = unassigned DNA
cgccaaccagacctcagggtgcacg

SEQ ID NO: 7549 - DNA, 498 bp, Homo sapiens; identical to SEQ ID NO: 585
  source 1..498: mol_type = unassigned DNA

SEQ ID NO: 7550 - DNA, 186 bp, Homo sapiens; identical to SEQ ID NO: 596
  source 1..186: mol_type = unassigned DNA

SEQ ID NO: 7551 - DNA, 97 bp, Homo sapiens; identical to SEQ ID NO: 607
  source 1..97: mol_type = unassigned DNA

SEQ ID NO: 7552 - DNA, 82 bp, Homo sapiens; identical to SEQ ID NO: 651
  source 1..82: mol_type = unassigned DNA

SEQ ID NO: 7553 - DNA, 51 bp, Homo sapiens; identical to SEQ ID NO: 762
  source 1..51: mol_type = unassigned DNA

SEQ ID NO: 7554 - DNA, 431 bp, Homo sapiens; identical to SEQ ID NO: 802
  source 1..431: mol_type = unassigned DNA

SEQ ID NO: 7555 - DNA, 258 bp, Homo sapiens; identical to SEQ ID NO: 813
  source 1..258: mol_type = unassigned DNA

SEQ ID NO: 7556 - DNA, 84 bp, Homo sapiens; identical to SEQ ID NO: 824
  source 1..84: mol_type = unassigned DNA

SEQ ID NO: 7557 - DNA, 62 bp, Homo sapiens; identical to SEQ ID NO: 835
  source 1..62: mol_type = unassigned DNA

SEQ ID NO: 7558 - DNA, 50 bp, Homo sapiens; identical to SEQ ID NO: 846
  source 1..50: mol_type = unassigned DNA

SEQ ID NO: 7559 - DNA, 1017 bp, synthetic construct; identical to SEQ ID NO: 857
  misc_feature 1..1017: note = Description of Artificial Sequence: Synthetic polynucleotide
  source 1..1017: mol_type = other DNA

SEQ ID NO: 7560 - DNA, 166 bp, synthetic construct; identical to SEQ ID NO: 858
  misc_feature 1..166: note = Description of Artificial Sequence: Synthetic polynucleotide
  source 1..166: mol_type = other DNA

SEQ ID NO: 7561 - DNA, 125 bp, synthetic construct; identical to SEQ ID NO: 869
  misc_feature 1..125: note = Description of Artificial Sequence: Synthetic polynucleotide
  source 1..125: mol_type = other DNA

SEQ ID NO: 7562 - DNA, 508 bp, synthetic construct; identical to SEQ ID NO: 880
  misc_feature 1..508: note = Description of Artificial Sequence: Synthetic polynucleotide
  source 1..508: mol_type = other DNA

SEQ ID NO: 7563 - DNA, 396 bp, synthetic construct; identical to SEQ ID NO: 891
  misc_feature 1..396: note = Description of Artificial Sequence: Synthetic polynucleotide
  source 1..396: mol_type = other DNA

SEQ ID NO: 7564 - DNA, 173 bp, synthetic construct; identical to SEQ ID NO: 902
  misc_feature 1..173: note = Description of Artificial Sequence: Synthetic polynucleotide
  source 1..173: mol_type = other DNA

SEQ ID NO: 7565 - DNA, 97 bp, synthetic construct; identical to SEQ ID NO: 913
  misc_feature 1..97: note = Description of Artificial Sequence: Synthetic oligonucleotide
  source 1..97: mol_type = other DNA

SEQ ID NO: 7566 - DNA, 208 bp, synthetic construct; identical to SEQ ID NO: 924
  misc_feature 1..208: note = Description of Artificial Sequence: Synthetic polynucleotide
  source 1..208: mol_type = other DNA

SEQ ID NO: 7567 - DNA, 647 bp, synthetic construct; identical to SEQ ID NO: 935
  misc_feature 1..647: note = Description of Artificial Sequence: Synthetic polynucleotide
  source 1..647: mol_type = other DNA

SEQ ID NO: 7568 - DNA, 282 bp, synthetic construct; identical to SEQ ID NO: 946
  misc_feature 1..282: note = Description of Artificial Sequence: Synthetic polynucleotide
  source 1..282: mol_type = other DNA

SEQ ID NO: 7569 - DNA, 32 bp, synthetic construct; identical to SEQ ID NO: 957
  misc_feature 1..32: note = Description of Artificial Sequence: Synthetic oligonucleotide
  source 1..32: mol_type = other DNA

SEQ ID NO: 7570 - DNA, 56 bp, synthetic construct; identical to SEQ ID NO: 968
  misc_feature 1..56: note = Description of Artificial Sequence: Synthetic oligonucleotide
  source 1..56: mol_type = other DNA

SEQ ID NO: 7571 - DNA, 44 bp, synthetic construct; identical to SEQ ID NO: 969
  misc_feature 1..44: note = Description of Artificial Sequence: Synthetic oligonucleotide
  source 1..44: mol_type = other DNA

SEQ ID NO: 7572 - DNA, 211 bp, synthetic construct; identical to SEQ ID NO: 980
  misc_feature 1..211: note = Description of Artificial Sequence: Synthetic polynucleotide
  source 1..211: mol_type = other DNA

SEQ ID NO: 7573 - DNA, 141 bp, synthetic construct; identical to SEQ ID NO: 991
  misc_feature 1..141: note = Description of Artificial Sequence: Synthetic polynucleotide
  source 1..141: mol_type = other DNA

SEQ ID NO: 7574 - DNA, 25 bp, synthetic construct
  misc_feature 1..25: note = Description of Artificial Sequence: Synthetic oligonucleotide
  source 1..25: mol_type = other DNA
ygtgtattttgaggtttggttggyg

SEQ ID NO: 7575 - DNA, 498 bp, synthetic construct; identical to SEQ ID NO: 1013
  misc_feature 1..498: note = Description of Artificial Sequence: Synthetic polynucleotide
  source 1..498: mol_type = other DNA

SEQ ID NO: 7576 - DNA, 186 bp, synthetic construct; identical to SEQ ID NO: 1024
  misc_feature 1..186: note = Description of Artificial Sequence: Synthetic polynucleotide
  source 1..186: mol_type = other DNA

SEQ ID NO: 7577 - DNA, 97 bp, synthetic construct; identical to SEQ ID NO: 1035
  misc_feature 1..97: note = Description of Artificial Sequence: Synthetic oligonucleotide
  source 1..97: mol_type = other DNA

SEQ ID NO: 7578 - DNA, 82 bp, synthetic construct; identical to SEQ ID NO: 1079
  misc_feature 1..82: note = Description of Artificial Sequence: Synthetic oligonucleotide
  source 1..82: mol_type = other DNA

SEQ ID NO: 7579 - DNA, 51 bp, synthetic construct; identical to SEQ ID NO: 1190
  misc_feature 1..51: note = Description of Artificial Sequence: Synthetic oligonucleotide
  source 1..51: mol_type = other DNA

SEQ ID NO: 7580 - DNA, 431 bp, synthetic construct; identical to SEQ ID NO: 1230
  misc_feature 1..431: note = Description of Artificial Sequence: Synthetic polynucleotide
  source 1..431: mol_type = other DNA

SEQ ID NO: 7581 - DNA, 258 bp, synthetic construct; identical to SEQ ID NO: 1241
  misc_feature 1..258: note = Description of Artificial Sequence: Synthetic polynucleotide
  source 1..258: mol_type = other DNA

SEQ ID NO: 7582 - DNA, 84 bp, synthetic construct; identical to SEQ ID NO: 1252
  misc_feature 1..84: note = Description of Artificial Sequence: Synthetic oligonucleotide
  source 1..84: mol_type = other DNA

SEQ ID NO: 7583 - DNA, 62 bp, synthetic construct; identical to SEQ ID NO: 1263
  misc_feature 1..62: note = Description of Artificial Sequence: Synthetic oligonucleotide
  source 1..62: mol_type = other DNA

SEQ ID NO: 7584 - DNA, 50 bp, synthetic construct; identical to SEQ ID NO: 1274
  misc_feature 1..50: note = Description of Artificial Sequence: Synthetic oligonucleotide
  source 1..50: mol_type = other DNA

SEQ ID NO: 7585 - DNA, 1017 bp, synthetic construct; identical to SEQ ID NO: 1285
  misc_feature 1..1017: note = Description of Artificial Sequence: Synthetic polynucleotide
  source 1..1017: mol_type = other DNA

SEQ ID NO: 7586 - DNA, 166 bp, synthetic construct; identical to SEQ ID NO: 1286
  misc_feature 1..166: note = Description of Artificial Sequence: Synthetic polynucleotide
  source 1..166: mol_type = other DNA

SEQ ID NO: 7587 - DNA, 125 bp, synthetic construct; identical to SEQ ID NO: 1297
  misc_feature 1..125: note = Description of Artificial Sequence: Synthetic polynucleotide
  source 1..125: mol_type = other DNA

SEQ ID NO: 7588 - DNA, 508 bp, synthetic construct; identical to SEQ ID NO: 1308
  misc_feature 1..508: note = Description of Artificial Sequence: Synthetic polynucleotide
  source 1..508: mol_type = other DNA

SEQ ID NO: 7589 - DNA, 396 bp, synthetic construct; identical to SEQ ID NO: 1319
  misc_feature 1..396: note = Description of Artificial Sequence: Synthetic polynucleotide
  source 1..396: mol_type = other DNA

SEQ ID NO: 7590 - DNA, 173 bp, synthetic construct; identical to SEQ ID NO: 1330
  misc_feature 1..173: note = Description of Artificial Sequence: Synthetic polynucleotide
  source 1..173: mol_type = other DNA

SEQ ID NO: 7591 - DNA, 97 bp, synthetic construct; identical to SEQ ID NO: 1341
  misc_feature 1..97: note = Description of Artificial Sequence: Synthetic oligonucleotide
  source 1..97: mol_type = other DNA

SEQ ID NO: 7592 - DNA, 208 bp, synthetic construct; identical to SEQ ID NO: 1352
  misc_feature 1..208: note = Description of Artificial Sequence: Synthetic polynucleotide
  source 1..208: mol_type = other DNA

SEQ ID NO: 7593 - DNA, 647 bp, synthetic construct; identical to SEQ ID NO: 1363
  misc_feature 1..647: note = Description of Artificial Sequence: Synthetic polynucleotide
  source 1..647: mol_type = other DNA

SEQ ID NO: 7594 - DNA, 282 bp, synthetic construct; identical to SEQ ID NO: 1374
  misc_feature 1..282: note = Description of Artificial Sequence: Synthetic polynucleotide
  source 1..282: mol_type = other DNA

SEQ ID NO: 7595 - DNA, 32 bp, synthetic construct; identical to SEQ ID NO: 1385
  misc_feature 1..32: note = Description of Artificial Sequence: Synthetic oligonucleotide
  source 1..32: mol_type = other DNA

SEQ ID NO: 7596 - DNA, 56 bp, synthetic construct; identical to SEQ ID NO: 1396
  misc_feature 1..56: note = Description of Artificial Sequence: Synthetic oligonucleotide
  source 1..56: mol_type = other DNA

SEQ ID NO: 7597 - DNA, 44 bp, synthetic construct; identical to SEQ ID NO: 113
  misc_feature 1..44: note = Description of Artificial Sequence: Synthetic oligonucleotide
  source 1..44: mol_type = other DNA

SEQ ID NO: 7598 - DNA, 211 bp, synthetic construct; identical to SEQ ID NO: 1408
  misc_feature 1..211: note = Description of Artificial Sequence: Synthetic polynucleotide
  source 1..211: mol_type = other DNA

SEQ ID NO: 7599 - DNA, 141 bp, synthetic construct; identical to SEQ ID NO: 1419
  misc_feature 1..141: note = Description of Artificial Sequence: Synthetic polynucleotide
  source 1..141: mol_type = other DNA

SEQ ID NO: 7600 - DNA, 25 bp, synthetic construct
  misc_feature 1..25: note = Description of Artificial Sequence: Synthetic oligonucleotide
  source 1..25: mol_type = other DNA
cgtgtattttgaggtttggttggcg

SEQ ID NO: 7601 - DNA, 498 bp, synthetic construct; identical to SEQ ID NO: 1441
  misc_feature 1..498: note = Description of Artificial Sequence: Synthetic polynucleotide
  source 1..498: mol_type = other DNA

SEQ ID NO: 7602 - DNA, 186 bp, synthetic construct; identical to SEQ ID NO: 1452
  misc_feature 1..186: note = Description of Artificial Sequence: Synthetic polynucleotide
  source 1..186: mol_type = other DNA

SEQ ID NO: 7603 - DNA, 97 bp, synthetic construct; identical to SEQ ID NO: 1463
  misc_feature 1..97: note = Description of Artificial Sequence: Synthetic oligonucleotide
  source 1..97: mol_type = other DNA

SEQ ID NO: 7604 - DNA, 82 bp, synthetic construct; identical to SEQ ID NO: 1507
  misc_feature 1..82: note = Description of Artificial Sequence: Synthetic oligonucleotide
  source 1..82: mol_type = other DNA

SEQ ID NO: 7605 - DNA, 51 bp, synthetic construct; identical to SEQ ID NO: 1618
  misc_feature 1..51: note = Description of Artificial Sequence: Synthetic oligonucleotide
  source 1..51: mol_type = other DNA

SEQ ID NO: 7606 - DNA, 431 bp, synthetic construct; identical to SEQ ID NO: 1658
  misc_feature 1..431: note = Description of Artificial Sequence: Synthetic polynucleotide
  source 1..431: mol_type = other DNA

SEQ ID NO: 7607 - DNA, 258 bp, synthetic construct; identical to SEQ ID NO: 1669
  misc_feature 1..258: note = Description of Artificial Sequence: Synthetic polynucleotide
  source 1..258: mol_type = other DNA

SEQ ID NO: 7608 - DNA, 84 bp, synthetic construct; identical to SEQ ID NO: 1680
  misc_feature 1..84: note = Description of Artificial Sequence: Synthetic oligonucleotide
  source 1..84: mol_type = other DNA

SEQ ID NO: 7609 - DNA, 62 bp, synthetic construct; identical to SEQ ID NO: 1691
  misc_feature 1..62: note = Description of Artificial Sequence: Synthetic oligonucleotide
  source 1..62: mol_type = other DNA

SEQ ID NO: 7610 - DNA, 50 bp, synthetic construct; identical to SEQ ID NO: 1702
  misc_feature 1..50: note = Description of Artificial Sequence: Synthetic oligonucleotide
  source 1..50: mol_type = other DNA

SEQ ID NO: 7611 - DNA, 1017 bp, synthetic construct; identical to SEQ ID NO: 1713
  misc_feature 1..1017: note = Description of Artificial Sequence: Synthetic polynucleotide
  source 1..1017: mol_type = other DNA

SEQ ID NO: 7612 - DNA, 166 bp, synthetic construct; identical to SEQ ID NO: 1714
  misc_feature 1..166: note = Description of Artificial Sequence: Synthetic polynucleotide
  source 1..166: mol_type = other DNA

SEQ ID NO: 7613 - DNA, 125 bp, synthetic construct; identical to SEQ ID NO: 1725
  misc_feature 1..125: note = Description of Artificial Sequence: Synthetic polynucleotide
  source 1..125: mol_type = other DNA

SEQ ID NO: 7614 - DNA, 508 bp, synthetic construct; identical to SEQ ID NO: 1736
  misc_feature 1..508: note = Description of Artificial Sequence: Synthetic polynucleotide
  source 1..508: mol_type = other DNA

SEQ ID NO: 7615 - DNA, 396 bp, synthetic construct; identical to SEQ ID NO: 1747
  misc_feature 1..396: note = Description of Artificial Sequence: Synthetic polynucleotide
  source 1..396: mol_type = other DNA

SEQ ID NO: 7616 - DNA, 173 bp, synthetic construct; identical to SEQ ID NO: 1758
  misc_feature 1..173: note = Description of Artificial Sequence: Synthetic polynucleotide
  source 1..173: mol_type = other DNA

SEQ ID NO: 7617 - DNA, 97 bp, synthetic construct; identical to SEQ ID NO: 1769
  misc_feature 1..97: note = Description of Artificial Sequence: Synthetic oligonucleotide
  source 1..97: mol_type = other DNA

SEQ ID NO: 7618 - DNA, 208 bp, synthetic construct; identical to SEQ ID NO: 1780
  misc_feature 1..208: note = Description of Artificial Sequence: Synthetic polynucleotide
  source 1..208: mol_type = other DNA

SEQ ID NO: 7619 - DNA, 647 bp, synthetic construct; identical to SEQ ID NO: 1791
  misc_feature 1..647: note = Description of Artificial Sequence: Synthetic polynucleotide
  source 1..647: mol_type = other DNA

SEQ ID NO: 7620 - DNA, 282 bp, synthetic construct; identical to SEQ ID NO: 1802
  misc_feature 1..282: note = Description of Artificial Sequence: Synthetic polynucleotide
  source 1..282: mol_type = other DNA

SEQ ID NO: 7621 - DNA, 32 bp, synthetic construct; identical to SEQ ID NO: 1813
  misc_feature 1..32: note = Description of Artificial Sequence: Synthetic oligonucleotide
  source 1..32: mol_type = other DNA

SEQ ID NO: 7622 - DNA, 56 bp, synthetic construct; identical to SEQ ID NO: 1824
  misc_feature 1..56: note = Description of Artificial Sequence: Synthetic oligonucleotide
  source 1..56: mol_type = other DNA

SEQ ID NO: 7623 - DNA, 44 bp, synthetic construct; identical to SEQ ID NO: 1825
  misc_feature 1..44: note = Description of Artificial Sequence: Synthetic oligonucleotide
  source 1..44: mol_type = other DNA

SEQ ID NO: 7624 - DNA, 211 bp, synthetic construct; identical to SEQ ID NO: 1836
  misc_feature 1..211: note = Description of Artificial Sequence: Synthetic polynucleotide
  source 1..211: mol_type = other DNA

SEQ ID NO: 7625 - DNA, 141 bp, synthetic construct; identical to SEQ ID NO: 1847
  misc_feature 1..141: note = Description of Artificial Sequence: Synthetic polynucleotide
  source 1..141: mol_type = other DNA

SEQ ID NO: 7626 - DNA, 25 bp, synthetic construct
  misc_feature 1..25: note = Description of Artificial Sequence: Synthetic oligonucleotide
  source 1..25: mol_type = other DNA
ygttaattagattttagggtgtayg

SEQ ID NO: 7627 - DNA, 498 bp, synthetic construct; identical to SEQ ID NO: 1869
  misc_feature 1..498: note = Description of Artificial Sequence: Synthetic polynucleotide
  source 1..498: mol_type = other DNA

SEQ ID NO: 7628 - DNA, 186 bp, synthetic construct; identical to SEQ ID NO: 1880
  misc_feature 1..186: note = Description of Artificial Sequence: Synthetic polynucleotide
  source 1..186: mol_type = other DNA

SEQ ID NO: 7629 - DNA, 97 bp, synthetic construct; identical to SEQ ID NO: 1891
  misc_feature 1..97: note = Description of Artificial Sequence: Synthetic oligonucleotide
  source 1..97: mol_type = other DNA

SEQ ID NO: 7630 - DNA, 82 bp, synthetic construct; identical to SEQ ID NO: 1935
  misc_feature 1..82: note = Description of Artificial Sequence: Synthetic oligonucleotide
  source 1..82: mol_type = other DNA

SEQ ID NO: 7631 - DNA, 51 bp, synthetic construct; identical to SEQ ID NO: 2046
  misc_feature 1..51: note = Description of Artificial Sequence: Synthetic oligonucleotide
  source 1..51: mol_type = other DNA

SEQ ID NO: 7632 - DNA, 431 bp, synthetic construct; identical to SEQ ID NO: 2086
  misc_feature 1..431: note = Description of Artificial Sequence: Synthetic polynucleotide
  source 1..431: mol_type = other DNA

SEQ ID NO: 7633 - DNA, 258 bp, synthetic construct; identical to SEQ ID NO: 2097
  misc_feature 1..258: note = Description of Artificial Sequence: Synthetic polynucleotide
  source 1..258: mol_type = other DNA

SEQ ID NO: 7634 - DNA, 84 bp, synthetic construct; identical to SEQ ID NO: 2108
  misc_feature 1..84: note = Description of Artificial Sequence: Synthetic oligonucleotide
  source 1..84: mol_type = other DNA

SEQ ID NO: 7635 - DNA, 62 bp, synthetic construct; identical to SEQ ID NO: 2119
  misc_feature 1..62: note = Description of Artificial Sequence: Synthetic oligonucleotide
  source 1..62: mol_type = other DNA

SEQ ID NO: 7636 - DNA, 50 bp, synthetic construct; identical to SEQ ID NO: 2130
  misc_feature 1..50: note = Description of Artificial Sequence: Synthetic oligonucleotide
  source 1..50: mol_type = other DNA

SEQ ID NO: 7637 - DNA, 1017 bp, synthetic construct; identical to SEQ ID NO: 2141
  misc_feature 1..1017: note = Description of Artificial Sequence: Synthetic polynucleotide
  source 1..1017: mol_type = other DNA

SEQ ID NO: 7638 - DNA, 166 bp, synthetic construct; identical to SEQ ID NO: 2142
  misc_feature 1..166: note = Description of Artificial Sequence: Synthetic polynucleotide
  source 1..166: mol_type = other DNA

SEQ ID NO: 7639 - DNA, 125 bp, synthetic construct; identical to SEQ ID NO: 2153
  misc_feature 1..125: note = Description of Artificial Sequence: Synthetic polynucleotide
  source 1..125: mol_type = other DNA

SEQ ID NO: 7640 - DNA, 508 bp, synthetic construct; identical to SEQ ID NO: 2164
  misc_feature 1..508: note = Description of Artificial Sequence: Synthetic polynucleotide
  source 1..508: mol_type = other DNA

SEQ ID NO: 7641 - DNA, 396 bp, synthetic construct; identical to SEQ ID NO: 2175
  misc_feature 1..396: note = Description of Artificial Sequence: Synthetic polynucleotide
  source 1..396: mol_type = other DNA

SEQ ID NO: 7642 - DNA, 173 bp, synthetic construct; identical to SEQ ID NO: 2186
  misc_feature 1..173: note = Description of Artificial Sequence: Synthetic polynucleotide
  source 1..173: mol_type = other DNA

SEQ ID NO: 7643 - DNA, 97 bp, synthetic construct; identical to SEQ ID NO: 2197
  misc_feature 1..97: note = Description of Artificial Sequence: Synthetic oligonucleotide
  source 1..97: mol_type = other DNA

SEQ ID NO: 7644 - DNA, 208 bp, synthetic construct; identical to SEQ ID NO: 2208
  misc_feature 1..208: note = Description of Artificial Sequence: Synthetic polynucleotide
  source 1..208: mol_type = other DNA

SEQ ID NO: 7645 - DNA, 647 bp, synthetic construct; identical to SEQ ID NO: 2219
  misc_feature 1..647: note = Description of Artificial Sequence: Synthetic polynucleotide
  source 1..647: mol_type = other DNA

SEQ ID NO: 7646 - DNA, 282 bp, synthetic construct; identical to SEQ ID NO: 2230
  misc_feature 1..282: note = Description of Artificial Sequence: Synthetic polynucleotide
  source 1..282: mol_type = other DNA

SEQ ID NO: 7647 - DNA, 32 bp, synthetic construct; identical to SEQ ID NO: 2241
  misc_feature 1..32: note = Description of Artificial Sequence: Synthetic oligonucleotide
  source 1..32: mol_type = other DNA

SEQ ID NO: 7648 - DNA, 56 bp, synthetic construct; identical to SEQ ID NO: 2252
  misc_feature 1..56: note = Description of Artificial Sequence: Synthetic oligonucleotide
  source 1..56: mol_type = other DNA

SEQ ID NO: 7649 - DNA, 44 bp, synthetic construct; identical to SEQ ID NO: 2253
  misc_feature 1..44: note = Description of Artificial Sequence: Synthetic oligonucleotide
  source 1..44: mol_type = other DNA

SEQ ID NO: 7650 - DNA, 211 bp, synthetic construct; identical to SEQ ID NO: 2264
  misc_feature 1..211: note = Description of Artificial Sequence: Synthetic polynucleotide
  source 1..211: mol_type = other DNA

SEQ ID NO: 7651 - DNA, 141 bp, synthetic construct; identical to SEQ ID NO: 2275
  misc_feature 1..141: note = Description of Artificial Sequence: Synthetic polynucleotide
  source 1..141: mol_type = other DNA

SEQ ID NO: 7652 - DNA, 25 bp, synthetic construct
  misc_feature 1..25: note = Description of Artificial Sequence: Synthetic oligonucleotide
  source 1..25: mol_type = other DNA
cgttaattagattttagggtgtacg

SEQ ID NO: 7653 - DNA, 498 bp, synthetic construct; identical to SEQ ID NO: 2297
  misc_feature 1..498: note = Description of Artificial Sequence: Synthetic polynucleotide
  source 1..498: mol_type = other DNA

SEQ ID NO: 7654 - DNA, 186 bp, synthetic construct; identical to SEQ ID NO: 2308
  misc_feature 1..186: note = Description of Artificial Sequence: Synthetic polynucleotide
  source 1..186: mol_type = other DNA

SEQ ID NO: 7655 - DNA, 97 bp, synthetic construct; identical to SEQ ID NO: 2319
  misc_feature 1..97: note = Description of Artificial Sequence: Synthetic oligonucleotide
  source 1..97: mol_type = other DNA

SEQ ID NO: 7656 - DNA, 82 bp, synthetic construct; identical to SEQ ID NO: 2363
  misc_feature 1..82: note = Description of Artificial Sequence: Synthetic oligonucleotide
  source 1..82: mol_type = other DNA

SEQ ID NO: 7657 - DNA, 51 bp, synthetic construct; identical to SEQ ID NO: 2474
  misc_feature 1..51: note = Description of Artificial Sequence: Synthetic oligonucleotide
  source 1..51: mol_type = other DNA

SEQ ID NO: 7658 - DNA, 431 bp, synthetic construct; identical to SEQ ID NO: 2514
  misc_feature 1..431: note = Description of Artificial Sequence: Synthetic polynucleotide
  source 1..431: mol_type = other DNA

SEQ ID NO: 7659 - DNA, 258 bp, synthetic construct; identical to SEQ ID NO: 2525
  misc_feature 1..258: note = Description of Artificial Sequence: Synthetic polynucleotide
  source 1..258: mol_type = other DNA

SEQ ID NO: 7660 - DNA, 84 bp, synthetic construct; identical to SEQ ID NO: 2536
  misc_feature 1..84: note = Description of Artificial Sequence: Synthetic oligonucleotide
  source 1..84: mol_type = other DNA

SEQ ID NO: 7661 - DNA, 62 bp, synthetic construct; identical to SEQ ID NO: 2547
  misc_feature 1..62: note = Description of Artificial Sequence: Synthetic oligonucleotide
  source 1..62: mol_type = other DNA

SEQ ID NO: 7662 - DNA, 50 bp, synthetic construct; identical to SEQ ID NO: 2558
  misc_feature 1..50: note = Description of Artificial Sequence: Synthetic oligonucleotide
  source 1..50: mol_type = other DNA

SEQ ID NO: 7663 - DNA, 1216 bp, Homo sapiens; identical to SEQ ID NO: 2569
  source 1..1216: mol_type = unassigned DNA

SEQ ID NO: 7664 - DNA, 365 bp, Homo sapiens; identical to SEQ ID NO: 2570
  source 1..365: mol_type = unassigned DNA

SEQ ID NO: 7665 - DNA, 324 bp, Homo sapiens; identical to SEQ ID NO: 2581
  source 1..324: mol_type = unassigned DNA

SEQ ID NO: 7666 - DNA, 707 bp, Homo sapiens; identical to SEQ ID NO: 2592
  source 1..707: mol_type = unassigned DNA

SEQ ID NO: 7667 - DNA, 595 bp, Homo sapiens; identical to SEQ ID NO: 2603
  source 1..595: mol_type = unassigned DNA

SEQ ID NO: 7668 - DNA, 372 bp, Homo sapiens; identical to SEQ ID NO: 2614
  source 1..372: mol_type = unassigned DNA

SEQ ID NO: 7669 - DNA, 296 bp, Homo sapiens; identical to SEQ ID NO: 2625
  source 1..296: mol_type = unassigned DNA

SEQ ID NO: 7670 - DNA, 407 bp, Homo sapiens; identical to SEQ ID NO: 2636
  source 1..407: mol_type = unassigned DNA

SEQ ID NO: 7671 - DNA, 846 bp, Homo sapiens; identical to SEQ ID NO: 2647
  source 1..846: mol_type = unassigned DNA

SEQ ID NO: 7672 - DNA, 481 bp, Homo sapiens; identical to SEQ ID NO: 2658
  source 1..481: mol_type = unassigned DNA

SEQ ID NO: 7673 - DNA, 231 bp, Homo sapiens; identical to SEQ ID NO: 2669
  source 1..231: mol_type = unassigned DNA

SEQ ID NO: 7674 - DNA, 255 bp, Homo sapiens; identical to SEQ ID NO: 2680
  source 1..255: mol_type = unassigned DNA

SEQ ID NO: 7675 - DNA, 243 bp, Homo sapiens; identical to SEQ ID NO: 2681
  source 1..243: mol_type = unassigned DNA

SEQ ID NO: 7676 - DNA, 410 bp, Homo sapiens; identical to SEQ ID NO: 2692
  source 1..410: mol_type = unassigned DNA

SEQ ID NO: 7677 - DNA, 340 bp, Homo sapiens; identical to SEQ ID NO: 2703
  source 1..340: mol_type = unassigned DNA

SEQ ID NO: 7678 - DNA, 224 bp, Homo sapiens; identical to SEQ ID NO: 2714
  source 1..224: mol_type = unassigned DNA

SEQ ID NO: 7679 - DNA, 697 bp, Homo sapiens; identical to SEQ ID NO: 2725
  source 1..697: mol_type = unassigned DNA

SEQ ID NO: 7680 - DNA, 385 bp, Homo sapiens; identical to SEQ ID NO: 2736
  source 1..385: mol_type = unassigned DNA

SEQ ID NO: 7681 - DNA, 296 bp, Homo sapiens; identical to SEQ ID NO: 2747
  source 1..296: mol_type = unassigned DNA

SEQ ID NO: 7682 - DNA, 281 bp, Homo sapiens; identical to SEQ ID NO: 2791
  source 1..281: mol_type = unassigned DNA

SEQ ID NO: 7683 - DNA, 250 bp, Homo sapiens; identical to SEQ ID NO: 2902
  source 1..250: mol_type = unassigned DNA

SEQ ID NO: 7684 - DNA, 630 bp, Homo sapiens; identical to SEQ ID NO: 2942
  source 1..630: mol_type = unassigned DNA

SEQ ID NO: 7685 - DNA, 457 bp, Homo sapiens; identical to SEQ ID NO: 2953
  source 1..457: mol_type = unassigned DNA

SEQ ID NO: 7686 - DNA, 283 bp, Homo sapiens; identical to SEQ ID NO: 2964
  source 1..283: mol_type = unassigned DNA

SEQ ID NO: 7687 - DNA, 261 bp, Homo sapiens; identical to SEQ ID NO: 2975
  source 1..261: mol_type = unassigned DNA

SEQ ID NO: 7688 - DNA, 249 bp, Homo sapiens; identical to SEQ ID NO: 2986
  source 1..249: mol_type = unassigned DNA

SEQ ID NO: 7689 - DNA, 1216 bp, Homo sapiens; identical to SEQ ID NO: 2997
  source 1..1216: mol_type = unassigned DNA

SEQ ID NO: 7690 - DNA, 365 bp, Homo sapiens; identical to SEQ ID NO: 2998
  source 1..365: mol_type = unassigned DNA

SEQ ID NO: 7691 - DNA, 324 bp, Homo sapiens; identical to SEQ ID NO: 3009
  source 1..324: mol_type = unassigned DNA

SEQ ID NO: 7692 - DNA, 707 bp, Homo sapiens; identical to SEQ ID NO: 3020
  source 1..707: mol_type = unassigned DNA

SEQ ID NO: 7693 - DNA, 595 bp, Homo sapiens; identical to SEQ ID NO: 3031
  source 1..595: mol_type = unassigned DNA

SEQ ID NO: 7694 - DNA, 372 bp, Homo sapiens; identical to SEQ ID NO: 3042
  source 1..372: mol_type = unassigned DNA

SEQ ID NO: 7695 - DNA, 296 bp, Homo sapiens; identical to SEQ ID NO: 3053
  source 1..296: mol_type = unassigned DNA

SEQ ID NO: 7696 - DNA, 407 bp, Homo sapiens; identical to SEQ ID NO: 3064
  source 1..407: mol_type = unassigned DNA

SEQ ID NO: 7697 - DNA, 846 bp, Homo sapiens; identical to SEQ ID NO: 3075
  source 1..846: mol_type = unassigned DNA

SEQ ID NO: 7698 - DNA, 481 bp, Homo sapiens; identical to SEQ ID NO: 3086
  source 1..481: mol_type = unassigned DNA

SEQ ID NO: 7699 - DNA, 231 bp, Homo sapiens; identical to SEQ ID NO: 3097
  source 1..231: mol_type = unassigned DNA

SEQ ID NO: 7700 - DNA, 255 bp, Homo sapiens; identical to SEQ ID NO: 3108
  source 1..255: mol_type = unassigned DNA

SEQ ID NO: 7701 - DNA, 243 bp, Homo sapiens; identical to SEQ ID NO: 3109
  source 1..243: mol_type = unassigned DNA

SEQ ID NO: 7702 - DNA, 410 bp, Homo sapiens; identical to SEQ ID NO: 3120
  source 1..410: mol_type = unassigned DNA

SEQ ID NO: 7703 - DNA, 340 bp, Homo sapiens; identical to SEQ ID NO: 3131
  source 1..340: mol_type = unassigned DNA

SEQ ID NO: 7704 - DNA, 224 bp, Homo sapiens; identical to SEQ ID NO: 3142
  source 1..224: mol_type = unassigned DNA

SEQ ID NO: 7705 - DNA, 697 bp, Homo sapiens; identical to SEQ ID NO: 3153
  source 1..697: mol_type = unassigned DNA

SEQ ID NO: 7706 - DNA, 385 bp, Homo sapiens; identical to SEQ ID NO: 3164
  source 1..385: mol_type = unassigned DNA

SEQ ID NO: 7707 - DNA, 296 bp, Homo sapiens; identical to SEQ ID NO: 3175
  source 1..296: mol_type = unassigned DNA

SEQ ID NO: 7708 - DNA, 281 bp, Homo sapiens; identical to SEQ ID NO: 3219
  source 1..281: mol_type = unassigned DNA

SEQ ID NO: 7709 - DNA, 250 bp, Homo sapiens; identical to SEQ ID NO: 3330
  source 1..250: mol_type = unassigned DNA

SEQ ID NO: 7710 - DNA, 630 bp, Homo sapiens; identical to SEQ ID NO: 3370
  source 1..630: mol_type = unassigned DNA

SEQ ID NO: 7711 - DNA, 457 bp, Homo sapiens; identical to SEQ ID NO: 3381
  source 1..457: mol_type = unassigned DNA

SEQ ID NO: 7712 - DNA, 283 bp, Homo sapiens; identical to SEQ ID NO: 3392
  source 1..283: mol_type = unassigned DNA

SEQ ID NO: 7713 - DNA, 261 bp, Homo sapiens; identical to SEQ ID NO: 3403
  source 1..261: mol_type = unassigned DNA

SEQ ID NO: 7714 - DNA, 249 bp, Homo sapiens; identical to SEQ ID NO: 3414
  source 1..249: mol_type = unassigned DNA

SEQ ID NO: 7715 - DNA, 1216 bp, synthetic construct; identical to SEQ ID NO: 3425
  misc_feature 1..1216: note = Description of Artificial Sequence: Synthetic polynucleotide
  source 1..1216: mol_type = other DNA

SEQ ID NO: 7716 - DNA, 365 bp, synthetic construct; identical to SEQ ID NO: 3426
  misc_feature 1..365: note = Description of Artificial Sequence: Synthetic polynucleotide
  source 1..365: mol_type = other DNA

SEQ ID NO: 7717 - DNA, 324 bp, synthetic construct; identical to SEQ ID NO: 3437
  misc_feature 1..324: note = Description of Artificial Sequence: Synthetic polynucleotide
  source 1..324: mol_type = other DNA

SEQ ID NO: 7718 - DNA, 707 bp, synthetic construct; identical to SEQ ID NO: 3448
  misc_feature 1..707: note = Description of Artificial Sequence: Synthetic polynucleotide
  source 1..707: mol_type = other DNA

SEQ ID NO: 7719 - DNA, 595 bp, synthetic construct; identical to SEQ ID NO: 3459
  misc_feature 1..595: note = Description of Artificial Sequence: Synthetic polynucleotide
  source 1..595: mol_type = other DNA

SEQ ID NO: 7720 - DNA, 372 bp, synthetic construct; identical to SEQ ID NO: 3470
  misc_feature 1..372: note = Description of Artificial Sequence: Synthetic polynucleotide
  source 1..372: mol_type = other DNA

SEQ ID NO: 7721 - DNA, 296 bp, synthetic construct; identical to SEQ ID NO: 3481
  misc_feature 1..296: note = Description of Artificial Sequence: Synthetic polynucleotide
  source 1..296: mol_type = other DNA

SEQ ID NO: 7722 - DNA, 407 bp, synthetic construct; identical to SEQ ID NO: 3492
  misc_feature 1..407: note = Description of Artificial Sequence: Synthetic polynucleotide
  source 1..407: mol_type = other DNA

SEQ ID NO: 7723 - DNA, 846 bp, synthetic construct; identical to SEQ ID NO: 3503
  misc_feature 1..846: note = Description of Artificial Sequence: Synthetic polynucleotide
  source 1..846: mol_type = other DNA

SEQ ID NO: 7724 - DNA, 481 bp, synthetic construct; identical to SEQ ID NO: 3514
  misc_feature 1..481: note = Description of Artificial Sequence: Synthetic polynucleotide
  source 1..481: mol_type = other DNA

SEQ ID NO: 7725 - DNA, 231 bp, synthetic construct; identical to SEQ ID NO: 3525
  misc_feature 1..231: note = Description of Artificial Sequence: Synthetic polynucleotide
  source 1..231: mol_type = other DNA

SEQ ID NO: 7726 - DNA, 255 bp, synthetic construct; identical to SEQ ID NO: 3536
  misc_feature 1..255: note = Description of Artificial Sequence: Synthetic polynucleotide
  source 1..255: mol_type = other DNA

SEQ ID NO: 7727 - DNA, 243 bp, synthetic construct; identical to SEQ ID NO: 3537
  misc_feature 1..243: note = Description of Artificial Sequence: Synthetic polynucleotide
  source 1..243: mol_type = other DNA

SEQ ID NO: 7728 - DNA, 410 bp, synthetic construct; identical to SEQ ID NO: 3548
  misc_feature 1..410: note = Description of Artificial Sequence: Synthetic polynucleotide
  source 1..410: mol_type = other DNA

SEQ ID NO: 7729 - DNA, 340 bp, synthetic construct; identical to SEQ ID NO: 3559
  misc_feature 1..340: note = Description of Artificial Sequence: Synthetic polynucleotide
  source 1..340: mol_type = other DNA

SEQ ID NO: 7730 - DNA, 224 bp, synthetic construct; identical to SEQ ID NO: 3570
  misc_feature 1..224: note = Description of Artificial Sequence: Synthetic polynucleotide
  source 1..224: mol_type = other DNA

SEQ ID NO: 7731 - DNA, 697 bp, synthetic construct; identical to SEQ ID NO: 3581
  misc_feature 1..697: note = Description of Artificial Sequence: Synthetic polynucleotide
  source 1..697: mol_type = other DNA

SEQ ID NO: 7732 - DNA, 385 bp, synthetic construct; identical to SEQ ID NO: 3592
  misc_feature 1..385: note = Description of Artificial Sequence: Synthetic polynucleotide
  source 1..385: mol_type = other DNA

SEQ ID NO: 7733 - DNA, 296 bp, synthetic construct; identical to SEQ ID NO: 3603
  misc_feature 1..296: note = Description of Artificial Sequence: Synthetic polynucleotide
  source 1..296: mol_type = other DNA

SEQ ID NO: 7734 - DNA, 281 bp, synthetic construct; identical to SEQ ID NO: 3647
  misc_feature 1..281: note = Description of Artificial Sequence: Synthetic polynucleotide
  source 1..281: mol_type = other DNA

SEQ ID NO: 7735 - DNA, 250 bp, synthetic construct; identical to SEQ ID NO: 3758
  misc_feature 1..250: note = Description of Artificial Sequence: Synthetic polynucleotide
  source 1..250: mol_type = other DNA

SEQ ID NO: 7736 - DNA, 630 bp, synthetic construct; identical to SEQ ID NO: 3798
  misc_feature 1..630: note = Description of Artificial Sequence: Synthetic polynucleotide
  source 1..630: mol_type = other DNA

SEQ ID NO: 7737 - DNA, 457 bp, synthetic construct; identical to SEQ ID NO: 3809
  misc_feature 1..457: note = Description of Artificial Sequence: Synthetic polynucleotide
  source 1..457: mol_type = other DNA

SEQ ID NO: 7738 - DNA, 283 bp, synthetic construct; identical to SEQ ID NO: 3820
  misc_feature 1..283: note = Description of Artificial Sequence: Synthetic polynucleotide
  source 1..283: mol_type = other DNA

SEQ ID NO: 7739 - DNA, 261 bp, synthetic construct; identical to SEQ ID NO: 3831
  misc_feature 1..261: note = Description of Artificial Sequence: Synthetic polynucleotide
  source 1..261: mol_type = other DNA

SEQ ID NO: 7740 - DNA, 249 bp, synthetic construct; identical to SEQ ID NO: 3842
  misc_feature 1..249: note = Description of Artificial Sequence: Synthetic polynucleotide
  source 1..249: mol_type = other DNA

SEQ ID NO: 7741 - DNA, 1216 bp, synthetic construct; identical to SEQ ID NO: 3853
  misc_feature 1..1216: note = Description of Artificial Sequence: Synthetic polynucleotide
  source 1..1216: mol_type = other DNA

SEQ ID NO: 7742 - DNA, 365 bp, synthetic construct; identical to SEQ ID NO: 3854
  misc_feature 1..365: note = Description of Artificial Sequence: Synthetic polynucleotide
  source 1..365: mol_type = other DNA

SEQ ID NO: 7743 - DNA, 324 bp, synthetic construct; identical to SEQ ID NO: 3865
  misc_feature 1..324: note = Description of Artificial Sequence: Synthetic polynucleotide
  source 1..324: mol_type = other DNA

SEQ ID NO: 7744 - DNA, 707 bp, synthetic construct; identical to SEQ ID NO: 3876
  misc_feature 1..707: note = Description of Artificial Sequence: Synthetic polynucleotide
  source 1..707: mol_type = other DNA

SEQ ID NO: 7745 - DNA, 595 bp, synthetic construct; identical to SEQ ID NO: 3887
  misc_feature 1..595: note = Description of Artificial Sequence: Synthetic polynucleotide
  source 1..595: mol_type = other DNA

SEQ ID NO: 7746 - DNA, 372 bp, synthetic construct; identical to SEQ ID NO: 3898
  misc_feature 1..372: note = Description of Artificial Sequence: Synthetic polynucleotide
  source 1..372: mol_type = other DNA

SEQ ID NO: 7747 - DNA, 296 bp, synthetic construct; identical to SEQ ID NO: 3909
  misc_feature 1..296: note = Description of Artificial Sequence: Synthetic polynucleotide
  source 1..296: mol_type = other DNA

SEQ ID NO: 7748 - DNA, 407 bp, synthetic construct; identical to SEQ ID NO: 3920
  misc_feature 1..407: note = Description of Artificial Sequence: Synthetic polynucleotide
  source 1..407: mol_type = other DNA

SEQ ID NO: 7749 - DNA, 846 bp, synthetic construct; identical to SEQ ID NO: 3931
  misc_feature 1..846: note = Description of Artificial Sequence: Synthetic polynucleotide
  source 1..846: mol_type = other DNA

SEQ ID NO: 7750 - DNA, 481 bp, synthetic construct; identical to SEQ ID NO: 3942
  misc_feature 1..481: note = Description of Artificial Sequence: Synthetic polynucleotide
  source 1..481: mol_type = other DNA

SEQ ID NO: 7751 - DNA, 231 bp, synthetic construct; identical to SEQ ID NO: 3953
  misc_feature 1..231: note = Description of Artificial Sequence: Synthetic polynucleotide
  source 1..231: mol_type = other DNA

SEQ ID NO: 7752 - DNA, 255 bp, synthetic construct; identical to SEQ ID NO: 3964
  misc_feature 1..255: note = Description of Artificial Sequence: Synthetic polynucleotide
  source 1..255: mol_type = other DNA

SEQ ID NO: 7753 - DNA, 243 bp, synthetic construct; identical to SEQ ID NO: 3965
  misc_feature 1..243: note = Description of Artificial Sequence: Synthetic polynucleotide
  source 1..243: mol_type = other DNA

SEQ ID NO: 7754 - DNA, 410 bp, synthetic construct; identical to SEQ ID NO: 3976
  misc_feature 1..410: note = Description of Artificial Sequence: Synthetic polynucleotide
  source 1..410: mol_type = other DNA

SEQ ID NO: 7755 - DNA, 340 bp, synthetic construct; identical to SEQ ID NO: 3987
  misc_feature 1..340: note = Description of Artificial Sequence: Synthetic polynucleotide
  source 1..340: mol_type = other DNA

SEQ ID NO: 7756 - DNA, 224 bp, synthetic construct; identical to SEQ ID NO: 3998
  misc_feature 1..224: note = Description of Artificial Sequence: Synthetic polynucleotide
  source 1..224: mol_type = other DNA

SEQ ID NO: 7757 - DNA, 697 bp, synthetic construct; identical to SEQ ID NO: 4009
  misc_feature 1..697: note = Description of Artificial Sequence: Synthetic polynucleotide
  source 1..697: mol_type = other DNA

SEQ ID NO: 7758 - DNA, 385 bp, synthetic construct; identical to SEQ ID NO: 4020
  misc_feature 1..385: note = Description of Artificial Sequence: Synthetic polynucleotide
  source 1..385: mol_type = other DNA

SEQ ID NO: 7759 - DNA, 296 bp, synthetic construct; identical to SEQ ID NO: 4031
  misc_feature 1..296: note = Description of Artificial Sequence: Synthetic polynucleotide
  source 1..296: mol_type = other DNA

SEQ ID NO: 7760 - DNA, 281 bp, synthetic construct; identical to SEQ ID NO: 4075
  misc_feature 1..281: note = Description of Artificial Sequence: Synthetic polynucleotide
  source 1..281: mol_type = other DNA

SEQ ID NO: 7761 - DNA, 250 bp, synthetic construct; identical to SEQ ID NO: 4186
  misc_feature 1..250: note = Description of Artificial Sequence: Synthetic polynucleotide
  source 1..250: mol_type = other DNA

SEQ ID NO: 7762 - DNA, 630 bp, synthetic construct; identical to SEQ ID NO: 4226
  misc_feature 1..630: note = Description of Artificial Sequence: Synthetic polynucleotide
  source 1..630: mol_type = other DNA

SEQ ID NO: 7763 - DNA, 457 bp, synthetic construct; identical to SEQ ID NO: 4237
  misc_feature 1..457: note = Description of Artificial Sequence: Synthetic polynucleotide
  source 1..457: mol_type = other DNA

SEQ ID NO: 7764 - DNA, 283 bp, synthetic construct; identical to SEQ ID NO: 4248
  misc_feature 1..283: note = Description of Artificial Sequence: Synthetic polynucleotide
  source 1..283: mol_type = other DNA

SEQ ID NO: 7765 - DNA, 261 bp, synthetic construct; identical to SEQ ID NO: 4259
  misc_feature 1..261: note = Description of Artificial Sequence: Synthetic polynucleotide
  source 1..261: mol_type = other DNA

SEQ ID NO: 7766 - DNA, 249 bp, synthetic construct; identical to SEQ ID NO: 4270
  misc_feature 1..249: note = Description of Artificial Sequence: Synthetic polynucleotide
  source 1..249: mol_type = other DNA

SEQ ID NO: 7767 - DNA, 1216 bp, synthetic construct; identical to SEQ ID NO: 4281
  misc_feature 1..1216: note = Description of Artificial Sequence: Synthetic polynucleotide
  source 1..1216: mol_type = other DNA

SEQ ID NO: 7768 - DNA, 365 bp, synthetic construct; identical to SEQ ID NO: 4282
  misc_feature 1..365: note = Description of Artificial Sequence: Synthetic polynucleotide
  source 1..365: mol_type = other DNA

SEQ ID NO: 7769 - DNA, 324 bp, synthetic construct; identical to SEQ ID NO: 4293
  misc_feature 1..324: note = Description of Artificial Sequence: Synthetic polynucleotide
  source 1..324: mol_type = other DNA

SEQ ID NO: 7770 - DNA, 707 bp, synthetic construct; identical to SEQ ID NO: 4304
  misc_feature 1..707: note = Description of Artificial Sequence: Synthetic polynucleotide
  source 1..707: mol_type = other DNA

SEQ ID NO: 7771 - DNA, 595 bp, synthetic construct; identical to SEQ ID NO: 4315
  misc_feature 1..595: note = Description of Artificial Sequence: Synthetic polynucleotide
  source 1..595: mol_type = other DNA

SEQ ID NO: 7772 - DNA, 372 bp, synthetic construct; identical to SEQ ID NO: 4326
  misc_feature 1..372: note = Description of Artificial Sequence: Synthetic polynucleotide
  source 1..372: mol_type = other DNA

SEQ ID NO: 7773 - DNA, 296 bp, synthetic construct; identical to SEQ ID NO: 4337
  misc_feature 1..296: note = Description of Artificial Sequence: Synthetic polynucleotide
  source 1..296: mol_type = other DNA

SEQ ID NO: 7774 - DNA, 407 bp, synthetic construct; identical to SEQ ID NO: 4348
  misc_feature 1..407: note = Description of Artificial Sequence: Synthetic polynucleotide
  source 1..407: mol_type = other DNA

SEQ ID NO: 7775 - DNA, 846 bp, synthetic construct; identical to SEQ ID NO: 4359
  misc_feature 1..846: note = Description of Artificial Sequence: Synthetic polynucleotide
  source 1..846: mol_type = other DNA

SEQ ID NO: 7776 - DNA, 481 bp, synthetic construct; identical to SEQ ID NO: 4370
  misc_feature 1..481: note = Description of Artificial Sequence: Synthetic polynucleotide
  source 1..481: mol_type = other DNA

SEQ ID NO: 7777 - DNA, 231 bp, synthetic construct; identical to SEQ ID NO: 4381
  misc_feature 1..231: note = Description of Artificial Sequence: Synthetic polynucleotide
  source 1..231: mol_type = other DNA

SEQ ID NO: 7778 - DNA, 255 bp, synthetic construct; identical to SEQ ID NO: 4392
  misc_feature 1..255: note = Description of Artificial Sequence: Synthetic polynucleotide
  source 1..255: mol_type = other DNA

SEQ ID NO: 7779 - DNA, 243 bp, synthetic construct; identical to SEQ ID NO: 4393
  misc_feature 1..243: note = Description of Artificial Sequence: Synthetic polynucleotide
  source 1..243: mol_type = other DNA

SEQ ID NO: 7780 - DNA, 410 bp, synthetic construct; identical to SEQ ID NO: 4404
  misc_feature 1..410: note = Description of Artificial Sequence: Synthetic polynucleotide
  source 1..410: mol_type = other DNA

SEQ ID NO: 7781 - DNA, 340 bp, synthetic construct; identical to SEQ ID NO: 4415
  misc_feature 1..340: note = Description of Artificial Sequence: Synthetic polynucleotide
  source 1..340: mol_type = other DNA

SEQ ID NO: 7782 - DNA, 224 bp, synthetic construct; identical to SEQ ID NO: 4426
  misc_feature 1..224: note = Description of Artificial Sequence: Synthetic polynucleotide
  source 1..224: mol_type = other DNA

SEQ ID NO: 7783 - DNA, 697 bp, synthetic construct; identical to SEQ ID NO: 4437
  misc_feature 1..697: note = Description of Artificial Sequence: Synthetic polynucleotide
  source 1..697: mol_type = other DNA

SEQ ID NO: 7784 - DNA, 385 bp, synthetic construct; identical to SEQ ID NO: 4448
  misc_feature 1..385: note = Description of Artificial Sequence: Synthetic polynucleotide
  source 1..385: mol_type = other DNA

SEQ ID NO: 7785 - DNA, 296 bp, synthetic construct; identical to SEQ ID NO: 4459
  misc_feature 1..296: note = Description of Artificial Sequence: Synthetic polynucleotide
  source 1..296: mol_type = other DNA

SEQ ID NO: 7786 - DNA, 281 bp, synthetic construct; identical to SEQ ID NO: 4503
  misc_feature 1..281: note = Description of Artificial Sequence: Synthetic polynucleotide
  source 1..281: mol_type = other DNA

SEQ ID NO: 7787 - DNA, 250 bp, synthetic construct; identical to SEQ ID NO: 4614
  misc_feature 1..250: note = Description of Artificial Sequence: Synthetic polynucleotide
  source 1..250: mol_type = other DNA

SEQ ID NO: 7788 - DNA, 630 bp, synthetic construct; identical to SEQ ID NO: 4654
  misc_feature 1..630: note = Description of Artificial Sequence: Synthetic polynucleotide
  source 1..630: mol_type = other DNA

SEQ ID NO: 7789 - DNA, 457 bp, synthetic construct; identical to SEQ ID NO: 4665
  misc_feature 1..457: note = Description of Artificial Sequence: Synthetic polynucleotide
  source 1..457: mol_type = other DNA

SEQ ID NO: 7790 - DNA, 283 bp, synthetic construct; identical to SEQ ID NO: 4676
  misc_feature 1..283: note = Description of Artificial Sequence: Synthetic polynucleotide
  source 1..283: mol_type = other DNA

SEQ ID NO: 7791 - DNA, 261 bp, synthetic construct; identical to SEQ ID NO: 4687
  misc_feature 1..261: note = Description of Artificial Sequence: Synthetic polynucleotide
  source 1..261: mol_type = other DNA

SEQ ID NO: 7792 - DNA, 249 bp, synthetic construct; identical to SEQ ID NO: 4698
  misc_feature 1..249: note = Description of Artificial Sequence: Synthetic polynucleotide
  source 1..249: mol_type = other DNA

SEQ ID NO: 7793 - DNA, 1216 bp, synthetic construct; identical to SEQ ID NO: 4709
  misc_feature 1..1216: note = Description of Artificial Sequence: Synthetic polynucleotide
  source 1..1216: mol_type = other DNA

SEQ ID NO: 7794 - DNA, 365 bp, synthetic construct; identical to SEQ ID NO: 4710
  misc_feature 1..365: note = Description of Artificial Sequence: Synthetic polynucleotide
  source 1..365: mol_type = other DNA

SEQ ID NO: 7795 - DNA, 324 bp, synthetic construct; identical to SEQ ID NO: 4721
  misc_feature 1..324: note = Description of Artificial Sequence: Synthetic polynucleotide
  source 1..324: mol_type = other DNA

SEQ ID NO: 7796 - DNA, 707 bp, synthetic construct; identical to SEQ ID NO: 4732
  misc_feature 1..707: note = Description of Artificial Sequence: Synthetic polynucleotide
  source 1..707: mol_type = other DNA

SEQ ID NO: 7797 - DNA, 595 bp, synthetic construct; identical to SEQ ID NO: 4743
  misc_feature 1..595: note = Description of Artificial Sequence: Synthetic polynucleotide
  source 1..595: mol_type = other DNA

SEQ ID NO: 7798 - DNA, 372 bp, synthetic construct; identical to SEQ ID NO: 4754
  misc_feature 1..372: note = Description of Artificial Sequence: Synthetic polynucleotide
  source 1..372: mol_type = other DNA

SEQ ID NO: 7799 - DNA, 296 bp, synthetic construct; identical to SEQ ID NO: 4765
  misc_feature 1..296: note = Description of Artificial Sequence: Synthetic polynucleotide
  source 1..296: mol_type = other DNA

SEQ ID NO: 7800 - DNA, 407 bp, synthetic construct; identical to SEQ ID NO: 4776
  misc_feature 1..407: note = Description of Artificial Sequence: Synthetic polynucleotide
  source 1..407: mol_type = other DNA

SEQ ID NO: 7801 - DNA, 846 bp, synthetic construct; identical to SEQ ID NO: 4787
  misc_feature 1..846: note = Description of Artificial Sequence: Synthetic polynucleotide
  source 1..846: mol_type = other DNA

SEQ ID NO: 7802 - DNA, 481 bp, synthetic construct; identical to SEQ ID NO: 4798
  misc_feature 1..481: note = Description of Artificial Sequence: Synthetic polynucleotide
  source 1..481: mol_type = other DNA

SEQ ID NO: 7803 - DNA, 231 bp, synthetic construct; identical to SEQ ID NO: 4809
  misc_feature 1..231: note = Description of Artificial Sequence: Synthetic polynucleotide
  source 1..231: mol_type = other DNA

SEQ ID NO: 7804 - DNA, 255 bp, synthetic construct; identical to SEQ ID NO: 4820
  misc_feature 1..255: note = Description of Artificial Sequence: Synthetic polynucleotide
  source 1..255: mol_type = other DNA

SEQ ID NO: 7805 - DNA, 243 bp, synthetic construct; identical to SEQ ID NO: 4821
  misc_feature 1..243: note = Description of Artificial Sequence: Synthetic polynucleotide
  source 1..243: mol_type = other DNA

SEQ ID NO: 7806 - DNA, 410 bp, synthetic construct; identical to SEQ ID NO: 4832
  misc_feature 1..410: note = Description of Artificial Sequence: Synthetic polynucleotide
  source 1..410: mol_type = other DNA

SEQ ID NO: 7807 - DNA, 340 bp, synthetic construct; identical to SEQ ID NO: 4843
  misc_feature 1..340: note = Description of Artificial Sequence: Synthetic polynucleotide
  source 1..340: mol_type = other DNA

SEQ ID NO: 7808 - DNA, 224 bp, synthetic construct; identical to SEQ ID NO: 4854
  misc_feature 1..224: note = Description of Artificial Sequence: Synthetic polynucleotide
  source 1..224: mol_type = other DNA

SEQ ID NO: 7809 - DNA, 697 bp, synthetic construct; identical to SEQ ID NO: 4865
  misc_feature 1..697: note = Description of Artificial Sequence: Synthetic polynucleotide
  source 1..697: mol_type = other DNA

SEQ ID NO: 7810 - DNA, 385 bp, synthetic construct; identical to SEQ ID NO: 4876
  misc_feature 1..385: note = Description of Artificial Sequence: Synthetic polynucleotide
  source 1..385: mol_type = other DNA

SEQ ID NO: 7811 - DNA, 296 bp, synthetic construct; identical to SEQ ID NO: 4887
  misc_feature 1..296: note = Description of Artificial Sequence: Synthetic polynucleotide
  source 1..296: mol_type = other DNA

SEQ ID NO: 7812 - DNA, 281 bp, synthetic construct; identical to SEQ ID NO: 4931
  misc_feature 1..281: note = Description of Artificial Sequence: Synthetic polynucleotide
  source 1..281: mol_type = other DNA

SEQ ID NO: 7813 - DNA, 250 bp, synthetic construct; identical to SEQ ID NO: 5042
  misc_feature 1..250: note = Description of Artificial Sequence: Synthetic polynucleotide
  source 1..250: mol_type = other DNA

SEQ ID NO: 7814 - DNA, 630 bp, synthetic construct; identical to SEQ ID NO: 5082
  misc_feature 1..630: note = Description of Artificial Sequence: Synthetic polynucleotide
  source 1..630: mol_type = other DNA

SEQ ID NO: 7815 - DNA, 457 bp, synthetic construct; identical to SEQ ID NO: 5093
  misc_feature 1..457: note = Description of Artificial Sequence: Synthetic polynucleotide
  source 1..457: mol_type = other DNA

SEQ ID NO: 7816 - DNA, 283 bp, synthetic construct; identical to SEQ ID NO: 5104
  misc_feature 1..283: note = Description of Artificial Sequence: Synthetic polynucleotide
  source 1..283: mol_type = other DNA

SEQ ID NO: 7817 - DNA, 261 bp, synthetic construct; identical to SEQ ID NO: 5115
  misc_feature 1..261: note = Description of Artificial Sequence: Synthetic polynucleotide
  source 1..261: mol_type = other DNA

SEQ ID NO: 7818 - DNA, 249 bp, synthetic construct; identical to SEQ ID NO: 5126
  misc_feature 1..249: note = Description of Artificial Sequence: Synthetic polynucleotide
  source 1..249: mol_type = other DNA

SEQ ID NO: 7819 - DNA, 2566 bp, Homo sapiens
  source 1..2566: mol_type = unassigned DNA
cgctgggcgatgagggaccgttgggtaattgggggcataggaccgggcttcgctgggttcggggcagaagcgccgaagctccgacccggaacgcggtgacttcatcaacgcagaagcccgcgcagccgagcagaggagtccctcgtaggcgaccctcggacagacgctcctgcgcggcccgcgtggctcagctccgccccaggaaacttttcgcgcagcccccgctccatgcgcccccacccagtccttcttcggggccgccccctccccaaagtagctctccgggtccactgggcgcccccgtaaccgggtcggaacctcgaacggcttcgcgtgccatccggttaccctggcaacaccatccggcggcgcccggcggtccaatcctagcctgcggcctctctcgagcctttcgcaaggtggggaccgggacgcgaccggggatggggaagggggctgcaggaggccccgcctgcgctgtcgcccctgctgggcacagcgccccccaccacccgcggcgaccccggcccccgcaaggtggggcggcgagcaggagccggggccaggccaggggctcgagctcccgttcgaggggcggggaaggcgggtgacgtgagccgggccgggcgggcggagttgggaccggctccgggaggcgggggcgagcgcgcggagaggcagacgcgaggagggaggcggctgagcagcgcgggcggctctgcggcgggcgcggtgggcgcgggcggcggggccccgggatccccgcgcgcctcctccgcgcggcgccgccgccgcgcgtccccacgccccgcgctccacggcgccctcgccccgcgcgcctctcgtgcccgcctcctgccagtctccgggccgcggccgtctgcagagcgagcgctcagacggagcccccgggcaacttgagtggcgccgatcggcggcggagcctctggcagagccccccgacccggcagcgcggaggggactcgcgtccgtccgcgtcgcgtcaccccaaaccctaagcagcgccgccccatcggcgcggagctccggctggaggcaagagccgcgcgccgggagacacgcaccgtgagcggcagcgccgccggcctccctcctcgccgccccggagggcgaagccgcggctccccagccctttgctgcgccgcgacagcgccggaacacgccccgcctcgctgccgccttcgctgtgccgccggcggagggggccgcgagccccgcgccccggccggaggatgtgcgcccccgcgggccgcccagcctgagccatgcgccccaacggcggcggcgcgccggccggcatggagccccgcgcggccgcgctctgactcgctgtgcgccccgcggccggcgggcggcgggaggcggcggaccgagagccggagaccggcgccgcgggacggaagcgagcgggcgcgggcgccgcgcagatggcctgggcgagccaggtctgaggccccgctccccgaaacgtgaccatgtggattcaacagcttttaggactcaggtgagcgacccggccggcgccgggtgcgtgtgggcgcgtgggtgccaggctgggcggaagcggcgctttcctctatgttgcaaatcaagggacccctcttcgcttcccgcaagcgggcaacggggtgcaccggtagccggaaaggggcgcccgcccggagcctggagcagcaccgcggccctggcggggagcggccgggtctccagggttccgcgcgtccggggtcggggcagcggcgcccgccccagcaacccgggaagtggggccggccaggcgcgcccgcagctctaggagccagcagcgcagtgtcctggccggctgccccggcgcgcctcctccccggggcccggggcgaggcgccggccgctgggcgcggcgggcgcgggggccggggctgccggggaaagctaaagctccgggctcccagcgagagcttcgcaggcggagttggaggaaaccacagccaaacagccactccgctcccccttctcctttctcggggccccggggctgagcaggggcctcccaggctcccagctgccgacccagctgtttgcgggtgacctccgggcccgacgggcgctcacagctggcgggcagctggggcgggagagctggggttcttggggagctccggcggccaccccgctgtaaacacacacgcacatacgcccgccggcgcgcccggggcttgtctgtgtctgggactccagggccagatggaagagggggttcgagcctagagcccgtggtgggggtgtccagaaagacccttctcggcaaactttgccagcccgccggggttctcgggcttctctggcttctgcctggggtggcccagggcccaccagagcacagctgtcgtttttgctgggcaggctgcctctgagccctcgccctcctgccggggcattcaccgagctcgtgcatttgggtcccgggttggaaccgcgagcggggaggacagaggtggaggcggagagcagcgtgcggttctcgagtttgtccactgggatgcactgcgctcccgcgttggggacg

SEQ ID NO: 7820 - DNA, 572 bp, Homo sapiens
  source 1..572: mol_type = unassigned DNA
cgcccaagaagtcggggtcctccctggccacgcgcctccgggggcgctcgcgctctccaggccctggctgcctgggcgccgattcccgggacgcgccggccgacagcaggggaggcggcagcagggaccgcagcagcccccgcttccgcacggcccgccgggtcgcggtgagcaaggcgggcaggcgcggcgggaggcgtccgacgcccaccccgggcttggcgtccccttccggccaccacgcggcgccgccccccgggatcctccagtccccggagccccgcgcgcccagagccgctcggagcgcgggcggggtcagcttgggcagccgcgggtcgctgctgcgtcggaagtctccgtcgccagggagccccttgggcgccaggtcctgggcccctgggcgaagtcgacgccagaacatgcttggccccgcactcagctcaccgcaccctcagcgcgcgtgggtggggggcgccggctgaggtggggagggcatagtccagccccaggccatagtgccccgggcggggcagcgcggtgcggggtgaacgccaccggcccggcggacagcg

SEQ ID NO: 7821 - DNA, 989 bp, Homo sapiens
  source 1..989: mol_type = unassigned DNA
cgtggtgtgtgtgtgcgcgcgcgagtgtgtgagcgccaggggccgcccgcccgccgcggctccccgtgggctggccgggccaatgagcgcgcggctgtaggggcggcgggcggggagggggcgccgagccctgcggatggaggcgcgggcagcgcggcgcgctcattccgcgcgggcgttgctggcggggggcggcgcagccactggacccggaccggggccgcgacccggggtggcgggtggcgtgggcggcgcccggggctgggatgcgccgggggctcagtggcggcggcggcgttggcggtggcgtcggcggctgcagggggacgagctagcgccgcggcgctgggagccagttgagcccggccggcgagcggaggcggcagcgcaggcagagcggcggcggcagcgggagcccgagcgctgcgcgcccaccatggccgcccagggagagcccggctacctggcggcgcagtcggaccccggctccaacagcgagcgcagcaccgactccccagtgcccggctccgaggacgacttggtcgccggggcgaccctgcacagcccggagtggagcgaggagcgcttccgcgtggacaggaagaaacttgaggccatgttacaaggtaggcatccctcgtgttctcggactctccgactgagcctctaactccttttcggacatccccaccgcgcgctccggcgcccgctactccagcctacggccggccggtttagctccaggcccgctcccccgcggagccggaggacacccagggactggagacttcgcgggactccccacccttccacgcctctcagatttccaggcgctgggggccctgtgcgaacttgactggcttcagaaaagccgaaggccgagtttgtactggcgcgcccaagttgcgttctggactttggagatgccaactttagcccggacacctgggctgtgccatccggaccactcgggccgcacagagtatgcg

SEQ ID NO: 7822 - DNA, 2400 bp, Homo sapiens
  source 1..2400: mol_type = unassigned DNA
cgaaggtgtcgccagcctcagtgccggtgggcgtctgcaccaggaatagctaaagccgacgacatctagccacctcgagcgccagggaagacgctccgcgtaaaaccgcggcctcaggcggactcccgctccagctccgcgctgctggtggcatttccggggacccaaagtgggtggcctgggggcaaaggaacagaggccgaagaacttggggtatgttccactagagcacctaagggacggagtgggaggttacatcagatatgcgacctcgacacattccaaaagtggcagccccgtgggctacccccaatagtgggatggatctccccaacttctctcgcccctcgaagtccccctgttatctcgggccatgctcctcccccgggattcccttgtgcaaaattattctctcccttgcccaaaggatttttcccttctttctgaccccacgaactcatctccccaacaggttcctaaagtatgggcggatgtgctccctctcgcccaccgccaggagccgagccccggcaggtgagcggtgcaaaacacgcacccagctgcccccagcttcctccgtccccgctgagttggctgtccccaccccgcaccacggcacccgagcctgtgagtccccgaccccggccccagccgcagccgccaacaaccctacaataaacaagaggacaggattgagcgtccgcgtcccggagcgcactggctgggggcaactcctcacccccggcgcgccgcccgctgccccgatccgagagcaccgggagagccgagggaagggaaggcggcgaggggaaggcaggcggggatggagggaggcacggcgcggcgcggagcgaggaggtgggctgcaggggacgccgagaagcggtggggctggcgcagagggcgggcgcccggggcgcgcgttaccttcgtcttgcccccgcagtggcagcacacggtccacaggtacttgagcgtccgccagagcaagatgatgaagaggcccccgaagaaagtcaccatggaggaggccaggaaagcccaccacatgcgttggccccggctgtcgcacggcacctccatggtcaccgggatgatgagcgcatccatcttgggctcgtggaccgaggacgaggaggaagaggaggaggaagaagaagaagaggaagaggaggaggaggaggaggaggacgcgtctaggctgagatggttcgcgtggatattgctactcattctaagactgctgcctccgccgccgccgccgccgccgctgctgccgccgccgccgccgccaccatttgccatagctagcaacgggcagccggcgcaggggctcgggggagctcctcccgccgccagcgccaccccaaacacccatcaacagccatattgctgctactgctgccgccgccgccgccgccgcggagcgcgggaggggggcggggaggcgcctgggctcggggcgctgtgcgcgacctggcggggtgcgccgagatatatacagcgagccgccgccgcccgcccgggggggagggggatggagtgcgcgggcagctccccctccccggcccgcgccccgctcgccccgggctgcgctggccccgagcgccgagagccagggggcgccgcgggccgcccgcgcccggggtctgcgccgcccccgggcccgccccggctccgcgcgcggtcccgggtgtcctcggcgccgcgccgcccgccgtgcgccacgggtgtgcgctgcgctcggccggtgacccccttccccgagcgcctcccgcgcggctaacgagccgctctccgcttattaggtggtaactcgttaataatggataatcggccccctccgcccgggcgcccctgcgccagccctcctcccccggctgcgctcggctccggctcgccgcgccagtgcgcgcccggccgcggcaggttcaccgcgtccggccgccggcccgtggccgcctgctagcccatgttctcgggaccccctagtcctgtcgccacgccgctgagcccctcggcctccgctcgctcttcctccttgccgcctccgactcctcctcgtccccgtcctcgccgcccaagcctcttcggcgcgcgccccgcgctccccgcagccgccagcagcagcagctgcagcaactggagcgggcgcggactcaggacgacccaggcgggaggggaggaggctcgccgcgctggctcgcctgggctccgggctgggcaggggtgggcagggcccctcggcagcggcccggcaagcgcccctgacccccagggcgcaaggtagagcgcccccagcccaggcgcggggccaggcgcctctctccaaggtgctgcgcccccagccgagagcggtggggtacactgggaggacggcggggcgccccggtcaggccg

SEQ ID NO: 7823 - DNA, 1859 bp, Homo sapiens
  source 1..1859: mol_type = unassigned DNA
cgcgatgtcagccacggcccgcggcggtcacggagccacttcagcacctcgcgatggacagtgacccccggcgtggcgcgagttccctgcggtccccacgcgggcctgggcggcgggtccctccacggctccgtccagacacccggaggcacctgccaaagctgcggaggtggacgaccgggcgtccaagcacgaactttctcgccgaggcacggctgccgggctccgtcctgagggtttggggcggcgaggaccgccggggaggagggcgcgcgagccggaggccagagccgggccgggcagggcgcgcccaggagcaggggagacggcgacccgggccgaggcgggacggggacacgttacctgcccgtggagcgcggggaaggggtgcgcggcggcggcggcggcggagtctggcgcagagggcagcggcagcagcgggagcaccggctcgctcggggccggccagccggggagaccggggagcagcggggccgcgggcggcggggccgaggcgagcagcaccgggggaaccacgacccccgcgctgagccggagcagcccggccgagcccggcaccatccagacccagggcggcggcggcggcggctctgcgtccatcggccagaggagaggctgccgccgccggggctgctgctgctgcagctgccgccgccgccgctggaacctggcgcccgcctgcatcctacatccccgcgctgacggcggcggcgggggcggcgggcgcccgagatgctgggccggcggcggcgcggctccggagcgaactcacttggctccgcggcgcggccgctcgctccgcccctgccccgcgcgggaagctcctcctcctcccgcccgcgccgccgccgcccccggacccggcccccgccccggtccccgcccgcccgcgcccctccccgccggaccccgccccgccctcgcgctccccggccctggccggggtctcctccccgctgcgcccctggacccgggcggccgcggaggacgtgggtgggagagggccgagggcgcgcccggctgggctcccgccgatgccggccccctggtggcctctggccctctgggacccagcgcaccgcgagggaggctccgggctccgcactcaagggcaagcggaagccgaggtggcggcgccggagccaggcatgtcccgctgcccagcgcggggctgagggcgcagacggggaccgcgcgagccgctctctacctggcctcctcggagtccagggcgcggagggtactgggctgcggatccggcgcaggcggccccggacgctgctaggcgcgggcggatttctgttgcacaaatgggccaaacaggttcgtaaggcccccgcgggtcccctggcccggaagttgagccgcgggtgcctggtctgaagttccgcgccccacagtggcccgcgggcctcggcggctcctgccctacgccctccaaggcaccaggcaggtggccccagggcctttgcccacgacaccccctgggtggggcaggaccacccctctgtgaattcgtcctggatgcccccaggcacagtctgtactcctccctcccccagcacacgcggcctctgacgctgcacgccgagcttcctgggacccaggacgaaccgggctccaaggaccctcgctccgcccggaccacacgcaggcagcgccggccgagccgagcctgggtccgcactggccacgcgcagccaccgccagacggcgctagccctcccccgctgtagaccctgcttcggaggccgccagcctcctccccatcccgggtccacagcttcagtgcagcccctggcgacgcgcgctgacagctgggcagagacttccgtgcg

SEQ ID NO: 7824 - DNA, 902 bp, Homo sapiens
  source 1..902: mol_type = unassigned DNA
cgatcccagaactcgttccccaccccgagcccgtttcccgccgcctcctcgcccctgggagggcggccccattaaccctcgcgacccgggccgctcctggcggtcctgaccccgccaccccgtcccgcggcgggggtttgggggtgaggggcgcgccctggggcagaggattgcgcggcagggtctgccacagggcagaggccagggctctccgggaaaaaggcaggcgcatatatgcccccctttctgggaaaagacggggaggggggcttctcctgggagactccaggcttcgaaattcctcgttccctatcctccggcccccgcacccctcctcctccccgccacgcaccctctcccctccccagccatctgttccactccgcagcgccgcgacaaacacggctccagctcgcttccgcccctgcccagccccctccccaagccccggggagtgggggagtgagcagacgcccttctcctaggaggccggaatttctgcctccatctcccaccggggtccggctggccagaggcaagcttcgagaccccccaccaaccaccaccaccgttgcgagggccggtgaggctgcagataacgcttgcaaggacgggagtcggggagggtgtagggcgagtttaaaggacgggcagagcaagccccgggaagaggcaggggttttccctcccgggtcgccgccccccgcaccctcggagccagccgcagccacgcagcgccgcctgccgggcacaccaaggacctggcgcgcacgtggcgcttacccccacccccgggtccgctcctggctcgcgctcagcctccccagactattcgcaaattgaggatcccggacacagagtgcagagaccccggcaagcctactgaaagccagccgaacccg

SEQ ID NO: 7825 - DNA, 2044 bp, Homo sapiens
  source 1..2044: mol_type = unassigned DNA
cgaaacggcagaggccggcagcccgcggcccacgtgcacttgctcagggaaccgttccagcgaaacctgacccggatcggaatcctcccgcagcacagcggccgtgtttatcggaatggaacgctacaagttgtcacctgcatccctctcccagctttgacagggaacacgcgctgcccccacgcccacaccgacacccggatccctatccagcccggccagagtcccaggggccagggaccagtgcagggagaaggtcccccacctcagccctcaggacccccaaccacagcccacccgcccccaccctgctcggttctaggcccagccgaacctacatgtccccgtagtgtcgagcgttatcatccacagtcgcccctcaaactgtgacccccacctgggagacccggaatcatccaggaccctggtgtggggggcagtactccccatatctgccccccgaaaactgctatggagcagccgcgcctcggcgggcaggtgagggggccgagcccaccagcgccgcagccccgctgcctaccttcttcagcgccggctgccgctcccgggcagacatcgccggccctgactttggggctgacaccgccaaagggcagtcagtgctcgcccaggccacttcgggaggcccaggggcacggcgaggggtcggggaaaggcgatcgcccactacagcccgcgcgcctagactgagggaggagccgggctgcagaaccggcggcggatggagacgggagggaggctgcgaggtcgctcgaggagagactaaggctctagaaacggagaagcgggcgctctgcgggaggcggcggcgctgccgctggccgtcaagggcgggaagtgttctgggactctcattaggggccgcgagcctcgagcgtcaaattcccgcggcgtccgcctagcgcgctgctgtggcgggcgcggagggcgcgcgccggcagtgggggctgcggcggcggagggcacgggcccccgctcagcgtcctcaccttcttggtgcagctgcctcccgcgagccgagacactcctgtcagggaagaggagcgccccggctgtccccctagagtctcctgctggggggacatcgcttccatgaagaaaatcttcaaacaaatcccagcccaggaggaggctacacgatcatgtccgcgggctgccggccggaggggcgaggacgcgcgggcggaggcgcggctgccgtgctcaggcagggagccgagctccgggtgctcgccgcgcgcctcccgtcggggccatgtacctccgcctgcgctcgacaccgcgggctggaggcgagtgcagcggcgacagcccgtcagcgccgcggcccgccccgcctcgggcccgccccctccgctccgggcgccctgcgccggggcccgcccccgcagccctcctcagccctcctccagcctgggccctcctagcctcgtcccagcctgcggcgcgcctggcgggcgtctctctatatatgttagcacaccggccaccggctgaccttttcggtctgtgactccgcgtgggtgcagcccgcaggagctcatcggcctgtgtcacgcacgggggcctctagtgcacggacacgcgcctctcccgccacctgcccactcccaccagaccccatcccttcccgcgccgtgcccgcggcggaaggcgcccctgcagcgcgtgcatccgcggagcggtggcgacctcagcctgagcagaggagttgcagtgattcctgcctcgctttcagcggactgcggagggaatcccccaccccaccccactggggatagggtggcacgtcgcagagtgtcgcagctgtacaaatttggaagcccacagcatcgcctgacctcttgtgcaatcccgaacgctagcctgttcgggtaaccctgagtgggcttctgcagccggtcatgtcagcggcccctgcacatttgcacccgcggtttccgctgtctgcaggctgcagagacgggggcattccaaacgtgaaagagcaatgaaggaaaatgcagacagagcgaggacgccg

SEQ ID NO: 7826 - DNA, 1152 bp, Homo sapiens
  source 1..1152: mol_type = unassigned DNA
cgccccctccgtagagaccgctagctgaggctgcaacacctgccccggcaaagcgtctccgcagccttcccggcttgcccgactcggcttcctccgcctctgccccggctgcggcaccacttcttggagccacgtctcggcgagcgggggccgcggagcgagggggccgctgtgccgctactcacccgagccgctcgggctggccgcgagccgggatccgcgagggctggcgggctctggcccccgaggacgcagacatgtggcttgaacctccgctcccctagccgttgcctctgtgcatctttctgggcgcccccagcgaatgcgagcggcgaggcgagggcgagcgcgccgaggaagggcgggagaggcgcggagcttggccgcgccgcgctgcgccgagcgccgggctctccccgcgagctccccgggcccgcgcgcgcgccccccactgcccccgccccccgcgcggcgcgtgccccccaccccccgccgcgcgccctcgcacccgcccggctccacgcggcgcgcgcctgccctggcggcagcggcggcggcggcggcgcgtcctcccccgaacgccgtctccagggctgctggctgcgctctccattgttccgcggctgctgcccggggtgggcggcgaggcgggggggaggtgtcggcttggccgccggggagggcttaccgctcgggcggaccctcactgcgagagcgatgcgggcccaggcgcggcgcgcgggggctgcagggcgcctagcactgggggttgccggcgcgcgggggcctcctcctggctcccaggcactcgctgctgctgggcgcccctcgcatcctcggttactatggatatctcgctcctccgccgccccctccgcgcactccgggaggccgccggggcggtagcagcggcgcggctccgcgggtgcccaggtgaccggctcggcagcggcagagcagtggcagcagccgccactgccgctgttactgcggtcgccgccgctggagagaggaggacgaggagggcaaggggcagaagcaggtcctgctctgtctgccccagaggccacctcgggtttcttctcactaaccaagcgacttcgtgtttacctcgcaggagacgcctcggcagtcctcaacttgtgtgcgccg

SEQ ID NO: 7827 - DNA, 872 bp, Homo sapiens
  source 1..872: mol_type = unassigned DNA
cggagagctgccaccgaccccctcaacgtcccaagccccagctctgtcgcccgcgttccttcctcttcctgggccacaatcttggctttcccgggccggcttcacgcagttgcgcaggagcccgcgggggaagacctctcgtggggacctcgagcacgacgtgcgaccctaaatccccacatctcctctgccgcctcgcaggccacatgcaccgggagccgggcggggcaggcgcggcccgcaaggacccccgcgatggagacgcaacactgccgcgactgcacttggggcagccccgccgcgtcccagccgcctcccggcaggaagcgtaggtgtgtgagccgacccggagcgagccgcgccctcgggccagcgtgggcagggcgccgcagcctgcgcagccccgaggaccccgcgtcgctctcccgagccagggttctcaggagcgggccgcgcaggagacgttagagggggttgttagcggctgttgggagaacgggtcacggaaacagtcccttccaaagccggggccatcgtggggtgggcgagtccgccctcccaggccgggggcgcggaccagaggggacgtgtgcagacggccgcggtcagccccacctcgcccgggcggagacgcacagctggagctggagggccgtcgcccgttgggccctcaggggcctgaacgcccaggggtcgcggcgagtccacccggagcgagtcaggtgagcaggtcgccatggcgatgcggccccggagagcgcacgcctgccgcggtcggcatggaaacgctcccgctaggtccgggggcgccgctgattggccgattcaacagacgcgggtgggcagctcagccgcatcgctaagcccggccg

SEQ ID NO: 7828 - DNA, 1070 bp, Homo sapiens
  source 1..1070: mol_type = unassigned DNA
cgagcggtggctcgaccccgggtgtggcaggaaggggtgccccgcgttccagagccagtgccagtccctatcctcccgggaagccgagactcagggggaacaggtttcccagagcccagcctgcagggacgcggagggcaggagccgccggcgaggagcagccaacttgccatctctggcggctgcacttctcggcggctacaggttgcccgacagcggactccagggtccccgcgacggcacccagagtgctcagaagggaggccggggccggggtgggccgggaaaaccgagggagggaaggagcctggagaagctccgtttaggcggggagggggcgacccggggcgcatctcccgaccatgacccccacagaccttggcgccgcaacctgcgcttcttgaggccgaagatgcgcactttggagaagatatccaccaggttgccgttgcagagcccgcggttcttgctggggctgctccgcctcctgctggcagacggccggtcccagtgctgctcccgcgcctgccgcttctggcggatcaagccgctagcgatggccgcggccatggtggccccgggaacgggtccggggagggagggcgcgggaggacggcgagccgggggcaccggaggggaaggcggcggcgcagaccgtggctcgccctcggggcagaggagggggtgccaggcgggactggggagaggggaaggggggctcagtcctgaccgggacccatcgccctctccgcggggcgcggggccaggcgcgcagatgcgcccagggcgcagccggacgatcccgggaagccggacgtcgtggccgccgccgcttggccacgtccgagtggagagcgggaccgcggctgcgggcgctgctggtcaccgctcgtcgcaggaaccccggcgggggtcgccaccgccactcgcgctgccttctcgccctgcccggctcccgggcgggaggtagagccggccggcggctccccgggcgccggctggagggcgggtcccggcagggtctctgcgcgtccgtcggtccgggtcgcgctgggcaggactcagcgccg

SEQ ID NO: 7829 - DNA, 395 bp, Homo sapiens
  source 1..395: mol_type = unassigned DNA
cgctgggaagggaaaaacggcccacatcgaactggatgccggatggaaacctctctgcgctattagactgcgtccagtacagcagatggcacgagcacgtgcggcgctcagcttaggctctcggaggcagctgagttggaaatcccgacggaaagcacccacaagctcccactctgcgctggcccacccgcgtgcacgcccaccccccacgcgcgtccctggctcagaagcgcacagatgtttactgcttagagccggtaccgctggggagatcgagcgacttgcgcggcgcacagtgcggcgctggcagggctctgggctcccggtcgggggttcgagcggccaagggatgggggtgggggcggggagagtggggggagggcgaaagaccgccg

SEQ ID NO: 7830 - DNA, 265 bp, Homo sapiens
  source 1..265: mol_type = unassigned DNA
cggggacacctaggcgcggggcaggtgcaggggagggggcgcggggcaggggcgcaggggccgccgggttcgggctggaggtgtccgggccgcgggagggagggagggaaggagggagggaggacggcgagggagggaggcaggggcgggcggcgggggatggggccagcggggaggtggaagcgatacccaccgcccgtattggtcctcttggtgctgccggcttcagggggggcttccagcggccttttccgcgagtccggcg

SEQ ID NO: 7831 - DNA, 1169 bp, Homo sapiens
  source 1..1169: mol_type = unassigned DNA
cgggctggcgggcactgagctggggccatcacgcctttctagagcgcctgcggaggtggcgaaggcttggagagcatacgaggcggaatccggatcgagtgagttccttgagccgcttgcgtgggacgcagggagagggcgaataacgccctcaggcgctgaatgcaggggcaaggagccagcgagggtggctggagcaggccttgccagctgttaccaagtctctccacaggcttgggggcttggggcctcctggaaagatccctccgccgcgctgaccagtacggggctcgctcccgcactttgaaggctgccgcggtctttcgtcatttataatcaagcccaagatcaaggttgcaagctgaggtcggggtactgacaacgggaatgaagccataggggaagaggataactgggacgggctggacccatacttgatacccgggaaactcctagagcgtgtggtgctcctgccagcggcagttactggtggagctgaggccaccgctactgtcgtcgttggcgctttgcttctggaacctcccagcaagatggcactcactgtctgttcccttccgattagcacccccagccgcgctccctcctccccgggatacgtattagtcacatactgtggggagaagatgggctatgtaaatgtaagtcaacgcgctttcccagccacctttgcataatgcaacaggaacagcgacccgcgcgcacgaaccgggtagtgtgcgcgtgtgtgtgctcgcgtgtgtgagcgcgtgtgccagcgtgcgtctccgcgcgggcgtgcgtctgggtggatccttgcgtggcttgggaggcaaatcgggcgtttctccaagtcgtcttaacatgatttaggctctcaaatacgtgaaagcggtagacacaacagggatgcgaaggaaataaaaaacaattggggaagtggtgccaagtcactcaggctttgaactgaggacgagtagtgcggtcgcgcctggggcgcgtccggaaatcatcctcagcctgtggcggccactgccccacttaaactcttctgcggggagagttgagcggatccctggggggttggtcctgggctagttttaaactctccggttgcatctcgcgtggccccaccgacggcgcgtctcggcgtagctcttggcgcgggctcg

SEQ ID NO: 7832 - DNA, 1743 bp, Homo sapiens
  source 1..1743: mol_type = unassigned DNA
cggtgggtcgggggcgtggcgagaccctgtttcagtggagggagggcttatgcattgccgagacgccgattatcagaccttgaccctgtcgctttcagaaaaaccactggcagaagatccggaccatggtcaatctgccggtcataagccctttcaagaagcgctacgcctgggtgcagctggcagggcacactggtgagcagtggggcgggtgggcgggtgcccgcgacgggaaggggctgggcggcgctgacggatgccggtcctcagggagttttaaggcggcgggcaccagcgggctgatcctgaagcgctgctcggagccggagcgctactgcctggcgcggctgatggctgacgcgctgcgcggctgcgtgcctgccttccacggcgtggtggagcgcgacggcgaaagctacctgcagctgcaggacctgctcgatggcttcgacggaccttgtgtgctcgactgcaaaatgggcgtcaggtatgcgtgccctgccaggtcggttggggggatcaagtaggggtccggggccgggacagctgcttgagggggacccggggcgagtgctcgaaggggtctccgtgtgcgccccctcatgccctggccgctgcctgcgcccccacaggacttacctagaggaggagctgaccaaggcccgtgagcggcccaagctgcggaaggacatgtacaagaaaatgctggcggtggatcctgaagctcccacggaggaggagcacgcgcagcgcgccgtcaccaagccgcgctacatgcagtggcgggaaggcatcagctccagcaccaccctcggcttccgcatcgagggcatcaaggtgaggcaggcgcgcttcgctggcaccgccgcagccccactgcgcgctgtctttcccgatcccccgctcccgccccgcctgcccctccgccctctcccaccgcctcgccgtcccctgcaactgggaggtaccgctgctctacgctgtcctcttccccactggcgggcccggggcccctgacactcctgtcccacatccagaaagcggacggctcctgcagcaccgacttcaagactacgcgaagccgagagcaggtgcttcgcgtctttgaagagtttgtgcaaggagatgaggaagtgctggtgagagcgggatcccaaaccctgaggtgttggggagcctgaagccgaggactgcccctgtcatctggcccagtgccctcggctgtgtccccaccatggccctcaccgcgctggctcgcaactgctctacgctccttcccttctgggccacgctgggcggggccctgggtcctcctcctggcggcatttgccaagcacagcgtgggtcccggctcctcatcgttagcaggggctcatttggcgtttagttaatttgccctcctctcccaccccaccctctgcagaggcggtatctgaaccgcctgcagcagatccgggacaccctggaggtatccgagttcttcaggaggcacgaggtaagcggcggctgcccgggtgcccgggccgcgagggctagggcgggaacccggcaagggcgtctctgggcagggccgcggcctgacggtgcggggctcgcaggtgatcggcagctcgctcctctttgtgcacgatcactgccatcgcgccggcgtgtggctcatcgacttcggcaagaccacgcccctccccgatggccagatcctggaccaccggcggccctgggaggagggcaaccgcgaggacg

SEQ ID NO: 7833 - DNA, 2405 bp, Homo sapiens
  source 1..2405: mol_type = unassigned DNA
cgcagcgctatagccgcgactgcggcggcggcggcggcgcagggggcgggggaggagagaagcgcccacttcgtcccgctgcctccgcagcagccctggccctagccccggcgcatcagagcggtccttgggaatctttgggcttgttgctccggcggccgccagctgggagcccaccaccgctcgatggtaccgaaccgacccgtgtagccccataaccccagcccaactccgaggagctagcgcagaccgctctccgccctcagctgcggcgaggcaagggctggcagcgctcggacgcctccgtcttgcccttcccatgcctaagcgcggggaattacacgttcccggtgtagaacagacgatcggggctattagggctgggcggtgggagtgggggttgggagcaccatttttggctggacgtgtgtccagactcatcgtctctggtccttaggaccccatcttcctctgcatctccaggtgtcggcccctctgtacccgcctcccacggggctcgtccggcgaagggcagccgcagcccacatctactccccgccctcaatccctgccccctctgcccgccgcagtcactcgcctggctgggagcaagcctcccctctcgctgagggtgcagagagcgcctagggcgccaagagtagaggggccaaagttcaagcgccatcagccagccgaaggccctgagcccccagggccgcggccgggacgcagggaggtcaggacgcgacgctcgcctcacctgtttctccagcggctccttggccgacagcgccggcttgggggagggcgcgcggtcgcagacgcagccctccagcaggtaaagccccgagggccgcgagctcgagtcgctctcgaagtagaagagcaggttctgcagcagcgcgaaccacttggtttgccattttgtgttgtccgaactccgcttgctcaggtagcctttgcgcgtgccgtccttgcgcgccagcagtcccagggacgcgacgtggccatcattcagccggatccccttctgcatggtgctcagaggccagcgagaccccacgcgcttacatcttctccgcgcagcagccccccgtccgtgcgcgctgcgcgctgcctctctctggcgctcgctcgctcgctccctctagctctcccctccccccaaatatctacactccaggatctggcgccgagccgcggcttcttgaatccagatataccattccccgctggaacctcttctccgctccgcagagccccagtacccggaagatgccgcccgaccctcctccggtgccgggcaaactgagggactggcgatctgcgcgctggcgaggggcaggcggagtcatgtgacgccgatccctcgaagagcccgtttcagcagcgcggacagggacacacgcacgcagccccgccgaggcgcagagccgcgcgcaggctgcaacttggtgcctcctccccctccccagacacacacacacgcacacgcacacgcacacactcaaaccctgccctccctcccctcatctccccttctctccctcggatgttaaaaagcaaatcagatcaattttcgtttaacccaatgaaaccccgaaggctcgccatcccgggagtttgcgtctttgcgccccaccgcggcgcactgtagacctggggttaagtgccagttgtcattttctcctccaaaggctcgccccccccccccactttatttctaatacgaggtggaaggaggaaggtgggtggcgaaatagagctgcaaaagcgtccagtcctagtctttgcatagtcagccgggtcacattgaattccagcatccggctgcactcccggcggcttccccagctacctgaggacagtacagggggtgagatggggtggtggttggtgaacgttggttactttattttatattattttattttgagagttgccataattaccggcgccaccccccgtgcaccctgaggtctggttggcgagccgctgctgggagttttctgcaaataccccccaaagcctgaaggcgggcttcaaacgcaggcgccggggaccatgggagccttcaaatagctgcgctggcgcaatgataccttaatgatagattttccgttcttatttttagctctcattcgcctacacagttacacggcatttatccgagaacgtcacagcgcccgcatgctgcaccgggagggcgcgcgggccgccgggcgagccgggagctggggcggggagcgcgcatcgctgtctgccgcagagggcagcgagctcgccccgacccggagcaagccgcgcctggcccgggcgctttgcagcggggatgggtgcccgcgcagccctgtgaaggaaagacaccatctttccgcacggaaactgcgtatacccctcccccg

SEQ ID NO: 7834 - DNA, 1920 bp, Homo sapiens
  source 1..1920: mol_type = unassigned DNA
cgcggacctgggcctggcgcccaccccatcgccaggactggacagaaaggccctggccgaggccaccaacggagaggccagagcggagcctctggcccagaatggaggcagcagcgagcccccggcggcccccaggagcatcaaggtggaggcggtggaggagccggaggcggcccccatcctgggccccggagagcctgggccccaggccccgtcgcggacgccgtcgccgcgcagccccgccccggccagggtcaaggccgagctgtccagccccacgccgggctccagcccggtgcccggcgagctgggcctggccggggccctgttccttccgcagtacgtgttcgggcccgacgcggcgccccccgcctcggagatcctggccaagatgtccgagctggtgcacagccggctgcagcagggcgcgggcgcgggcgccggcggcgcgcagaccgggctcttccccggggcccccaagggcgctacgtgcttcgagtgcgagatcaccttcagcaacgtcaacaactactacgtgcacaagcgcctctactgttcaggccgccgtgcgcccgaggacgcgcctgccgcgcgcaggcccaaggcgccccccggcccggcccgcgcgccccccggccagcccgccgaacccgacgcgccgcgctcgtccccgggccccggagcgcgcgaggagggggctgggggcgcggccacgcccgaggacggcgcgggcggccggggcagcgagggcagccagagcccgggtagctccgtggacgacgcggaggacgaccccagccgcacgctgtgcgaggcctgcaacatccgcttcagccgccacgagacctacaccgtgcacaagcggtactactgcgcctcgcgccacgacccgccgccgcgccgaccggccgcgcccccgggaccccctgggccggccgcgcccccggccccctctcccgccgcgcctgtgcgcacgcgcagacgccgcaagctctacgagctgcacgcggccggcgccccgccccccccgccgcccggccacgcccccgcgcccgagtcgccgcggcccggaagcggaagcggaagcggccccggcctcgcccctgcgcgctcgcccggccccgcggccgacggccccatcgacctgagcaagaagccgcggcgcccgctccccggagccccggcaccggcgctggccgactaccacgagtgcacggcctgccgcgtgagcttccacagcctcgaggcctacctggcgcacaagaagtactcgtgccccgctgcgccaccgcccggcgcgctcggcctgcccgccgccgcctgcccctactgccccccgaacggcccggtgcgcggggacctgctggagcatttccgcctggcgcacggcctgctgctcggcgcgcccctggccggcccgggggtcgaggcccggacgccggccgaccgcggcccctcgcccgctcccgcccccgccgcctccccgcagcccgggtcccgtggcccccgggacggcctcggcccggagccccaggagccgccgcccggcccgcccccgtccccggccgccgcgcccgaggccgtgccgcccccgccggcgcccccctcctactcggacaagggcgtccagactcccagcaagggcacgccggcgccgctgcccaacggcaaccaccggtactgccgtctttgcaacatcaagttcagcagcctgtccaccttcatcgcccacaagaagtattactgctcctcgcacgccgccgagcacgtgaagtgagcgcccacactacagccgcagacgctttgcacgccccgctgcgatgcggggagggggccgcccccaggccgcacggactgccgctcctgggaaccccgccacgcacaggcctcggcggagggggccgcagggggcagcgcccg

SEQ ID NO: 7835 - DNA, 1403 bp, Homo sapiens
  source 1..1403: mol_type = unassigned DNA
cgcggggtccccgggaaccgccgcctttcttcctcgctcccgcgctcgcgcttcccctcccggggccccggcccacccacccctggtgcggccccgccggactcaggagccccggccgcccgggctgcggggagggggcgccccgggccggccctagaagttactttgcaaagaggcagggggcgcggggccgcgcggggcgagctcgggatccgcggggaagaagccctccgggaccgcgcctcggccgcccgagccccccgcgcccgccgccccccacctcggtcgggggcttacctgggagcccgctgcccccggccagccgcccgcgtgtgcccagggccagcagcacgcacaagtgccagcgcacggccgccgcgcccatgctcaatgcgggccccgctgggcgtgcgggcgtgcggggcgcggggacccgaccgaccggccgctcccgcaggcgctgctcgctgctcgccgctccgccaccgctcgggctcccgagccgcccagccagcccggctgatgagctgacagcgcgcgctcattggcccgtggcgtcggaggggcggggcgtcgcccagggccggccaatgggcgccggcctccggccctccgaggaagaggggggctcgggcgtcgtcggggggacccttcccctggggcgggcggcaggtggggggtgtgggcctggccggccggctcgctaggcgcggggtctaggccaggctggggctgcttggaggctgcgccctcccctgcccgcggcgccccggcccccgccgtcgagagtggacgcccctctggggtaacccctcccggcccagaggcagcctcgggggcggggatcctgcgaaccggggatcccgtgaggtcgcccgccatccgtgggcagtgaaacgcgccagcgcgcagagcagactcgcctgcgctgccgtttgctggacgtttcttgagcacctactggggaccgagtgcgggcgaggcagcagcgaaggaaccgggaggggaaacctcgtgaagatcacttgaaaattgacgttcaaaacaaacgaactttttagcactcgtcaaaggacagtggcccgtcagtgtgcttgtcacggggcggccgcaggacctgcgtctggaaccgggcgggcgcccgggacggacaatgccgcttggcggtcggtcccgcgggaggcccccgcacggggctaacctcggccggcgaagttcgctgcccggaatgcgaggccgaggcctccccctgtgacagaccgggcggggccaggaggaggggcagggcgggcatcccggtccgaagacccaggaactgctctggcctggcctggggtctacacctgacgcctggcgagggttggcttcgggtctggtcccaccgggcctgggagggacgggcg

SEQ ID NO: 7836 - DNA, 1088 bp, Homo sapiens
  source 1..1088: mol_type = unassigned DNA
cgggaaacgccgtctcccctggcgtctgagatctggggtcccctccccacctggtctcctcgctcccgccccagccccgtgcgccccaggagggcaccgccgagcgccgggtccccgcagggttcgggagactccgcggaccggaggagggataggacccccgagctttgggggcgggaagggagggtggaaggaggaggggagcggggttggggaaagttggagcttcggtatcttttctccgggccaggccgtcctcggggccctgcgctgcgtctccaagtgctgggaagactccgcggggaaaggtctgaggacgcggccggctggcacaggtgtggcggcttcagagggccggggagaacccatggcttcgaggctgtggactagaaatgtccctgattagaagctgagaacctttggccagggaggtggggcggcggggaggggtcgtcaagccggtccagagcgcgcccacctgcgccacaagggagaagaggtgccccccgcccccctccgcccaccgccgccacgatgcgccgcggacctcggcgacccagcccgggtagaagcgcgcgctcccctcctccagcctcgtgcgccggcccctgccccgccagccccgctatggtcccccatccacccccgcgggagcgcccctgtccccccatcctgcacttcccccagagtcgcgcgccagtttcccgccccgtggaagcgcccctctcccgacttcggctgatccccgctcgccgccctccccgcgggtgcgcgcccggcccctccctcgcccggggcgggtctgcgtgggcggtgctccgggtcggcgggcggagctccggttccccagccctgcgccccggtggagcccgagccggagccggcagaggggcgcgggcgcggacgcggcgcctggcggggccctgggaggctcggacggggtcctggcgttgagctcggccggcccggagcgcggacccagccgcaggggcggcgatgggcaccgagggacccccgcccccggccgcctcccgcggacgccagggctgcctgctggtacctgcgcgggtgagtgcggcccctcagcg

SEQ ID NO: 7837 - DNA, 1812 bp, Homo sapiens
  source 1..1812: mol_type = unassigned DNA
cgggcggcggaggagggctggcggttagatacagtatcgctggagctcagagagccgggcagaggctggcggagagccgaggctggcccagccttcaggagaccggcgagctggggtgtgtgggagcgggatgcttctaaggcgaaaagaagcgccagcctcgtaagcggcctctatctgggctgcccaggccggatgctcaggagcccacagcaggggggatggagcgaaggaccgaggggctgggaggcgaggccgcagcgcactgacgcaggccagcgaggccgctggccccgacgcagggcgcccggcaaggtgtctggcaccacgagagtcaatccttgcgcgccatctccggaggccagtgcgcccagggcgcgccggcccggcaggagggtgggtgccagcctttcttcccatctctcgagcctcctccccggcgcccacgtgggcggagcagcgcgagggtgtgcgtggcaggggccgcggcggcgtgtgccgtgcgtggggtggggtgcgggctgggcggcctcgccttcgggccccgcgccgccggggcgcggcccccagctccatcttctttgccacctgggcggagatctgggggactgtgacctaccctgcggaagacacggaggggacgggccggccacaccccccgcgccactccggcaggcaccgggtgggtccccctcccgctccttggcttgagggcggaatccggagaagagtggaaataggggtggcgtgaaggagagctgggggctgggggcgggaccgggagggggtgttgggggaagcgacgcagcggctgggagattttgcaagggggtctgaagaggagtgggggatgggtatggaagggtgggggaccactgaggtgggatgcgagagtggaagggggacccagagggggcgcgatggccggaggagggggagatggacgatggggcggggcggcaccggtcgccgcgtcccttgccgccaggtccgcccctcggtcgccgggtccacgggttccctctggccagcgctcgcctcccgccccccggcgcacctgtacccacctgctcggcgctcaggcccgagccgggcagcagcagcggacgtagcgagcgcagccccgcgccgcatcctccggccgccccctccccgctgcgagcttacgccgctgtcgccgccgccaccgccttaaaaaggacaaaacggaacagaaaatgaatgcatgcacaaaaaaaatcgtaaaaagcaattgaggaggatggcagtcgcgcgcgcggctcggcggggcgggagtcgagaggccgcggcactggtggccgcgatccgggcaggcggccggcgcgtgccgcacgcgggtggctgcagctccctcggtcgcccgcgcccggctcaggcacggcaccgcccctccccccggggagcccctccgattggtctgtcttcctgccagtcaggcaggagggcgcggcgcccgccccgccccgcccccgcccccgccccgggcagatgccgggagctctcctgccgccgtgggagggggagctgagctgccggagcgtgcgcactgggccagcgggcggccggggcagggctggggtcccggcgctgagcgcccccagccgcgccgggcagcctggcgcctcgctgagtcggagcaacccccggcaggagctttcaggctctggtcaagcctcgggacccgggaagctatccctgccctcgggggctcgagcctggagtggggcttgcaggtaaagcggggctggggccgtcctggccgtcagtggtcaggaagacgcagcgaccccg

SEQ ID NO: 7838 - DNA, 5819 bp, Homo sapiens
  source 1..5819: mol_type = unassigned DNA
cgagtagaaggcggacgcctccgagccgtaggtcacgtagttgccatagccctgcgatccgccatagggacccccatagacgcccagcgccgcggccgagttgagctcgtggcgcgcggtggccagcagccggctctcgtagaccgggcagtagaccggcgcctgggccgaggcggcgggcccggagtccgccagcgtgcggcctccggactcgcagcacgtgctcagggagttggtggccatcaagaactgcagagagaggccgcgaggactggcgggaagccgggctggaggctggggccctgggccttgccaatcccgcgcgccgcccacgagggcgtgccccgagtacccccgggcctcccgccgtccacaccaggatgctcgcccctttccactagcttgtgcgcgtctggcctcctccgccacgtggggcccagccgagcacctacacccttccccggagggtttccaaggcctctgacgccatttgcgcgccaagcctccttccccaggggttccttggggtcctaggactcccctggggcacagcctgagccttgtggttcaaacatcagggaacccgggcccggcccgtcggattttcttagcgcctcggcctttccccgggggtttggggagcaggggttgggcgtgaggggcgcgcgacccaggccttgctagctcggaagccgcaggcagtcgtaggtcggacactccccaccccccgtccccgccccatccgccctaccggcacctgcggtggcctgggcggggcggggctccgcttacctggggagccgaggagtaggggtatccaaactgcgggtaggacatggcgggcgcggcccggggcggacgggcggggcctgcagggttctgcgcgctggggccggcgtggcgcggccactgctccggagctgcaggcttctaggcgctgggagggcgaagcaggagagccggttagtccatccccgcgctccgcaaacttttctaaccgggtaacaaagtgagcagcggtggccgccgcgattcctttaacttcgcattccggaggctcgagggggctctgggaccgagcggcctcgcagcggcgacagaaatacatattttacgaaaaagaaaaaaaaaaaaacgagtcgcgcgaacccgtcaagtcagatgtgcgcggcttgaagcggaggaggctctgacgtcagccccacctcgcgcagcccggcctggccgcagactcgccggtcactcgccggcggctcaggccgggaggggccaggacagtcccggccgcgcggtggacggaggggccattcctccgggcgttagcaaataaattccatccgagtcaatatcgcccagcgaacggtgtttctctttagtcacccgagaacgagaggcacttttaattagaaattaattaatgagcagctgctccttcccgccccactgtaatcattcgtctcaattacaaatgagacctatgaaaggacacgctgaagatgtaatcaacagttaaaattagcccggcgctgcgcaggcggccggcccggcctcgcgctggcgcgctctgctccgagtggcaggaaggggctcgcaggcgccccgcacgcgtctcgtcactattgtttaatcgagaatcagcaacgcctcccgccggtttccaccctacgccggaatggactttcagaacccactgcggccgcaagacagcccgcaagagctggtcaaaatgccctcaggtgcgtgggggcttcggggccttagttggagcccgacaccctgagactggcggcccgagggctgtagggccgccccgggcgtgcgcccaccggctttgcacctctgggcagccgagtgtcgcggagaacgccccatcttctccaccgcggtcttttaagttcccgctcagcccaccgcccccacctcgcctccccgactttcctccccgatcccctttccgccggccgtgctccgccggcttccccctgcccctcgcggctaagccggggactgccgggcggccctgcgcgctcggaagagcaggttcctcaacccaggccccggcccctcccgctaagctcgtccctcccggcgccccgcagggctggctgcgagggagggggcgttgggtgcctggcggaggcgccctcccctgtccattttgcccagctttctgtctggggcgcacggagcaatcggaagaggggaccgagcgcccaccccaggactccctcggccagtaccctccctgggaccttgcccaagttcaaagcggaggccagtgagcaggcggcaagggggcggcaagggggcgcccgggccatcccgaacccgttccccgccttctgcgccatcgccctccgggaccgggactcgccccggttgccctcgccccctgggccggcctcccgtggtaagttgggaaggaagccgtgcaaggcagcgttgtgcagacttgctcagaaagattcctgggttcagacctgtgaatcgccccagggtcaccctctaattaatgatgacgtcctcgccctctccccagctgcaagcctgcctcccagaaacgaaatctgcctgctcttttgacagctcggttgaaggtgattgatgactatctggagaccacagtacacatcatataatatctgctgcgtaattgctttaatttacagatgaaaatacgagttctccgatcgcgttggaccggagcgggccacgtccgagctgcttgcagagggaaaccatcggaaataatgaatagccgctccatgcaaattattcagacagtttagcgtcggtagccgcgagaaatatataaagaacacgagtcaaatgacattaataattgtttctgaattctgtattgatttcgcggcaggccgcgtttctttctttctcacctgaatcgctaatatcaccttcctgtaaataataagaaactagccaccggggtttctcgctagaaatgaatctctcaacccctttccctctcctcctgctcctcccctcccccaccctccttcctcccctctcccaccctccctcctccccactccttgcagttttctggtttttcccgagcatccttctacttcccattatttattgtttacaaactactcgctctctccaggtaatgaggcccggctgaaggaggggtgtgagcccagccgggccaagggctgggatggggagtagagacccccagaggggaggcattcagctgtggcttgtcctttcctcacctatactcggggacctggcctcggcgactgtgagcactccgccggctgagggggagagccagggcccaggggcccagccacctatgccctgcacctctgggctctagtgcaacagctcagcccacccagacctgaggctggtgcatttccttccttccagacccggcggggcttaactggagccgaagccccagaacaggcggccattcatcttctgagcagagtctgggagaagcagcctccacttcccagggcagccagtacgtgggggccctttcgggggcttcctttgaccaccaccgccaccttctcctgttctcttttgcctttccagcctgtgtgcataaatcgacgctccagtccccaccagcgggcgaccctttctccgtgacccagaaacctggcctctgaatcggctttcccaggccgccgcacacacacgctccacttcctgcccgccagcaggccccagcgcctggggtccgggcccagtcacagtcaccctgcctcgggaagctcgcaactgcccaggaggcctcctgacccgcccggcctcacccaggccccactactcattccaggacacagggtcaatccagcctgtggattggcgaccaccgggacatctcactgaaaccctgtagcctggcctaggcccgcctgcccaaaccggggattctcactgggccacccttctcccatagataatactggaatattttccaagtgccttcaccaaaaggccaagcctggagcggaggcacccagtgtccctttcaccaacgataggacgctcagcatctcaggtatcagctgaacgcgtctgcatagactcggagtgctgagccttcctccctctagggacccccggtactaaatacacccgtgagcaggtgggccagaagtcagccggctcccggagtacacagcaccggctcagcttcggggagatgaggtgctcccgctggcctggagcgctccgaagagcggaggaccagggccggagcaggccgcaggggaggcaggggatggtcagcccctaacgcgaagcgcaggcgggtcgcctattttgacggggttaccgttggccgtcggaaccatggaaggcctccggggagacaggccgggccctgacccttcttcggccagcctagccctggtgcttcaggagttaccctgggggccaccagttccccgcaccaagagctcgtccggagggagctccttccagcccagagaagttaactccagccaaaggcgaagccgggagcccggggcaccaggcaagggcctttctttctgagacctggggccagagaccttgggggcgcctgtgcccgcccaccgctcgggacacccggctggggtgtgggtttgagaggcctcacggtcgctgacgccgcactggcgaacctcgaggttggcaggtcatttcctcacagccccgaggccccctcggagccagtggtaggagaaggagccacagggacaagcggtgaatctctggattcccaaccgccctccatgggggcccgcggccctctccctcctctctcccgctgcgcccccgccgcttgctccctgggtacggcctgaggctggacggagcgccgtccgggcgtccaggactcaggcctggccactccgagccccccaccccccgccccgcgccggcccgcgcaccctgcttcccgcaacttgcagcaaacgcagcggcctctggagagcctagcgacgggtagcaaactttgtccccttaagcgcaagagcaatcctcgcaaagtttgtgcggcggagcccactccctacctgagctggggaagctcccgcccgcgccgtgtggctgccggggccgcggggagcagctcgcagcccgggacgcaccggggagtcgccgcagccgccgccgcccgctcccctcggcggccgcgcggagcctccgcctcctcggaaggggggaggggtctcggaaccccggggcgggggcgggagcgggggacctcacctacctgcggtggcgctgggccgctcccggcagcccgcgagggctccgcgcggaagctcggcgcgcgcgctccagcggggagccggcgacaactaatggagacatttccaggcggagcacctggcgagcggagcgcgccggcgtccccaggcgccgcggtcgtcagccgagcccgcaccggcgtgacgtgggcgagcgagcgcgctgctcccacccggccgcccattaacgctttctcccgcgggcgccgcgctcttgccaactttcccctccgtccggtctgcgcgcggcgcgccgggtgcaggagctggggtgagggcgccccgggtgccagcaggggcgctgggagctgtttgggcggggacgtagggctccgggaggtcacacagccctaacaggacagtgggaaggcgcgcgagccagatttggccaaacgctaagctcgctgcggcctcgggccctcggcccacggggcccctctccccgtttgggctgccccacccagggacgcttgggccgggcgcgaagagcccggaaatagccacccttgtcgtcggcccggtttccctccg

SEQ ID NO: 7839 - DNA, 2001 bp, Homo sapiens
  source 1..2001: mol_type = unassigned DNA
cggaggctgtgccggggctcgtcaaaggctacaaacaaaccggacgggtgggaagcacgtttcagcggcgactggatttttaaaaatctgctggtagagtgaaaacaaaaattgtcctccaagttggcaaaatcggcgtcccagacggtgcgcaggagggccctgcgaggcctgtccccggagccccgcgccagtcctgtaggcccggctgggtccgcagcccggtgttccactcgtgggtcgggcccggctgcggggtctttccgcagccgggacacccaggacagcagcggctggggagccggggccaggggcttccttgcaattccaatgatttttattattatcactcgcaaaggacaaacgcggccaaggccgggcctcacagtggctgtgctggtcatcgcgtggaggagtgtgcgctaacccaggggcgaggggggcgcgcccggtgtcccggggagagcttagaaggaagacgccccaccgtggtccctacagtcagggacagtctgggtgctagaaattcccagagagaactcgaggggctgatgtcctgggtcaccagtccctggtgcctgtggggcttcctgcgcgcccacccccatccccctcccccctctcaggttcgacggattctcccggaggcttaggacagtgatttacagtaagtggtgacagtggaataacgtgacagtccgctgcatttgccagctggctcctgggcaggcctacccgccgggcccgaccccagagtcgagtcctcggagccgccgggtaaagccccctcccccgccccggtgcagccccgcgttccccgcgcccggcgctgccggggaaaagtggcacaacaggaaagcctcgccagagggcccttcccagtcggcttcctcgccataaaaagccagactccagccgaggtcctgaccccttccaaatatacgttcccttgcccgcggcccgccactcccgcccgggcctcgggctgtgcagcttcctcctaggcctgcccgggcccatgcctcccccgaagcggcgggagtcggtgcagcctcaacttctactgcgtgtcccaggtcgccaaccagctttgctcgcgtgccgttggcccggaggctgccgcgccagtctctgcgtgcgcctgagcgcgctggagcatttgcgaggccagggctgccgacggcgagaggatactttgaggaacacggtgcttcagtcccgcccccgctctccgcccgagctggaggttggggcgcgctgagccgcagcgcctggacaagtgcgcgggccggagccgcccaggcctgcacccgggggctcgcggccgacgcatgcgcacgcgcggtggcgggtctgcaggcccgaaggcccggcccctccctcaaacccggagcggggaagcccaggggctgagagcctcggcccgggtcgcaggagctggggagcggggacgcgggcaggctaggtcttcccacctgccgtcggggctcctccccgcagcagcaaaggggtcccagtgcccgtggcagtgcatgccccagcggacacgctggctcccaaattcagagatcagaggggcggctgagaacggggcgtccgctgtgtgtgacccctgaccgtggaggaagggcgggagccgggagtaggcggtggggcccggggtcaggccgcggtcgtcggctcccggcaaaggcgctctggccggggaagggggcgagggtgggcggccggcctctgccgtcgtagtcatacctgggacgttgaaatgggctttggggatagagctcactcccagcgcgccccacaggagaagcccgcagctcaggcctgggccgtgcagaccgctgggcgggctcggggcccgaggagagcaacacggcgcgaggtccagtcgcgagtaataaccccgacagcacggcccctcgaagacgtgttccgggcaccggggttgtgagcgggggagcctcgggccttgggcccgcttggcacggggcgggggcg

SEQ ID NO: 7840 - DNA, 1265 bp, Homo sapiens
  source 1..1265: mol_type = unassigned DNA
cggcgaggagggctgtaggtgaagcgcggggagagggaggtcgcccgctccggcctctcccccaggggccctgcggctggccagcgctccggctgcacctcctggtgcgcgccgcggcggcgccacaggcccctcgaccctttgaccaccgccctcgggccgcgcgtccggcagccgggaccggtgatggcgcgggactgacggccgtctcctcccagacccctctgtcccgcctggggctcgctggggctgcggcgccgccccgagctgcatgtggggcgggcgcgcccgagcccagagcgagcggccctcggcgcccccgaggcggtgccccgccgcgccagagtacgaggaggagcggcgggccgggccaggctccccacgcgccgcagcctcggagcacgggctccccggaggggacttggggcgtcccagcccaggaggaaggacccggaagcagaagcggagccgcgagtcgagccgagccactgcccccgctgcccgcgggcgccgggtgggggtcccggcggctggatgggcagcggcggcgcgggccgcgggcggcgatgggcgaggagcagagcacggtgagcggcggcggcgggccccaggagtcgcagaccctggccagtggcactgcgggccaccctgagcccccgaggcctcagggggacagcgcccgggcgcccccgctgcgcgccgcctccgcggagccgagcggcggtggctgcggaagcgactggggctgcgcggacaccagcgccccagagcccgcgaggagcctggggcccccgggctggagtaagagccgagcaccggcgcagcctgcgggactggcactcaccgggcctctcaatccccagaccttgccactgcagttggagctggaggaggaagaggaggaagctggggatcgaaaagagggaggggatgaacagcaggaggcgccccccggcgaagagctggagcccaggacccgcgtgggggccgccgacggactggtcctggacgtgctgggtcagcggcgcccgtccctcgccaagagacaagtcttctgctccgtgtactgcgtggagagcgacctgcccgaggcccccgcctcggagcagctctcgccgcccgcgtcgccacctggggctccgccagtgttgaaccctcccagcacccgctcttccttccccagcccccgactgtccctcccaacggattccctctcccccgacggcggcagcatcgagctggagttctacctggcgcccgagccg

SEQ ID NO: 7841 - DNA, 1360 bp, Homo sapiens
  source 1..1360: mol_type = unassigned DNA
cgcccccgacccccgccgctgggatttcccgccgcagctcctgctccagtctgtgctgcgggtggggtcgggttgagcagcccggcgccccccaccgcgccccccaccgcaccgccctcgatctaaccccgcccccgggcgctcattggcctgcagcaccccctccccagcctgtgaagtgagcagggggaggcggtggtcggtcgcctccctccagcgcccagcctggcttcgcggcggaggcggcgcctctcccgcaggacggagccaagctggactgccgcgccgcgcggggcgggcaaagggggcgctgcgctcggccccgggcagggagtgacggcggcggcggcggctccgggcgagcgtggtccccgcgtgcgcacacgcacacgccgccgcgcagggacacacggaccccggccgccagccggccacacaggcgcggagacccggctcggcgcgcgctcctcggcgcacacgctccccatccccgcgccgcgcgggccgcggacttgcaggctgcgcgtcctttgcggagtctgccccggccccacggacaggccccgcagtgagcaggtaagggtcgccccgccgcggctgcccctccacgcctcggccgtcttctccccctccagaaccttcgcccagccgggacctcggatcccctcctctggcttggcggtctccgccagccgcgacctccaccgacggagagcgggcgagggccggcgccaggcaagcctcccagatctgaaatgaagccccctcccgccgctgcgcccttcctgcgcgtcaggctgacaccccccaacccaagtgtctggcgctgcgctcggggcggccgatcgccgcagactgccggggtgggggtcgacctagctatctcacgcccctcctgatgcggagaagggagaccaggggggcaggcaagccatgcggccggagggacccggagggacatgcctccctacccttaggtggacggacgcacctacgcggatcgggaaggcagggctggagggtcccccggggctaggtaccgcaatccgcacggggtttgaggggtgggcaagcaatgtgctaggtgggggttggggtaggggccagtgtagaatgcccctctgtggtgacacatccgggattgttcaaaagagtgtcgtcttcgtttcccgtggcgcggaggggctggggttggggatgccagggcttcagtggtccccagaagaaacgccctgcggggtctgtggggaaacgcaccggccttcccaggttgaagtgggcccgctgagacccctgcctgccgctttagaggcagaagctcctgcggcggctgcggggggcggaggccacatcctcggcg

SEQ ID NO: 7842 - DNA, 362 bp, Homo sapiens
  source 1..362: mol_type = unassigned DNA
cgctcagcacggcgggcagcgccgcgctgcgcaccgccgccgaccatgagcgaggacagccgcggagacagccgcgccgagagcgccaaggacctggagaagcagcttcgcctgcgcgtgtgcgtgctcagcgagctccagaagaccgagcgggactatgtgggcacgctggagttcctggtgtcggtgagtgtccccggcagacgcagggggacgtccgggcggcgcggggcgcgggtcccggagtggctgcgggaaggacgcgcggcattgtctgtgcggggacccgggacgggtcggggcatcacaggcgcgggaatccacgtgtggactctgcgttcgcgggcgcggtgacccccgcg

SEQ ID NO: 7843 - DNA, 2566 bp, Homo sapiens
  source 1..2566: mol_type = unassigned DNA
cgtccccaacgcgggagcgcagtgcatcccagtggacaaactcgagaaccgcacgctgctctccgcctccacctctgtcctccccgctcgcggttccaacccgggacccaaatgcacgagctcggtgaatgccccggcaggagggcgagggctcagaggcagcctgcccagcaaaaacgacagctgtgctctggtgggccctgggccaccccaggcagaagccagagaagcccgagaaccccggcgggctggcaaagtttgccgagaagggtctttctggacacccccaccacgggctctaggctcgaaccccctcttccatctggccctggagtcccagacacagacaagccccgggcgcgccggcgggcgtatgtgcgtgtgtgtttacagcggggtggccgccggagctccccaagaaccccagctctcccgccccagctgcccgccagctgtgagcgcccgtcgggcccggaggtcacccgcaaacagctgggtcggcagctgggagcctgggaggcccctgctcagccccggggccccgagaaaggagaagggggagcggagtggctgtttggctgtggtttcctccaactccgcctgcgaagctctcgctgggagcccggagctttagctttccccggcagccccggcccccgcgcccgccgcgcccagcggccggcgcctcgccccgggccccggggaggaggcgcgccggggcagccggccaggacactgcgctgctggctcctagagctgcgggcgcgcctggccggccccacttcccgggttgctggggcgggcgccgctgccccgaccccggacgcgcggaaccctggagacccggccgctccccgccagggccgcggtgctgctccaggctccgggcgggcgcccctttccggctaccggtgcaccccgttgcccgcttgcgggaagcgaagaggggtcccttgatttgcaacatagaggaaagcgccgcttccgcccagcctggcacccacgcgcccacacgcacccggcgccggccgggtcgctcacctgagtcctaaaagctgttgaatccacatggtcacgtttcggggagcggggcctcagacctggctcgcccaggccatctgcgcggcgcccgcgcccgctcgcttccgtcccgcggcgccggtctccggctctcggtccgccgcctcccgccgcccgccggccgcggggcgcacagcgagtcagagcgcggccgcgcggggctccatgccggccggcgcgccgccgccgttggggcgcatggctcaggctgggcggcccgcgggggcgcacatcctccggccggggcgcggggctcgcggccccctccgccggcggcacagcgaaggcggcagcgaggcggggcgtgttccggcgctgtcgcggcgcagcaaagggctggggagccgcggcttcgccctccggggcggcgaggagggaggccggcggcgctgccgctcacggtgcgtgtctcccggcgcgcggctcttgcctccagccggagctccgcgccgatggggcggcgctgcttagggtttggggtgacgcgacgcggacggacgcgagtcccctccgcgctgccgggtcggggggctctgccagaggctccgccgccgatcggcgccactcaagttgcccgggggctccgtctgagcgctcgctctgcagacggccgcggcccggagactggcaggaggcgggcacgagaggcgcgcggggcgagggcgccgtggagcgcggggcgtggggacgcgcggcggcggcgccgcgcggaggaggcgcgcggggatcccggggccccgccgcccgcgcccaccgcgcccgccgcagagccgcccgcgctgctcagccgcctccctcctcgcgtctgcctctccgcgcgctcgcccccgcctcccggagccggtcccaactccgcccgcccggcccggctcacgtcacccgccttccccgcccctcgaacgggagctcgagcccctggcctggccccggctcctgctcgccgccccaccttgcgggggccggggtcgccgcgggtggtggggggcgctgtgcccagcaggggcgacagcgcaggcggggcctcctgcagcccccttccccatccccggtcgcgtcccggtccccaccttgcgaaaggctcgagagaggccgcaggctaggattggaccgccgggcgccgccggatggtgttgccagggtaaccggatggcacgcgaagccgttcgaggttccgacccggttacgggggcgcccagtggacccggagagctactttggggagggggcggccccgaagaaggactgggtgggggcgcatggagcgggggctgcgcgaaaagtttcctggggcggagctgagccacgcgggccgcgcaggagcgtctgtccgagggtcgcctacgagggactcctctgctcggctgcgcgggcttctgcgttgatgaagtcaccgcgttccgggtcggagcttcggcgcttctgccccgaacccagcgaagcccggtcctatgcccccaattacccaacggtccctcatcgcccagcg

SEQ ID NO: 7844 - DNA, 572 bp, Homo sapiens
  source 1..572: mol_type = unassigned DNA
cgctgtccgccgggccggtggcgttcaccccgcaccgcgctgccccgcccggggcactatggcctggggctggactatgccctccccacctcagccggcgccccccacccacgcgcgctgagggtgcggtgagctgagtgcggggccaagcatgttctggcgtcgacttcgcccaggggcccaggacctggcgcccaaggggctccctggcgacggagacttccgacgcagcagcgacccgcggctgcccaagctgaccccgcccgcgctccgagcggctctgggcgcgcggggctccggggactggaggatcccggggggcggcgccgcgtggtggccggaaggggacgccaagcccggggtgggcgtcggacgcctcccgccgcgcctgcccgccttgctcaccgcgacccggcgggccgtgcggaagcgggggctgctgcggtccctgctgccgcctcccctgctgtcggccggcgcgtcccgggaatcggcgcccaggcagccagggcctggagagcgcgagcgcccccggaggcgcgtggccagggaggaccccgacttcttgggcg

SEQ ID NO: 7845 - DNA, 989 bp, Homo sapiens
  source 1..989: mol_type = unassigned DNA
cgcatactctgtgcggcccgagtggtccggatggcacagcccaggtgtccgggctaaagttggcatctccaaagtccagaacgcaacttgggcgcgccagtacaaactcggccttcggcttttctgaagccagtcaagttcgcacagggcccccagcgcctggaaatctgagaggcgtggaagggtggggagtcccgcgaagtctccagtccctgggtgtcctccggctccgcgggggagcgggcctggagctaaaccggccggccgtaggctggagtagcgggcgccggagcgcgcggtggggatgtccgaaaaggagttagaggctcagtcggagagtccgagaacacgagggatgcctaccttgtaacatggcctcaagtttcttcctgtccacgcggaagcgctcctcgctccactccgggctgtgcagggtcgccccggcgaccaagtcgtcctcggagccgggcactggggagtcggtgctgcgctcgctgttggagccggggtccgactgcgccgccaggtagccgggctctccctgggcggccatggtgggcgcgcagcgctcgggctcccgctgccgccgccgctctgcctgcgctgccgcctccgctcgccggccgggctcaactggctcccagcgccgcggcgctagctcgtccccctgcagccgccgacgccaccgccaacgccgccgccgccactgagcccccggcgcatcccagccccgggcgccgcccacgccacccgccaccccgggtcgcggccccggtccgggtccagtggctgcgccgccccccgccagcaacgcccgcgcggaatgagcgcgccgcgctgcccgcgcctccatccgcagggctcggcgccccctccccgcccgccgcccctacagccgcgcgctcattggcccggccagcccacggggagccgcggcgggcgggcggcccctggcgctcacacactcgcgcgcgcacacacacaccacg

SEQ ID NO: 7846 - DNA, 2400 bp, Homo sapiens
  source 1..2400: mol_type = unassigned DNA
cggcctgaccggggcgccccgccgtcctcccagtgtaccccaccgctctcggctgggggcgcagcaccttggagagaggcgcctggccccgcgcctgggctgggggcgctctaccttgcgccctgggggtcaggggcgcttgccgggccgctgccgaggggccctgcccacccctgcccagcccggagcccaggcgagccagcgcggcgagcctcctcccctcccgcctgggtcgtcctgagtccgcgcccgctccagttgctgcagctgctgctgctggcggctgcggggagcgcggggcgcgcgccgaagaggcttgggcggcgaggacggggacgaggaggagtcggaggcggcaaggaggaagagcgagcggaggccgaggggctcagcggcgtggcgacaggactagggggtcccgagaacatgggctagcaggcggccacgggccggcggccggacgcggtgaacctgccgcggccgggcgcgcactggcgcggcgagccggagccgagcgcagccgggggaggagggctggcgcaggggcgcccgggcggagggggccgattatccattattaacgagttaccacctaataagcggagagcggctcgttagccgcgcgggaggcgctcggggaagggggtcaccggccgagcgcagcgcacacccgtggcgcacggcgggcggcgcggcgccgaggacacccgggaccgcgcgcggagccggggcgggcccgggggcggcgcagaccccgggcgcgggcggcccgcggcgccccctggctctcggcgctcggggccagcgcagcccggggcgagcggggcgcgggccggggagggggagctgcccgcgcactccatccccctcccccccgggcgggcggcggcggctcgctgtatatatctcggcgcaccccgccaggtcgcgcacagcgccccgagcccaggcgcctccccgcccccctcccgcgctccgcggcggcggcggcggcggcagcagtagcagcaatatggctgttgatgggtgtttggggtggcgctggcggcgggaggagctcccccgagcccctgcgccggctgcccgttgctagctatggcaaatggtggcggcggcggcggcggcagcagcggcggcggcggcggcggcggaggcagcagtcttagaatgagtagcaatatccacgcgaaccatctcagcctagacgcgtcctcctcctcctcctcctcctcttcctcttcttcttcttcctcctcctcttcctcctcgtcctcggtccacgagcccaagatggatgcgctcatcatcccggtgaccatggaggtgccgtgcgacagccggggccaacgcatgtggtgggctttcctggcctcctccatggtgactttcttcgggggcctcttcatcatcttgctctggcggacgctcaagtacctgtggaccgtgtgctgccactgcgggggcaagacgaaggtaacgcgcgccccgggcgcccgccctctgcgccagccccaccgcttctcggcgtcccctgcagcccacctcctcgctccgcgccgcgccgtgcctccctccatccccgcctgccttcccctcgccgccttcccttccctcggctctcccggtgctctcggatcggggcagcgggcggcgcgccgggggtgaggagttgcccccagccagtgcgctccgggacgcggacgctcaatcctgtcctcttgtttattgtagggttgttggcggctgcggctggggccggggtcggggactcacaggctcgggtgccgtggtgcggggtggggacagccaactcagcggggacggaggaagctgggggcagctgggtgcgtgttttgcaccgctcacctgccggggctcggctcctggcggtgggcgagagggagcacatccgcccatactttaggaacctgttggggagatgagttcgtggggtcagaaagaagggaaaaatcctttgggcaagggagagaataattttgcacaagggaatcccgggggaggagcatggcccgagataacagggggacttcgaggggcgagagaagttggggagatccatcccactattgggggtagcccacggggctgccacttttggaatgtgtcgaggtcgcatatctgatgtaacctcccactccgtcccttaggtgctctagtggaacataccccaagttcttcggcctctgttcctttgcccccaggccacccactttgggtccccggaaatgccaccagcagcgcggagctggagcgggagtccgcctgaggccgcggttttacgcggagcgtcttccctggcgctcgaggtggctagatgtcgtcggctttagctattcctggtgcagacgcccaccggcactgaggctggcgacaccttcg

SEQ ID NO: 7847 - DNA, 1859 bp, Homo sapiens
  source 1..1859: mol_type = unassigned DNA
cgcacggaagtctctgcccagctgtcagcgcgcgtcgccaggggctgcactgaagctgtggacccgggatggggaggaggctggcggcctccgaagcagggtctacagcgggggagggctagcgccgtctggcggtggctgcgcgtggccagtgcggacccaggctcggctcggccggcgctgcctgcgtgtggtccgggcggagcgagggtccttggagcccggttcgtcctgggtcccaggaagctcggcgtgcagcgtcagaggccgcgtgtgctgggggagggaggagtacagactgtgcctgggggcatccaggacgaattcacagaggggtggtcctgccccacccagggggtgtcgtgggcaaaggccctggggccacctgcctggtgccttggagggcgtagggcaggagccgccgaggcccgcgggccactgtggggcgcggaacttcagaccaggcacccgcggctcaacttccgggccaggggacccgcgggggccttacgaacctgtttggcccatttgtgcaacagaaatccgcccgcgcctagcagcgtccggggccgcctgcgccggatccgcagcccagtaccctccgcgccctggactccgaggaggccaggtagagagcggctcgcgcggtccccgtctgcgccctcagccccgcgctgggcagcgggacatgcctggctccggcgccgccacctcggcttccgcttgcccttgagtgcggagcccggagcctccctcgcggtgcgctgggtcccagagggccagaggccaccagggggccggcatcggcgggagcccagccgggcgcgccctcggccctctcccacccacgtcctccgcggccgcccgggtccaggggcgcagcggggaggagaccccggccagggccggggagcgcgagggcggggcggggtccggcggggaggggcgcgggcgggcggggaccggggcgggggccgggtccgggggcggcggcggcgcgggcgggaggaggaggagcttcccgcgcggggcaggggcggagcgagcggccgcgccgcggagccaagtgagttcgctccggagccgcgccgccgccggcccagcatctcgggcgcccgccgcccccgccgccgccgtcagcgcggggatgtaggatgcaggcgggcgccaggttccagcggcggcggcggcagctgcagcagcagcagccccggcggcggcagcctctcctctggccgatggacgcagagccgccgccgccgccgccctgggtctggatggtgccgggctcggccgggctgctccggctcagcgcgggggtcgtggttcccccggtgctgctcgcctcggccccgccgcccgcggccccgctgctccccggtctccccggctggccggccccgagcgagccggtgctcccgctgctgccgctgccctctgcgccagactccgccgccgccgccgccgcgcaccccttccccgcgctccacgggcaggtaacgtgtccccgtcccgcctcggcccgggtcgccgtctcccctgctcctgggcgcgccctgcccggcccggctctggcctccggctcgcgcgccctcctccccggcggtcctcgccgccccaaaccctcaggacggagcccggcagccgtgcctcggcgagaaagttcgtgcttggacgcccggtcgtccacctccgcagctttggcaggtgcctccgggtgtctggacggagccgtggagggacccgccgcccaggcccgcgtggggaccgcagggaactcgcgccacgccgggggtcactgtccatcgcgaggtgctgaagtggctccgtgaccgccgcgggccgtggctgacatcgcg

SEQ ID NO: 7848 - DNA, 902 bp, Homo sapiens
  source 1..902: mol_type = unassigned DNA
cgggttcggctggctttcagtaggcttgccggggtctctgcactctgtgtccgggatcctcaatttgcgaatagtctggggaggctgagcgcgagccaggagcggacccgggggtgggggtaagcgccacgtgcgcgccaggtccttggtgtgcccggcaggcggcgctgcgtggctgcggctggctccgagggtgcggggggcggcgacccgggagggaaaacccctgcctcttcccggggcttgctctgcccgtcctttaaactcgccctacaccctccccgactcccgtccttgcaagcgttatctgcagcctcaccggccctcgcaacggtggtggtggttggtggggggtctcgaagcttgcctctggccagccggaccccggtgggagatggaggcagaaattccggcctcctaggagaagggcgtctgctcactcccccactccccggggcttggggagggggctgggcaggggcggaagcgagctggagccgtgtttgtcgcggcgctgcggagtggaacagatggctggggaggggagagggtgcgtggcggggaggaggaggggtgcgggggccggaggatagggaacgaggaatttcgaagcctggagtctcccaggagaagcccccctccccgtcttttcccagaaaggggggcatatatgcgcctgcctttttcccggagagccctggcctctgccctgtggcagaccctgccgcgcaatcctctgccccagggcgcgcccctcacccccaaacccccgccgcgggacggggtggcggggtcaggaccgccaggagcggcccgggtcgcgagggttaatggggccgccctcccaggggcgaggaggcggcgggaaacgggctcggggtggggaacgagttctgggatcg

SEQ ID NO: 7849 - DNA, 2044 bp, Homo sapiens
  source 1..2044: mol_type = unassigned DNA
cggcgtcctcgctctgtctgcattttccttcattgctctttcacgtttggaatgcccccgtctctgcagcctgcagacagcggaaaccgcgggtgcaaatgtgcaggggccgctgacatgaccggctgcagaagcccactcagggttacccgaacaggctagcgttcgggattgcacaagaggtcaggcgatgctgtgggcttccaaatttgtacagctgcgacactctgcgacgtgccaccctatccccagtggggtggggtgggggattccctccgcagtccgctgaaagcgaggcaggaatcactgcaactcctctgctcaggctgaggtcgccaccgctccgcggatgcacgcgctgcaggggcgccttccgccgcgggcacggcgcgggaagggatggggtctggtgggagtgggcaggtggcgggagaggcgcgtgtccgtgcactagaggcccccgtgcgtgacacaggccgatgagctcctgcgggctgcacccacgcggagtcacagaccgaaaaggtcagccggtggccggtgtgctaacatatatagagagacgcccgccaggcgcgccgcaggctgggacgaggctaggagggcccaggctggaggagggctgaggagggctgcgggggcgggccccggcgcagggcgcccggagcggagggggcgggcccgaggcggggcgggccgcggcgctgacgggctgtcgccgctgcactcgcctccagcccgcggtgtcgagcgcaggcggaggtacatggccccgacgggaggcgcgcggcgagcacccggagctcggctccctgcctgagcacggcagccgcgcctccgcccgcgcgtcctcgcccctccggccggcagcccgcggacatgatcgtgtagcctcctcctgggctgggatttgtttgaagattttcttcatggaagcgatgtccccccagcaggagactctagggggacagccggggcgctcctcttccctgacaggagtgtctcggctcgcgggaggcagctgcaccaagaaggtgaggacgctgagcgggggcccgtgccctccgccgccgcagcccccactgccggcgcgcgccctccgcgcccgccacagcagcgcgctaggcggacgccgcgggaatttgacgctcgaggctcgcggcccctaatgagagtcccagaacacttcccgcccttgacggccagcggcagcgccgccgcctcccgcagagcgcccgcttctccgtttctagagccttagtctctcctcgagcgacctcgcagcctccctcccgtctccatccgccgccggttctgcagcccggctcctccctcagtctaggcgcgcgggctgtagtgggcgatcgcctttccccgacccctcgccgtgcccctgggcctcccgaagtggcctgggcgagcactgactgccctttggcggtgtcagccccaaagtcagggccggcgatgtctgcccgggagcggcagccggcgctgaagaaggtaggcagcggggctgcggcgctggtgggctcggccccctcacctgcccgccgaggcgcggctgctccatagcagttttcggggggcagatatggggagtactgccccccacaccagggtcctggatgattccgggtctcccaggtgggggtcacagtttgaggggcgactgtggatgataacgctcgacactacggggacatgtaggttcggctgggcctagaaccgagcagggtgggggcgggtgggctgtggttgggggtcctgagggctgaggtgggggaccttctccctgcactggtccctggcccctgggactctggccgggctggatagggatccgggtgtcggtgtgggcgtgggggcagcgcgtgttccctgtcaaagctgggagagggatgcaggtgacaacttgtagcgttccattccgataaacacggccgctgtgctgcgggaggattccgatccgggtcaggtttcgctggaacggttccctgagcaagtgcacgtgggccgcgggctgccggcctctgccgtttcg

SEQ ID NO: 7850 - DNA, 1152 bp, Homo sapiens
  source 1..1152: mol_type = unassigned DNA
cggcgcacacaagttgaggactgccgaggcgtctcctgcgaggtaaacacgaagtcgcttggttagtgagaagaaacccgaggtggcctctggggcagacagagcaggacctgcttctgccccttgccctcctcgtcctcctctctccagcggcggcgaccgcagtaacagcggcagtggcggctgctgccactgctctgccgctgccgagccggtcacctgggcacccgcggagccgcgccgctgctaccgccccggcggcctcccggagtgcgcggagggggcggcggaggagcgagatatccatagtaaccgaggatgcgaggggcgcccagcagcagcgagtgcctgggagccaggaggaggcccccgcgcgccggcaacccccagtgctaggcgccctgcagcccccgcgcgccgcgcctgggcccgcatcgctctcgcagtgagggtccgcccgagcggtaagccctccccggcggccaagccgacacctcccccccgcctcgccgcccaccccgggcagcagccgcggaacaatggagagcgcagccagcagccctggagacggcgttcgggggaggacgcgccgccgccgccgccgctgccgccagggcaggcgcgcgccgcgtggagccgggcgggtgcgagggcgcgcggcggggggtggggggcacgcgccgcgcggggggcgggggcagtggggggcgcgcgcgcgggcccggggagctcgcggggagagcccggcgctcggcgcagcgcggcgcggccaagctccgcgcctctcccgcccttcctcggcgcgctcgccctcgcctcgccgctcgcattcgctgggggcgcccagaaagatgcacagaggcaacggctaggggagcggaggttcaagccacatgtctgcgtcctcgggggccagagcccgccagccctcgcggatcccggctcgcggccagcccgagcggctcgggtgagtagcggcacagcggccccctcgctccgcggcccccgctcgccgagacgtggctccaagaagtggtgccgcagccggggcagaggcggaggaagccgagtcgggcaagccgggaaggctgcggagacgctttgccggggcaggtgttgcagcctcagctagcggtctctacggagggggcg

SEQ ID NO: 7851 - DNA, 872 bp, Homo sapiens
  source 1..872: mol_type = unassigned DNA
cggccgggcttagcgatgcggctgagctgcccacccgcgtctgttgaatcggccaatcagcggcgcccccggacctagcgggagcgtttccatgccgaccgcggcaggcgtgcgctctccggggccgcatcgccatggcgacctgctcacctgactcgctccgggtggactcgccgcgacccctgggcgttcaggcccctgagggcccaacgggcgacggccctccagctccagctgtgcgtctccgcccgggcgaggtggggctgaccgcggccgtctgcacacgtcccctctggtccgcgcccccggcctgggagggcggactcgcccaccccacgatggccccggctttggaagggactgtttccgtgacccgttctcccaacagccgctaacaaccccctctaacgtctcctgcgcggcccgctcctgagaaccctggctcgggagagcgacgcggggtcctcggggctgcgcaggctgcggcgccctgcccacgctggcccgagggcgcggctcgctccgggtcggctcacacacctacgcttcctgccgggaggcggctgggacgcggcggggctgccccaagtgcagtcgcggcagtgttgcgtctccatcgcgggggtccttgcgggccgcgcctgccccgcccggctcccggtgcatgtggcctgcgaggcggcagaggagatgtggggatttagggtcgcacgtcgtgctcgaggtccccacgagaggtcttcccccgcgggctcctgcgcaactgcgtgaagccggcccgggaaagccaagattgtggcccaggaagaggaaggaacgcgggcgacagagctggggcttgggacgttgagggggtcggtggcagctctccg

SEQ ID NO: 7852 - DNA, 1070 bp, Homo sapiens
  source 1..1070: mol_type = unassigned DNA
cggcgctgagtcctgcccagcgcgacccggaccgacggacgcgcagagaccctgccgggacccgccctccagccggcgcccggggagccgccggccggctctacctcccgcccgggagccgggcagggcgagaaggcagcgcgagtggcggtggcgacccccgccggggttcctgcgacgagcggtgaccagcagcgcccgcagccgcggtcccgctctccactcggacgtggccaagcggcggcggccacgacgtccggcttcccgggatcgtccggctgcgccctgggcgcatctgcgcgcctggccccgcgccccgcggagagggcgatgggtcccggtcaggactgagccccccttcccctctccccagtcccgcctggcaccccctcctctgccccgagggcgagccacggtctgcgccgccgccttcccctccggtgcccccggctcgccgtcctcccgcgccctccctccccggacccgttcccggggccaccatggccgcggccatcgctagcggcttgatccgccagaagcggcaggcgcgggagcagcactgggaccggccgtctgccagcaggaggcggagcagccccagcaagaaccgcgggctctgcaacggcaacctggtggatatcttctccaaagtgcgcatcttcggcctcaagaagcgcaggttgcggcgccaaggtctgtgggggtcatggtcgggagatgcgccccgggtcgccccctccccgcctaaacggagcttctccaggctccttccctccctcggttttcccggcccaccccggccccggcctcccttctgagcactctgggtgccgtcgcggggaccctggagtccgctgtcgggcaacctgtagccgccgagaagtgcagccgccagagatggcaagttggctgctcctcgccggcggctcctgccctccgcgtccctgcaggctgggctctgggaaacctgttccccctgagtctcggcttcccgggaggatagggactggcactggctctggaacgcggggcaccccttcctgccacacccggggtcgagccaccgctcg

SEQ ID NO: 7853 - DNA, 395 bp, Homo sapiens
  source 1..395: mol_type = unassigned DNA
cggcggtctttcgccctccccccactctccccgcccccacccccatcccttggccgctcgaacccccgaccgggagcccagagccctgccagcgccgcactgtgcgccgcgcaagtcgctcgatctccccagcggtaccggctctaagcagtaaacatctgtgcgcttctgagccagggacgcgcgtggggggtgggcgtgcacgcgggtgggccagcgcagagtgggagcttgtgggtgctttccgtcgggatttccaactcagctgcctccgagagcctaagctgagcgccgcacgtgctcgtgccatctgctgtactggacgcagtctaatagcgcagagaggtttccatccggcatccagttcgatgtgggccgtttttcccttcccagcg

SEQ ID NO: 7854 - DNA, 265 bp, Homo sapiens
  source 1..265: mol_type = unassigned DNA
cgccggactcgcggaaaaggccgctggaagccccccctgaagccggcagcaccaagaggaccaatacgggcggtgggtatcgcttccacctccccgctggccccatcccccgccgcccgcccctgcctccctccctcgccgtcctccctccctccttccctccctccctcccgcggcccggacacctccagcccgaacccggcggcccctgcgcccctgccccgcgccccctcccctgcacctgccccgcgcctaggtgtccccg

SEQ ID NO: 7855 - DNA, 1169 bp, Homo sapiens
  source 1..1169: mol_type = unassigned DNA
cgagcccgcgccaagagctacgccgagacgcgccgtcggtggggccacgcgagatgcaaccggagagtttaaaactagcccaggaccaaccccccagggatccgctcaactctccccgcagaagagtttaagtggggcagtggccgccacaggctgaggatgatttccggacgcgccccaggcgcgaccgcactactcgtcctcagttcaaagcctgagtgacttggcaccacttccccaattgttttttatttccttcgcatccctgttgtgtctaccgctttcacgtatttgagagcctaaatcatgttaagacgacttggagaaacgcccgatttgcctcccaagccacgcaaggatccacccagacgcacgcccgcgcggagacgcacgctggcacacgcgctcacacacgcgagcacacacacgcgcacactacccggttcgtgcgcgcgggtcgctgttcctgttgcattatgcaaaggtggctgggaaagcgcgttgacttacatttacatagcccatcttctccccacagtatgtgactaatacgtatcccggggaggagggagcgcggctgggggtgctaatcggaagggaacagacagtgagtgccatcttgctgggaggttccagaagcaaagcgccaacgacgacagtagcggtggcctcagctccaccagtaactgccgctggcaggagcaccacacgctctaggagtttcccgggtatcaagtatgggtccagcccgtcccagttatcctcttcccctatggcttcattcccgttgtcagtaccccgacctcagcttgcaaccttgatcttgggcttgattataaatgacgaaagaccgcggcagccttcaaagtgcgggagcgagccccgtactggtcagcgcggcggagggatctttccaggaggccccaagcccccaagcctgtggagagacttggtaacagctggcaaggcctgctccagccaccctcgctggctccttgcccctgcattcagcgcctgagggcgttattcgccctctccctgcgtcccacgcaagcggctcaaggaactcactcgatccggattccgcctcgtatgctctccaagccttcgccacctccgcaggcgctctagaaaggcgtgatggccccagctcagtgcccgccagcccg

SEQ ID NO: 7856 - DNA, 1743 bp, Homo sapiens
  source 1..1743: mol_type = unassigned DNA
cgtcctcgcggttgccctcctcccagggccgccggtggtccaggatctggccatcggggaggggcgtggtcttgccgaagtcgatgagccacacgccggcgcgatggcagtgatcgtgcacaaagaggagcgagctgccgatcacctgcgagccccgcaccgtcaggccgcggccctgcccagagacgcccttgccgggttcccgccctagccctcgcggcccgggcacccgggcagccgccgcttacctcgtgcctcctgaagaactcggatacctccagggtgtcccggatctgctgcaggcggttcagataccgcctctgcagagggtggggtgggagaggagggcaaattaactaaacgccaaatgagcccctgctaacgatgaggagccgggacccacgctgtgcttggcaaatgccgccaggaggaggacccagggccccgcccagcgtggcccagaagggaaggagcgtagagcagttgcgagccagcgcggtgagggccatggtggggacacagccgagggcactgggccagatgacaggggcagtcctcggcttcaggctccccaacacctcagggtttgggatcccgctctcaccagcacttcctcatctccttgcacaaactcttcaaagacgcgaagcacctgctctcggcttcgcgtagtcttgaagtcggtgctgcaggagccgtccgctttctggatgtgggacaggagtgtcaggggccccgggcccgccagtggggaagaggacagcgtagagcagcggtacctcccagttgcaggggacggcgaggcggtgggagagggcggaggggcaggcggggcgggagcgggggatcgggaaagacagcgcgcagtggggctgcggcggtgccagcgaagcgcgcctgcctcaccttgatgccctcgatgcggaagccgagggtggtgctggagctgatgccttcccgccactgcatgtagcgcggcttggtgacggcgcgctgcgcgtgctcctcctccgtgggagcttcaggatccaccgccagcattttcttgtacatgtccttccgcagcttgggccgctcacgggccttggtcagctcctcctctaggtaagtcctgtgggggcgcaggcagcggccagggcatgagggggcgcacacggagaccccttcgagcactcgccccgggtccccctcaagcagctgtcccggccccggacccctacttgatccccccaaccgacctggcagggcacgcatacctgacgcccattttgcagtcgagcacacaaggtccgtcgaagccatcgagcaggtcctgcagctgcaggtagctttcgccgtcgcgctccaccacgccgtggaaggcaggcacgcagccgcgcagcgcgtcagccatcagccgcgccaggcagtagcgctccggctccgagcagcgcttcaggatcagcccgctggtgcccgccgccttaaaactccctgaggaccggcatccgtcagcgccgcccagccccttcccgtcgcgggcacccgcccacccgccccactgctcaccagtgtgccctgccagctgcacccaggcgtagcgcttcttgaaagggcttatgaccggcagattgaccatggtccggatcttctgccagtggtttttctgaaagcgacagggtcaaggtctgataatcggcgtctcggcaatgcataagccctccctccactgaaacagggtctcgccacgcccccgacccaccg

SEQ ID NO: 7857 - DNA, 2405 bp, Homo sapiens
  source 1..2405: mol_type = unassigned DNA
cgggggaggggtatacgcagtttccgtgcggaaagatggtgtctttccttcacagggctgcgcgggcacccatccccgctgcaaagcgcccgggccaggcgcggcttgctccgggtcggggcgagctcgctgccctctgcggcagacagcgatgcgcgctccccgccccagctcccggctcgcccggcggcccgcgcgccctcccggtgcagcatgcgggcgctgtgacgttctcggataaatgccgtgtaactgtgtaggcgaatgagagctaaaaataagaacggaaaatctatcattaaggtatcattgcgccagcgcagctatttgaaggctcccatggtccccggcgcctgcgtttgaagcccgccttcaggctttggggggtatttgcagaaaactcccagcagcggctcgccaaccagacctcagggtgcacggggggtggcgccggtaattatggcaactctcaaaataaaataatataaaataaagtaaccaacgttcaccaaccaccaccccatctcaccccctgtactgtcctcaggtagctggggaagccgccgggagtgcagccggatgctggaattcaatgtgacccggctgactatgcaaagactaggactggacgcttttgcagctctatttcgccacccaccttcctccttccacctcgtattagaaataaagtggggggggggggcgagcctttggaggagaaaatgacaactggcacttaaccccaggtctacagtgcgccgcggtggggcgcaaagacgcaaactcccgggatggcgagccttcggggtttcattgggttaaacgaaaattgatctgatttgctttttaacatccgagggagagaaggggagatgaggggagggagggcagggtttgagtgtgtgcgtgtgcgtgtgcgtgtgtgtgtgtctggggagggggaggaggcaccaagttgcagcctgcgcgcggctctgcgcctcggcggggctgcgtgcgtgtgtccctgtccgcgctgctgaaacgggctcttcgagggatcggcgtcacatgactccgcctgcccctcgccagcgcgcagatcgccagtccctcagtttgcccggcaccggaggagggtcgggcggcatcttccgggtactggggctctgcggagcggagaagaggttccagcggggaatggtatatctggattcaagaagccgcggctcggcgccagatcctggagtgtagatatttggggggaggggagagctagagggagcgagcgagcgagcgccagagagaggcagcgcgcagcgcgcacggacggggggctgctgcgcggagaagatgtaagcgcgtggggtctcgctggcctctgagcaccatgcagaaggggatccggctgaatgatggccacgtcgcgtccctgggactgctggcgcgcaaggacggcacgcgcaaaggctacctgagcaagcggagttcggacaacacaaaatggcaaaccaagtggttcgcgctgctgcagaacctgctcttctacttcgagagcgactcgagctcgcggccctcggggctttacctgctggagggctgcgtctgcgaccgcgcgccctcccccaagccggcgctgtcggccaaggagccgctggagaaacaggtgaggcgagcgtcgcgtcctgacctccctgcgtcccggccgcggccctgggggctcagggccttcggctggctgatggcgcttgaactttggcccctctactcttggcgccctaggcgctctctgcaccctcagcgagaggggaggcttgctcccagccaggcgagtgactgcggcgggcagagggggcagggattgagggcggggagtagatgtgggctgcggctgcccttcgccggacgagccccgtgggaggcgggtacagaggggccgacacctggagatgcagaggaagatggggtcctaaggaccagagacgatgagtctggacacacgtccagccaaaaatggtgctcccaacccccactcccaccgcccagccctaatagccccgatcgtctgttctacaccgggaacgtgtaattccccgcgcttaggcatgggaagggcaagacggaggcgtccgagcgctgccagcccttgcctcgccgcagctgagggcggagagcggtctgcgctagctcctcggagttgggctggggttatggggctacacgggtcggttcggtaccatcgagcggtggtgggctcccagctggcggccgccggagcaacaagcccaaagattcccaaggaccgctctgatgcgccggggctagggccagggctgctgcggaggcagcgggacgaagtgggcgcttctctcctcccccgccccctgcgccgccgccgccgccgcagtcgcggctatagcgctgcg

SEQ ID NO: 7858 - DNA, 1920 bp, Homo sapiens
  source 1..1920: mol_type = unassigned DNA
cgggcgctgccccctgcggccccctccgccgaggcctgtgcgtggcggggttcccaggagcggcagtccgtgcggcctgggggcggccccctccccgcatcgcagcggggcgtgcaaagcgtctgcggctgtagtgtgggcgctcacttcacgtgctcggcggcgtgcgaggagcagtaatacttcttgtgggcgatgaaggtggacaggctgctgaacttgatgttgcaaagacggcagtaccggtggttgccgttgggcagcggcgccggcgtgcccttgctgggagtctggacgcccttgtccgagtaggaggggggcgccggcgggggcggcacggcctcgggcgcggcggccggggacgggggcgggccgggcggcggctcctggggctccgggccgaggccgtcccgggggccacgggacccgggctgcggggaggcggcgggggcgggagcgggcgaggggccgcggtcggccggcgtccgggcctcgacccccgggccggccaggggcgcgccgagcagcaggccgtgcgccaggcggaaatgctccagcaggtccccgcgcaccgggccgttcggggggcagtaggggcaggcggcggcgggcaggccgagcgcgccgggcggtggcgcagcggggcacgagtacttcttgtgcgccaggtaggcctcgaggctgtggaagctcacgcggcaggccgtgcactcgtggtagtcggccagcgccggtgccggggctccggggagcgggcgccgcggcttcttgctcaggtcgatggggccgtcggccgcggggccgggcgagcgcgcaggggcgaggccggggccgcttccgcttccgcttccgggccgcggcgactcgggcgcgggggcgtggccgggcggcggggggggcggggcgccggccgcgtgcagctcgtagagcttgcggcgtctgcgcgtgcgcacaggcgcggcgggagagggggccgggggcgcggccggcccagggggtcccgggggcgcggccggtcggcgcggcggcgggtcgtggcgcgaggcgcagtagtaccgcttgtgcacggtgtaggtctcgtggcggctgaagcggatgttgcaggcctcgcacagcgtgcggctggggtcgtcctccgcgtcgtccacggagctacccgggctctggctgccctcgctgccccggccgcccgcgccgtcctcgggcgtggccgcgcccccagccccctcctcgcgcgctccggggcccggggacgagcgcggcgcgtcgggttcggcgggctggccggggggcgcgcgggccgggccggggggcgccttgggcctgcgcgcggcaggcgcgtcctcgggcgcacggcggcctgaacagtagaggcgcttgtgcacgtagtagttgttgacgttgctgaaggtgatctcgcactcgaagcacgtagcgcccttgggggccccggggaagagcccggtctgcgcgccgccggcgcccgcgcccgcgccctgctgcagccggctgtgcaccagctcggacatcttggccaggatctccgaggcggggggcgccgcgtcgggcccgaacacgtactgcggaaggaacagggccccggccaggcccagctcgccgggcaccgggctggagcccggcgtggggctggacagctcggccttgaccctggccggggcggggctgcgcggcgacggcgtccgcgacggggcctggggcccaggctctccggggcccaggatgggggccgcctccggctcctccaccgcctccaccttgatgctcctgggggccgccgggggctcgctgctgcctccattctgggccagaggctccgctctggcctctccgttggtggcctcggccagggcctttctgtccagtcctggcgatggggtgggcgccaggcccaggtccgcg

SEQ ID NO: 7859 - DNA, 1403 bp, Homo sapiens
  source 1..1403: mol_type = unassigned DNA
cgcccgtccctcccaggcccggtgggaccagacccgaagccaaccctcgccaggcgtcaggtgtagaccccaggccaggccagagcagttcctgggtcttcggaccgggatgcccgccctgcccctcctcctggccccgcccggtctgtcacagggggaggcctcggcctcgcattccgggcagcgaacttcgccggccgaggttagccccgtgcgggggcctcccgcgggaccgaccgccaagcggcattgtccgtcccgggcgcccgcccggttccagacgcaggtcctgcggccgccccgtgacaagcacactgacgggccactgtcctttgacgagtgctaaaaagttcgtttgttttgaacgtcaattttcaagtgatcttcacgaggtttcccctcccggttccttcgctgctgcctcgcccgcactcggtccccagtaggtgctcaagaaacgtccagcaaacggcagcgcaggcgagtctgctctgcgcgctggcgcgtttcactgcccacggatggcgggcgacctcacgggatccccggttcgcaggatccccgcccccgaggctgcctctgggccgggaggggttaccccagaggggcgtccactctcgacggcgggggccggggcgccgcgggcaggggagggcgcagcctccaagcagccccagcctggcctagaccccgcgcctagcgagccggccggccaggcccacaccccccacctgccgcccgccccaggggaagggtccccccgacgacgcccgagcccccctcttcctcggagggccggaggccggcgcccattggccggccctgggcgacgccccgcccctccgacgccacgggccaatgagcgcgcgctgtcagctcatcagccgggctggctgggcggctcgggagcccgagcggtggcggagcggcgagcagcgagcagcgcctgcgggagcggccggtcggtcgggtccccgcgccccgcacgcccgcacgcccagcggggcccgcattgagcatgggcgcggcggccgtgcgctggcacttgtgcgtgctgctggccctgggcacacgcgggcggctggccgggggcagcgggctcccaggtaagcccccgaccgaggtggggggcggcgggcgcggggggctcgggcggccgaggcgcggtcccggagggcttcttccccgcggatcccgagctcgccccgcgcggccccgcgccccctgcctctttgcaaagtaacttctagggccggcccggggcgccccctccccgcagcccgggcggccggggctcctgagtccggcggggccgcaccaggggtgggtgggccggggccccgggaggggaagcgcgagcgcgggagcgaggaagaaaggcggcggttcccggggaccccgcg

SEQ ID NO: 7860 - DNA, 1088 bp, Homo sapiens
  source 1..1088: mol_type = unassigned DNA
cgctgaggggccgcactcacccgcgcaggtaccagcaggcagccctggcgtccgcgggaggcggccgggggcgggggtccctcggtgcccatcgccgcccctgcggctgggtccgcgctccgggccggccgagctcaacgccaggaccccgtccgagcctcccagggccccgccaggcgccgcgtccgcgcccgcgcccctctgccggctccggctcgggctccaccggggcgcagggctggggaaccggagctccgcccgccgacccggagcaccgcccacgcagacccgccccgggcgagggaggggccgggcgcgcacccgcggggagggcggcgagcggggatcagccgaagtcgggagaggggcgcttccacggggcgggaaactggcgcgcgactctgggggaagtgcaggatggggggacaggggcgctcccgcgggggtggatgggggaccatagcggggctggcggggcaggggccggcgcacgaggctggaggaggggagcgcgcgcttctacccgggctgggtcgccgaggtccgcggcgcatcgtggcggcggtgggcggaggggggcggggggcacctcttctcccttgtggcgcaggtgggcgcgctctggaccggcttgacgacccctccccgccgccccacctccctggccaaaggttctcagcttctaatcagggacatttctagtccacagcctcgaagccatgggttctccccggccctctgaagccgccacacctgtgccagccggccgcgtcctcagacctttccccgcggagtcttcccagcacttggagacgcagcgcagggccccgaggacggcctggcccggagaaaagataccgaagctccaactttccccaaccccgctcccctcctccttccaccctcccttcccgcccccaaagctcgggggtcctatccctcctccggtccgcggagtctcccgaaccctgcggggacccggcgctcggcggtgccctcctggggcgcacggggctggggcgggagcgaggagaccaggtggggaggggaccccagatctcagacgccaggggagacggcgtttcccg

SEQ ID NO: 7861 - DNA, 1812 bp, Homo sapiens
  source 1..1812: mol_type = unassigned DNA
cggggtcgctgcgtcttcctgaccactgacggccaggacggccccagccccgctttacctgcaagccccactccaggctcgagcccccgagggcagggatagcttcccgggtcccgaggcttgaccagagcctgaaagctcctgccgggggttgctccgactcagcgaggcgccaggctgcccggcgcggctgggggcgctcagcgccgggaccccagccctgccccggccgcccgctggcccagtgcgcacgctccggcagctcagctccccctcccacggcggcaggagagctcccggcatctgcccggggcgggggcgggggcggggcggggcgggcgccgcgccctcctgcctgactggcaggaagacagaccaatcggaggggctccccggggggaggggcggtgccgtgcctgagccgggcgcgggcgaccgagggagctgcagccacccgcgtgcggcacgcgccggccgcctgcccggatcgcggccaccagtgccgcggcctctcgactcccgccccgccgagccgcgcgcgcgactgccatcctcctcaattgctttttacgattttttttgtgcatgcattcattttctgttccgttttgtcctttttaaggcggtggcggcggcgacagcggcgtaagctcgcagcggggagggggcggccggaggatgcggcgcggggctgcgctcgctacgtccgctgctgctgcccggctcgggcctgagcgccgagcaggtgggtacaggtgcgccggggggcgggaggcgagcgctggccagagggaacccgtggacccggcgaccgaggggcggacctggcggcaagggacgcggcgaccggtgccgccccgccccatcgtccatctccccctcctccggccatcgcgccccctctgggtcccccttccactctcgcatcccacctcagtggtcccccacccttccatacccatcccccactcctcttcagacccccttgcaaaatctcccagccgctgcgtcgcttcccccaacaccccctcccggtcccgcccccagcccccagctctccttcacgccacccctatttccactcttctccggattccgccctcaagccaaggagcgggagggggacccacccggtgcctgccggagtggcgcggggggtgtggccggcccgtcccctccgtgtcttccgcagggtaggtcacagtcccccagatctccgcccaggtggcaaagaagatggagctgggggccgcgccccggcggcgcggggcccgaaggcgaggccgcccagcccgcaccccaccccacgcacggcacacgccgccgcggcccctgccacgcacaccctcgcgctgctccgcccacgtgggcgccggggaggaggctcgagagatgggaagaaaggctggcacccaccctcctgccgggccggcgcgccctgggcgcactggcctccggagatggcgcgcaaggattgactctcgtggtgccagacaccttgccgggcgccctgcgtcggggccagcggcctcgctggcctgcgtcagtgcgctgcggcctcgcctcccagcccctcggtccttcgctccatcccccctgctgtgggctcctgagcatccggcctgggcagcccagatagaggccgcttacgaggctggcgcttcttttcgccttagaagcatcccgctcccacacaccccagctcgccggtctcctgaaggctgggccagcctcggctctccgccagcctctgcccggctctctgagctccagcgatactgtatctaaccgccagccctcctccgccgcccg

SEQ ID NO: 7862 - DNA, 5819 bp, Homo sapiens
  source 1..5819: mol_type = unassigned DNA
cggagggaaaccgggccgacgacaagggtggctatttccgggctcttcgcgcccggcccaagcgtccctgggtggggcagcccaaacggggagaggggccccgtgggccgagggcccgaggccgcagcgagcttagcgtttggccaaatctggctcgcgcgccttcccactgtcctgttagggctgtgtgacctcccggagccctacgtccccgcccaaacagctcccagcgcccctgctggcacccggggcgccctcaccccagctcctgcacccggcgcgccgcgcgcagaccggacggaggggaaagttggcaagagcgcggcgcccgcgggagaaagcgttaatgggcggccgggtgggagcagcgcgctcgctcgcccacgtcacgccggtgcgggctcggctgacgaccgcggcgcctggggacgccggcgcgctccgctcgccaggtgctccgcctggaaatgtctccattagttgtcgccggctccccgctggagcgcgcgcgccgagcttccgcgcggagccctcgcgggctgccgggagcggcccagcgccaccgcaggtaggtgaggtcccccgctcccgcccccgccccggggttccgagacccctccccccttccgaggaggcggaggctccgcgcggccgccgaggggagcgggcggcggcggctgcggcgactccccggtgcgtcccgggctgcgagctgctccccgcggccccggcagccacacggcgcgggcgggagcttccccagctcaggtagggagtgggctccgccgcacaaactttgcgaggattgctcttgcgcttaaggggacaaagtttgctacccgtcgctaggctctccagaggccgctgcgtttgctgcaagttgcgggaagcagggtgcgcgggccggcgcggggcggggggtggggggctcggagtggccaggcctgagtcctggacgcccggacggcgctccgtccagcctcaggccgtacccagggagcaagcggcgggggcgcagcgggagagaggagggagagggccgcgggcccccatggagggcggttgggaatccagagattcaccgcttgtccctgtggctccttctcctaccactggctccgagggggcctcggggctgtgaggaaatgacctgccaacctcgaggttcgccagtgcggcgtcagcgaccgtgaggcctctcaaacccacaccccagccgggtgtcccgagcggtgggcgggcacaggcgcccccaaggtctctggccccaggtctcagaaagaaaggcccttgcctggtgccccgggctcccggcttcgcctttggctggagttaacttctctgggctggaaggagctccctccggacgagctcttggtgcggggaactggtggcccccagggtaactcctgaagcaccagggctaggctggccgaagaagggtcagggcccggcctgtctccccggaggccttccatggttccgacggccaacggtaaccccgtcaaaataggcgacccgcctgcgcttcgcgttaggggctgaccatcccctgcctcccctgcggcctgctccggccctggtcctccgctcttcggagcgctccaggccagcgggagcacctcatctccccgaagctgagccggtgctgtgtactccgggagccggctgacttctggcccacctgctcacgggtgtatttagtaccgggggtccctagagggaggaaggctcagcactccgagtctatgcagacgcgttcagctgatacctgagatgctgagcgtcctatcgttggtgaaagggacactgggtgcctccgctccaggcttggccttttggtgaaggcacttggaaaatattccagtattatctatgggagaagggtggcccagtgagaatccccggtttgggcaggcgggcctaggccaggctacagggtttcagtgagatgtcccggtggtcgccaatccacaggctggattgaccctgtgtcctggaatgagtagtggggcctgggtgaggccgggcgggtcaggaggcctcctgggcagttgcgagcttcccgaggcagggtgactgtgactgggcccggaccccaggcgctggggcctgctggcgggcaggaagtggagcgtgtgtgtgcggcggcctgggaaagccgattcagaggccaggtttctgggtcacggagaaagggtcgcccgctggtggggactggagcgtcgatttatgcacacaggctggaaaggcaaaagagaacaggagaaggtggcggtggtggtcaaaggaagcccccgaaagggcccccacgtactggctgccctgggaagtggaggctgcttctcccagactctgctcagaagatgaatggccgcctgttctggggcttcggctccagttaagccccgccgggtctggaaggaaggaaatgcaccagcctcaggtctgggtgggctgagctgttgcactagagcccagaggtgcagggcataggtggctgggcccctgggccctggctctccccctcagccggcggagtgctcacagtcgccgaggccaggtccccgagtataggtgaggaaaggacaagccacagctgaatgcctcccctctgggggtctctactccccatcccagcccttggcccggctgggctcacacccctccttcagccgggcctcattacctggagagagcgagtagtttgtaaacaataaataatgggaagtagaaggatgctcgggaaaaaccagaaaactgcaaggagtggggaggagggagggtgggagaggggaggaaggagggtgggggaggggaggagcaggaggagagggaaaggggttgagagattcatttctagcgagaaaccccggtggctagtttcttattatttacaggaaggtgatattagcgattcaggtgagaaagaaagaaacgcggcctgccgcgaaatcaatacagaattcagaaacaattattaatgtcatttgactcgtgttctttatatatttctcgcggctaccgacgctaaactgtctgaataatttgcatggagcggctattcattatttccgatggtttccctctgcaagcagctcggacgtggcccgctccggtccaacgcgatcggagaactcgtattttcatctgtaaattaaagcaattacgcagcagatattatatgatgtgtactgtggtctccagatagtcatcaatcaccttcaaccgagctgtcaaaagagcaggcagatttcgtttctgggaggcaggcttgcagctggggagagggcgaggacgtcatcattaattagagggtgaccctggggcgattcacaggtctgaacccaggaatctttctgagcaagtctgcacaacgctgccttgcacggcttccttcccaacttaccacgggaggccggcccagggggcgagggcaaccggggcgagtcccggtcccggagggcgatggcgcagaaggcggggaacgggttcgggatggcccgggcgcccccttgccgcccccttgccgcctgctcactggcctccgctttgaacttgggcaaggtcccagggagggtactggccgagggagtcctggggtgggcgctcggtcccctcttccgattgctccgtgcgccccagacagaaagctgggcaaaatggacaggggagggcgcctccgccaggcacccaacgccccctccctcgcagccagccctgcggggcgccgggagggacgagcttagcgggaggggccggggcctgggttgaggaacctgctcttccgagcgcgcagggccgcccggcagtccccggcttagccgcgaggggcagggggaagccggcggagcacggccggcggaaaggggatcggggaggaaagtcggggaggcgaggtgggggcggtgggctgagcgggaacttaaaagaccgcggtggagaagatggggcgttctccgcgacactcggctgcccagaggtgcaaagccggtgggcgcacgcccggggcggccctacagccctcgggccgccagtctcagggtgtcgggctccaactaaggccccgaagcccccacgcacctgagggcattttgaccagctcttgcgggctgtcttgcggccgcagtgggttctgaaagtccattccggcgtagggtggaaaccggcgggaggcgttgctgattctcgattaaacaatagtgacgagacgcgtgcggggcgcctgcgagccccttcctgccactcggagcagagcgcgccagcgcgaggccgggccggccgcctgcgcagcgccgggctaattttaactgttgattacatcttcagcgtgtcctttcataggtctcatttgtaattgagacgaatgattacagtggggcgggaaggagcagctgctcattaattaatttctaattaaaagtgcctctcgttctcgggtgactaaagagaaacaccgttcgctgggcgatattgactcggatggaatttatttgctaacgcccggaggaatggcccctccgtccaccgcgcggccgggactgtcctggcccctcccggcctgagccgccggcgagtgaccggcgagtctgcggccaggccgggctgcgcgaggtggggctgacgtcagagcctcctccgcttcaagccgcgcacatctgacttgacgggttcgcgcgactcgtttttttttttttctttttcgtaaaatatgtatttctgtcgccgctgcgaggccgctcggtcccagagccccctcgagcctccggaatgcgaagttaaaggaatcgcggcggccaccgctgctcactttgttacccggttagaaaagtttgcggagcgcggggatggactaaccggctctcctgcttcgccctcccagcgcctagaagcctgcagctccggagcagtggccgcgccacgccggccccagcgcgcagaaccctgcaggccccgcccgtccgccccgggccgcgcccgccatgtcctacccgcagtttggatacccctactcctcggctccccaggtaagcggagccccgccccgcccaggccaccgcaggtgccggtagggcggatggggcggggacggggggtggggagtgtccgacctacgactgcctgcggcttccgagctagcaaggcctgggtcgcgcgcccctcacgcccaacccctgctccccaaacccccggggaaaggccgaggcgctaagaaaatccgacgggccgggcccgggttccctgatgtttgaaccacaaggctcaggctgtgccccaggggagtcctaggaccccaaggaacccctggggaaggaggcttggcgcgcaaatggcgtcagaggccttggaaaccctccggggaagggtgtaggtgctcggctgggccccacgtggcggaggaggccagacgcgcacaagctagtggaaaggggcgagcatcctggtgtggacggcgggaggcccgggggtactcggggcacgccctcgtgggcggcgcgcgggattggcaaggcccagggccccagcctccagcccggcttcccgccagtcctcgcggcctctctctgcagttcttgatggccaccaactccctgagcacgtgctgcgagtccggaggccgcacgctggcggactccgggcccgccgcctcggcccaggcgccggtctactgcccggtctacgagagccggctgctggccaccgcgcgccacgagctcaactcggccgcggcgctgggcgtctatgggggtccctatggcggatcgcagggctatggcaactacgtgacctacggctcggaggcgtccgccttctactcg

SEQ ID NO: 7863 - DNA, 2001 bp, Homo sapiens
  source 1..2001: mol_type = unassigned DNA
cgcccccgccccgtgccaagcgggcccaaggcccgaggctcccccgctcacaaccccggtgcccggaacacgtcttcgaggggccgtgctgtcggggttattactcgcgactggacctcgcgccgtgttgctctcctcgggccccgagcccgcccagcggtctgcacggcccaggcctgagctgcgggcttctcctgtggggcgcgctgggagtgagctctatccccaaagcccatttcaacgtcccaggtatgactacgacggcagaggccggccgcccaccctcgcccccttccccggccagagcgcctttgccgggagccgacgaccgcggcctgaccccgggccccaccgcctactcccggctcccgcccttcctccacggtcaggggtcacacacagcggacgccccgttctcagccgcccctctgatctctgaatttgggagccagcgtgtccgctggggcatgcactgccacgggcactgggacccctttgctgctgcggggaggagccccgacggcaggtgggaagacctagcctgcccgcgtccccgctccccagctcctgcgacccgggccgaggctctcagcccctgggcttccccgctccgggtttgagggaggggccgggccttcgggcctgcagacccgccaccgcgcgtgcgcatgcgtcggccgcgagcccccgggtgcaggcctgggcggctccggcccgcgcacttgtccaggcgctgcggctcagcgcgccccaacctccagctcgggcggagagcgggggcgggactgaagcaccgtgttcctcaaagtatcctctcgccgtcggcagccctggcctcgcaaatgctccagcgcgctcaggcgcacgcagagactggcgcggcagcctccgggccaacggcacgcgagcaaagctggttggcgacctgggacacgcagtagaagttgaggctgcaccgactcccgccgcttcgggggaggcatgggcccgggcaggcctaggaggaagctgcacagcccgaggcccgggcgggagtggcgggccgcgggcaagggaacgtatatttggaaggggtcaggacctcggctggagtctggctttttatggcgaggaagccgactgggaagggccctctggcgaggctttcctgttgtgccacttttccccggcagcgccgggcgcggggaacgcggggctgcaccggggcgggggagggggctttacccggcggctccgaggactcgactctggggtcgggcccggcgggtaggcctgcccaggagccagctggcaaatgcagcggactgtcacgttattccactgtcaccacttactgtaaatcactgtcctaagcctccgggagaatccgtcgaacctgagaggggggagggggatgggggtgggcgcgcaggaagccccacaggcaccagggactggtgacccaggacatcagcccctcgagttctctctgggaatttctagcacccagactgtccctgactgtagggaccacggtggggcgtcttccttctaagctctccccgggacaccgggcgcgcccccctcgcccctgggttagcgcacactcctccacgcgatgaccagcacagccactgtgaggcccggccttggccgcgtttgtcctttgcgagtgataataataaaaatcattggaattgcaaggaagcccctggccccggctccccagccgctgctgtcctgggtgtcccggctgcggaaagaccccgcagccgggcccgacccacgagtggaacaccgggctgcggacccagccgggcctacaggactggcgcggggctccggggacaggcctcgcagggccctcctgcgcaccgtctgggacgccgattttgccaacttggaggacaatttttgttttcactctaccagcagatttttaaaaatccagtcgccgctgaaacgtgcttcccacccgtccggtttgtttgtagcctttgacgagccccggcacagcctccg

SEQ ID NO: 7864 - DNA, 1265 bp, Homo sapiens
  source 1..1265: mol_type = unassigned DNA
cggctcgggcgccaggtagaactccagctcgatgctgccgccgtcgggggagagggaatccgttgggagggacagtcgggggctggggaaggaagagcgggtgctgggagggttcaacactggcggagccccaggtggcgacgcgggcggcgagagctgctccgaggcgggggcctcgggcaggtcgctctccacgcagtacacggagcagaagacttgtctcttggcgagggacgggcgccgctgacccagcacgtccaggaccagtccgtcggcggcccccacgcgggtcctgggctccagctcttcgccggggggcgcctcctgctgttcatcccctccctcttttcgatccccagcttcctcctcttcctcctccagctccaactgcagtggcaaggtctggggattgagaggcccggtgagtgccagtcccgcaggctgcgccggtgctcggctcttactccagcccgggggccccaggctcctcgcgggctctggggcgctggtgtccgcgcagccccagtcgcttccgcagccaccgccgctcggctccgcggaggcggcgcgcagcgggggcgcccgggcgctgtccccctgaggcctcgggggctcagggtggcccgcagtgccactggccagggtctgcgactcctggggcccgccgccgccgctcaccgtgctctgctcctcgcccatcgccgcccgcggcccgcgccgccgctgcccatccagccgccgggacccccacccggcgcccgcgggcagcgggggcagtggctcggctcgactcgcggctccgcttctgcttccgggtccttcctcctgggctgggacgccccaagtcccctccggggagcccgtgctccgaggctgcggcgcgtggggagcctggcccggcccgccgctcctcctcgtactctggcgcggcggggcaccgcctcgggggcgccgagggccgctcgctctgggctcgggcgcgcccgccccacatgcagctcggggcggcgccgcagccccagcgagccccaggcgggacagaggggtctgggaggagacggccgtcagtcccgcgccatcaccggtcccggctgccggacgcgcggcccgagggcggtggtcaaagggtcgaggggcctgtggcgccgccgcggcgcgcaccaggaggtgcagccggagcgctggccagccgcagggcccctgggggagaggccggagcgggcgacctccctctccccgcgcttcacctacagccctcctcgccg

SEQ ID NO: 7865 - DNA, 1360 bp, Homo sapiens
  source 1..1360: mol_type = unassigned DNA
cgccgaggatgtggcctccgccccccgcagccgccgcaggagcttctgcctctaaagcggcaggcaggggtctcagcgggcccacttcaacctgggaaggccggtgcgtttccccacagaccccgcagggcgtttcttctggggaccactgaagccctggcatccccaaccccagcccctccgcgccacgggaaacgaagacgacactcttttgaacaatcccggatgtgtcaccacagaggggcattctacactggcccctaccccaacccccacctagcacattgcttgcccacccctcaaaccccgtgcggattgcggtacctagccccgggggaccctccagccctgccttcccgatccgcgtaggtgcgtccgtccacctaagggtagggaggcatgtccctccgggtccctccggccgcatggcttgcctgcccccctggtctcccttctccgcatcaggaggggcgtgagatagctaggtcgacccccaccccggcagtctgcggcgatcggccgccccgagcgcagcgccagacacttgggttggggggtgtcagcctgacgcgcaggaagggcgcagcggcgggagggggcttcatttcagatctgggaggcttgcctggcgccggccctcgcccgctctccgtcggtggaggtcgcggctggcggagaccgccaagccagaggaggggatccgaggtcccggctgggcgaaggttctggagggggagaagacggccgaggcgtggaggggcagccgcggcggggcgacccttacctgctcactgcggggcctgtccgtggggccggggcagactccgcaaaggacgcgcagcctgcaagtccgcggcccgcgcggcgcggggatggggagcgtgtgcgccgaggagcgcgcgccgagccgggtctccgcgcctgtgtggccggctggcggccggggtccgtgtgtccctgcgcggcggcgtgtgcgtgtgcgcacgcggggaccacgctcgcccggagccgccgccgccgccgtcactccctgcccggggccgagcgcagcgccccctttgcccgccccgcgcggcgcggcagtccagcttggctccgtcctgcgggagaggcgccgcctccgccgcgaagccaggctgggcgctggagggaggcgaccgaccaccgcctccccctgctcacttcacaggctggggagggggtgctgcaggccaatgagcgcccgggggcggggttagatcgagggcggtgcggtggggggcgcggtggggggcgccgggctgctcaacccgaccccacccgcagcacagactggagcaggagctgcggcgggaaatcccagcggcgggggtcgggggcg

SEQ ID NO: 7866 - DNA, 362 bp, Homo sapiens
  source 1..362: mol_type = unassigned DNA
cgcgggggtcaccgcgcccgcgaacgcagagtccacacgtggattcccgcgcctgtgatgccccgacccgtcccgggtccccgcacagacaatgccgcgcgtccttcccgcagccactccgggacccgcgccccgcgccgcccggacgtccccctgcgtctgccggggacactcaccgacaccaggaactccagcgtgcccacatagtcccgctcggtcttctggagctcgctgagcacgcacacgcgcaggcgaagctgcttctccaggtccttggcgctctcggcgcggctgtctccgcggctgtcctcgctcatggtcggcggcggtgcgcagcgcggcgctgcccgccgtgctgagcg

SEQ ID NO: 7867 - DNA, 2566 bp, synthetic construct
  misc_feature 1..2566: note = Description of Artificial Sequence: Synthetic polynucleotide
  source 1..2566: mol_type = other DNA
ygttgggygatgagggatygttgggtaattgggggtataggatygggtttygttgggttyggggtagaagygtygaagtttygattyggaaygyggtgattttattaaygtagaagttygygtagtygagtagaggagtttttygtaggygattttyggatagaygtttttgygyggttygygtggtttagtttygttttaggaaatttttygygtagttttygttttatgygtttttatttagttttttttyggggtygttttttttttaaagtagtttttygggtttattgggygttttygtaatygggtyggaatttygaayggtttygygtgttattyggttattttggtaatattattyggyggygttyggyggtttaattttagtttgyggtttttttygagtttttygtaaggtggggatygggaygygatyggggatggggaagggggttgtaggaggtttygtttgygttgtygtttttgttgggtatagygttttttattattygyggygatttyggttttygtaaggtggggyggygagtaggagtyggggttaggttaggggttygagttttygttygaggggyggggaaggygggtgaygtgagtygggtygggygggyggagttgggatyggtttygggaggygggggygagygygyggagaggtagaygygaggagggaggyggttgagtagygygggyggttttgyggygggygyggtgggygygggyggyggggtttygggattttygygygtttttttygygyggygtygtygtygygygtttttaygtttygygttttayggygttttygtttygygygtttttygtgttygttttttgttagttttygggtygyggtygtttgtagagygagygtttagayggagttttygggtaatttgagtggygtygatyggyggyggagtttttggtagagtttttygattyggtagygyggaggggattygygttygttygygtygygttattttaaattttaagtagygtygttttatyggygyggagtttyggttggaggtaagagtygygygtygggagataygtatygtgagyggtagygtygtyggttttttttttygtygtttyggagggygaagtygyggttttttagttttttgttgygtygygatagygtyggaataygtttygtttygttgtygttttygttgtgtygtyggyggagggggtygygagtttygygtttyggtyggaggatgtgygttttygygggtygtttagtttgagttatgygttttaayggyggyggygygtyggtyggtatggagtttygygyggtygygttttgattygttgtgygtttygyggtyggygggyggygggaggyggyggatygagagtyggagatyggygtygygggayggaagygagygggygygggygtygygtagatggtttgggygagttaggtttgaggtttygtttttygaaaygtgattatgtggatttaatagtttttaggatttaggtgagygattyggtyggygtygggtgygtgtgggygygtgggtgttaggttgggyggaagyggygtttttttttatgttgtaaattaagggattttttttygtttttygtaagygggtaayggggtgtatyggtagtyggaaaggggygttygttyggagtttggagtagtatygyggttttggyggggagyggtygggtttttagggtttygygygttyggggtyggggtagyggygttygttttagtaattygggaagtggggtyggttaggygygttygtagttttaggagttagtagygtagtgttttggtyggttgtttyggygygtttttttttyggggttyggggygaggygtyggtygttgggygyggygggygygggggtyggggttgtyggggaaagttaaagtttygggtttttagygagagtttygtaggyggagttggaggaaattatagttaaatagttatttygttttttttttttttttttyggggtttyggggttgagtaggggttttttaggtttttagttgtygatttagttgtttgygggtgattttygggttygaygggygtttatagttggygggtagttggggygggagagttggggtttttggggagtttyggyggttatttygttgtaaatatataygtatataygttygtyggygygttyggggtttgtttgtgtttgggattttagggttagatggaagagggggttygagtttagagttygtggtgggggtgtttagaaagatttttttyggtaaattttgttagttygtyggggttttygggtttttttggtttttgtttggggtggtttagggtttattagagtatagttgtygtttttgttgggtaggttgtttttgagttttygtttttttgtyggggtatttatygagttygtgtatttgggtttygggttggaatygygagyggggaggatagaggtggaggyggagagtagygtgyggttttygagtttgtttattgggatgtattgygttttygygttggggayg

SEQ ID NO: 7868 - DNA, 572 bp, synthetic construct
  misc_feature 1..572: note = Description of Artificial Sequence: Synthetic polynucleotide
  source 1..572: mol_type = other DNA
ygtttaagaagtyggggttttttttggttaygygttttygggggygttygygttttttaggttttggttgtttgggygtygattttygggaygygtyggtygatagtaggggaggyggtagtagggatygtagtagttttygttttygtayggttygtygggtygyggtgagtaaggygggtaggygyggygggaggygttygaygtttatttygggtttggygttttttttyggttattaygyggygtygtttttygggattttttagttttyggagtttygygygtttagagtygttyggagygygggyggggttagtttgggtagtygygggtygttgttgygtyggaagttttygtygttagggagttttttgggygttaggttttgggtttttgggygaagtygaygttagaatatgtttggtttygtatttagtttatygtatttttagygygygtgggtggggggygtyggttgaggtggggagggtatagtttagttttaggttatagtgtttygggyggggtagygyggtgyggggtgaaygttatyggttyggyggatagyg

SEQ ID NO: 7869 - DNA, 989 bp, synthetic construct
  misc_feature 1..989: note = Description of Artificial Sequence: Synthetic polynucleotide
  source 1..989: mol_type = other DNA
ygtggtgtgtgtgtgygygygygagtgtgtgagygttaggggtygttygttygtygyggtttttygtgggttggtygggttaatgagygygyggttgtaggggyggygggyggggagggggygtygagttttgyggatggaggygygggtagygyggygygtttatttygygygggygttgttggyggggggyggygtagttattggattyggatyggggtygygattyggggtggygggtggygtgggyggygttyggggttgggatgygtygggggtttagtggyggyggyggygttggyggtggygtyggyggttgtagggggaygagttagygtygyggygttgggagttagttgagttyggtyggygagyggaggyggtagygtaggtagagyggyggyggtagygggagttygagygttgygygtttattatggtygtttagggagagttyggttatttggyggygtagtyggatttyggttttaatagygagygtagtatygattttttagtgttyggtttygaggaygatttggtygtyggggygattttgtatagttyggagtggagygaggagygttttygygtggataggaagaaatttgaggttatgttataaggtaggtatttttygtgttttyggatttttygattgagtttttaattttttttyggatatttttatygygygtttyggygttygttattttagtttayggtyggtyggtttagttttaggttygttttttygyggagtyggaggatatttagggattggagatttygygggattttttatttttttaygttttttagatttttaggygttgggggttttgtgygaatttgattggttttagaaaagtygaaggtygagtttgtattggygygtttaagttgygttttggattttggagatgttaattttagttyggatatttgggttgtgttattyggattattygggtygtatagagtatgyg

SEQ ID NO: 7870 - DNA, 2400 bp, synthetic construct
  misc_feature 1..2400: note = Description of Artificial Sequence: Synthetic polynucleotide
  source 1..2400: mol_type = other DNA
ygaaggtgtygttagttttagtgtyggtgggygtttgtattaggaatagttaaagtygaygatatttagttatttygagygttagggaagaygtttygygtaaaatygyggttttaggyggattttygttttagtttygygttgttggtggtattttyggggatttaaagtgggtggtttgggggtaaaggaatagaggtygaagaatttggggtatgttttattagagtatttaagggayggagtgggaggttatattagatatgygatttygatatattttaaaagtggtagtttygtgggttatttttaatagtgggatggatttttttaatttttttygtttttygaagtttttttgttatttygggttatgtttttttttygggatttttttgtgtaaaattatttttttttttgtttaaaggattttttttttttttttgattttaygaatttatttttttaataggtttttaaagtatgggyggatgtgttttttttygtttatygttaggagtygagtttyggtaggtgagyggtgtaaaataygtatttagttgtttttagtttttttygttttygttgagttggttgtttttatttygtattayggtattygagtttgtgagttttygatttyggttttagtygtagtygttaataattttataataaataagaggataggattgagygttygygtttyggagygtattggttgggggtaattttttattttyggygygtygttygttgtttygattygagagtatygggagagtygagggaagggaaggyggygaggggaaggtaggyggggatggagggaggtayggygyggygyggagygaggaggtgggttgtaggggaygtygagaagyggtggggttggygtagagggygggygttyggggygygygttattttygttttgttttygtagtggtagtatayggtttataggtatttgagygttygttagagtaagatgatgaagaggttttygaagaaagttattatggaggaggttaggaaagtttattatatgygttggtttyggttgtygtayggtatttttatggttatygggatgatgagygtatttattttgggttygtggattgaggaygaggaggaagaggaggaggaagaagaagaagaggaagaggaggaggaggaggaggaggaygygtttaggttgagatggttygygtggatattgttatttattttaagattgttgttttygtygtygtygtygtygtygttgttgtygtygtygtygtygttattatttgttatagttagtaaygggtagtyggygtaggggttygggggagtttttttygtygttagygttattttaaatatttattaatagttatattgttgttattgttgtygtygtygtygtygtygtggagygygggaggggggyggggaggygtttgggttyggggygttgtgygygatttggyggggtgygtygagatatatatagygagtygtygtygttygttygggggggagggggatggagtgygygggtagtttttttttttyggttygygtttygttygtttygggttgygttggtttygagygtygagagttagggggygtygygggtygttygygttyggggtttgygtygttttygggttygtttyggtttygygygyggtttygggtgttttyggygtygygtygttygtygtgygttaygggtgtgygttgygttyggtyggtgattttttttttygagygtttttygygyggttaaygagtygtttttygtttattaggtggtaattygttaataatggataatyggtttttttygttygggygtttttgygttagtttttttttttyggttgygttyggtttyggttygtygygttagtgygygttyggtygyggtaggtttatygygttyggtygtyggttygtggtygtttgttagtttatgttttygggattttttagttttgtygttaygtygttgagtttttyggttttygttygttttttttttttgtygttttygattttttttygttttygttttygtygtttaagttttttyggygygygtttygygtttttygtagtygttagtagtagtagttgtagtaattggagygggygyggatttaggaygatttaggygggaggggaggaggttygtygygttggttygtttgggtttygggttgggtaggggtgggtagggtttttyggtagyggttyggtaagygtttttgatttttagggygtaaggtagagygtttttagtttaggygyggggttaggygtttttttttaaggtgttgygtttttagtygagagyggtggggtatattgggaggayggyggggygtttyggttaggtyg

SEQ ID NO: 7871 - DNA, 1859 bp, synthetic construct
  misc_feature 1..1859: note = Description of Artificial Sequence: Synthetic polynucleotide
  source 1..1859: mol_type = other DNA
ygygatgttagttayggttygyggyggttayggagttattttagtatttygygatggatagtgattttyggygtggygygagttttttgyggtttttaygygggtttgggyggygggtttttttayggtttygtttagatattyggaggtatttgttaaagttgyggaggtggaygatygggygtttaagtaygaattttttygtygaggtayggttgtygggtttygttttgagggtttggggyggygaggatygtyggggaggagggygygygagtyggaggttagagtygggtygggtagggygygtttaggagtaggggagayggygattygggtygaggygggayggggataygttatttgttygtggagygyggggaaggggtgygyggyggyggyggyggyggagtttggygtagagggtagyggtagtagygggagtatyggttygttyggggtyggttagtyggggagatyggggagtagyggggtygygggyggyggggtygaggygagtagtatygggggaattaygattttygygttgagtyggagtagttyggtygagttyggtattatttagatttagggyggyggyggyggyggttttgygtttatyggttagaggagaggttgtygtygtyggggttgttgttgttgtagttgtygtygtygtygttggaatttggygttygtttgtattttatattttygygttgayggyggyggygggggyggygggygttygagatgttgggtyggyggyggygyggtttyggagygaatttatttggtttygyggygyggtygttygtttygtttttgtttygygygggaagtttttttttttttygttygygtygtygtygttttyggattyggttttygtttyggttttygttygttygygttttttttygtyggatttygtttygttttygygtttttyggttttggtyggggtttttttttygttgygtttttggattygggyggtygyggaggaygtgggtgggagagggtygagggygygttyggttgggttttygtygatgtyggttttttggtggtttttggttttttgggatttagygtatygygagggaggtttygggtttygtatttaagggtaagyggaagtygaggtggyggygtyggagttaggtatgtttygttgtttagygyggggttgagggygtagayggggatygygygagtygttttttatttggttttttyggagtttagggygyggagggtattgggttgyggattyggygtaggyggtttyggaygttgttaggygygggyggatttttgttgtataaatgggttaaataggttygtaaggttttygygggttttttggttyggaagttgagtygygggtgtttggtttgaagtttygygttttatagtggttygygggtttyggyggtttttgttttaygttttttaaggtattaggtaggtggttttagggtttttgtttaygatattttttgggtggggtaggattatttttttgtgaattygttttggatgtttttaggtatagtttgtattttttttttttttagtataygyggtttttgaygttgtaygtygagttttttgggatttaggaygaatygggttttaaggattttygtttygttyggattataygtaggtagygtyggtygagtygagtttgggttygtattggttaygygtagttatygttagayggygttagttttttttygttgtagattttgtttyggaggtygttagttttttttttatttygggtttatagttttagtgtagtttttggygaygygygttgatagttgggtagagattttygtgyg

SEQ ID NO: 7872 - DNA, 902 bp, synthetic construct
  misc_feature 1..902: note = Description of Artificial Sequence: Synthetic polynucleotide
  source 1..902: mol_type = other DNA
ygattttagaattygttttttatttygagttygtttttygtygttttttygtttttgggagggyggttttattaattttygygattygggtygtttttggyggttttgatttygttatttygtttygyggygggggtttgggggtgaggggygygttttggggtagaggattgygyggtagggtttgttatagggtagaggttagggtttttygggaaaaaggtaggygtatatatgtttttttttttgggaaaagayggggaggggggttttttttgggagattttaggtttygaaatttttygttttttatttttyggttttygtattttttttttttttygttaygtatttttttttttttttagttatttgttttatttygtagygtygygataaatayggttttagttygttttygtttttgtttagttttttttttaagtttyggggagtgggggagtgagtagaygttttttttttaggaggtyggaatttttgtttttattttttatyggggttyggttggttagaggtaagtttygagattttttattaattattattatygttgygagggtyggtgaggttgtagataaygtttgtaaggaygggagtyggggagggtgtagggygagtttaaaggaygggtagagtaagtttygggaagaggtaggggttttttttttygggtygtygtttttygtattttyggagttagtygtagttaygtagygtygtttgtygggtatattaaggatttggygygtaygtggygtttatttttattttygggttygtttttggttygygtttagtttttttagattattygtaaattgaggatttyggatatagagtgtagagatttyggtaagtttattgaaagttagtygaattyg

SEQ ID NO: 7873 - DNA, 2044 bp, synthetic construct
  misc_feature 1..2044: note = Description of Artificial Sequence: Synthetic polynucleotide
  source 1..2044: mol_type = other DNA
ygaaayggtagaggtyggtagttygyggtttaygtgtatttgtttagggaatygttttagygaaatttgattyggatyggaattttttygtagtatagyggtygtgtttatyggaatggaaygttataagttgttatttgtattttttttttagttttgatagggaataygygttgtttttaygtttatatygatattyggatttttatttagttyggttagagttttaggggttagggattagtgtagggagaaggttttttattttagtttttaggatttttaattatagtttattygtttttattttgttyggttttaggtttagtygaatttatatgttttygtagtgtygagygttattatttatagtygttttttaaattgtgatttttatttgggagattyggaattatttaggattttggtgtggggggtagtattttttatatttgtttttygaaaattgttatggagtagtygygtttyggygggtaggtgagggggtygagtttattagygtygtagtttygttgtttattttttttagygtyggttgtygttttygggtagatatygtyggttttgattttggggttgatatygttaaagggtagttagtgttygtttaggttatttygggaggtttaggggtayggygaggggtyggggaaaggygatygtttattatagttygygygtttagattgagggaggagtygggttgtagaatyggyggyggatggagaygggagggaggttgygaggtygttygaggagagattaaggttttagaaayggagaagygggygttttgygggaggyggyggygttgtygttggtygttaagggygggaagtgttttgggatttttattaggggtygygagtttygagygttaaattttygyggygttygtttagygygttgttgtggygggygyggagggygygygtyggtagtgggggttgyggyggyggagggtaygggttttygtttagygtttttatttttttggtgtagttgtttttygygagtygagatatttttgttagggaagaggagygtttyggttgtttttttagagttttttgttggggggatatygtttttatgaagaaaatttttaaataaattttagtttaggaggaggttataygattatgttygygggttgtyggtyggaggggygaggaygygygggyggaggygyggttgtygtgtttaggtagggagtygagtttygggtgttygtygygygtttttygtyggggttatgtattttygtttgygttygatatygygggttggaggygagtgtagyggygatagttygttagygtygyggttygtttygtttygggttygtttttttygtttygggygttttgygtyggggttygttttygtagttttttttagtttttttttagtttgggtttttttagtttygttttagtttgtggygygtttggygggygtttttttatatatgttagtatatyggttatyggttgattttttyggtttgtgatttygygtgggtgtagttygtaggagtttatyggtttgtgttaygtaygggggtttttagtgtayggataygygtttttttygttatttgtttatttttattagattttattttttttygygtygtgttygyggyggaaggygtttttgtagygygtgtattygyggagyggtggygattttagtttgagtagaggagttgtagtgatttttgtttygtttttagyggattgyggagggaattttttattttattttattggggatagggtggtaygtygtagagtgtygtagttgtataaatttggaagtttatagtatygtttgattttttgtgtaatttygaaygttagtttgttygggtaattttgagtgggtttttgtagtyggttatgttagyggtttttgtatatttgtattygyggttttygttgtttgtaggttgtagagaygggggtattttaaaygtgaaagagtaatgaaggaaaatgtagatagagygaggaygtyg

SEQ ID NO: 7874 - DNA, 1152 bp, synthetic construct
  misc_feature 1..1152: note = Description of Artificial Sequence: Synthetic polynucleotide
  source 1..1152: mol_type = other DNA
ygtttttttygtagagatygttagttgaggttgtaatatttgtttyggtaaagygttttygtagttttttyggtttgttygattyggtttttttygtttttgtttyggttgyggtattattttttggagttaygtttyggygagygggggtygyggagygagggggtygttgtgtygttatttattygagtygttygggttggtygygagtygggattygygagggttggygggttttggttttygaggaygtagatatgtggtttgaattttygtttttttagtygttgtttttgtgtatttttttgggygtttttagygaatgygagyggygaggygagggygagygygtygaggaagggygggagaggygyggagtttggtygygtygygttgygtygagygtygggtttttttygygagtttttygggttygygygygygttttttattgttttygtttttygygyggygygtgttttttatttttygtygygygttttygtattygttyggttttaygyggygygygtttgttttggyggtagyggyggyggyggyggygygttttttttygaaygtygtttttagggttgttggttgygttttttattgtttygyggttgttgttyggggtgggyggygaggygggggggaggtgtyggtttggtygtyggggagggtttatygttygggyggatttttattgygagagygatgygggtttaggygyggygygygggggttgtagggygtttagtattgggggttgtyggygygygggggtttttttttggtttttaggtattygttgttgttgggygtttttygtattttyggttattatggatatttygttttttygtygtttttttygygtatttygggaggtygtyggggyggtagtagyggygyggtttygygggtgtttaggtgatyggttyggtagyggtagagtagtggtagtagtygttattgtygttgttattgyggtygtygtygttggagagaggaggaygaggagggtaaggggtagaagtaggttttgttttgtttgttttagaggttatttygggtttttttttattaattaagygatttygtgtttatttygtaggagaygtttyggtagtttttaatttgtgtgygtyg

SEQ ID NO: 7875 - DNA, 872 bp, synthetic construct
  misc_feature 1..872: note = Description of Artificial Sequence: Synthetic polynucleotide
  source 1..872: mol_type = other DNA
yggagagttgttatygatttttttaaygttttaagttttagttttgtygttygygtttttttttttttttgggttataattttggttttttygggtyggttttaygtagttgygtaggagttygygggggaagatttttygtggggatttygagtaygaygtgygattttaaatttttatattttttttgtygtttygtaggttatatgtatygggagtygggyggggtaggygyggttygtaaggattttygygatggagaygtaatattgtygygattgtatttggggtagtttygtygygttttagtygtttttyggtaggaagygtaggtgtgtgagtygattyggagygagtygygttttygggttagygtgggtagggygtygtagtttgygtagtttygaggatttygygtygttttttygagttagggtttttaggagygggtygygtaggagaygttagagggggttgttagyggttgttgggagaaygggttayggaaatagttttttttaaagtyggggttatygtggggtgggygagttygtttttttaggtygggggygyggattagaggggaygtgtgtagayggtygyggttagttttatttygttygggyggagaygtatagttggagttggagggtygtygttygttgggtttttaggggtttgaaygtttaggggtygyggygagtttattyggagygagttaggtgagtaggtygttatggygatgyggtttyggagagygtaygtttgtygyggtyggtatggaaaygttttygttaggttygggggygtygttgattggtygatttaatagaygygggtgggtagtttagtygtatygttaagttyggtyg

SEQ ID NO: 7876 - DNA, 1070 bp, synthetic construct
  misc_feature 1..1070: note = Description of Artificial Sequence: Synthetic polynucleotide
  source 1..1070: mol_type = other DNA
ygagyggtggttygatttygggtgtggtaggaaggggtgtttygygttttagagttagtgttagtttttattttttygggaagtygagatttagggggaataggttttttagagtttagtttgtagggaygyggagggtaggagtygtyggygaggagtagttaatttgttatttttggyggttgtatttttyggyggttataggttgttygatagyggattttagggttttygygayggtatttagagtgtttagaagggaggtyggggtyggggtgggtygggaaaatygagggagggaaggagtttggagaagtttygtttaggyggggagggggygattyggggygtatttttygattatgatttttatagattttggygtygtaatttgygttttttgaggtygaagatgygtattttggagaagatatttattaggttgtygttgtagagttygyggtttttgttggggttgtttygttttttgttggtagayggtyggttttagtgttgttttygygtttgtygtttttggyggattaagtygttagygatggtygyggttatggtggtttygggaaygggttyggggagggagggygygggaggayggygagtygggggtatyggaggggaaggyggyggygtagatygtggttygttttyggggtagaggagggggtgttaggygggattggggagaggggaaggggggtttagttttgatygggatttatygtttttttygyggggygyggggttaggygygtagatgygtttagggygtagtyggaygatttygggaagtyggaygtygtggtygtygtygtttggttaygttygagtggagagygggatygyggttgygggygttgttggttatygttygtygtaggaatttyggygggggtygttatygttattygygttgttttttygttttgttyggttttygggygggaggtagagtyggtyggyggtttttygggygtyggttggagggygggtttyggtagggtttttgygygttygtyggttygggtygygttgggtaggatttagygtyg

SEQ ID NO: 7877 - DNA, 395 bp, synthetic construct
  misc_feature 1..395: note = Description of Artificial Sequence: Synthetic polynucleotide
  source 1..395: mol_type = other DNA
ygttgggaagggaaaaayggtttatatygaattggatgtyggatggaaatttttttgygttattagattgygtttagtatagtagatggtaygagtaygtgyggygtttagtttaggttttyggaggtagttgagttggaaatttygayggaaagtatttataagtttttattttgygttggtttattygygtgtaygtttattttttaygygygtttttggtttagaagygtatagatgtttattgtttagagtyggtatygttggggagatygagygatttgygyggygtatagtgyggygttggtagggttttgggttttyggtygggggttygagyggttaagggatgggggtgggggyggggagagtggggggagggygaaagatygtyg

SEQ ID NO: 7878 - DNA, 265 bp, synthetic construct
  misc_feature 1..265: note = Description of Artificial Sequence: Synthetic polynucleotide
  source 1..265: mol_type = other DNA
yggggatatttaggygyggggtaggtgtaggggagggggygyggggtaggggygtaggggtygtygggttygggttggaggtgttygggtygtgggagggagggagggaaggagggagggaggayggygagggagggaggtaggggygggyggygggggatggggttagyggggaggtggaagygatatttatygttygtattggtttttttggtgttgtyggttttagggggggtttttagyggtttttttygygagttyggyg

SEQ ID NO: 7879 - DNA, 1169 bp, synthetic construct
  misc_feature 1..1169: note = Description of Artificial Sequence: Synthetic polynucleotide
  source 1..1169: mol_type = other DNA
ygggttggygggtattgagttggggttattaygtttttttagagygtttgyggaggtggygaaggtttggagagtataygaggyggaattyggatygagtgagttttttgagtygtttgygtgggaygtagggagagggygaataaygtttttaggygttgaatgtaggggtaaggagttagygagggtggttggagtaggttttgttagttgttattaagtttttttataggtttgggggtttggggttttttggaaagattttttygtygygttgattagtayggggttygttttygtattttgaaggttgtygyggtttttygttatttataattaagtttaagattaaggttgtaagttgaggtyggggtattgataaygggaatgaagttataggggaagaggataattgggaygggttggatttatatttgatattygggaaatttttagagygtgtggtgtttttgttagyggtagttattggtggagttgaggttatygttattgtygtygttggygttttgtttttggaattttttagtaagatggtatttattgtttgttttttttygattagtatttttagtygygttttttttttttygggataygtattagttatatattgtggggagaagatgggttatgtaaatgtaagttaaygygtttttttagttatttttgtataatgtaataggaatagygattygygygtaygaatygggtagtgtgygygtgtgtgtgttygygtgtgtgagygygtgtgttagygtgygttttygygygggygtgygtttgggtggatttttgygtggtttgggaggtaaatygggygtttttttaagtygttttaatatgatttaggtttttaaataygtgaaagyggtagatataatagggatgygaaggaaataaaaaataattggggaagtggtgttaagttatttaggttttgaattgaggaygagtagtgyggtygygtttggggygygttyggaaattatttttagtttgtggyggttattgttttatttaaatttttttgyggggagagttgagyggatttttggggggttggttttgggttagttttaaatttttyggttgtatttygygtggttttatygayggygygtttyggygtagtttttggygygggttyg

SEQ ID NO: 7880 - DNA, 1743 bp, synthetic construct
  misc_feature 1..1743: note = Description of Artificial Sequence: Synthetic polynucleotide
  source 1..1743: mol_type = other DNA
yggtgggtygggggygtggygagattttgttttagtggagggagggtttatgtattgtygagaygtygattattagattttgattttgtygtttttagaaaaattattggtagaagattyggattatggttaatttgtyggttataagtttttttaagaagygttaygtttgggtgtagttggtagggtatattggtgagtagtggggygggtgggygggtgttygygaygggaaggggttgggyggygttgayggatgtyggtttttagggagttttaaggyggygggtattagygggttgattttgaagygttgttyggagtyggagygttattgtttggygyggttgatggttgaygygttgygyggttgygtgtttgttttttayggygtggtggagygygayggygaaagttatttgtagttgtaggatttgttygatggtttygayggattttgtgtgttygattgtaaaatgggygttaggtatgygtgttttgttaggtyggttggggggattaagtaggggttyggggtygggatagttgtttgagggggattyggggygagtgttygaaggggttttygtgtgygtttttttatgttttggtygttgtttgygtttttataggatttatttagaggaggagttgattaaggttygtgagyggtttaagttgyggaaggatatgtataagaaaatgttggyggtggattttgaagtttttayggaggaggagtaygygtagygygtygttattaagtygygttatatgtagtggygggaaggtattagttttagtattattttyggttttygtatygagggtattaaggtgaggtaggygygtttygttggtatygtygtagttttattgygygttgtttttttygatttttygttttygtttygtttgttttttygtttttttttatygtttygtygttttttgtaattgggaggtatygttgttttaygttgtttttttttttattggygggttyggggtttttgatatttttgttttatatttagaaagyggayggtttttgtagtatygattttaagattaygygaagtygagagtaggtgtttygygtttttgaagagtttgtgtaaggagatgaggaagtgttggtgagagygggattttaaattttgaggtgttggggagtttgaagtygaggattgtttttgttatttggtttagtgttttyggttgtgtttttattatggtttttatygygttggttygtaattgttttaygtttttttttttttgggttaygttgggyggggttttgggttttttttttggyggtatttgttaagtatagygtgggtttyggttttttatygttagtaggggtttatttggygtttagttaatttgttttttttttttattttattttttgtagaggyggtatttgaatygtttgtagtagattygggatattttggaggtattygagttttttaggaggtaygaggtaagyggyggttgttygggtgttygggtygygagggttagggygggaattyggtaagggygtttttgggtagggtygyggtttgayggtgyggggttygtaggtgatyggtagttygtttttttttgtgtaygattattgttatygygtyggygtgtggtttatygatttyggtaagattaygttttttttygatggttagattttggattatyggyggttttgggaggagggtaatygygaggayg

SEQ ID NO: 7881 - DNA, 2405 bp, synthetic construct
  misc_feature 1..2405: note = Description of Artificial Sequence: Synthetic polynucleotide
  source 1..2405: mol_type = other DNA
ygtagygttatagtygygattgyggyggyggyggyggygtagggggygggggaggagagaagygtttatttygtttygttgttttygtagtagttttggttttagtttyggygtattagagyggtttttgggaatttttgggtttgttgtttyggyggtygttagttgggagtttattatygttygatggtatygaatygattygtgtagttttataattttagtttaatttygaggagttagygtagatygtttttygtttttagttgyggygaggtaagggttggtagygttyggaygttttygttttgttttttttatgtttaagygyggggaattataygttttyggtgtagaatagaygatyggggttattagggttgggyggtgggagtgggggttgggagtattatttttggttggaygtgtgtttagatttatygtttttggtttttaggattttatttttttttgtatttttaggtgtyggtttttttgtattygttttttayggggttygttyggygaagggtagtygtagtttatatttatttttygtttttaatttttgttttttttgttygtygtagttattygtttggttgggagtaagttttttttttygttgagggtgtagagagygtttagggygttaagagtagaggggttaaagtttaagygttattagttagtygaaggttttgagtttttagggtygyggtygggaygtagggaggttaggaygygaygttygttttatttgtttttttagyggttttttggtygatagygtyggtttgggggagggygygyggtygtagaygtagttttttagtaggtaaagtttygagggtygygagttygagtygttttygaagtagaagagtaggttttgtagtagygygaattatttggtttgttattttgtgttgttygaatttygtttgtttaggtagtttttgygygtgtygtttttgygygttagtagttttagggaygygaygtggttattatttagtyggatttttttttgtatggtgtttagaggttagygagattttaygygtttatatttttttygygtagtagtttttygttygtgygygttgygygttgtttttttttggygttygttygttygttttttttagtttttttttttttttaaatatttatattttaggatttggygtygagtygyggttttttgaatttagatatattatttttygttggaatttttttttygtttygtagagttttagtattyggaagatgtygttygattttttttyggtgtygggtaaattgagggattggygatttgygygttggygaggggtaggyggagttatgtgaygtygatttttygaagagttygttttagtagygyggatagggatataygtaygtagtttygtygaggygtagagtygygygtaggttgtaatttggtgttttttttttttttttagatatatatataygtataygtataygtatatatttaaattttgttttttttttttttatttttttttttttttttyggatgttaaaaagtaaattagattaattttygtttaatttaatgaaatttygaaggttygttatttygggagtttgygtttttgygttttatygyggygtattgtagatttggggttaagtgttagttgttatttttttttttaaaggttygttttttttttttattttatttttaataygaggtggaaggaggaaggtgggtggygaaatagagttgtaaaagygtttagttttagtttttgtatagttagtygggttatattgaattttagtattyggttgtattttyggyggtttttttagttatttgaggatagtatagggggtgagatggggtggtggttggtgaaygttggttattttattttatattattttattttgagagttgttataattatyggygttatttttygtgtattttgaggtttggttggygagtygttgttgggagttttttgtaaatattttttaaagtttgaaggygggttttaaaygtaggygtyggggattatgggagtttttaaatagttgygttggygtaatgatattttaatgatagatttttygtttttatttttagtttttattygtttatatagttatayggtatttattygagaaygttatagygttygtatgttgtatygggagggygygygggtygtygggygagtygggagttggggyggggagygygtatygttgtttgtygtagagggtagygagttygtttygattyggagtaagtygygtttggttygggygttttgtagyggggatgggtgttygygtagttttgtgaaggaaagatattattttttygtayggaaattgygtatatttttttttyg

SEQ ID NO: 7882 - DNA, 1920 bp, synthetic construct
  misc_feature 1..1920: note = Description of Artificial Sequence: Synthetic polynucleotide
  source 1..1920: mol_type = other DNA
ygyggatttgggtttggygtttattttatygttaggattggatagaaaggttttggtygaggttattaayggagaggttagagyggagtttttggtttagaatggaggtagtagygagttttyggyggtttttaggagtattaaggtggaggyggtggaggagtyggaggyggtttttattttgggtttyggagagtttgggttttaggtttygtygyggaygtygtygtygygtagtttygtttyggttagggttaaggtygagttgtttagttttaygtygggttttagttyggtgttyggygagttgggtttggtyggggttttgtttttttygtagtaygtgttygggttygaygyggygtttttygtttyggagattttggttaagatgttygagttggtgtatagtyggttgtagtagggygygggygygggygtyggyggygygtagatygggttttttttyggggtttttaagggygttaygtgtttygagtgygagattatttttagtaaygttaataattattaygtgtataagygtttttattgtttaggtygtygtgygttygaggaygygtttgtygygygtaggtttaaggygtttttyggttyggttygygygtttttyggttagttygtygaattygaygygtygygttygttttygggtttyggagygygygaggagggggttgggggygyggttaygttygaggayggygygggyggtyggggtagygagggtagttagagttygggtagtttygtggaygaygyggaggaygattttagtygtaygttgtgygaggtttgtaatattygttttagtygttaygagatttatatygtgtataagyggtattattgygtttygygttaygattygtygtygygtygatyggtygygttttygggattttttgggtyggtygygttttyggttttttttttygtygygtttgtgygtaygygtagaygtygtaagttttaygagttgtaygyggtyggygtttygtttttttygtygttyggttaygttttygygttygagtygtygyggttyggaagyggaagyggaagyggtttyggtttygtttttgygygttygttyggtttygyggtygayggttttatygatttgagtaagaagtygyggygttygtttttyggagtttyggtatyggygttggtygattattaygagtgtayggtttgtygygtgagtttttatagtttygaggtttatttggygtataagaagtattygtgtttygttgygttatygttyggygygttyggtttgttygtygtygtttgtttttattgtttttygaayggttyggtgygyggggatttgttggagtattttygtttggygtayggtttgttgttyggygygtttttggtyggttygggggtygaggttyggaygtyggtygatygyggtttttygttygttttygttttygtygttttttygtagttygggtttygtggttttygggayggtttyggttyggagttttaggagtygtygttyggttygttttygttttyggtygtygygttygaggtygtgtygttttygtyggygttttttttttattyggataagggygtttagatttttagtaagggtaygtyggygtygttgtttaayggtaattatyggtattgtygtttttgtaatattaagtttagtagtttgtttatttttatygtttataagaagtattattgtttttygtaygtygtygagtaygtgaagtgagygtttatattatagtygtagaygttttgtaygtttygttgygatgyggggagggggtygtttttaggtygtayggattgtygtttttgggaatttygttaygtataggtttyggyggagggggtygtagggggtagygttyg

SEQ ID NO: 7883 - DNA, 1403 bp, synthetic construct
  misc_feature 1..1403: note = Description of Artificial Sequence: Synthetic polynucleotide
  source 1..1403: mol_type = other DNA
ygyggggttttygggaatygtygtttttttttttygttttygygttygygttttttttttyggggtttyggtttatttatttttggtgyggtttygtyggatttaggagtttyggtygttygggttgyggggagggggygtttygggtyggttttagaagttattttgtaaagaggtagggggygyggggtygygyggggygagttygggattygyggggaagaagtttttygggatygygtttyggtygttygagtttttygygttygtygttttttatttyggtygggggtttatttgggagttygttgttttyggttagtygttygygtgtgtttagggttagtagtaygtataagtgttagygtayggtygtygygtttatgtttaatgygggtttygttgggygtgygggygtgyggggygyggggattygatygatyggtygttttygtaggygttgttygttgttygtygtttygttatygttygggttttygagtygtttagttagttyggttgatgagttgatagygygygtttattggttygtggygtyggaggggyggggygtygtttagggtyggttaatgggygtyggttttyggtttttygaggaagaggggggttygggygtygtyggggggattttttttttggggygggyggtaggtggggggtgtgggtttggtyggtyggttygttaggygyggggtttaggttaggttggggttgtttggaggttgygtttttttttgttygyggygtttyggttttygtygtygagagtggaygtttttttggggtaatttttttyggtttagaggtagtttygggggyggggattttgygaatyggggatttygtgaggtygttygttattygtgggtagtgaaaygygttagygygtagagtagattygtttgygttgtygtttgttggaygttttttgagtatttattggggatygagtgygggygaggtagtagygaaggaatygggaggggaaatttygtgaagattatttgaaaattgaygtttaaaataaaygaattttttagtattygttaaaggatagtggttygttagtgtgtttgttayggggyggtygtaggatttgygtttggaatygggygggygttygggayggataatgtygtttggyggtyggtttygygggaggttttygtayggggttaatttyggtyggygaagttygttgttyggaatgygaggtygaggtttttttttgtgatagatygggyggggttaggaggaggggtagggygggtatttyggttygaagatttaggaattgttttggtttggtttggggtttatatttgaygtttggygagggttggtttygggtttggttttatygggtttgggagggaygggyg

SEQ ID NO: 7884 - DNA, 1088 bp, synthetic construct
  misc_feature 1..1088: note = Description of Artificial Sequence: Synthetic polynucleotide
  source 1..1088: mol_type = other DNA
ygggaaaygtygttttttttggygtttgagatttggggttttttttttatttggttttttygttttygttttagtttygtgygttttaggagggtatygtygagygtygggttttygtagggttygggagatttygyggatyggaggagggataggattttygagttttgggggygggaagggagggtggaaggaggaggggagyggggttggggaaagttggagtttyggtatttttttttygggttaggtygttttyggggttttgygttgygtttttaagtgttgggaagatttygyggggaaaggtttgaggaygyggtyggttggtataggtgtggyggttttagagggtyggggagaatttatggtttygaggttgtggattagaaatgtttttgattagaagttgagaatttttggttagggaggtggggyggyggggaggggtygttaagtyggtttagagygygtttatttgygttataagggagaagaggtgtttttygttttttttygtttatygtygttaygatgygtygyggatttyggygatttagttygggtagaagygygygttttttttttttagtttygtgygtyggtttttgtttygttagtttygttatggttttttatttattttygygggagygtttttgtttttttattttgtattttttttagagtygygygttagtttttygtttygtggaagygtttttttttygatttyggttgattttygttygtygtttttttygygggtgygygttyggtttttttttygttyggggygggtttgygtgggyggtgtttygggtyggygggyggagtttyggttttttagttttgygtttyggtggagttygagtyggagtyggtagaggggygygggygyggaygyggygtttggyggggttttgggaggttyggayggggttttggygttgagttyggtyggttyggagygyggatttagtygtaggggyggygatgggtatygagggattttygttttyggtygtttttygyggaygttagggttgtttgttggtatttgygygggtgagtgyggttttttagyg

SEQ ID NO: 7885 - DNA, 1812 bp, synthetic construct
  misc_feature 1..1812: note = Description of Artificial Sequence: Synthetic polynucleotide
  source 1..1812: mol_type = other DNA
ygggyggyggaggagggttggyggttagatatagtatygttggagtttagagagtygggtagaggttggyggagagtygaggttggtttagtttttaggagatyggygagttggggtgtgtgggagygggatgtttttaaggygaaaagaagygttagtttygtaagyggtttttatttgggttgtttaggtyggatgtttaggagtttatagtaggggggatggagygaaggatygaggggttgggaggygaggtygtagygtattgaygtaggttagygaggtygttggtttygaygtagggygttyggtaaggtgtttggtattaygagagttaatttttgygygttattttyggaggttagtgygtttagggygygtyggttyggtaggagggtgggtgttagtttttttttttatttttygagtttttttttyggygtttaygtgggyggagtagygygagggtgtgygtggtaggggtygyggyggygtgtgtygtgygtggggtggggtgygggttgggyggtttygttttygggtttygygtygtyggggygyggtttttagttttattttttttgttatttgggyggagatttgggggattgtgatttattttgyggaagatayggaggggaygggtyggttatatttttygygttatttyggtaggtatygggtgggtttttttttygttttttggtttgagggyggaattyggagaagagtggaaataggggtggygtgaaggagagttgggggttgggggygggatygggagggggtgttgggggaagygaygtagyggttgggagattttgtaagggggtttgaagaggagtgggggatgggtatggaagggtgggggattattgaggtgggatgygagagtggaagggggatttagagggggygygatggtyggaggagggggagatggaygatggggyggggyggtatyggtygtygygttttttgtygttaggttygtttttyggtygtygggtttaygggttttttttggttagygttygtttttygtttttyggygtatttgtatttatttgttyggygtttaggttygagtygggtagtagtagyggaygtagygagygtagtttygygtygtatttttyggtygtttttttttygttgygagtttaygtygttgtygtygtygttatygttttaaaaaggataaaayggaatagaaaatgaatgtatgtataaaaaaaatygtaaaaagtaattgaggaggatggtagtygygygygyggttyggyggggygggagtygagaggtygyggtattggtggtygygattygggtaggyggtyggygygtgtygtaygygggtggttgtagttttttyggtygttygygttyggtttaggtayggtatygttttttttttyggggagttttttygattggtttgtttttttgttagttaggtaggagggygyggygttygtttygtttygttttygttttygttttgggtagatgtygggagtttttttgtygtygtgggagggggagttgagttgtyggagygtgygtattgggttagygggyggtyggggtagggttggggtttyggygttgagygtttttagtygygtygggtagtttggygtttygttgagtyggagtaattttyggtaggagtttttaggttttggttaagtttygggattygggaagttatttttgttttygggggttygagtttggagtggggtttgtaggtaaagyggggttggggtygttttggtygttagtggttaggaagaygtagygatttyg

SEQ ID NO: 7886 - DNA, 5819 bp, synthetic construct
  misc_feature 1..5819: note = Description of Artificial Sequence: Synthetic polynucleotide
  source 1..5819: mol_type = other DNA
ygagtagaaggyggaygttttygagtygtaggttaygtagttgttatagttttgygattygttatagggatttttatagaygtttagygtygyggtygagttgagttygtggygygyggtggttagtagtyggttttygtagatygggtagtagatyggygtttgggtygaggyggygggttyggagttygttagygtgyggttttyggattygtagtaygtgtttagggagttggtggttattaagaattgtagagagaggtygygaggattggygggaagtygggttggaggttggggttttgggttttgttaatttygygygtygtttaygagggygtgtttygagtattttygggtttttygtygtttatattaggatgttygtttttttttattagtttgtgygygtttggtttttttygttaygtggggtttagtygagtatttatattttttttyggagggtttttaaggtttttgaygttatttgygygttaagtttttttttttaggggttttttggggttttaggatttttttggggtatagtttgagttttgtggtttaaatattagggaattygggttyggttygtyggatttttttagygtttyggttttttttygggggtttggggagtaggggttgggygtgaggggygygygatttaggttttgttagttyggaagtygtaggtagtygtaggtyggatattttttatttttygttttygttttattygttttatyggtatttgyggtggtttgggyggggyggggtttygtttatttggggagtygaggagtaggggtatttaaattgygggtaggatatggygggygyggttyggggyggaygggyggggtttgtagggttttgygygttggggtyggygtggygyggttattgtttyggagttgtaggtttttaggygttgggagggygaagtaggagagtyggttagtttattttygygtttygtaaatttttttaatygggtaataaagtgagtagyggtggtygtygygatttttttaatttygtatttyggaggttygagggggttttgggatygagyggtttygtagyggygatagaaatatatattttaygaaaaagaaaaaaaaaaaaaygagtygygygaattygttaagttagatgtgygyggtttgaagyggaggaggttttgaygttagttttatttygygtagttyggtttggtygtagattygtyggttattygtyggyggtttaggtygggaggggttaggatagtttyggtygygyggtggayggaggggttattttttygggygttagtaaataaattttattygagttaatatygtttagygaayggtgtttttttttagttattygagaaygagaggtatttttaattagaaattaattaatgagtagttgttttttttygttttattgtaattattygttttaattataaatgagatttatgaaaggataygttgaagatgtaattaatagttaaaattagttyggygttgygtaggyggtyggttyggtttygygttggygygttttgtttygagtggtaggaaggggttygtaggygtttygtaygygtttygttattattgtttaatygagaattagtaaygtttttygtyggtttttattttaygtyggaatggatttttagaatttattgyggtygtaagatagttygtaagagttggttaaaatgtttttaggtgygtgggggtttyggggttttagttggagttygatattttgagattggyggttygagggttgtagggtygtttygggygtgygtttatyggttttgtatttttgggtagtygagtgtygyggagaaygttttattttttttatygyggttttttaagttttygtttagtttatygtttttatttygttttttygattttttttttygatttttttttygtyggtygtgtttygtyggtttttttttgtttttygyggttaagtyggggattgtygggyggttttgygygttyggaagagtaggttttttaatttaggtttyggtttttttygttaagttygtttttttyggygtttygtagggttggttgygagggagggggygttgggtgtttggyggaggygtttttttttgtttattttgtttagttttttgtttggggygtayggagtaatyggaagaggggatygagygtttattttaggattttttyggttagtattttttttgggattttgtttaagtttaaagyggaggttagtgagtaggyggtaagggggyggtaagggggygttygggttatttygaattygtttttygttttttgygttatygtttttygggatygggattygtttyggttgttttygttttttgggtyggtttttygtggtaagttgggaaggaagtygtgtaaggtagygttgtgtagatttgtttagaaagatttttgggtttagatttgtgaatygttttagggttattttttaattaatgatgaygttttygttttttttttagttgtaagtttgttttttagaaaygaaatttgtttgtttttttgatagttyggttgaaggtgattgatgattatttggagattatagtatatattatataatatttgttgygtaattgttttaatttatagatgaaaataygagtttttygatygygttggatyggagygggttaygttygagttgtttgtagagggaaattatyggaaataatgaatagtygttttatgtaaattatttagatagtttagygtyggtagtygygagaaatatataaagaataygagttaaatgatattaataattgtttttgaattttgtattgatttygyggtaggtygygttttttttttttttatttgaatygttaatattatttttttgtaaataataagaaattagttatyggggtttttygttagaaatgaattttttaatttttttttttttttttttgtttttttttttttttatttttttttttttttttttttatttttttttttttttattttttgtagttttttggtttttttygagtatttttttattttttattatttattgtttataaattattygttttttttaggtaatgaggttyggttgaaggaggggtgtgagtttagtygggttaagggttgggatggggagtagagatttttagaggggaggtatttagttgtggtttgttttttttttatttatattyggggatttggtttyggygattgtgagtatttygtyggttgagggggagagttagggtttaggggtttagttatttatgttttgtatttttgggttttagtgtaatagtttagtttatttagatttgaggttggtgtatttttttttttttagattyggyggggtttaattggagtygaagttttagaataggyggttatttattttttgagtagagtttgggagaagtagtttttattttttagggtagttagtaygtgggggttttttygggggttttttttgattattatygttatttttttttgtttttttttgtttttttagtttgtgtgtataaatygaygttttagtttttattagygggygatttttttttygtgatttagaaatttggtttttgaatyggtttttttaggtygtygtatatataygttttattttttgttygttagtaggttttagygtttggggttygggtttagttatagttattttgtttygggaagttygtaattgtttaggaggttttttgattygttyggttttatttaggttttattatttattttaggatatagggttaatttagtttgtggattggygattatygggatattttattgaaattttgtagtttggtttaggttygtttgtttaaatyggggatttttattgggttattttttttttatagataatattggaatattttttaagtgtttttattaaaaggttaagtttggagyggaggtatttagtgttttttttattaaygataggaygtttagtattttaggtattagttgaaygygtttgtatagattyggagtgttgagtttttttttttttagggattttyggtattaaatatattygtgagtaggtgggttagaagttagtyggttttyggagtatatagtatyggtttagtttyggggagatgaggtgttttygttggtttggagygtttygaagagyggaggattagggtyggagtaggtygtaggggaggtaggggatggttagtttttaaygygaagygtaggygggtygtttattttgayggggttatygttggtygtyggaattatggaaggttttyggggagataggtygggttttgattttttttyggttagtttagttttggtgttttaggagttattttgggggttattagtttttygtattaagagttygttyggagggagttttttttagtttagagaagttaattttagttaaaggygaagtygggagttyggggtattaggtaagggtttttttttttgagatttggggttagagattttgggggygtttgtgttygtttatygttygggatattyggttggggtgtgggtttgagaggttttayggtygttgaygtygtattggygaatttygaggttggtaggttatttttttatagtttygaggttttttyggagttagtggtaggagaaggagttatagggataagyggtgaatttttggatttttaatygttttttatgggggttygyggtttttttttttttttttttygttgygttttygtygtttgttttttgggtayggtttgaggttggayggagygtygttygggygtttaggatttaggtttggttatttygagttttttatttttygtttygygtyggttygygtattttgtttttygtaatttgtagtaaaygtagyggtttttggagagtttagygaygggtagtaaattttgtttttttaagygtaagagtaattttygtaaagtttgtgyggyggagtttattttttatttgagttggggaagttttygttygygtygtgtggttgtyggggtygyggggagtagttygtagttygggaygtatyggggagtygtygtagtygtygtygttygtttttttyggyggtygygyggagttttygttttttyggaaggggggaggggtttyggaatttyggggygggggygggagygggggattttatttatttgyggtggygttgggtygttttyggtagttygygagggtttygygyggaagttyggygygygygttttagyggggagtyggygataattaatggagatatttttaggyggagtatttggygagyggagygygtyggygtttttaggygtygyggtygttagtygagttygtatyggygtgaygtgggygagygagygygttgtttttattyggtygtttattaaygttttttttygygggygtygygtttttgttaattttttttttygttyggtttgygygyggygygtygggtgtaggagttggggtgagggygtttygggtgttagtaggggygttgggagttgtttgggyggggaygtagggtttygggaggttatatagttttaataggatagtgggaaggygygygagttagatttggttaaaygttaagttygttgyggtttygggttttyggtttayggggttttttttttygtttgggttgttttatttagggaygtttgggtygggygygaagagttyggaaatagttatttttgtygtyggttyggttttttttyg

SEQ ID NO: 7887 - DNA, 2001 bp, synthetic construct
  misc_feature 1..2001: note = Description of Artificial Sequence: Synthetic polynucleotide
  source 1..2001: mol_type = other DNA
yggaggttgtgtyggggttygttaaaggttataaataaatyggaygggtgggaagtaygttttagyggygattggatttttaaaaatttgttggtagagtgaaaataaaaattgttttttaagttggtaaaatyggygttttagayggtgygtaggagggttttgygaggtttgttttyggagtttygygttagttttgtaggttyggttgggttygtagttyggtgttttattygtgggtygggttyggttgyggggttttttygtagtygggatatttaggatagtagyggttggggagtyggggttaggggtttttttgtaattttaatgatttttattattattattygtaaaggataaaygyggttaaggtygggttttatagtggttgtgttggttatygygtggaggagtgtgygttaatttaggggygaggggggygygttyggtgtttyggggagagtttagaaggaagaygttttatygtggtttttatagttagggatagtttgggtgttagaaatttttagagagaattygaggggttgatgttttgggttattagtttttggtgtttgtggggttttttgygygtttatttttatttttttttttttttttaggttygayggattttttyggaggtttaggatagtgatttatagtaagtggtgatagtggaataaygtgatagttygttgtatttgttagttggtttttgggtaggtttattygtygggttygattttagagtygagttttyggagtygtygggtaaagttttttttttygtttyggtgtagtttygygtttttygygttyggygttgtyggggaaaagtggtataataggaaagtttygttagagggttttttttagtyggttttttygttataaaaagttagattttagtygaggttttgattttttttaaatataygtttttttgttygyggttygttattttygttygggtttygggttgtgtagtttttttttaggtttgttygggtttatgtttttttygaagyggygggagtyggtgtagttttaatttttattgygtgttttaggtygttaattagttttgttygygtgtygttggttyggaggttgtygygttagtttttgygtgygtttgagygygttggagtatttgygaggttagggttgtygayggygagaggatattttgaggaatayggtgttttagtttygttttygtttttygttygagttggaggttggggygygttgagtygtagygtttggataagtgygygggtyggagtygtttaggtttgtattygggggttygyggtygaygtatgygtaygygyggtggygggtttgtaggttygaaggttyggttttttttttaaattyggagyggggaagtttaggggttgagagtttyggttygggtygtaggagttggggagyggggaygygggtaggttaggtttttttatttgtygtyggggttttttttygtagtagtaaaggggttttagtgttygtggtagtgtatgttttagyggataygttggtttttaaatttagagattagaggggyggttgagaayggggygttygttgtgtgtgatttttgatygtggaggaagggygggagtygggagtaggyggtggggttyggggttaggtygyggtygtyggttttyggtaaaggygttttggtyggggaagggggygagggtgggyggtyggtttttgtygtygtagttatatttgggaygttgaaatgggttttggggatagagtttatttttagygygttttataggagaagttygtagtttaggtttgggtygtgtagatygttgggygggttyggggttygaggagagtaatayggygygaggtttagtygygagtaataatttygatagtayggtttttygaagaygtgtttygggtatyggggttgtgagygggggagtttygggttttgggttygtttggtayggggygggggyg

SEQ ID NO: 7888 - DNA, 1265 bp, synthetic construct
  misc_feature 1..1265: note = Description of Artificial Sequence: Synthetic polynucleotide
  source 1..1265: mol_type = other DNA
yggygaggagggttgtaggtgaagygyggggagagggaggtygttygtttyggttttttttttaggggttttgyggttggttagygtttyggttgtattttttggtgygygtygyggyggygttataggtttttygattttttgattatygttttygggtygygygttyggtagtygggatyggtgatggygygggattgayggtygtttttttttagatttttttgtttygtttggggttygttggggttgyggygtygtttygagttgtatgtggggygggygygttygagtttagagygagyggttttyggygttttygaggyggtgtttygtygygttagagtaygaggaggagyggygggtygggttaggttttttaygygtygtagtttyggagtaygggtttttyggaggggatttggggygttttagtttaggaggaaggattyggaagtagaagyggagtygygagtygagtygagttattgttttygttgttygygggygtygggtgggggtttyggyggttggatgggtagyggyggygygggtygygggyggygatgggygaggagtagagtayggtgagyggyggyggygggttttaggagtygtagattttggttagtggtattgygggttattttgagttttygaggttttagggggatagygttygggygttttygttgygygtygttttygyggagtygagyggyggtggttgyggaagygattggggttgygyggatattagygttttagagttygygaggagtttggggttttygggttggagtaagagtygagtatyggygtagtttgygggattggtatttatygggttttttaatttttagattttgttattgtagttggagttggaggaggaagaggaggaagttggggatygaaaagagggaggggatgaatagtaggaggygtttttyggygaagagttggagtttaggattygygtgggggtygtygayggattggttttggaygtgttgggttagyggygttygtttttygttaagagataagttttttgtttygtgtattgygtggagagygatttgttygaggttttygtttyggagtagttttygtygttygygtygttatttggggtttygttagtgttgaatttttttagtattygtttttttttttttagttttygattgttttttttaayggattttttttttttygayggyggtagtatygagttggagttttatttggygttygagtyg

SEQ ID NO: 7889 - DNA, 1360 bp, synthetic construct
  misc_feature 1..1360: note = Description of Artificial Sequence: Synthetic polynucleotide
  source 1..1360: mol_type = other DNA
ygttttygattttygtygttgggatttttygtygtagtttttgttttagtttgtgttgygggtggggtygggttgagtagttyggygttttttatygygttttttatygtatygttttygatttaatttygttttygggygtttattggtttgtagtattttttttttagtttgtgaagtgagtagggggaggyggtggtyggtygtttttttttagygtttagtttggtttygyggyggaggyggygtttttttygtaggayggagttaagttggattgtygygtygygyggggygggtaaagggggygttgygttyggtttygggtagggagtgayggyggyggyggyggtttygggygagygtggttttygygtgygtataygtataygtygtygygtagggatatayggatttyggtygttagtyggttatataggygyggagattyggttyggygygygtttttyggygtataygttttttattttygygtygygygggtygyggatttgtaggttgygygttttttgyggagtttgtttyggttttayggataggtttygtagtgagtaggtaagggtygtttygtygyggttgtttttttaygtttyggtygttttttttttttttagaattttygtttagtygggatttyggatttttttttttggtttggyggttttygttagtygygatttttatygayggagagygggygagggtyggygttaggtaagttttttagatttgaaatgaagttttttttygtygttgygttttttttgygygttaggttgatattttttaatttaagtgtttggygttgygttyggggyggtygatygtygtagattgtyggggtgggggtygatttagttattttaygttttttttgatgyggagaagggagattaggggggtaggtaagttatgyggtyggagggattyggagggatatgtttttttatttttaggtggayggaygtatttaygyggatygggaaggtagggttggagggtttttyggggttaggtatygtaattygtayggggtttgaggggtgggtaagtaatgtgttaggtgggggttggggtaggggttagtgtagaatgtttttttgtggtgatatattygggattgtttaaaagagtgtygttttygtttttygtggygyggaggggttggggttggggatgttagggttttagtggtttttagaagaaaygttttgyggggtttgtggggaaaygtatyggtttttttaggttgaagtgggttygttgagatttttgtttgtygttttagaggtagaagtttttgyggyggttgyggggggyggaggttatattttyggyg

SEQ ID NO: 7890 - DNA, 362 bp, synthetic construct
  misc_feature 1..362: note = Description of Artificial Sequence: Synthetic polynucleotide
  source 1..362: mol_type = other DNA
ygtttagtayggygggtagygtygygttgygtatygtygtygattatgagygaggatagtygyggagatagtygygtygagagygttaaggatttggagaagtagtttygtttgygygtgtgygtgtttagygagttttagaagatygagygggattatgtgggtaygttggagtttttggtgtyggtgagtgttttyggtagaygtagggggaygttygggyggygyggggygygggtttyggagtggttgygggaaggaygygyggtattgtttgtgyggggattygggaygggtyggggtattataggygygggaatttaygtgtggattttgygttygygggygyggtgattttygyg

SEQ ID NO: 7891 - DNA, 2566 bp, synthetic construct
  misc_feature 1..2566: note = Description of Artificial Sequence: Synthetic polynucleotide
  source 1..2566: mol_type = other DNA
cgttgggcgatgagggatcgttgggtaattgggggtataggatcgggtttcgttgggttcggggtagaagcgtcgaagtttcgattcggaacgcggtgattttattaacgtagaagttcgcgtagtcgagtagaggagtttttcgtaggcgattttcggatagacgtttttgcgcggttcgcgtggtttagtttcgttttaggaaatttttcgcgtagttttcgttttatgcgtttttatttagttttttttcggggtcgttttttttttaaagtagtttttcgggtttattgggcgttttcgtaatcgggtcggaatttcgaacggtttcgcgtgttattcggttattttggtaatattattcggcggcgttcggcggtttaattttagtttgcggtttttttcgagtttttcgtaaggtggggatcgggacgcgatcggggatggggaagggggttgtaggaggtttcgtttgcgttgtcgtttttgttgggtatagcgttttttattattcgcggcgatttcggttttcgtaaggtggggcggcgagtaggagtcggggttaggttaggggttcgagttttcgttcgaggggcggggaaggcgggtgacgtgagtcgggtcgggcgggcggagttgggatcggtttcgggaggcgggggcgagcgcgcggagaggtagacgcgaggagggaggcggttgagtagcgcgggcggttttgcggcgggcgcggtgggcgcgggcggcggggtttcgggattttcgcgcgtttttttcgcgcggcgtcgtcgtcgcgcgtttttacgtttcgcgttttacggcgttttcgtttcgcgcgtttttcgtgttcgttttttgttagttttcgggtcgcggtcgtttgtagagcgagcgtttagacggagttttcgggtaatttgagtggcgtcgatcggcggcggagtttttggtagagtttttcgattcggtagcgcggaggggattcgcgttcgttcgcgtcgcgttattttaaattttaagtagcgtcgttttatcggcgcggagtttcggttggaggtaagagtcgcgcgtcgggagatacgtatcgtgagcggtagcgtcgtcggttttttttttcgtcgtttcggagggcgaagtcgcggttttttagttttttgttgcgtcgcgatagcgtcggaatacgtttcgtttcgttgtcgttttcgttgtgtcgtcggcggagggggtcgcgagtttcgcgtttcggtcggaggatgtgcgttttcgcgggtcgtttagtttgagttatgcgttttaacggcggcggcgcgtcggtcggtatggagtttcgcgcggtcgcgttttgattcgttgtgcgtttcgcggtcggcgggcggcgggaggcggcggatcgagagtcggagatcggcgtcgcgggacggaagcgagcgggcgcgggcgtcgcgtagatggtttgggcgagttaggtttgaggtttcgtttttcgaaacgtgattatgtggatttaatagtttttaggatttaggtgagcgattcggtcggcgtcgggtgcgtgtgggcgcgtgggtgttaggttgggcggaagcggcgtttttttttatgttgtaaattaagggattttttttcgtttttcgtaagcgggtaacggggtgtatcggtagtcggaaaggggcgttcgttcggagtttggagtagtatcgcggttttggcggggagcggtcgggtttttagggtttcgcgcgttcggggtcggggtagcggcgttcgttttagtaattcgggaagtggggtcggttaggcgcgttcgtagttttaggagttagtagcgtagtgttttggtcggttgtttcggcgcgtttttttttcggggttcggggcgaggcgtcggtcgttgggcgcggcgggcgcgggggtcggggttgtcggggaaagttaaagtttcgggtttttagcgagagtttcgtaggcggagttggaggaaattatagttaaatagttatttcgttttttttttttttttttcggggtttcggggttgagtaggggttttttaggtttttagttgtcgatttagttgtttgcgggtgattttcgggttcgacgggcgtttatagttggcgggtagttggggcgggagagttggggtttttggggagtttcggcggttatttcgttgtaaatatatacgtatatacgttcgtcggcgcgttcggggtttgtttgtgtttgggattttagggttagatggaagagggggttcgagtttagagttcgtggtgggggtgtttagaaagatttttttcggtaaattttgttagttcgtcggggttttcgggtttttttggtttttgtttggggtggtttagggtttattagagtatagttgtcgtttttgttgggtaggttgtttttgagttttcgtttttttgtcggggtatttatcgagttcgtgtatttgggtttcgggttggaatcgcgagcggggaggatagaggtggaggcggagagtagcgtgcggttttcgagtttgtttattgggatgtattgcgttttcgcgttggggacg

SEQ ID NO: 7892 - DNA, 572 bp, synthetic construct
  misc_feature 1..572: note = Description of Artificial Sequence: Synthetic polynucleotide
  source 1..572: mol_type = other DNA
cgtttaagaagtcggggttttttttggttacgcgttttcgggggcgttcgcgttttttaggttttggttgtttgggcgtcgattttcgggacgcgtcggtcgatagtaggggaggcggtagtagggatcgtagtagttttcgttttcgtacggttcgtcgggtcgcggtgagtaaggcgggtaggcgcggcgggaggcgttcgacgtttatttcgggtttggcgttttttttcggttattacgcggcgtcgtttttcgggattttttagttttcggagtttcgcgcgtttagagtcgttcggagcgcgggcggggttagtttgggtagtcgcgggtcgttgttgcgtcggaagttttcgtcgttagggagttttttgggcgttaggttttgggtttttgggcgaagtcgacgttagaatatgtttggtttcgtatttagtttatcgtatttttagcgcgcgtgggtggggggcgtcggttgaggtggggagggtatagtttagttttaggttatagtgtttcgggcggggtagcgcggtgcggggtgaacgttatcggttcggcggatagcg

SEQ ID NO: 7893 - DNA, 989 bp, synthetic construct
  misc_feature 1..989: note = Description of Artificial Sequence: Synthetic polynucleotide
  source 1..989: mol_type = other DNA
cgtggtgtgtgtgtgcgcgcgcgagtgtgtgagcgttaggggtcgttcgttcgtcgcggtttttcgtgggttggtcgggttaatgagcgcgcggttgtaggggcggcgggcggggagggggcgtcgagttttgcggatggaggcgcgggtagcgcggcgcgtttatttcgcgcgggcgttgttggcggggggcggcgtagttattggattcggatcggggtcgcgattcggggtggcgggtggcgtgggcggcgttcggggttgggatgcgtcgggggtttagtggcggcggcggcgttggcggtggcgtcggcggttgtagggggacgagttagcgtcgcggcgttgggagttagttgagttcggtcggcgagcggaggcggtagcgtaggtagagcggcggcggtagcgggagttcgagcgttgcgcgtttattatggtcgtttagggagagttcggttatttggcggcgtagtcggatttcggttttaatagcgagcgtagtatcgattttttagtgttcggtttcgaggacgatttggtcgtcggggcgattttgtatagttcggagtggagcgaggagcgttttcgcgtggataggaagaaatttgaggttatgttataaggtaggtatttttcgtgttttcggatttttcgattgagtttttaattttttttcggatatttttatcgcgcgtttcggcgttcgttattttagtttacggtcggtcggtttagttttaggttcgttttttcgcggagtcggaggatatttagggattggagatttcgcgggattttttatttttttacgttttttagatttttaggcgttgggggttttgtgcgaatttgattggttttagaaaagtcgaaggtcgagtttgtattggcgcgtttaagttgcgttttggattttggagatgttaattttagttcggatatttgggttgtgttattcggattattcgggtcgtatagagtatgcg

SEQ ID NO: 7894 - DNA, 2400 bp, synthetic construct
  misc_feature 1..2400: note = Description of Artificial Sequence: Synthetic polynucleotide
  source 1..2400: mol_type = other DNA
cgaaggtgtcgttagttttagtgtcggtgggcgtttgtattaggaatagttaaagtcgacgatatttagttatttcgagcgttagggaagacgtttcgcgtaaaatcgcggttttaggcggattttcgttttagtttcgcgttgttggtggtattttcggggatttaaagtgggtggtttgggggtaaaggaatagaggtcgaagaatttggggtatgttttattagagtatttaagggacggagtgggaggttatattagatatgcgatttcgatatattttaaaagtggtagtttcgtgggttatttttaatagtgggatggatttttttaatttttttcgtttttcgaagtttttttgttatttcgggttatgtttttttttcgggatttttttgtgtaaaattatttttttttttgtttaaaggattttttttttttttttgattttacgaatttatttttttaataggtttttaaagtatgggcggatgtgttttttttcgtttatcgttaggagtcgagtttcggtaggtgagcggtgtaaaatacgtatttagttgtttttagtttttttcgttttcgttgagttggttgtttttatttcgtattacggtattcgagtttgtgagttttcgatttcggttttagtcgtagtcgttaataattttataataaataagaggataggattgagcgttcgcgtttcggagcgtattggttgggggtaattttttattttcggcgcgtcgttcgttgtttcgattcgagagtatcgggagagtcgagggaagggaaggcggcgaggggaaggtaggcggggatggagggaggtacggcgcggcgcggagcgaggaggtgggttgtaggggacgtcgagaagcggtggggttggcgtagagggcgggcgttcggggcgcgcgttattttcgttttgttttcgtagtggtagtatacggtttataggtatttgagcgttcgttagagtaagatgatgaagaggttttcgaagaaagttattatggaggaggttaggaaagtttattatatgcgttggtttcggttgtcgtacggtatttttatggttatcgggatgatgagcgtatttattttgggttcgtggattgaggacgaggaggaagaggaggaggaagaagaagaagaggaagaggaggaggaggaggaggaggacgcgtttaggttgagatggttcgcgtggatattgttatttattttaagattgttgttttcgtcgtcgtcgtcgtcgtcgttgttgtcgtcgtcgtcgtcgttattatttgttatagttagtaacgggtagtcggcgtaggggttcgggggagtttttttcgtcgttagcgttattttaaatatttattaatagttatattgttgttattgttgtcgtcgtcgtcgtcgtcgtggagcgcgggaggggggcggggaggcgtttgggttcggggcgttgtgcgcgatttggcggggtgcgtcgagatatatatagcgagtcgtcgtcgttcgttcgggggggagggggatggagtgcgcgggtagtttttttttttcggttcgcgtttcgttcgtttcgggttgcgttggtttcgagcgtcgagagttagggggcgtcgcgggtcgttcgcgttcggggtttgcgtcgttttcgggttcgtttcggtttcgcgcgcggtttcgggtgttttcggcgtcgcgtcgttcgtcgtgcgttacgggtgtgcgttgcgttcggtcggtgattttttttttcgagcgtttttcgcgcggttaacgagtcgtttttcgtttattaggtggtaattcgttaataatggataatcggtttttttcgttcgggcgtttttgcgttagtttttttttttcggttgcgttcggtttcggttcgtcgcgttagtgcgcgttcggtcgcggtaggtttatcgcgttcggtcgtcggttcgtggtcgtttgttagtttatgttttcgggattttttagttttgtcgttacgtcgttgagtttttcggttttcgttcgttttttttttttgtcgttttcgattttttttcgttttcgttttcgtcgtttaagttttttcggcgcgcgtttcgcgtttttcgtagtcgttagtagtagtagttgtagtaattggagcgggcgcggatttaggacgatttaggcgggaggggaggaggttcgtcgcgttggttcgtttgggtttcgggttgggtaggggtgggtagggtttttcggtagcggttcggtaagcgtttttgatttttagggcgtaaggtagagcgtttttagtttaggcgcggggttaggcgtttttttttaaggtgttgcgtttttagtcgagagcggtggggtatattgggaggacggcggggcgtttcggttaggtcg

SEQ ID NO: 7895 - DNA, 1859 bp, synthetic construct
  misc_feature 1..1859: note = Description of Artificial Sequence: Synthetic polynucleotide
  source 1..1859: mol_type = other DNA
cgcgatgttagttacggttcgcggcggttacggagttattttagtatttcgcgatggatagtgattttcggcgtggcgcgagttttttgcggtttttacgcgggtttgggcggcgggtttttttacggtttcgtttagatattcggaggtatttgttaaagttgcggaggtggacgatcgggcgtttaagtacgaattttttcgtcgaggtacggttgtcgggtttcgttttgagggtttggggcggcgaggatcgtcggggaggagggcgcgcgagtcggaggttagagtcgggtcgggtagggcgcgtttaggagtaggggagacggcgattcgggtcgaggcgggacggggatacgttatttgttcgtggagcgcggggaaggggtgcgcggcggcggcggcggcggagtttggcgtagagggtagcggtagtagcgggagtatcggttcgttcggggtcggttagtcggggagatcggggagtagcggggtcgcgggcggcggggtcgaggcgagtagtatcgggggaattacgattttcgcgttgagtcggagtagttcggtcgagttcggtattatttagatttagggcggcggcggcggcggttttgcgtttatcggttagaggagaggttgtcgtcgtcggggttgttgttgttgtagttgtcgtcgtcgtcgttggaatttggcgttcgtttgtattttatattttcgcgttgacggcggcggcgggggcggcgggcgttcgagatgttgggtcggcggcggcgcggtttcggagcgaatttatttggtttcgcggcgcggtcgttcgtttcgtttttgtttcgcgcgggaagtttttttttttttcgttcgcgtcgtcgtcgttttcggattcggttttcgtttcggttttcgttcgttcgcgttttttttcgtcggatttcgtttcgttttcgcgtttttcggttttggtcggggtttttttttcgttgcgtttttggattcgggcggtcgcggaggacgtgggtgggagagggtcgagggcgcgttcggttgggttttcgtcgatgtcggttttttggtggtttttggttttttgggatttagcgtatcgcgagggaggtttcgggtttcgtatttaagggtaagcggaagtcgaggtggcggcgtcggagttaggtatgtttcgttgtttagcgcggggttgagggcgtagacggggatcgcgcgagtcgttttttatttggttttttcggagtttagggcgcggagggtattgggttgcggattcggcgtaggcggtttcggacgttgttaggcgcgggcggatttttgttgtataaatgggttaaataggttcgtaaggttttcgcgggttttttggttcggaagttgagtcgcgggtgtttggtttgaagtttcgcgttttatagtggttcgcgggtttcggcggtttttgttttacgttttttaaggtattaggtaggtggttttagggtttttgtttacgatattttttgggtggggtaggattatttttttgtgaattcgttttggatgtttttaggtatagtttgtattttttttttttttagtatacgcggtttttgacgttgtacgtcgagttttttgggatttaggacgaatcgggttttaaggattttcgtttcgttcggattatacgtaggtagcgtcggtcgagtcgagtttgggttcgtattggttacgcgtagttatcgttagacggcgttagttttttttcgttgtagattttgtttcggaggtcgttagttttttttttatttcgggtttatagttttagtgtagtttttggcgacgcgcgttgatagttgggtagagattttcgtgcg

SEQ ID NO: 7896 - DNA, 902 bp, synthetic construct
  misc_feature 1..902: note = Description of Artificial Sequence: Synthetic polynucleotide
  source 1..902: mol_type = other DNA
cgattttagaattcgttttttatttcgagttcgtttttcgtcgttttttcgtttttgggagggcggttttattaattttcgcgattcgggtcgtttttggcggttttgatttcgttatttcgtttcgcggcgggggtttgggggtgaggggcgcgttttggggtagaggattgcgcggtagggtttgttatagggtagaggttagggtttttcgggaaaaaggtaggcgtatatatgtttttttttttgggaaaagacggggaggggggttttttttgggagattttaggtttcgaaatttttcgttttttatttttcggttttcgtattttttttttttttcgttacgtatttttttttttttttagttatttgttttatttcgtagcgtcgcgataaatacggttttagttcgttttcgtttttgtttagttttttttttaagtttcggggagtgggggagtgagtagacgttttttttttaggaggtcggaatttttgtttttattttttatcggggttcggttggttagaggtaagtttcgagattttttattaattattattatcgttgcgagggtcggtgaggttgtagataacgtttgtaaggacgggagtcggggagggtgtagggcgagtttaaaggacgggtagagtaagtttcgggaagaggtaggggttttttttttcgggtcgtcgtttttcgtattttcggagttagtcgtagttacgtagcgtcgtttgtcgggtatattaaggatttggcgcgtacgtggcgtttatttttattttcgggttcgtttttggttcgcgtttagtttttttagattattcgtaaattgaggatttcggatatagagtgtagagatttcggtaagtttattgaaagttagtcgaattcg

SEQ ID NO: 7897 - DNA, 2044 bp, synthetic construct
  misc_feature 1..2044: note = Description of Artificial Sequence: Synthetic polynucleotide
  source 1..2044: mol_type = other DNA
cgaaacggtagaggtcggtagttcgcggtttacgtgtatttgtttagggaatcgttttagcgaaatttgattcggatcggaattttttcgtagtatagcggtcgtgtttatcggaatggaacgttataagttgttatttgtattttttttttagttttgatagggaatacgcgttgtttttacgtttatatcgatattcggatttttatttagttcggttagagttttaggggttagggattagtgtagggagaaggttttttattttagtttttaggatttttaattatagtttattcgtttttattttgttcggttttaggtttagtcgaatttatatgttttcgtagtgtcgagcgttattatttatagtcgttttttaaattgtgatttttatttgggagattcggaattatttaggattttggtgtggggggtagtattttttatatttgtttttcgaaaattgttatggagtagtcgcgtttcggcgggtaggtgagggggtcgagtttattagcgtcgtagtttcgttgtttattttttttagcgtcggttgtcgttttcgggtagatatcgtcggttttgattttggggttgatatcgttaaagggtagttagtgttcgtttaggttatttcgggaggtttaggggtacggcgaggggtcggggaaaggcgatcgtttattatagttcgcgcgtttagattgagggaggagtcgggttgtagaatcggcggcggatggagacgggagggaggttgcgaggtcgttcgaggagagattaaggttttagaaacggagaagcgggcgttttgcgggaggcggcggcgttgtcgttggtcgttaagggcgggaagtgttttgggatttttattaggggtcgcgagtttcgagcgttaaattttcgcggcgttcgtttagcgcgttgttgtggcgggcgcggagggcgcgcgtcggtagtgggggttgcggcggcggagggtacgggttttcgtttagcgtttttatttttttggtgtagttgtttttcgcgagtcgagatatttttgttagggaagaggagcgtttcggttgtttttttagagttttttgttggggggatatcgtttttatgaagaaaatttttaaataaattttagtttaggaggaggttatacgattatgttcgcgggttgtcggtcggaggggcgaggacgcgcgggcggaggcgcggttgtcgtgtttaggtagggagtcgagtttcgggtgttcgtcgcgcgtttttcgtcggggttatgtattttcgtttgcgttcgatatcgcgggttggaggcgagtgtagcggcgatagttcgttagcgtcgcggttcgtttcgtttcgggttcgtttttttcgtttcgggcgttttgcgtcggggttcgttttcgtagttttttttagtttttttttagtttgggtttttttagtttcgttttagtttgtggcgcgtttggcgggcgtttttttatatatgttagtatatcggttatcggttgattttttcggtttgtgatttcgcgtgggtgtagttcgtaggagtttatcggtttgtgttacgtacgggggtttttagtgtacggatacgcgtttttttcgttatttgtttatttttattagattttattttttttcgcgtcgtgttcgcggcggaaggcgtttttgtagcgcgtgtattcgcggagcggtggcgattttagtttgagtagaggagttgtagtgatttttgtttcgtttttagcggattgcggagggaattttttattttattttattggggatagggtggtacgtcgtagagtgtcgtagttgtataaatttggaagtttatagtatcgtttgattttttgtgtaatttcgaacgttagtttgttcgggtaattttgagtgggtttttgtagtcggttatgttagcggtttttgtatatttgtattcgcggttttcgttgtttgtaggttgtagagacgggggtattttaaacgtgaaagagtaatgaaggaaaatgtagatagagcgaggacgtcg

SEQ ID NO: 7898 - DNA, 1152 bp, synthetic construct
  misc_feature 1..1152: note = Description of Artificial Sequence: Synthetic polynucleotide
  source 1..1152: mol_type = other DNA
cgtttttttcgtagagatcgttagttgaggttgtaatatttgtttcggtaaagcgttttcgtagttttttcggtttgttcgattcggtttttttcgtttttgtttcggttgcggtattattttttggagttacgtttcggcgagcgggggtcgcggagcgagggggtcgttgtgtcgttatttattcgagtcgttcgggttggtcgcgagtcgggattcgcgagggttggcgggttttggttttcgaggacgtagatatgtggtttgaattttcgtttttttagtcgttgtttttgtgtatttttttgggcgtttttagcgaatgcgagcggcgaggcgagggcgagcgcgtcgaggaagggcgggagaggcgcggagtttggtcgcgtcgcgttgcgtcgagcgtcgggtttttttcgcgagtttttcgggttcgcgcgcgcgttttttattgttttcgtttttcgcgcggcgcgtgttttttatttttcgtcgcgcgttttcgtattcgttcggttttacgcggcgcgcgtttgttttggcggtagcggcggcggcggcggcgcgttttttttcgaacgtcgtttttagggttgttggttgcgttttttattgtttcgcggttgttgttcggggtgggcggcgaggcgggggggaggtgtcggtttggtcgtcggggagggtttatcgttcgggcggatttttattgcgagagcgatgcgggtttaggcgcggcgcgcgggggttgtagggcgtttagtattgggggttgtcggcgcgcgggggtttttttttggtttttaggtattcgttgttgttgggcgtttttcgtattttcggttattatggatatttcgttttttcgtcgtttttttcgcgtatttcgggaggtcgtcggggcggtagtagcggcgcggtttcgcgggtgtttaggtgatcggttcggtagcggtagagtagtggtagtagtcgttattgtcgttgttattgcggtcgtcgtcgttggagagaggaggacgaggagggtaaggggtagaagtaggttttgttttgtttgttttagaggttatttcgggtttttttttattaattaagcgatttcgtgtttatttcgtaggagacgtttcggtagtttttaatttgtgtgcgtcg

SEQ ID NO: 7899 - DNA, 872 bp, synthetic construct
  misc_feature 1..872: note = Description of Artificial Sequence: Synthetic polynucleotide
  source 1..872: mol_type = other DNA
cggagagttgttatcgatttttttaacgttttaagttttagttttgtcgttcgcgtttttttttttttttgggttataattttggttttttcgggtcggttttacgtagttgcgtaggagttcgcgggggaagatttttcgtggggatttcgagtacgacgtgcgattttaaatttttatattttttttgtcgtttcgtaggttatatgtatcgggagtcgggcggggtaggcgcggttcgtaaggattttcgcgatggagacgtaatattgtcgcgattgtatttggggtagtttcgtcgcgttttagtcgtttttcggtaggaagcgtaggtgtgtgagtcgattcggagcgagtcgcgttttcgggttagcgtgggtagggcgtcgtagtttgcgtagtttcgaggatttcgcgtcgttttttcgagttagggtttttaggagcgggtcgcgtaggagacgttagagggggttgttagcggttgttgggagaacgggttacggaaatagttttttttaaagtcggggttatcgtggggtgggcgagttcgtttttttaggtcgggggcgcggattagaggggacgtgtgtagacggtcgcggttagttttatttcgttcgggcggagacgtatagttggagttggagggtcgtcgttcgttgggtttttaggggtttgaacgtttaggggtcgcggcgagtttattcggagcgagttaggtgagtaggtcgttatggcgatgcggtttcggagagcgtacgtttgtcgcggtcggtatggaaacgttttcgttaggttcgggggcgtcgttgattggtcgatttaatagacgcgggtgggtagtttagtcgtatcgttaagttcggtcg

SEQ ID NO: 7900 - DNA, 1070 bp, synthetic construct
  misc_feature 1..1070: note = Description of Artificial Sequence: Synthetic polynucleotide
  source 1..1070: mol_type = other DNA
cgagcggtggttcgatttcgggtgtggtaggaaggggtgtttcgcgttttagagttagtgttagtttttattttttcgggaagtcgagatttagggggaataggttttttagagtttagtttgtagggacgcggagggtaggagtcgtcggcgaggagtagttaatttgttatttttggcggttgtatttttcggcggttataggttgttcgatagcggattttagggttttcgcgacggtatttagagtgtttagaagggaggtcggggtcggggtgggtcgggaaaatcgagggagggaaggagtttggagaagtttcgtttaggcggggagggggcgattcggggcgtatttttcgattatgatttttatagattttggcgtcgtaatttgcgttttttgaggtcgaagatgcgtattttggagaagatatttattaggttgtcgttgtagagttcgcggtttttgttggggttgtttcgttttttgttggtagacggtcggttttagtgttgttttcgcgtttgtcgtttttggcggattaagtcgttagcgatggtcgcggttatggtggtttcgggaacgggttcggggagggagggcgcgggaggacggcgagtcgggggtatcggaggggaaggcggcggcgtagatcgtggttcgttttcggggtagaggagggggtgttaggcgggattggggagaggggaaggggggtttagttttgatcgggatttatcgtttttttcgcggggcgcggggttaggcgcgtagatgcgtttagggcgtagtcggacgatttcgggaagtcggacgtcgtggtcgtcgtcgtttggttacgttcgagtggagagcgggatcgcggttgcgggcgttgttggttatcgttcgtcgtaggaatttcggcgggggtcgttatcgttattcgcgttgttttttcgttttgttcggttttcgggcgggaggtagagtcggtcggcggtttttcgggcgtcggttggagggcgggtttcggtagggtttttgcgcgttcgtcggttcgggtcgcgttgggtaggatttagcgtcg

SEQ ID NO: 7901 - DNA, 395 bp, synthetic construct
  misc_feature 1..395: note = Description of Artificial Sequence: Synthetic polynucleotide
  source 1..395: mol_type = other DNA
cgttgggaagggaaaaacggtttatatcgaattggatgtcggatggaaatttttttgcgttattagattgcgtttagtatagtagatggtacgagtacgtgcggcgtttagtttaggttttcggaggtagttgagttggaaatttcgacggaaagtatttataagtttttattttgcgttggtttattcgcgtgtacgtttattttttacgcgcgtttttggtttagaagcgtatagatgtttattgtttagagtcggtatcgttggggagatcgagcgatttgcgcggcgtatagtgcggcgttggtagggttttgggttttcggtcgggggttcgagcggttaagggatgggggtgggggcggggagagtggggggagggcgaaagatcgtcg

SEQ ID NO: 7902 - DNA, 265 bp, synthetic construct
  misc_feature 1..265: note = Description of Artificial Sequence: Synthetic polynucleotide
  source 1..265: mol_type = other DNA
cggggatatttaggcgcggggtaggtgtaggggagggggcgcggggtaggggcgtaggggtcgtcgggttcgggttggaggtgttcgggtcgtgggagggagggagggaaggagggagggaggacggcgagggagggaggtaggggcgggcggcgggggatggggttagcggggaggtggaagcgatatttatcgttcgtattggtttttttggtgttgtcggttttagggggggtttttagcggtttttttcgcgagttcggcg

SEQ ID NO: 7903 - DNA, 1169 bp, synthetic construct
  misc_feature 1..1169: note = Description of Artificial Sequence: Synthetic polynucleotide
  source 1..1169: mol_type = other DNA
cgggttggcgggtattgagttggggttattacgtttttttagagcgtttgcggaggtggcgaaggtttggagagtatacgaggcggaattcggatcgagtgagttttttgagtcgtttgcgtgggacgtagggagagggcgaataacgtttttaggcgttgaatgtaggggtaaggagttagcgagggtggttggagtaggttttgttagttgttattaagtttttttataggtttgggggtttggggttttttggaaagattttttcgtcgcgttgattagtacggggttcgttttcgtattttgaaggttgtcgcggtttttcgttatttataattaagtttaagattaaggttgtaagttgaggtcggggtattgataacgggaatgaagttataggggaagaggataattgggacgggttggatttatatttgatattcgggaaatttttagagcgtgtggtgtttttgttagcggtagttattggtggagttgaggttatcgttattgtcgtcgttggcgttttgtttttggaattttttagtaagatggtatttattgtttgttttttttcgattagtatttttagtcgcgttttttttttttcgggatacgtattagttatatattgtggggagaagatgggttatgtaaatgtaagttaacgcgtttttttagttatttttgtataatgtaataggaatagcgattcgcgcgtacgaatcgggtagtgtgcgcgtgtgtgtgttcgcgtgtgtgagcgcgtgtgttagcgtgcgttttcgcgcgggcgtgcgtttgggtggatttttgcgtggtttgggaggtaaatcgggcgtttttttaagtcgttttaatatgatttaggtttttaaatacgtgaaagcggtagatataatagggatgcgaaggaaataaaaaataattggggaagtggtgttaagttatttaggttttgaattgaggacgagtagtgcggtcgcgtttggggcgcgttcggaaattatttttagtttgtggcggttattgttttatttaaatttttttgcggggagagttgagcggatttttggggggttggttttgggttagttttaaatttttcggttgtatttcgcgtggttttatcgacggcgcgtttcggcgtagtttttggcgcgggttcg

SEQ ID NO: 7904 - DNA, 1743 bp, synthetic construct
  misc_feature 1..1743: note = Description of Artificial Sequence: Synthetic polynucleotide
  source 1..1743: mol_type = other DNA
cggtgggtcgggggcgtggcgagattttgttttagtggagggagggtttatgtattgtcgagacgtcgattattagattttgattttgtcgtttttagaaaaattattggtagaagattcggattatggttaatttgtcggttataagtttttttaagaagcgttacgtttgggtgtagttggtagggtatattggtgagtagtggggcgggtgggcgggtgttcgcgacgggaaggggttgggcggcgttgacggatgtcggtttttagggagttttaaggcggcgggtattagcgggttgattttgaagcgttgttcggagtcggagcgttattgtttggcgcggttgatggttgacgcgttgcgcggttgcgtgtttgttttttacggcgtggtggagcgcgacggcgaaagttatttgtagttgtaggatttgttcgatggtttcgacggattttgtgtgttcgattgtaaaatgggcgttaggtatgcgtgttttgttaggtcggttggggggattaagtaggggttcggggtcgggatagttgtttgagggggattcggggcgagtgttcgaaggggttttcgtgtgcgtttttttatgttttggtcgttgtttgcgtttttataggatttatttagaggaggagttgattaaggttcgtgagcggtttaagttgcggaaggatatgtataagaaaatgttggcggtggattttgaagtttttacggaggaggagtacgcgtagcgcgtcgttattaagtcgcgttatatgtagtggcgggaaggtattagttttagtattattttcggttttcgtatcgagggtattaaggtgaggtaggcgcgtttcgttggtatcgtcgtagttttattgcgcgttgtttttttcgatttttcgttttcgtttcgtttgttttttcgtttttttttatcgtttcgtcgttttttgtaattgggaggtatcgttgttttacgttgtttttttttttattggcgggttcggggtttttgatatttttgttttatatttagaaagcggacggtttttgtagtatcgattttaagattacgcgaagtcgagagtaggtgtttcgcgtttttgaagagtttgtgtaaggagatgaggaagtgttggtgagagcgggattttaaattttgaggtgttggggagtttgaagtcgaggattgtttttgttatttggtttagtgttttcggttgtgtttttattatggtttttatcgcgttggttcgtaattgttttacgtttttttttttttgggttacgttgggcggggttttgggttttttttttggcggtatttgttaagtatagcgtgggtttcggttttttatcgttagtaggggtttatttggcgtttagttaatttgttttttttttttattttattttttgtagaggcggtatttgaatcgtttgtagtagattcgggatattttggaggtattcgagttttttaggaggtacgaggtaagcggcggttgttcgggtgttcgggtcgcgagggttagggcgggaattcggtaagggcgtttttgggtagggtcgcggtttgacggtgcggggttcgtaggtgatcggtagttcgtttttttttgtgtacgattattgttatcgcgtcggcgtgtggtttatcgatttcggtaagattacgttttttttcgatggttagattttggattatcggcggttttgggaggagggtaatcgcgaggacg

SEQ ID NO: 7905 - DNA, 2405 bp, synthetic construct
  misc_feature 1..2405: note = Description of Artificial Sequence: Synthetic polynucleotide
  source 1..2405: mol_type = other DNA
cgtagcgttatagtcgcgattgcggcggcggcggcggcgtagggggcgggggaggagagaagcgtttatttcgtttcgttgttttcgtagtagttttggttttagtttcggcgtattagagcggtttttgggaatttttgggtttgttgtttcggcggtcgttagttgggagtttattatcgttcgatggtatcgaatcgattcgtgtagttttataattttagtttaatttcgaggagttagcgtagatcgtttttcgtttttagttgcggcgaggtaagggttggtagcgttcggacgttttcgttttgttttttttatgtttaagcgcggggaattatacgttttcggtgtagaatagacgatcggggttattagggttgggcggtgggagtgggggttgggagtattatttttggttggacgtgtgtttagatttatcgtttttggtttttaggattttatttttttttgtatttttaggtgtcggtttttttgtattcgttttttacggggttcgttcggcgaagggtagtcgtagtttatatttatttttcgtttttaatttttgttttttttgttcgtcgtagttattcgtttggttgggagtaagttttttttttcgttgagggtgtagagagcgtttagggcgttaagagtagaggggttaaagtttaagcgttattagttagtcgaaggttttgagtttttagggtcgcggtcgggacgtagggaggttaggacgcgacgttcgttttatttgtttttttagcggttttttggtcgatagcgtcggtttgggggagggcgcgcggtcgtagacgtagttttttagtaggtaaagtttcgagggtcgcgagttcgagtcgttttcgaagtagaagagtaggttttgtagtagcgcgaattatttggtttgttattttgtgttgttcgaatttcgtttgtttaggtagtttttgcgcgtgtcgtttttgcgcgttagtagttttagggacgcgacgtggttattatttagtcggatttttttttgtatggtgtttagaggttagcgagattttacgcgtttatatttttttcgcgtagtagtttttcgttcgtgcgcgttgcgcgttgtttttttttggcgttcgttcgttcgttttttttagtttttttttttttttaaatatttatattttaggatttggcgtcgagtcgcggttttttgaatttagatatattatttttcgttggaatttttttttcgtttcgtagagttttagtattcggaagatgtcgttcgattttttttcggtgtcgggtaaattgagggattggcgatttgcgcgttggcgaggggtaggcggagttatgtgacgtcgatttttcgaagagttcgttttagtagcgcggatagggatatacgtacgtagtttcgtcgaggcgtagagtcgcgcgtaggttgtaatttggtgttttttttttttttttagatatatatatacgtatacgtatacgtatatatttaaattttgttttttttttttttatttttttttttttttttcggatgttaaaaagtaaattagattaattttcgtttaatttaatgaaatttcgaaggttcgttatttcgggagtttgcgtttttgcgttttatcgcggcgtattgtagatttggggttaagtgttagttgttatttttttttttaaaggttcgttttttttttttattttatttttaatacgaggtggaaggaggaaggtgggtggcgaaatagagttgtaaaagcgtttagttttagtttttgtatagttagtcgggttatattgaattttagtattcggttgtattttcggcggtttttttagttatttgaggatagtatagggggtgagatggggtggtggttggtgaacgttggttattttattttatattattttattttgagagttgttataattatcggcgttatttttcgtgtattttgaggtttggttggcgagtcgttgttgggagttttttgtaaatattttttaaagtttgaaggcgggttttaaacgtaggcgtcggggattatgggagtttttaaatagttgcgttggcgtaatgatattttaatgatagatttttcgtttttatttttagtttttattcgtttatatagttatacggtatttattcgagaacgttatagcgttcgtatgttgtatcgggagggcgcgcgggtcgtcgggcgagtcgggagttggggcggggagcgcgtatcgttgtttgtcgtagagggtagcgagttcgtttcgattcggagtaagtcgcgtttggttcgggcgttttgtagcggggatgggtgttcgcgtagttttgtgaaggaaagatattattttttcgtacggaaattgcgtatatttttttttcg

SEQ ID NO: 7906 - DNA, 1920 bp, synthetic construct
  misc_feature 1..1920: note = Description of Artificial Sequence: Synthetic polynucleotide
  source 1..1920: mol_type = other DNA
cgcggatttgggtttggcgtttattttatcgttaggattggatagaaaggttttggtcgaggttattaacggagaggttagagcggagtttttggtttagaatggaggtagtagcgagttttcggcggtttttaggagtattaaggtggaggcggtggaggagtcggaggcggtttttattttgggtttcggagagtttgggttttaggtttcgtcgcggacgtcgtcgtcgcgtagtttcgtttcggttagggttaaggtcgagttgtttagttttacgtcgggttttagttcggtgttcggcgagttgggtttggtcggggttttgtttttttcgtagtacgtgttcgggttcgacgcggcgtttttcgtttcggagattttggttaagatgttcgagttggtgtatagtcggttgtagtagggcgcgggcgcgggcgtcggcggcgcgtagatcgggttttttttcggggtttttaagggcgttacgtgtttcgagtgcgagattatttttagtaacgttaataattattacgtgtataagcgtttttattgtttaggtcgtcgtgcgttcgaggacgcgtttgtcgcgcgtaggtttaaggcgtttttcggttcggttcgcgcgtttttcggttagttcgtcgaattcgacgcgtcgcgttcgttttcgggtttcggagcgcgcgaggagggggttgggggcgcggttacgttcgaggacggcgcgggcggtcggggtagcgagggtagttagagttcgggtagtttcgtggacgacgcggaggacgattttagtcgtacgttgtgcgaggtttgtaatattcgttttagtcgttacgagatttatatcgtgtataagcggtattattgcgtttcgcgttacgattcgtcgtcgcgtcgatcggtcgcgttttcgggattttttgggtcggtcgcgttttcggttttttttttcgtcgcgtttgtgcgtacgcgtagacgtcgtaagttttacgagttgtacgcggtcggcgtttcgtttttttcgtcgttcggttacgttttcgcgttcgagtcgtcgcggttcggaagcggaagcggaagcggtttcggtttcgtttttgcgcgttcgttcggtttcgcggtcgacggttttatcgatttgagtaagaagtcgcggcgttcgtttttcggagtttcggtatcggcgttggtcgattattacgagtgtacggtttgtcgcgtgagtttttatagtttcgaggtttatttggcgtataagaagtattcgtgtttcgttgcgttatcgttcggcgcgttcggtttgttcgtcgtcgtttgtttttattgtttttcgaacggttcggtgcgcggggatttgttggagtattttcgtttggcgtacggtttgttgttcggcgcgtttttggtcggttcgggggtcgaggttcggacgtcggtcgatcgcggtttttcgttcgttttcgttttcgtcgttttttcgtagttcgggtttcgtggttttcgggacggtttcggttcggagttttaggagtcgtcgttcggttcgttttcgttttcggtcgtcgcgttcgaggtcgtgtcgttttcgtcggcgttttttttttattcggataagggcgtttagatttttagtaagggtacgtcggcgtcgttgtttaacggtaattatcggtattgtcgtttttgtaatattaagtttagtagtttgtttatttttatcgtttataagaagtattattgtttttcgtacgtcgtcgagtacgtgaagtgagcgtttatattatagtcgtagacgttttgtacgtttcgttgcgatgcggggagggggtcgtttttaggtcgtacggattgtcgtttttgggaatttcgttacgtataggtttcggcggagggggtcgtagggggtagcgttcg

SEQ ID NO: 7907 - DNA, 1403 bp, synthetic construct
  misc_feature 1..1403: note = Description of Artificial Sequence: Synthetic polynucleotide
  source 1..1403: mol_type = other DNA
cgcggggttttcgggaatcgtcgtttttttttttcgttttcgcgttcgcgttttttttttcggggtttcggtttatttatttttggtgcggtttcgtcggatttaggagtttcggtcgttcgggttgcggggagggggcgtttcgggtcggttttagaagttattttgtaaagaggtagggggcgcggggtcgcgcggggcgagttcgggattcgcggggaagaagtttttcgggatcgcgtttcggtcgttcgagtttttcgcgttcgtcgttttttatttcggtcgggggtttatttgggagttcgttgttttcggttagtcgttcgcgtgtgtttagggttagtagtacgtataagtgttagcgtacggtcgtcgcgtttatgtttaatgcgggtttcgttgggcgtgcgggcgtgcggggcgcggggattcgatcgatcggtcgttttcgtaggcgttgttcgttgttcgtcgtttcgttatcgttcgggttttcgagtcgtttagttagttcggttgatgagttgatagcgcgcgtttattggttcgtggcgtcggaggggcggggcgtcgtttagggtcggttaatgggcgtcggttttcggtttttcgaggaagaggggggttcgggcgtcgtcggggggattttttttttggggcgggcggtaggtggggggtgtgggtttggtcggtcggttcgttaggcgcggggtttaggttaggttggggttgtttggaggttgcgtttttttttgttcgcggcgtttcggttttcgtcgtcgagagtggacgtttttttggggtaatttttttcggtttagaggtagtttcgggggcggggattttgcgaatcggggatttcgtgaggtcgttcgttattcgtgggtagtgaaacgcgttagcgcgtagagtagattcgtttgcgttgtcgtttgttggacgttttttgagtatttattggggatcgagtgcgggcgaggtagtagcgaaggaatcgggaggggaaatttcgtgaagattatttgaaaattgacgtttaaaataaacgaattttttagtattcgttaaaggatagtggttcgttagtgtgtttgttacggggcggtcgtaggatttgcgtttggaatcgggcgggcgttcgggacggataatgtcgtttggcggtcggtttcgcgggaggttttcgtacggggttaatttcggtcggcgaagttcgttgttcggaatgcgaggtcgaggtttttttttgtgatagatcgggcggggttaggaggaggggtagggcgggtatttcggttcgaagatttaggaattgttttggtttggtttggggtttatatttgacgtttggcgagggttggtttcgggtttggttttatcgggtttgggagggacgggcg

SEQ ID NO: 7908 - DNA, 1088 bp, synthetic construct
  misc_feature 1..1088: note = Description of Artificial Sequence: Synthetic polynucleotide
  source 1..1088: mol_type = other DNA
cgggaaacgtcgttttttttggcgtttgagatttggggttttttttttatttggttttttcgttttcgttttagtttcgtgcgttttaggagggtatcgtcgagcgtcgggttttcgtagggttcgggagatttcgcggatcggaggagggataggattttcgagttttgggggcgggaagggagggtggaaggaggaggggagcggggttggggaaagttggagtttcggtatttttttttcgggttaggtcgttttcggggttttgcgttgcgtttttaagtgttgggaagatttcgcggggaaaggtttgaggacgcggtcggttggtataggtgtggcggttttagagggtcggggagaatttatggtttcgaggttgtggattagaaatgtttttgattagaagttgagaatttttggttagggaggtggggcggcggggaggggtcgttaagtcggtttagagcgcgtttatttgcgttataagggagaagaggtgtttttcgttttttttcgtttatcgtcgttacgatgcgtcgcggatttcggcgatttagttcgggtagaagcgcgcgttttttttttttagtttcgtgcgtcggtttttgtttcgttagtttcgttatggttttttatttattttcgcgggagcgtttttgtttttttattttgtattttttttagagtcgcgcgttagtttttcgtttcgtggaagcgtttttttttcgatttcggttgattttcgttcgtcgtttttttcgcgggtgcgcgttcggtttttttttcgttcggggcgggtttgcgtgggcggtgtttcgggtcggcgggcggagtttcggttttttagttttgcgtttcggtggagttcgagtcggagtcggtagaggggcgcgggcgcggacgcggcgtttggcggggttttgggaggttcggacggggttttggcgttgagttcggtcggttcggagcgcggatttagtcgtaggggcggcgatgggtatcgagggattttcgttttcggtcgtttttcgcggacgttagggttgtttgttggtatttgcgcgggtgagtgcggttttttagcg

SEQ ID NO: 7909 - DNA, 1812 bp, synthetic construct
  misc_feature 1..1812: note = Description of Artificial Sequence: Synthetic polynucleotide
  source 1..1812: mol_type = other DNA
cgggcggcggaggagggttggcggttagatatagtatcgttggagtttagagagtcgggtagaggttggcggagagtcgaggttggtttagtttttaggagatcggcgagttggggtgtgtgggagcgggatgtttttaaggcgaaaagaagcgttagtttcgtaagcggtttttatttgggttgtttaggtcggatgtttaggagtttatagtaggggggatggagcgaaggatcgaggggttgggaggcgaggtcgtagcgtattgacgtaggttagcgaggtcgttggtttcgacgtagggcgttcggtaaggtgtttggtattacgagagttaatttttgcgcgttattttcggaggttagtgcgtttagggcgcgtcggttcggtaggagggtgggtgttagtttttttttttatttttcgagtttttttttcggcgtttacgtgggcggagtagcgcgagggtgtgcgtggtaggggtcgcggcggcgtgtgtcgtgcgtggggtggggtgcgggttgggcggtttcgttttcgggtttcgcgtcgtcggggcgcggtttttagttttattttttttgttatttgggcggagatttgggggattgtgatttattttgcggaagatacggaggggacgggtcggttatatttttcgcgttatttcggtaggtatcgggtgggtttttttttcgttttttggtttgagggcggaattcggagaagagtggaaataggggtggcgtgaaggagagttgggggttgggggcgggatcgggagggggtgttgggggaagcgacgtagcggttgggagattttgtaagggggtttgaagaggagtgggggatgggtatggaagggtgggggattattgaggtgggatgcgagagtggaagggggatttagagggggcgcgatggtcggaggagggggagatggacgatggggcggggcggtatcggtcgtcgcgttttttgtcgttaggttcgtttttcggtcgtcgggtttacgggttttttttggttagcgttcgtttttcgtttttcggcgtatttgtatttatttgttcggcgtttaggttcgagtcgggtagtagtagcggacgtagcgagcgtagtttcgcgtcgtatttttcggtcgtttttttttcgttgcgagtttacgtcgttgtcgtcgtcgttatcgttttaaaaaggataaaacggaatagaaaatgaatgtatgtataaaaaaaatcgtaaaaagtaattgaggaggatggtagtcgcgcgcgcggttcggcggggcgggagtcgagaggtcgcggtattggtggtcgcgattcgggtaggcggtcggcgcgtgtcgtacgcgggtggttgtagttttttcggtcgttcgcgttcggtttaggtacggtatcgttttttttttcggggagttttttcgattggtttgtttttttgttagttaggtaggagggcgcggcgttcgtttcgtttcgttttcgttttcgttttgggtagatgtcgggagtttttttgtcgtcgtgggagggggagttgagttgtcggagcgtgcgtattgggttagcgggcggtcggggtagggttggggtttcggcgttgagcgtttttagtcgcgtcgggtagtttggcgtttcgttgagtcggagtaattttcggtaggagtttttaggttttggttaagtttcgggattcgggaagttatttttgttttcgggggttcgagtttggagtggggtttgtaggtaaagcggggttggggtcgttttggtcgttagtggttaggaagacgtagcgatttcg

SEQ ID NO: 7910 - DNA, 5819 bp, synthetic construct
  misc_feature 1..5819: note = Description of Artificial Sequence: Synthetic polynucleotide
  source 1..5819: mol_type = other DNA
cgagtagaaggcggacgttttcgagtcgtaggttacgtagttgttatagttttgcgattcgttatagggatttttatagacgtttagcgtcgcggtcgagttgagttcgtggcgcgcggtggttagtagtcggttttcgtagatcgggtagtagatcggcgtttgggtcgaggcggcgggttcggagttcgttagcgtgcggttttcggattcgtagtacgtgtttagggagttggtggttattaagaattgtagagagaggtcgcgaggattggcgggaagtcgggttggaggttggggttttgggttttgttaatttcgcgcgtcgtttacgagggcgtgtttcgagtattttcgggtttttcgtcgtttatattaggatgttcgtttttttttattagtttgtgcgcgtttggtttttttcgttacgtggggtttagtcgagtatttatattttttttcggagggtttttaaggtttttgacgttatttgcgcgttaagtttttttttttaggggttttttggggttttaggatttttttggggtatagtttgagttttgtggtttaaatattagggaattcgggttcggttcgtcggatttttttagcgtttcggttttttttcgggggtttggggagtaggggttgggcgtgaggggcgcgcgatttaggttttgttagttcggaagtcgtaggtagtcgtaggtcggatattttttatttttcgttttcgttttattcgttttatcggtatttgcggtggtttgggcggggcggggtttcgtttatttggggagtcgaggagtaggggtatttaaattgcgggtaggatatggcgggcgcggttcggggcggacgggcggggtttgtagggttttgcgcgttggggtcggcgtggcgcggttattgtttcggagttgtaggtttttaggcgttgggagggcgaagtaggagagtcggttagtttattttcgcgtttcgtaaatttttttaatcgggtaataaagtgagtagcggtggtcgtcgcgatttttttaatttcgtatttcggaggttcgagggggttttgggatcgagcggtttcgtagcggcgatagaaatatatattttacgaaaaagaaaaaaaaaaaaacgagtcgcgcgaattcgttaagttagatgtgcgcggtttgaagcggaggaggttttgacgttagttttatttcgcgtagttcggtttggtcgtagattcgtcggttattcgtcggcggtttaggtcgggaggggttaggatagtttcggtcgcgcggtggacggaggggttattttttcgggcgttagtaaataaattttattcgagttaatatcgtttagcgaacggtgtttttttttagttattcgagaacgagaggtatttttaattagaaattaattaatgagtagttgttttttttcgttttattgtaattattcgttttaattataaatgagatttatgaaaggatacgttgaagatgtaattaatagttaaaattagttcggcgttgcgtaggcggtcggttcggtttcgcgttggcgcgttttgtttcgagtggtaggaaggggttcgtaggcgtttcgtacgcgtttcgttattattgtttaatcgagaattagtaacgtttttcgtcggtttttattttacgtcggaatggatttttagaatttattgcggtcgtaagatagttcgtaagagttggttaaaatgtttttaggtgcgtgggggtttcggggttttagttggagttcgatattttgagattggcggttcgagggttgtagggtcgtttcgggcgtgcgtttatcggttttgtatttttgggtagtcgagtgtcgcggagaacgttttattttttttatcgcggttttttaagttttcgtttagtttatcgtttttatttcgttttttcgattttttttttcgatttttttttcgtcggtcgtgtttcgtcggtttttttttgtttttcgcggttaagtcggggattgtcgggcggttttgcgcgttcggaagagtaggttttttaatttaggtttcggtttttttcgttaagttcgtttttttcggcgtttcgtagggttggttgcgagggagggggcgttgggtgtttggcggaggcgtttttttttgtttattttgtttagttttttgtttggggcgtacggagtaatcggaagaggggatcgagcgtttattttaggattttttcggttagtattttttttgggattttgtttaagtttaaagcggaggttagtgagtaggcggtaagggggcggtaagggggcgttcgggttatttcgaattcgtttttcgttttttgcgttatcgtttttcgggatcgggattcgtttcggttgttttcgttttttgggtcggtttttcgtggtaagttgggaaggaagtcgtgtaaggtagcgttgtgtagatttgtttagaaagatttttgggtttagatttgtgaatcgttttagggttattttttaattaatgatgacgttttcgttttttttttagttgtaagtttgttttttagaaacgaaatttgtttgtttttttgatagttcggttgaaggtgattgatgattatttggagattatagtatatattatataatatttgttgcgtaattgttttaatttatagatgaaaatacgagtttttcgatcgcgttggatcggagcgggttacgttcgagttgtttgtagagggaaattatcggaaataatgaatagtcgttttatgtaaattatttagatagtttagcgtcggtagtcgcgagaaatatataaagaatacgagttaaatgatattaataattgtttttgaattttgtattgatttcgcggtaggtcgcgttttttttttttttatttgaatcgttaatattatttttttgtaaataataagaaattagttatcggggtttttcgttagaaatgaattttttaatttttttttttttttttttgtttttttttttttttatttttttttttttttttttttatttttttttttttttattttttgtagttttttggtttttttcgagtatttttttattttttattatttattgtttataaattattcgttttttttaggtaatgaggttcggttgaaggaggggtgtgagtttagtcgggttaagggttgggatggggagtagagatttttagaggggaggtatttagttgtggtttgttttttttttatttatattcggggatttggtttcggcgattgtgagtatttcgtcggttgagggggagagttagggtttaggggtttagttatttatgttttgtatttttgggttttagtgtaatagtttagtttatttagatttgaggttggtgtatttttttttttttagattcggcggggtttaattggagtcgaagttttagaataggcggttatttattttttgagtagagtttgggagaagtagtttttattttttagggtagttagtacgtgggggttttttcgggggttttttttgattattatcgttatttttttttgtttttttttgtttttttagtttgtgtgtataaatcgacgttttagtttttattagcgggcgatttttttttcgtgatttagaaatttggtttttgaatcggtttttttaggtcgtcgtatatatacgttttattttttgttcgttagtaggttttagcgtttggggttcgggtttagttatagttattttgtttcgggaagttcgtaattgtttaggaggttttttgattcgttcggttttatttaggttttattatttattttaggatatagggttaatttagtttgtggattggcgattatcgggatattttattgaaattttgtagtttggtttaggttcgtttgtttaaatcggggatttttattgggttattttttttttatagataatattggaatattttttaagtgtttttattaaaaggttaagtttggagcggaggtatttagtgttttttttattaacgataggacgtttagtattttaggtattagttgaacgcgtttgtatagattcggagtgttgagtttttttttttttagggattttcggtattaaatatattcgtgagtaggtgggttagaagttagtcggttttcggagtatatagtatcggtttagtttcggggagatgaggtgttttcgttggtttggagcgtttcgaagagcggaggattagggtcggagtaggtcgtaggggaggtaggggatggttagtttttaacgcgaagcgtaggcgggtcgtttattttgacggggttatcgttggtcgtcggaattatggaaggttttcggggagataggtcgggttttgattttttttcggttagtttagttttggtgttttaggagttattttgggggttattagtttttcgtattaagagttcgttcggagggagttttttttagtttagagaagttaattttagttaaaggcgaagtcgggagttcggggtattaggtaagggtttttttttttgagatttggggttagagattttgggggcgtttgtgttcgtttatcgttcgggatattcggttggggtgtgggtttgagaggttttacggtcgttgacgtcgtattggcgaatttcgaggttggtaggttatttttttatagtttcgaggttttttcggagttagtggtaggagaaggagttatagggataagcggtgaatttttggatttttaatcgttttttatgggggttcgcggtttttttttttttttttttcgttgcgttttcgtcgtttgttttttgggtacggtttgaggttggacggagcgtcgttcgggcgtttaggatttaggtttggttatttcgagttttttatttttcgtttcgcgtcggttcgcgtattttgtttttcgtaatttgtagtaaacgtagcggtttttggagagtttagcgacgggtagtaaattttgtttttttaagcgtaagagtaattttcgtaaagtttgtgcggcggagtttattttttatttgagttggggaagttttcgttcgcgtcgtgtggttgtcggggtcgcggggagtagttcgtagttcgggacgtatcggggagtcgtcgtagtcgtcgtcgttcgtttttttcggcggtcgcgcggagttttcgttttttcggaaggggggaggggtttcggaatttcggggcgggggcgggagcgggggattttatttatttgcggtggcgttgggtcgttttcggtagttcgcgagggtttcgcgcggaagttcggcgcgcgcgttttagcggggagtcggcgataattaatggagatatttttaggcggagtatttggcgagcggagcgcgtcggcgtttttaggcgtcgcggtcgttagtcgagttcgtatcggcgtgacgtgggcgagcgagcgcgttgtttttattcggtcgtttattaacgttttttttcgcgggcgtcgcgtttttgttaattttttttttcgttcggtttgcgcgcggcgcgtcgggtgtaggagttggggtgagggcgtttcgggtgttagtaggggcgttgggagttgtttgggcggggacgtagggtttcgggaggttatatagttttaataggatagtgggaaggcgcgcgagttagatttggttaaacgttaagttcgttgcggtttcgggttttcggtttacggggttttttttttcgtttgggttgttttatttagggacgtttgggtcgggcgcgaagagttcggaaatagttatttttgtcgtcggttcggttttttttcg

SEQ ID NO: 7911 - DNA, 2001 bp, synthetic construct
  misc_feature 1..2001: note = Description of Artificial Sequence: Synthetic polynucleotide
  source 1..2001: mol_type = other DNA
cggaggttgtgtcggggttcgttaaaggttataaataaatcggacgggtgggaagtacgttttagcggcgattggatttttaaaaatttgttggtagagtgaaaataaaaattgttttttaagttggtaaaatcggcgttttagacggtgcgtaggagggttttgcgaggtttgttttcggagtttcgcgttagttttgtaggttcggttgggttcgtagttcggtgttttattcgtgggtcgggttcggttgcggggttttttcgtagtcgggatatttaggatagtagcggttggggagtcggggttaggggtttttttgtaattttaatgatttttattattattattcgtaaaggataaacgcggttaaggtcgggttttatagtggttgtgttggttatcgcgtggaggagtgtgcgttaatttaggggcgaggggggcgcgttcggtgtttcggggagagtttagaaggaagacgttttatcgtggtttttatagttagggatagtttgggtgttagaaatttttagagagaattcgaggggttgatgttttgggttattagtttttggtgtttgtggggttttttgcgcgtttatttttatttttttttttttttttaggttcgacggattttttcggaggtttaggatagtgatttatagtaagtggtgatagtggaataacgtgatagttcgttgtatttgttagttggtttttgggtaggtttattcgtcgggttcgattttagagtcgagttttcggagtcgtcgggtaaagttttttttttcgtttcggtgtagtttcgcgtttttcgcgttcggcgttgtcggggaaaagtggtataataggaaagtttcgttagagggttttttttagtcggttttttcgttataaaaagttagattttagtcgaggttttgattttttttaaatatacgtttttttgttcgcggttcgttattttcgttcgggtttcgggttgtgtagtttttttttaggtttgttcgggtttatgtttttttcgaagcggcgggagtcggtgtagttttaatttttattgcgtgttttaggtcgttaattagttttgttcgcgtgtcgttggttcggaggttgtcgcgttagtttttgcgtgcgtttgagcgcgttggagtatttgcgaggttagggttgtcgacggcgagaggatattttgaggaatacggtgttttagtttcgttttcgtttttcgttcgagttggaggttggggcgcgttgagtcgtagcgtttggataagtgcgcgggtcggagtcgtttaggtttgtattcgggggttcgcggtcgacgtatgcgtacgcgcggtggcgggtttgtaggttcgaaggttcggttttttttttaaattcggagcggggaagtttaggggttgagagtttcggttcgggtcgtaggagttggggagcggggacgcgggtaggttaggtttttttatttgtcgtcggggttttttttcgtagtagtaaaggggttttagtgttcgtggtagtgtatgttttagcggatacgttggtttttaaatttagagattagaggggcggttgagaacggggcgttcgttgtgtgtgatttttgatcgtggaggaagggcgggagtcgggagtaggcggtggggttcggggttaggtcgcggtcgtcggttttcggtaaaggcgttttggtcggggaagggggcgagggtgggcggtcggtttttgtcgtcgtagttatatttgggacgttgaaatgggttttggggatagagtttatttttagcgcgttttataggagaagttcgtagtttaggtttgggtcgtgtagatcgttgggcgggttcggggttcgaggagagtaatacggcgcgaggtttagtcgcgagtaataatttcgatagtacggtttttcgaagacgtgtttcgggtatcggggttgtgagcgggggagtttcgggttttgggttcgtttggtacggggcgggggcg

SEQ ID NO: 7912 - DNA, 1265 bp, synthetic construct
  misc_feature 1..1265: note = Description of Artificial Sequence: Synthetic polynucleotide
  source 1..1265: mol_type = other DNA
cggcgaggagggttgtaggtgaagcgcggggagagggaggtcgttcgtttcggttttttttttaggggttttgcggttggttagcgtttcggttgtattttttggtgcgcgtcgcggcggcgttataggtttttcgattttttgattatcgttttcgggtcgcgcgttcggtagtcgggatcggtgatggcgcgggattgacggtcgtttttttttagatttttttgtttcgtttggggttcgttggggttgcggcgtcgtttcgagttgtatgtggggcgggcgcgttcgagtttagagcgagcggttttcggcgttttcgaggcggtgtttcgtcgcgttagagtacgaggaggagcggcgggtcgggttaggttttttacgcgtcgtagtttcggagtacgggtttttcggaggggatttggggcgttttagtttaggaggaaggattcggaagtagaagcggagtcgcgagtcgagtcgagttattgttttcgttgttcgcgggcgtcgggtgggggtttcggcggttggatgggtagcggcggcgcgggtcgcgggcggcgatgggcgaggagtagagtacggtgagcggcggcggcgggttttaggagtcgtagattttggttagtggtattgcgggttattttgagttttcgaggttttagggggatagcgttcgggcgttttcgttgcgcgtcgttttcgcggagtcgagcggcggtggttgcggaagcgattggggttgcgcggatattagcgttttagagttcgcgaggagtttggggttttcgggttggagtaagagtcgagtatcggcgtagtttgcgggattggtatttatcgggttttttaatttttagattttgttattgtagttggagttggaggaggaagaggaggaagttggggatcgaaaagagggaggggatgaatagtaggaggcgtttttcggcgaagagttggagtttaggattcgcgtgggggtcgtcgacggattggttttggacgtgttgggttagcggcgttcgtttttcgttaagagataagttttttgtttcgtgtattgcgtggagagcgatttgttcgaggttttcgtttcggagtagttttcgtcgttcgcgtcgttatttggggtttcgttagtgttgaatttttttagtattcgtttttttttttttagttttcgattgttttttttaacggattttttttttttcgacggcggtagtatcgagttggagttttatttggcgttcgagtcg

SEQ ID NO: 7913 - DNA, 1360 bp, synthetic construct
  misc_feature 1..1360: note = Description of Artificial Sequence: Synthetic polynucleotide
  source 1..1360: mol_type = other DNA
cgttttcgattttcgtcgttgggatttttcgtcgtagtttttgttttagtttgtgttgcgggtggggtcgggttgagtagttcggcgttttttatcgcgttttttatcgtatcgttttcgatttaatttcgttttcgggcgtttattggtttgtagtattttttttttagtttgtgaagtgagtagggggaggcggtggtcggtcgtttttttttagcgtttagtttggtttcgcggcggaggcggcgtttttttcgtaggacggagttaagttggattgtcgcgtcgcgcggggcgggtaaagggggcgttgcgttcggtttcgggtagggagtgacggcggcggcggcggtttcgggcgagcgtggttttcgcgtgcgtatacgtatacgtcgtcgcgtagggatatacggatttcggtcgttagtcggttatataggcgcggagattcggttcggcgcgcgtttttcggcgtatacgttttttattttcgcgtcgcgcgggtcgcggatttgtaggttgcgcgttttttgcggagtttgtttcggttttacggataggtttcgtagtgagtaggtaagggtcgtttcgtcgcggttgtttttttacgtttcggtcgttttttttttttttagaattttcgtttagtcgggatttcggatttttttttttggtttggcggttttcgttagtcgcgatttttatcgacggagagcgggcgagggtcggcgttaggtaagttttttagatttgaaatgaagttttttttcgtcgttgcgttttttttgcgcgttaggttgatattttttaatttaagtgtttggcgttgcgttcggggcggtcgatcgtcgtagattgtcggggtgggggtcgatttagttattttacgttttttttgatgcggagaagggagattaggggggtaggtaagttatgcggtcggagggattcggagggatatgtttttttatttttaggtggacggacgtatttacgcggatcgggaaggtagggttggagggtttttcggggttaggtatcgtaattcgtacggggtttgaggggtgggtaagtaatgtgttaggtgggggttggggtaggggttagtgtagaatgtttttttgtggtgatatattcgggattgtttaaaagagtgtcgttttcgtttttcgtggcgcggaggggttggggttggggatgttagggttttagtggtttttagaagaaacgttttgcggggtttgtggggaaacgtatcggtttttttaggttgaagtgggttcgttgagatttttgtttgtcgttttagaggtagaagtttttgcggcggttgcggggggcggaggttatattttcggcg

SEQ ID NO: 7914 - DNA, 362 bp, synthetic construct
  misc_feature 1..362: note = Description of Artificial Sequence: Synthetic polynucleotide
  source 1..362: mol_type = other DNA
cgtttagtacggcgggtagcgtcgcgttgcgtatcgtcgtcgattatgagcgaggatagtcgcggagatagtcgcgtcgagagcgttaaggatttggagaagtagtttcgtttgcgcgtgtgcgtgtttagcgagttttagaagatcgagcgggattatgtgggtacgttggagtttttggtgtcggtgagtgttttcggtagacgtagggggacgttcgggcggcgcggggcgcgggtttcggagtggttgcgggaaggacgcgcggtattgtttgtgcggggattcgggacgggtcggggtattataggcgcgggaatttacgtgtggattttgcgttcgcgggcgcggtgattttcgcg

SEQ ID NO: 7915 - DNA, 2566 bp, synthetic construct
  misc_feature 1..2566: note = Description of Artificial Sequence: Synthetic polynucleotide
  source 1..2566: mol_type = other DNA
ygtttttaaygygggagygtagtgtattttagtggataaattygagaatygtaygttgtttttygtttttatttttgtttttttygttygyggttttaattygggatttaaatgtaygagttyggtgaatgtttyggtaggagggygagggtttagaggtagtttgtttagtaaaaaygatagttgtgttttggtgggttttgggttattttaggtagaagttagagaagttygagaatttyggygggttggtaaagtttgtygagaagggtttttttggatatttttattaygggttttaggttygaatttttttttttatttggttttggagttttagatatagataagtttygggygygtyggygggygtatgtgygtgtgtgtttatagyggggtggtygtyggagttttttaagaattttagttttttygttttagttgttygttagttgtgagygttygtygggttyggaggttattygtaaatagttgggtyggtagttgggagtttgggaggtttttgtttagtttyggggtttygagaaaggagaagggggagyggagtggttgtttggttgtggttttttttaatttygtttgygaagttttygttgggagttyggagttttagtttttttyggtagtttyggttttygygttygtygygtttagyggtyggygtttygtttygggtttyggggaggaggygygtyggggtagtyggttaggatattgygttgttggtttttagagttgygggygygtttggtyggttttatttttygggttgttggggygggygtygttgtttygatttyggaygygyggaattttggagattyggtygtttttygttagggtygyggtgttgttttaggtttygggygggygttttttttyggttatyggtgtatttygttgttygtttgygggaagygaagaggggttttttgatttgtaatatagaggaaagygtygttttygtttagtttggtatttaygygtttataygtattyggygtyggtygggtygtttatttgagttttaaaagttgttgaatttatatggttaygtttyggggagyggggttttagatttggttygtttaggttatttgygyggygttygygttygttygttttygtttygyggygtyggttttyggttttyggttygtygtttttygtygttygtyggtygyggggygtatagygagttagagygyggtygygyggggttttatgtyggtyggygygtygtygtygttggggygtatggtttaggttgggyggttygygggggygtatatttttyggtyggggygyggggttygyggtttttttygtyggyggtatagygaaggyggtagygaggyggggygtgtttyggygttgtygyggygtagtaaagggttggggagtygyggtttygtttttyggggyggygaggagggaggtyggyggygttgtygtttayggtgygtgtttttyggygygyggtttttgtttttagtyggagtttygygtygatggggyggygttgtttagggtttggggtgaygygaygyggayggaygygagtttttttygygttgtygggtyggggggttttgttagaggtttygtygtygatyggygttatttaagttgttygggggtttygtttgagygttygttttgtagayggtygyggttyggagattggtaggaggygggtaygagaggygygyggggygagggygtygtggagygyggggygtggggaygygyggyggyggygtygygyggaggaggygygyggggatttyggggtttygtygttygygtttatygygttygtygtagagtygttygygttgtttagtygttttttttttygygtttgttttttygygygttygttttygtttttyggagtyggttttaatttygttygttyggttyggtttaygttattygtttttttygtttttygaaygggagttygagtttttggtttggtttyggtttttgttygtygttttattttgygggggtyggggtygtygygggtggtggggggygttgtgtttagtaggggygatagygtaggyggggttttttgtagtttttttttttattttyggtygygtttyggtttttattttgygaaaggttygagagaggtygtaggttaggattggatygtygggygtygtyggatggtgttgttagggtaatyggatggtaygygaagtygttygaggtttygattyggttaygggggygtttagtggattyggagagttattttggggagggggyggtttygaagaaggattgggtgggggygtatggagygggggttgygygaaaagttttttggggyggagttgagttaygygggtygygtaggagygtttgttygagggtygtttaygagggatttttttgttyggttgygygggtttttgygttgatgaagttatygygtttygggtyggagtttyggygtttttgtttygaatttagygaagttyggttttatgtttttaattatttaayggttttttatygtttagyg

SEQ ID NO: 7916 - DNA, 572 bp, synthetic construct
  misc_feature 1..572: note = Description of Artificial Sequence: Synthetic polynucleotide
  source 1..572: mol_type = other DNA
ygttgttygtygggtyggtggygtttatttygtatygygttgtttygttyggggtattatggtttggggttggattatgttttttttattttagtyggygttttttatttaygygygttgagggtgyggtgagttgagtgyggggttaagtatgttttggygtygatttygtttaggggtttaggatttggygtttaaggggttttttggygayggagattttygaygtagtagygattygyggttgtttaagttgatttygttygygtttygagyggttttgggygygyggggtttyggggattggaggatttyggggggyggygtygygtggtggtyggaaggggaygttaagttyggggtgggygtyggaygtttttygtygygtttgttygttttgtttatygygattyggygggtygtgyggaagygggggttgttgyggtttttgttgtygttttttttgttgtyggtyggygygtttygggaatyggygtttaggtagttagggtttggagagygygagygttttyggaggygygtggttagggaggatttygattttttgggyg

SEQ ID NO: 7917 - DNA, 989 bp, synthetic construct
  misc_feature 1..989: note = Description of Artificial Sequence: Synthetic polynucleotide
  source 1..989: mol_type = other DNA
ygtatattttgtgyggttygagtggttyggatggtatagtttaggtgttygggttaaagttggtatttttaaagtttagaaygtaatttgggygygttagtataaattyggttttyggtttttttgaagttagttaagttygtatagggtttttagygtttggaaatttgagaggygtggaagggtggggagtttygygaagtttttagtttttgggtgtttttyggtttygygggggagygggtttggagttaaatyggtyggtygtaggttggagtagygggygtyggagygygyggtggggatgttygaaaaggagttagaggtttagtyggagagttygagaataygagggatgtttattttgtaatatggttttaagtttttttttgtttaygyggaagygtttttygttttatttygggttgtgtagggtygtttyggygattaagtygttttyggagtygggtattggggagtyggtgttgygttygttgttggagtyggggttygattgygtygttaggtagtygggttttttttgggyggttatggtgggygygtagygttygggttttygttgtygtygtygttttgtttgygttgtygttttygttygtyggtygggtttaattggtttttagygtygyggygttagttygtttttttgtagtygtygaygttatygttaaygtygtygtygttattgagttttyggygtattttagtttygggygtygtttaygttattygttatttygggtygyggtttyggttygggtttagtggttgygtygtttttygttagtaaygttygygyggaatgagygygtygygttgttygygtttttattygtagggttyggygtttttttttygttygtygtttttatagtygygygtttattggttyggttagtttayggggagtygyggygggygggyggtttttggygtttatatattygygygygtatatatatattayg

SEQ ID NO: 7918 - DNA, 2400 bp, synthetic construct
  misc_feature 1..2400: note = Description of Artificial Sequence: Synthetic polynucleotide
  source 1..2400: mol_type = other DNA
yggtttgatyggggygtttygtygtttttttagtgtattttatygttttyggttgggggygtagtattttggagagaggygtttggtttygygtttgggttgggggygttttattttgygttttgggggttaggggygtttgtygggtygttgtygaggggttttgtttatttttgtttagttyggagtttaggygagttagygyggygagtttttttttttttygtttgggtygttttgagttygygttygttttagttgttgtagttgttgttgttggyggttgyggggagygyggggygygygtygaagaggtttgggyggygaggayggggaygaggaggagtyggaggyggtaaggaggaagagygagyggaggtygaggggtttagyggygtggygataggattagggggtttygagaatatgggttagtaggyggttaygggtyggyggtyggaygyggtgaatttgtygyggtygggygygtattggygyggygagtyggagtygagygtagtygggggaggagggttggygtaggggygttygggyggagggggtygattatttattattaaygagttattatttaataagyggagagyggttygttagtygygygggaggygttyggggaagggggttatyggtygagygtagygtatattygtggygtayggygggyggygyggygtygaggatattygggatygygygyggagtyggggygggttygggggyggygtagatttygggygygggyggttygyggygttttttggttttyggygttyggggttagygtagttyggggygagyggggygygggtyggggagggggagttgttygygtattttatttttttttttttygggygggyggyggyggttygttgtatatatttyggygtatttygttaggtygygtatagygtttygagtttaggygttttttygtttttttttygygttttgyggyggyggyggyggyggtagtagtagtagtaatatggttgttgatgggtgtttggggtggygttggyggygggaggagttttttygagtttttgygtyggttgttygttgttagttatggtaaatggtggyggyggyggyggyggtagtagyggyggyggyggyggyggyggaggtagtagttttagaatgagtagtaatatttaygygaattattttagtttagaygygttttttttttttttttttttttttttttttttttttttttttttttttttttttttttygtttttggtttaygagtttaagatggatgygtttattatttyggtgattatggaggtgtygtgygatagtyggggttaaygtatgtggtgggtttttttggttttttttatggtgatttttttygggggtttttttattattttgttttggyggaygtttaagtatttgtggatygtgtgttgttattgygggggtaagaygaaggtaaygygygtttygggygttygttttttgygttagttttatygtttttyggygttttttgtagtttattttttygtttygygtygygtygtgtttttttttattttygtttgtttttttttygtygtttttttttttttyggttttttyggtgttttyggatyggggtagygggyggygygtygggggtgaggagttgtttttagttagtgygtttygggaygyggaygtttaattttgtttttttgtttattgtagggttgttggyggttgyggttggggtyggggtyggggatttataggttygggtgtygtggtgyggggtggggatagttaatttagyggggayggaggaagttgggggtagttgggtgygtgttttgtatygtttatttgtyggggttyggtttttggyggtgggygagagggagtatattygtttatattttaggaatttgttggggagatgagttygtggggttagaaagaagggaaaaattttttgggtaagggagagaataattttgtataagggaatttygggggaggagtatggttygagataatagggggatttygaggggygagagaagttggggagatttattttattattgggggtagtttayggggttgttatttttggaatgtgtygaggtygtatatttgatgtaattttttatttygttttttaggtgttttagtggaatatattttaagtttttyggtttttgtttttttgtttttaggttatttattttgggttttyggaaatgttattagtagygyggagttggagygggagttygtttgaggtygyggttttaygyggagygttttttttggygttygaggtggttagatgtygtyggttttagttatttttggtgtagaygtttatyggtattgaggttggygatattttyg

SEQ ID NO: 7919 - DNA, 1859 bp, synthetic construct
  misc_feature 1..1859: note = Description of Artificial Sequence: Synthetic polynucleotide
  source 1..1859: mol_type = other DNA
ygtayggaagtttttgtttagttgttagygygygtygttaggggttgtattgaagttgtggattygggatggggaggaggttggyggttttygaagtagggtttatagygggggagggttagygtygtttggyggtggttgygygtggttagtgyggatttaggttyggttyggtyggygttgtttgygtgtggttygggyggagygagggtttttggagttyggttygttttgggttttaggaagttyggygtgtagygttagaggtygygtgtgttgggggagggaggagtatagattgtgtttgggggtatttaggaygaatttatagaggggtggttttgttttatttagggggtgtygtgggtaaaggttttggggttatttgtttggtgttttggagggygtagggtaggagtygtygaggttygygggttattgtggggygyggaattttagattaggtattygyggtttaattttygggttaggggattygygggggttttaygaatttgtttggtttatttgtgtaatagaaattygttygygtttagtagygttyggggtygtttgygtyggattygtagtttagtatttttygygttttggatttygaggaggttaggtagagagyggttygygyggttttygtttgygtttttagtttygygttgggtagygggatatgtttggtttyggygtygttatttyggttttygtttgtttttgagtgyggagttyggagtttttttygyggtgygttgggttttagagggttagaggttattagggggtyggtatyggygggagtttagtygggygygttttyggtttttttttatttaygtttttygyggtygttygggtttaggggygtagyggggaggagatttyggttagggtyggggagygygagggyggggyggggttyggyggggaggggygygggygggyggggatyggggygggggtygggttygggggyggyggyggygygggygggaggaggaggagtttttygygyggggtaggggyggagygagyggtygygtygyggagttaagtgagttygtttyggagtygygtygtygtyggtttagtatttygggygttygtygttttygtygtygtygttagygyggggatgtaggatgtaggygggygttaggttttagyggyggyggyggtagttgtagtagtagtagtttyggyggyggtagttttttttttggtygatggaygtagagtygtygtygtygtygttttgggtttggatggtgtygggttyggtygggttgtttyggtttagygygggggtygtggttttttyggtgttgttygtttyggtttygtygttygyggtttygttgtttttyggttttttyggttggtyggtttygagygagtyggtgttttygttgttgtygttgttttttgygttagatttygtygtygtygtygtygygtatttttttttygygttttaygggtaggtaaygtgttttygtttygtttyggttygggtygtygttttttttgtttttgggygygttttgttyggttyggttttggttttyggttygygygttttttttttyggyggttttygtygttttaaatttttaggayggagttyggtagtygtgtttyggygagaaagttygtgtttggaygttyggtygtttattttygtagttttggtaggtgttttygggtgtttggayggagtygtggagggattygtygtttaggttygygtggggatygtagggaattygygttaygtygggggttattgtttatygygaggtgttgaagtggtttygtgatygtygygggtygtggttgatatygyg

SEQ ID NO: 7920 - DNA, 902 bp, synthetic construct
  misc_feature 1..902: note = Description of Artificial Sequence: Synthetic polynucleotide
  source 1..902: mol_type = other DNA
ygggttyggttggtttttagtaggtttgtyggggtttttgtattttgtgttygggatttttaatttgygaatagtttggggaggttgagygygagttaggagyggattygggggtgggggtaagygttaygtgygygttaggtttttggtgtgttyggtaggyggygttgygtggttgyggttggtttygagggtgyggggggyggygattygggagggaaaatttttgttttttttyggggtttgttttgttygttttttaaattygttttatatttttttygattttygtttttgtaagygttatttgtagttttatyggttttygtaayggtggtggtggttggtggggggtttygaagtttgtttttggttagtyggatttyggtgggagatggaggtagaaatttyggttttttaggagaagggygtttgtttatttttttatttttyggggtttggggagggggttgggtaggggyggaagygagttggagtygtgtttgtygyggygttgyggagtggaatagatggttggggaggggagagggtgygtggyggggaggaggaggggtgygggggtyggaggatagggaaygaggaatttygaagtttggagttttttaggagaagttttttttttygtttttttttagaaaggggggtatatatgygtttgtttttttttyggagagttttggtttttgttttgtggtagattttgtygygtaattttttgttttagggygygttttttatttttaaattttygtygygggayggggtggyggggttaggatygttaggagyggttygggtygygagggttaatggggtygtttttttaggggygaggaggyggygggaaaygggttyggggtggggaaygagttttgggatyg

SEQ ID NO: 7921 - DNA, 2044 bp, synthetic construct
  misc_feature 1..2044: note = Description of Artificial Sequence: Synthetic polynucleotide
  source 1..2044: mol_type = other DNA
yggygttttygttttgtttgtatttttttttattgtttttttaygtttggaatgttttygtttttgtagtttgtagatagyggaaatygygggtgtaaatgtgtaggggtygttgatatgatyggttgtagaagtttatttagggttattygaataggttagygttygggattgtataagaggttaggygatgttgtgggtttttaaatttgtatagttgygatattttgygaygtgttattttatttttagtggggtggggtgggggatttttttygtagttygttgaaagygaggtaggaattattgtaatttttttgtttaggttgaggtygttatygtttygyggatgtaygygttgtaggggygtttttygtygygggtayggygygggaagggatggggtttggtgggagtgggtaggtggygggagaggygygtgttygtgtattagaggttttygtgygtgatataggtygatgagtttttgygggttgtatttaygyggagttatagatygaaaaggttagtyggtggtyggtgtgttaatatatatagagagaygttygttaggygygttgtaggttgggaygaggttaggagggtttaggttggaggagggttgaggagggttgygggggygggtttyggygtagggygttyggagyggagggggygggttygaggyggggygggtygyggygttgaygggttgtygtygttgtattygtttttagttygyggtgtygagygtaggyggaggtatatggtttygaygggaggygygyggygagtattyggagttyggttttttgtttgagtayggtagtygygttttygttygygygttttygttttttyggtyggtagttygyggatatgatygtgtagtttttttttgggttgggatttgtttgaagattttttttatggaagygatgtttttttagtaggagattttagggggatagtyggggygttttttttttttgataggagtgtttyggttygygggaggtagttgtattaagaaggtgaggaygttgagygggggttygtgtttttygtygtygtagtttttattgtyggygygygtttttygygttygttatagtagygygttaggyggaygtygygggaatttgaygttygaggttygyggtttttaatgagagttttagaatatttttygtttttgayggttagyggtagygtygtygtttttygtagagygttygttttttygtttttagagttttagttttttttygagygatttygtagtttttttttygtttttattygtygtyggttttgtagttyggttttttttttagtttaggygygygggttgtagtgggygatygttttttttygatttttygtygtgtttttgggtttttygaagtggtttgggygagtattgattgttttttggyggtgttagttttaaagttagggtyggygatgtttgttygggagyggtagtyggygttgaagaaggtaggtagyggggttgyggygttggtgggttyggtttttttatttgttygtygaggygyggttgttttatagtagttttyggggggtagatatggggagtattgttttttatattagggttttggatgatttygggttttttaggtgggggttatagtttgaggggygattgtggatgataaygttygatattayggggatatgtaggttyggttgggtttagaatygagtagggtgggggygggtgggttgtggttgggggttttgagggttgaggtgggggattttttttttgtattggtttttggtttttgggattttggtygggttggatagggattygggtgtyggtgtgggygtgggggtagygygtgttttttgttaaagttgggagagggatgtaggtgataatttgtagygttttatttygataaatayggtygttgtgttgygggaggatttygattygggttaggtttygttggaayggttttttgagtaagtgtaygtgggtygygggttgtyggtttttgtygtttyg

SEQ ID NO: 7922 - DNA, 1152 bp, synthetic construct
  misc_feature 1..1152: note = Description of Artificial Sequence: Synthetic polynucleotide
  source 1..1152: mol_type = other DNA
yggygtatataagttgaggattgtygaggygttttttgygaggtaaataygaagtygtttggttagtgagaagaaattygaggtggtttttggggtagatagagtaggatttgtttttgttttttgtttttttygtttttttttttttagyggyggygatygtagtaatagyggtagtggyggttgttgttattgttttgtygttgtygagtyggttatttgggtattygyggagtygygtygttgttatygtttyggyggtttttyggagtgygyggagggggyggyggaggagygagatatttatagtaatygaggatgygaggggygtttagtagtagygagtgtttgggagttaggaggaggttttygygygtyggtaatttttagtgttaggygttttgtagttttygygygtygygtttgggttygtatygttttygtagtgagggttygttygagyggtaagtttttttyggyggttaagtygatatttttttttygtttygtygtttatttygggtagtagtygyggaataatggagagygtagttagtagttttggagayggygttygggggaggaygygtygtygtygtygtygttgtygttagggtaggygygygtygygtggagtygggygggtgygagggygygyggyggggggtggggggtaygygtygygyggggggygggggtagtggggggygygygygygggttyggggagttygyggggagagttyggygttyggygtagygyggygyggttaagtttygygtttttttygttttttttyggygygttygttttygtttygtygttygtattygttgggggygtttagaaagatgtatagaggtaayggttaggggagyggaggtttaagttatatgtttgygttttygggggttagagttygttagttttygyggatttyggttygyggttagttygagyggttygggtgagtagyggtatagyggttttttygtttygyggttttygttygtygagaygtggttttaagaagtggtgtygtagtyggggtagaggyggaggaagtygagtygggtaagtygggaaggttgyggagaygttttgtyggggtaggtgttgtagttttagttagyggtttttayggagggggyg

SEQ ID NO: 7923 - DNA, 872 bp, synthetic construct
  misc_feature 1..872: note = Description of Artificial Sequence: Synthetic polynucleotide
  source 1..872: mol_type = other DNA
yggtygggtttagygatgyggttgagttgtttattygygtttgttgaatyggttaattagyggygttttyggatttagygggagygtttttatgtygatygyggtaggygtgygtttttyggggtygtatygttatggygatttgtttatttgattygtttygggtggattygtygygatttttgggygtttaggtttttgagggtttaaygggygayggttttttagttttagttgtgygttttygttygggygaggtggggttgatygyggtygtttgtataygttttttttggttygygttttyggtttgggagggyggattygtttattttaygatggtttyggttttggaagggattgttttygtgattygtttttttaatagtygttaataattttttttaaygttttttgygyggttygtttttgagaattttggttygggagagygaygyggggttttyggggttgygtaggttgyggygttttgtttaygttggttygagggygyggttygtttygggtyggtttatatatttaygttttttgtygggaggyggttgggaygyggyggggttgttttaagtgtagtygyggtagtgttgygtttttatygygggggtttttgygggtygygtttgtttygttyggttttyggtgtatgtggtttgygaggyggtagaggagatgtggggatttagggtygtaygtygtgttygaggtttttaygagaggttttttttygygggtttttgygtaattgygtgaagtyggttygggaaagttaagattgtggtttaggaagaggaaggaaygygggygatagagttggggtttgggaygttgagggggtyggtggtagtttttyg

SEQ ID NO: 7924 - DNA, 1070 bp, synthetic construct
  misc_feature 1..1070: note = Description of Artificial Sequence: Synthetic polynucleotide
  source 1..1070: mol_type = other DNA
yggygttgagttttgtttagygygattyggatygayggaygygtagagattttgtygggattygttttttagtyggygttyggggagtygtyggtyggttttatttttygttygggagtygggtagggygagaaggtagygygagtggyggtggygattttygtyggggtttttgygaygagyggtgattagtagygttygtagtygyggtttygttttttattyggaygtggttaagyggyggyggttaygaygttyggtttttygggatygttyggttgygttttgggygtatttgygygtttggtttygygtttygyggagagggygatgggtttyggttaggattgagtttttttttttttttttttagtttygtttggtatttttttttttgtttygagggygagttayggtttgygtygtygttttttttttyggtgttttyggttygtygttttttygygtttttttttttyggattygttttyggggttattatggtygyggttatygttagyggtttgattygttagaagyggtaggygygggagtagtattgggatyggtygtttgttagtaggaggyggagtagttttagtaagaatygygggttttgtaayggtaatttggtggatattttttttaaagtgygtattttyggttttaagaagygtaggttgyggygttaaggtttgtgggggttatggtygggagatgygtttygggtygtttttttttygtttaaayggagtttttttaggttttttttttttttyggttttttyggtttatttyggtttyggttttttttttgagtattttgggtgtygtygyggggattttggagttygttgtygggtaatttgtagtygtygagaagtgtagtygttagagatggtaagttggttgtttttygtyggyggtttttgtttttygygtttttgtaggttgggttttgggaaatttgttttttttgagtttyggtttttygggaggatagggattggtattggttttggaaygyggggtatttttttttgttatattyggggtygagttatygttyg

SEQ ID NO: 7925 - DNA, 395 bp, synthetic construct
  misc_feature 1..395: note = Description of Artificial Sequence: Synthetic polynucleotide
  source 1..395: mol_type = other DNA
yggyggtttttygttttttttttatttttttygtttttatttttattttttggtygttygaattttygatygggagtttagagttttgttagygtygtattgtgygtygygtaagtygttygatttttttagyggtatyggttttaagtagtaaatatttgtgygtttttgagttagggaygygygtggggggtgggygtgtaygygggtgggttagygtagagtgggagtttgtgggtgtttttygtygggatttttaatttagttgttttygagagtttaagttgagygtygtaygtgttygtgttatttgttgtattggaygtagtttaatagygtagagaggtttttattyggtatttagttygatgtgggtygtttttttttttttagyg

SEQ ID NO: 7926 - DNA, 265 bp, synthetic construct
  misc_feature 1..265: note = Description of Artificial Sequence: Synthetic polynucleotide
  source 1..265: mol_type = other DNA
ygtyggattygyggaaaaggtygttggaagttttttttgaagtyggtagtattaagaggattaataygggyggtgggtatygtttttattttttygttggttttatttttygtygttygtttttgtttttttttttygtygtttttttttttttttttttttttttttttttgyggttyggatatttttagttygaattyggyggtttttgygtttttgtttygygtttttttttttgtatttgtttygygtttaggtgttttyg

SEQ ID NO: 7927 - DNA, 1169 bp, synthetic construct
  misc_feature 1..1169: note = Description of Artificial Sequence: Synthetic polynucleotide
  source 1..1169: mol_type = other DNA
ygagttygygttaagagttaygtygagaygygtygtyggtggggttaygygagatgtaatyggagagtttaaaattagtttaggattaattttttagggattygtttaatttttttygtagaagagtttaagtggggtagtggtygttataggttgaggatgattttyggaygygttttaggygygatygtattattygtttttagtttaaagtttgagtgatttggtattatttttttaattgttttttatttttttygtatttttgttgtgtttatygtttttaygtatttgagagtttaaattatgttaagaygatttggagaaaygttygatttgttttttaagttaygtaaggatttatttagaygtaygttygygyggagaygtaygttggtataygygtttatataygygagtatatataygygtatattattyggttygtgygygygggtygttgtttttgttgtattatgtaaaggtggttgggaaagygygttgatttatatttatatagtttattttttttttatagtatgtgattaataygtatttyggggaggagggagygyggttgggggtgttaatyggaagggaatagatagtgagtgttattttgttgggaggttttagaagtaaagygttaaygaygatagtagyggtggttttagttttattagtaattgtygttggtaggagtattataygttttaggagtttttygggtattaagtatgggtttagttygttttagttattttttttttttatggttttattttygttgttagtatttygattttagtttgtaattttgattttgggtttgattataaatgaygaaagatygyggtagtttttaaagtgygggagygagtttygtattggttagygyggyggagggatttttttaggaggttttaagtttttaagtttgtggagagatttggtaatagttggtaaggtttgttttagttattttygttggttttttgtttttgtatttagygtttgagggygttattygttttttttttgygttttaygtaagyggtttaaggaatttattygattyggatttygtttygtatgttttttaagttttygttattttygtaggygttttagaaaggygtgatggttttagtttagtgttygttagttyg

SEQ ID NO: 7928 - DNA, 1743 bp, synthetic construct
  misc_feature 1..1743: note = Description of Artificial Sequence: Synthetic polynucleotide
  source 1..1743: mol_type = other DNA
ygttttygyggttgttttttttttagggtygtyggtggtttaggatttggttatyggggaggggygtggttttgtygaagtygatgagttataygtyggygygatggtagtgatygtgtataaagaggagygagttgtygattatttgygagtttygtatygttaggtygyggttttgtttagagaygtttttgtygggttttygttttagttttygyggttygggtattygggtagtygtygtttatttygtgttttttgaagaattyggatatttttagggtgtttyggatttgttgtaggyggtttagatatygtttttgtagagggtggggtgggagaggagggtaaattaattaaaygttaaatgagtttttgttaaygatgaggagtygggatttaygttgtgtttggtaaatgtygttaggaggaggatttagggtttygtttagygtggtttagaagggaaggagygtagagtagttgygagttagygyggtgagggttatggtggggatatagtygagggtattgggttagatgataggggtagttttyggttttaggttttttaatattttagggtttgggatttygtttttattagtatttttttatttttttgtataaattttttaaagaygygaagtatttgttttyggtttygygtagttttgaagtyggtgttgtaggagtygttygttttttggatgtgggataggagtgttaggggtttygggttygttagtggggaagaggatagygtagagtagyggtattttttagttgtaggggayggygaggyggtgggagagggyggaggggtaggyggggygggagygggggatygggaaagatagygygtagtggggttgyggyggtgttagygaagygygtttgttttattttgatgttttygatgyggaagtygagggtggtgttggagttgatgttttttygttattgtatgtagygyggtttggtgayggygygttgygygtgtttttttttygtgggagttttaggatttatygttagtatttttttgtatatgttttttygtagtttgggtygtttaygggttttggttagttttttttttaggtaagttttgtgggggygtaggtagyggttagggtatgagggggygtatayggagattttttygagtattygtttygggttttttttaagtagttgtttyggtttyggatttttatttgatttttttaatygatttggtagggtaygtatatttgaygtttattttgtagtygagtatataaggttygtygaagttatygagtaggttttgtagttgtaggtagttttygtygtygygttttattaygtygtggaaggtaggtaygtagtygygtagygygttagttattagtygygttaggtagtagygtttyggtttygagtagygttttaggattagttygttggtgttygtygttttaaaattttttgaggatyggtattygttagygtygtttagttttttttygtygygggtattygtttattygttttattgtttattagtgtgttttgttagttgtatttaggygtagygttttttgaaagggtttatgatyggtagattgattatggttyggattttttgttagtggtttttttgaaagygatagggttaaggtttgataatyggygtttyggtaatgtataagttttttttttattgaaatagggtttygttaygttttygatttatyg

SEQ ID NO: 7929 - DNA, 2405 bp, synthetic construct
  misc_feature 1..2405: note = Description of Artificial Sequence: Synthetic polynucleotide
  source 1..2405: mol_type = other DNA
ygggggaggggtataygtagttttygtgyggaaagatggtgttttttttttatagggttgygygggtatttattttygttgtaaagygttygggttaggygyggtttgtttygggtyggggygagttygttgttttttgyggtagatagygatgygygtttttygttttagttttyggttygttyggyggttygygygttttttyggtgtagtatgygggygttgtgaygttttyggataaatgtygtgtaattgtgtaggygaatgagagttaaaaataagaayggaaaatttattattaaggtattattgygttagygtagttatttgaaggtttttatggttttyggygtttgygtttgaagttygtttttaggttttggggggtatttgtagaaaatttttagtagyggttygttaattagattttagggtgtayggggggtggygtyggtaattatggtaatttttaaaataaaataatataaaataaagtaattaaygtttattaattattattttattttattttttgtattgtttttaggtagttggggaagtygtygggagtgtagtyggatgttggaatttaatgtgattyggttgattatgtaaagattaggattggaygtttttgtagttttatttygttatttatttttttttttttatttygtattagaaataaagtggggggggggggygagtttttggaggagaaaatgataattggtatttaattttaggtttatagtgygtygyggtggggygtaaagaygtaaattttygggatggygagttttyggggttttattgggttaaaygaaaattgatttgatttgttttttaatattygagggagagaaggggagatgaggggagggagggtagggtttgagtgtgtgygtgtgygtgtgygtgtgtgtgtgtttggggagggggaggaggtattaagttgtagtttgygygyggttttgygtttyggyggggttgygtgygtgtgtttttgttygygttgttgaaaygggtttttygagggatyggygttatatgatttygtttgtttttygttagygygtagatygttagttttttagtttgttyggtatyggaggagggtygggyggtatttttygggtattggggttttgyggagyggagaagaggttttagyggggaatggtatatttggatttaagaagtygyggttyggygttagattttggagtgtagatatttggggggaggggagagttagagggagygagygagygagygttagagagaggtagygygtagygygtayggayggggggttgttgygyggagaagatgtaagygygtggggtttygttggtttttgagtattatgtagaaggggattyggttgaatgatggttaygtygygtttttgggattgttggygygtaaggayggtaygygtaaaggttatttgagtaagyggagttyggataatataaaatggtaaattaagtggttygygttgttgtagaatttgtttttttatttygagagygattygagttygyggttttyggggttttatttgttggagggttgygtttgygatygygygtttttttttaagtyggygttgtyggttaaggagtygttggagaaataggtgaggygagygtygygttttgatttttttgygtttyggtygyggttttgggggtttagggttttyggttggttgatggygtttgaattttggtttttttatttttggygttttaggygttttttgtatttttagygagaggggaggtttgtttttagttaggygagtgattgyggygggtagagggggtagggattgagggyggggagtagatgtgggttgyggttgtttttygtyggaygagtttygtgggaggygggtatagaggggtygatatttggagatgtagaggaagatggggttttaaggattagagaygatgagtttggatataygtttagttaaaaatggtgtttttaatttttatttttatygtttagttttaatagtttygatygtttgttttatatygggaaygtgtaatttttygygtttaggtatgggaagggtaagayggaggygttygagygttgttagtttttgtttygtygtagttgagggyggagagyggtttgygttagtttttyggagttgggttggggttatggggttataygggtyggttyggtattatygagyggtggtgggtttttagttggyggtygtyggagtaataagtttaaagatttttaaggatygttttgatgygtyggggttagggttagggttgttgyggaggtagygggaygaagtgggygttttttttttttttygttttttgygtygtygtygtygtygtagtygyggttatagygttgyg

SEQ ID NO: 7930 - DNA, 1920 bp, synthetic construct
  misc_feature 1..1920: note = Description of Artificial Sequence: Synthetic polynucleotide
  source 1..1920: mol_type = other DNA
ygggygttgttttttgyggtttttttygtygaggtttgtgygtggyggggtttttaggagyggtagttygtgyggtttgggggyggtttttttttygtatygtagyggggygtgtaaagygtttgyggttgtagtgtgggygtttattttaygtgttyggyggygtgygaggagtagtaatattttttgtgggygatgaaggtggataggttgttgaatttgatgttgtaaagayggtagtatyggtggttgtygttgggtagyggygtyggygtgtttttgttgggagtttggaygtttttgttygagtaggaggggggygtyggygggggyggtayggtttygggygyggyggtyggggaygggggygggtygggyggyggtttttggggtttygggtygaggtygtttygggggttaygggattygggttgyggggaggyggygggggygggagygggygaggggtygyggtyggtyggygttygggtttygattttygggtyggttaggggygygtygagtagtaggtygtgygttaggyggaaatgttttagtaggttttygygtatygggtygttyggggggtagtaggggtaggyggyggygggtaggtygagygygtygggyggtggygtagyggggtaygagtattttttgtgygttaggtaggtttygaggttgtggaagtttaygyggtaggtygtgtattygtggtagtyggttagygtyggtgtyggggtttyggggagygggygtygyggttttttgtttaggtygatggggtygtyggtygyggggtygggygagygygtaggggygaggtyggggtygttttygttttygttttygggtygyggygattygggygygggggygtggtygggyggyggggggggyggggygtyggtygygtgtagttygtagagtttgyggygtttgygygtgygtataggygyggygggagagggggtygggggygyggtyggtttagggggtttygggggygyggtyggtyggygyggyggygggtygtggygygaggygtagtagtatygtttgtgtayggtgtaggtttygtggyggttgaagyggatgttgtaggtttygtatagygtgyggttggggtygtttttygygtygtttayggagttattygggttttggttgttttygttgtttyggtygttygygtygttttygggygtggtygygtttttagtttttttttygygygtttyggggttyggggaygagygyggygygtygggttyggygggttggtyggggggygygygggtygggtyggggggygttttgggtttgygygyggtaggygygttttygggygtayggyggtttgaatagtagaggygtttgtgtaygtagtagttgttgaygttgttgaaggtgatttygtattygaagtaygtagygtttttgggggtttyggggaagagttyggtttgygygtygtyggygttygygttygygttttgttgtagtyggttgtgtattagttyggatattttggttaggattttygaggyggggggygtygygtygggttygaataygtattgyggaaggaatagggtttyggttaggtttagttygtygggtatygggttggagttyggygtggggttggatagttyggttttgattttggtyggggyggggttgygyggygayggygttygygayggggtttggggtttaggtttttyggggtttaggatgggggtygttttyggtttttttatygtttttattttgatgtttttgggggtygtygggggttygttgttgtttttattttgggttagaggtttygttttggttttttygttggtggtttyggttagggtttttttgtttagttttggygatggggtgggygttaggtttaggttygyg

SEQ ID NO: 7931 - DNA, 1403 bp, synthetic construct
  misc_feature 1..1403: note = Description of Artificial Sequence: Synthetic polynucleotide
  source 1..1403: mol_type = other DNA
ygttygttttttttaggttyggtgggattagattygaagttaattttygttaggygttaggtgtagattttaggttaggttagagtagtttttgggttttyggatygggatgttygttttgtttttttttttggtttygttyggtttgttatagggggaggtttyggtttygtatttygggtagygaatttygtyggtygaggttagtttygtgygggggtttttygygggatygatygttaagyggtattgttygtttygggygttygttyggttttagaygtaggttttgyggtygtttygtgataagtatattgaygggttattgttttttgaygagtgttaaaaagttygtttgttttgaaygttaatttttaagtgatttttaygaggttttttttttyggttttttygttgttgtttygttygtattyggtttttagtaggtgtttaagaaaygtttagtaaayggtagygtaggygagtttgttttgygygttggygygttttattgtttayggatggygggygattttaygggattttyggttygtaggattttygttttygaggttgtttttgggtygggaggggttattttagaggggygtttattttygayggygggggtyggggygtygygggtaggggagggygtagtttttaagtagttttagtttggtttagatttygygtttagygagtyggtyggttaggtttatattttttatttgtygttygttttaggggaagggttttttygaygaygttygagtttttttttttttyggagggtyggaggtyggygtttattggtyggttttgggygaygtttygttttttygaygttaygggttaatgagygygygttgttagtttattagtygggttggttgggyggttygggagttygagyggtggyggagyggygagtagygagtagygtttgygggagyggtyggtyggtygggttttygygtttygtaygttygtaygtttagyggggttygtattgagtatgggygyggyggtygtgygttggtatttgtgygtgttgttggttttgggtataygygggyggttggtygggggtagygggtttttaggtaagttttygatygaggtggggggyggygggygyggggggttygggyggtygaggygyggtttyggagggtttttttttygyggatttygagttygtttygygyggtttygygttttttgtttttttgtaaagtaatttttagggtyggttyggggygtttttttttygtagttygggyggtyggggtttttgagttyggyggggtygtattaggggtgggtgggtyggggtttygggaggggaagygygagygygggagygaggaagaaaggyggyggttttyggggatttygyg

SEQ ID NO: 7932 - DNA, 1088 bp, synthetic construct
  misc_feature 1..1088: note = Description of Artificial Sequence: Synthetic polynucleotide
  source 1..1088: mol_type = other DNA
ygttgaggggtygtatttattygygtaggtattagtaggtagttttggygttygygggaggyggtygggggygggggtttttyggtgtttatygtygtttttgyggttgggttygygtttygggtyggtygagtttaaygttaggatttygttygagttttttagggtttygttaggygtygygttygygttygygtttttttgtyggtttyggttygggttttatyggggygtagggttggggaatyggagtttygttygtygattyggagtatygtttaygtagattygtttygggygagggaggggtygggygygtattygyggggagggyggygagyggggattagtygaagtygggagaggggygtttttayggggygggaaattggygygygattttgggggaagtgtaggatggggggataggggygttttygygggggtggatgggggattatagyggggttggyggggtaggggtyggygtaygaggttggaggaggggagygygygtttttattygggttgggtygtygaggttygyggygtatygtggyggyggtgggyggaggggggyggggggtatttttttttttttgtggygtaggtgggygygttttggatyggtttgaygattttttttygtygttttatttttttggttaaaggtttttagtttttaattagggatatttttagtttatagtttygaagttatgggtttttttyggttttttgaagtygttatatttgtgttagtyggtygygtttttagattttttttygyggagtttttttagtatttggagaygtagygtagggtttygaggayggtttggttyggagaaaagatatygaagttttaattttttttaatttygttttttttttttttttatttttttttttygtttttaaagttygggggttttatttttttttyggttygyggagtttttygaattttgyggggattyggygttyggyggtgtttttttggggygtayggggttggggygggagygaggagattaggtggggaggggattttagattttagaygttaggggagayggygtttttyg

SEQ ID NO: 7933 - DNA, 1812 bp, synthetic construct
  misc_feature 1..1812: note = Description of Artificial Sequence: Synthetic polynucleotide
  source 1..1812: mol_type = other DNA
yggggtygttgygtttttttgattattgayggttaggayggttttagtttygttttatttgtaagttttattttaggttygagttttygagggtagggatagtttttygggtttygaggtttgattagagtttgaaagtttttgtygggggttgtttygatttagygaggygttaggttgttyggygyggttgggggygtttagygtygggattttagttttgtttyggtygttygttggtttagtgygtaygtttyggtagtttagtttttttttttayggyggtaggagagttttyggtatttgtttggggygggggygggggyggggyggggygggygtygygtttttttgtttgattggtaggaagatagattaatyggaggggtttttyggggggaggggyggtgtygtgtttgagtygggygygggygatygagggagttgtagttattygygtgyggtaygygtyggtygtttgttyggatygyggttattagtgtygyggtttttygattttygtttygtygagtygygygygygattgttattttttttaattgttttttaygattttttttgtgtatgtatttattttttgtttygttttgttttttttaaggyggtggyggyggygatagyggygtaagttygtagyggggagggggyggtyggaggatgyggygyggggttgygttygttaygttygttgttgttgttyggttygggtttgagygtygagtaggtgggtataggtgygtyggggggygggaggygagygttggttagagggaattygtggattyggygatygaggggyggatttggyggtaagggaygyggygatyggtgtygtttygttttatygtttatttttttttttttyggttatygygttttttttgggttttttttttattttygtattttattttagtggttttttatttttttatatttattttttatttttttttagatttttttgtaaaattttttagtygttgygtygttttttttaatattttttttyggtttygtttttagtttttagtttttttttaygttatttttatttttattttttttyggatttygtttttaagttaaggagygggagggggatttattyggtgtttgtyggagtggygyggggggtgtggtyggttygtttttttygtgtttttygtagggtaggttatagttttttagattttygtttaggtggtaaagaagatggagttgggggtygygtttyggyggygyggggttygaaggygaggtygtttagttygtattttattttaygtayggtataygtygtygyggtttttgttaygtatattttygygttgtttygtttaygtgggygtyggggaggaggttygagagatgggaagaaaggttggtatttatttttttgtygggtyggygygttttgggygtattggttttyggagatggygygtaaggattgattttygtggtgttagatattttgtygggygttttgygtyggggttagyggtttygttggtttgygttagtgygttgyggtttygttttttagtttttyggtttttygttttattttttttgttgtgggtttttgagtattyggtttgggtagtttagatagaggtygtttaygaggttggygttttttttygttttagaagtatttygtttttatatattttagttygtyggttttttgaaggttgggttagtttyggtttttygttagtttttgttyggttttttgagttttagygatattgtatttaatygttagttttttttygtygttyg

SEQ ID NO: 7934 - DNA, 5819 bp, synthetic construct
  misc_feature 1..5819: note = Description of Artificial Sequence: Synthetic polynucleotide
  source 1..5819: mol_type = other DNA
yggagggaaatygggtygaygataagggtggttattttygggtttttygygttyggtttaagygtttttgggtggggtagtttaaayggggagaggggtttygtgggtygagggttygaggtygtagygagtttagygtttggttaaatttggttygygygtttttttattgttttgttagggttgtgtgatttttyggagttttaygttttygtttaaatagtttttagygtttttgttggtattyggggygtttttattttagtttttgtattyggygygtygygygtagatyggayggaggggaaagttggtaagagygyggygttygygggagaaagygttaatgggyggtygggtgggagtagygygttygttygtttaygttaygtyggtgygggttyggttgaygatygyggygtttggggaygtyggygygtttygttygttaggtgtttygtttggaaatgtttttattagttgtygtyggtttttygttggagygygygygtygagttttygygyggagttttygygggttgtygggagyggtttagygttatygtaggtaggtgaggtttttygttttygttttygtttyggggtttygagattttttttttttttygaggaggyggaggtttygygyggtygtygaggggagygggyggyggyggttgyggygatttttyggtgygtttygggttgygagttgtttttygyggtttyggtagttatayggygygggygggagtttttttagtttaggtagggagtgggtttygtygtataaattttgygaggattgtttttgygtttaaggggataaagtttgttattygtygttaggttttttagaggtygttgygtttgttgtaagttgygggaagtagggtgygygggtyggygyggggyggggggtggggggttyggagtggttaggtttgagttttggaygttyggayggygtttygtttagttttaggtygtatttagggagtaagyggygggggygtagygggagagaggagggagagggtygygggtttttatggagggyggttgggaatttagagatttatygtttgtttttgtggtttttttttttattattggtttygagggggtttyggggttgtgaggaaatgatttgttaatttygaggttygttagtgyggygttagygatygtgaggttttttaaatttatattttagtygggtgtttygagyggtgggygggtataggygtttttaaggtttttggttttaggttttagaaagaaaggtttttgtttggtgtttygggttttyggtttygtttttggttggagttaatttttttgggttggaaggagtttttttyggaygagtttttggtgyggggaattggtggtttttagggtaatttttgaagtattagggttaggttggtygaagaagggttagggttyggtttgttttttyggaggttttttatggtttygayggttaayggtaatttygttaaaataggygattygtttgygtttygygttaggggttgattattttttgttttttttgyggtttgtttyggttttggtttttygtttttyggagygttttaggttagygggagtattttattttttygaagttgagtyggtgttgtgtatttygggagtyggttgatttttggtttatttgtttaygggtgtatttagtatygggggtttttagagggaggaaggtttagtatttygagtttatgtagaygygtttagttgatatttgagatgttgagygttttatygttggtgaaagggatattgggtgttttygttttaggtttggttttttggtgaaggtatttggaaaatattttagtattatttatgggagaagggtggtttagtgagaattttyggtttgggtaggygggtttaggttaggttatagggttttagtgagatgtttyggtggtygttaatttataggttggattgattttgtgttttggaatgagtagtggggtttgggtgaggtygggygggttaggaggttttttgggtagttgygagtttttygaggtagggtgattgtgattgggttyggattttaggygttggggtttgttggygggtaggaagtggagygtgtgtgtgyggyggtttgggaaagtygatttagaggttaggtttttgggttayggagaaagggtygttygttggtggggattggagygtygatttatgtatataggttggaaaggtaaaagagaataggagaaggtggyggtggtggttaaaggaagttttygaaagggtttttaygtattggttgttttgggaagtggaggttgttttttttagattttgtttagaagatgaatggtygtttgttttggggtttyggttttagttaagtttygtygggtttggaaggaaggaaatgtattagttttaggtttgggtgggttgagttgttgtattagagtttagaggtgtagggtataggtggttgggtttttgggttttggtttttttttttagtyggyggagtgtttatagtygtygaggttaggttttygagtataggtgaggaaaggataagttatagttgaatgttttttttttgggggtttttattttttattttagtttttggttyggttgggtttatattttttttttagtygggttttattatttggagagagygagtagtttgtaaataataaataatgggaagtagaaggatgttygggaaaaattagaaaattgtaaggagtggggaggagggagggtgggagaggggaggaaggagggtgggggaggggaggagtaggaggagagggaaaggggttgagagatttatttttagygagaaatttyggtggttagttttttattatttataggaaggtgatattagygatttaggtgagaaagaaagaaaygyggtttgtygygaaattaatatagaatttagaaataattattaatgttatttgattygtgttttttatatatttttygyggttatygaygttaaattgtttgaataatttgtatggagyggttatttattattttygatggtttttttttgtaagtagttyggaygtggttygtttyggtttaaygygatyggagaattygtatttttatttgtaaattaaagtaattaygtagtagatattatatgatgtgtattgtggtttttagatagttattaattatttttaatygagttgttaaaagagtaggtagatttygtttttgggaggtaggtttgtagttggggagagggygaggaygttattattaattagagggtgattttggggygatttataggtttgaatttaggaatttttttgagtaagtttgtataaygttgttttgtayggttttttttttaatttattaygggaggtyggtttagggggygagggtaatyggggygagtttyggtttyggagggygatggygtagaaggyggggaaygggttygggatggttygggygtttttttgtygtttttttgtygtttgtttattggttttygttttgaatttgggtaaggttttagggagggtattggtygagggagttttggggtgggygttyggttttttttttygattgtttygtgygttttagatagaaagttgggtaaaatggataggggagggygttttygttaggtatttaaygttttttttttygtagttagttttgyggggygtygggagggaygagtttagygggaggggtyggggtttgggttgaggaatttgttttttygagygygtagggtygttyggtagttttyggtttagtygygaggggtagggggaagtyggyggagtayggtyggyggaaaggggatyggggaggaaagtyggggaggygaggtgggggyggtgggttgagygggaatttaaaagatygyggtggagaagatggggygtttttygygatattyggttgtttagaggtgtaaagtyggtgggygtaygttyggggyggttttatagttttygggtygttagttttagggtgtygggttttaattaaggtttygaagtttttaygtatttgagggtattttgattagtttttgygggttgttttgyggtygtagtgggttttgaaagtttatttyggygtagggtggaaatyggygggaggygttgttgattttygattaaataatagtgaygagaygygtgyggggygtttgygagtttttttttgttattyggagtagagygygttagygygaggtygggtyggtygtttgygtagygtygggttaattttaattgttgattatatttttagygtgtttttttataggttttatttgtaattgagaygaatgattatagtggggygggaaggagtagttgtttattaattaatttttaattaaaagtgtttttygttttygggtgattaaagagaaatatygttygttgggygatattgattyggatggaatttatttgttaaygttyggaggaatggttttttygtttatygygyggtygggattgttttggtttttttyggtttgagtygtyggygagtgatyggygagtttgyggttaggtygggttgygygaggtggggttgaygttagagtttttttygttttaagtygygtatatttgatttgaygggttygygygattygtttttttttttttttttttygtaaaatatgtatttttgtygtygttgygaggtygttyggttttagagttttttygagttttyggaatgygaagttaaaggaatygyggyggttatygttgtttattttgttattyggttagaaaagtttgyggagygyggggatggattaatyggtttttttgtttygtttttttagygtttagaagtttgtagtttyggagtagtggtygygttaygtyggttttagygygtagaattttgtaggtttygttygttygtttygggtygygttygttatgttttattygtagtttggatatttttatttttyggttttttaggtaagyggagtttygtttygtttaggttatygtaggtgtyggtagggyggatggggyggggayggggggtggggagtgttygatttaygattgtttgyggttttygagttagtaaggtttgggtygygygttttttaygtttaatttttgttttttaaattttyggggaaaggtygaggygttaagaaaattygaygggtygggttygggttttttgatgtttgaattataaggtttaggttgtgttttaggggagttttaggattttaaggaatttttggggaaggaggtttggygygtaaatggygttagaggttttggaaatttttyggggaagggtgtaggtgttyggttgggttttaygtggyggaggaggttagaygygtataagttagtggaaaggggygagtattttggtgtggayggygggaggttygggggtattyggggtaygttttygtgggyggygygygggattggtaaggtttagggttttagtttttagttyggtttttygttagttttygyggtttttttttgtagtttttgatggttattaattttttgagtaygtgttgygagttyggaggtygtaygttggyggatttygggttygtygtttyggtttaggygtyggtttattgttyggtttaygagagtyggttgttggttatygygygttaygagtttaattyggtygyggygttgggygtttatgggggtttttatggyggatygtagggttatggtaattaygtgatttayggttyggaggygttygttttttattyg

SEQ ID NO: 7935 - DNA, 2001 bp, synthetic construct
  misc_feature 1..2001: note = Description of Artificial Sequence: Synthetic polynucleotide
  source 1..2001: mol_type = other DNA
ygttttygtttygtgttaagygggtttaaggttygaggttttttygtttataatttyggtgttyggaataygttttygaggggtygtgttgtyggggttattattygygattggatttygygtygtgttgtttttttygggtttygagttygtttagyggtttgtayggtttaggtttgagttgygggttttttttgtggggygygttgggagtgagttttatttttaaagtttattttaaygttttaggtatgattaygayggtagaggtyggtygtttattttygttttttttttyggttagagygtttttgtygggagtygaygatygyggtttgatttygggttttatygtttattttyggttttygttttttttttayggttaggggttatatatagyggaygtttygtttttagtygtttttttgatttttgaatttgggagttagygtgttygttggggtatgtattgttaygggtattgggatttttttgttgttgyggggaggagtttygayggtaggtgggaagatttagtttgttygygttttygttttttagtttttgygattygggtygaggtttttagtttttgggttttttygtttygggtttgagggaggggtygggttttygggtttgtagattygttatygygygtgygtatgygtyggtygygagttttygggtgtaggtttgggyggtttyggttygygtatttgtttaggygttgyggtttagygygttttaatttttagttygggyggagagygggggygggattgaagtatygtgttttttaaagtattttttygtygtyggtagttttggtttygtaaatgttttagygygtttaggygtaygtagagattggygyggtagttttygggttaayggtaygygagtaaagttggttggygatttgggataygtagtagaagttgaggttgtatygattttygtygtttygggggaggtatgggttygggtaggtttaggaggaagttgtatagttygaggttygggygggagtggygggtygygggtaagggaaygtatatttggaaggggttaggatttyggttggagtttggttttttatggygaggaagtygattgggaagggttttttggygaggtttttttgttgtgttattttttttyggtagygtygggygyggggaaygyggggttgtatyggggygggggagggggttttattyggyggtttygaggattygattttggggtygggttyggygggtaggtttgtttaggagttagttggtaaatgtagyggattgttaygttattttattgttattatttattgtaaattattgttttaagttttygggagaattygtygaatttgagaggggggagggggatgggggtgggygygtaggaagttttataggtattagggattggtgatttaggatattagtttttygagttttttttgggaatttttagtatttagattgtttttgattgtagggattayggtggggygttttttttttaagtttttttygggatatygggygygtttttttygtttttgggttagygtatatttttttaygygatgattagtatagttattgtgaggttyggttttggtygygtttgttttttgygagtgataataataaaaattattggaattgtaaggaagtttttggtttyggttttttagtygttgttgttttgggtgtttyggttgyggaaagatttygtagtygggttygatttaygagtggaatatygggttgyggatttagtygggtttataggattggygyggggtttyggggataggtttygtagggtttttttgygtatygtttgggaygtygattttgttaatttggaggataatttttgtttttattttattagtagatttttaaaaatttagtygtygttgaaaygtgttttttattygttyggtttgtttgtagtttttgaygagtttyggtatagttttyg

SEQ ID NO: 7936 - DNA, 1265 bp, synthetic construct
  misc_feature 1..1265: note = Description of Artificial Sequence: Synthetic polynucleotide
  source 1..1265: mol_type = other DNA
yggttygggygttaggtagaattttagttygatgttgtygtygtygggggagagggaattygttgggagggatagtygggggttggggaaggaagagygggtgttgggagggtttaatattggyggagttttaggtggygaygygggyggygagagttgtttygaggygggggtttygggtaggtygttttttaygtagtatayggagtagaagatttgttttttggygagggaygggygtygttgatttagtaygtttaggattagttygtyggyggtttttaygygggttttgggttttagtttttygtyggggggygttttttgttgtttatttttttttttttttygatttttagttttttttttttttttttttagttttaattgtagtggtaaggtttggggattgagaggttyggtgagtgttagtttygtaggttgygtyggtgttyggtttttattttagttygggggttttaggtttttygygggttttggggygttggtgttygygtagttttagtygttttygtagttatygtygttyggtttygyggaggyggygygtagygggggygttygggygttgtttttttgaggtttygggggtttagggtggttygtagtgttattggttagggtttgygatttttggggttygtygtygtygtttatygtgttttgtttttygtttatygtygttygyggttygygtygtygttgtttatttagtygtygggatttttattyggygttygygggtagygggggtagtggttyggttygattygyggtttygtttttgttttygggtttttttttttgggttgggaygttttaagtttttttyggggagttygtgtttygaggttgyggygygtggggagtttggttyggttygtygttttttttygtattttggygyggyggggtatygtttygggggygtygagggtygttygttttgggttygggygygttygttttatatgtagttyggggyggygtygtagttttagygagttttaggygggatagaggggtttgggaggagayggtygttagtttygygttattatyggtttyggttgtyggaygygyggttygagggyggtggttaaagggtygaggggtttgtggygtygtygyggygygtattaggaggtgtagtyggagygttggttagtygtagggtttttgggggagaggtyggagygggygattttttttttttygygttttatttatagtttttttygtyg

SEQ ID NO: 7937 - DNA, 1360 bp, synthetic construct
  misc_feature 1..1360: note = Description of Artificial Sequence: Synthetic polynucleotide
  source 1..1360: mol_type = other DNA
ygtygaggatgtggttttygtttttygtagtygtygtaggagtttttgtttttaaagyggtaggtaggggttttagygggtttattttaatttgggaaggtyggtgygtttttttatagatttygtagggygttttttttggggattattgaagttttggtatttttaattttagttttttygygttaygggaaaygaagaygatatttttttgaataatttyggatgtgttattatagaggggtattttatattggtttttattttaatttttatttagtatattgtttgtttattttttaaatttygtgyggattgyggtatttagtttygggggattttttagttttgttttttygattygygtaggtgygttygtttatttaagggtagggaggtatgttttttygggttttttyggtygtatggtttgtttgtttttttggtttttttttttygtattaggaggggygtgagatagttaggtygatttttatttyggtagtttgyggygatyggtygtttygagygtagygttagatatttgggttggggggtgttagtttgaygygtaggaagggygtagyggygggagggggttttattttagatttgggaggtttgtttggygtyggttttygttygtttttygtyggtggaggtygyggttggyggagatygttaagttagaggaggggattygaggtttyggttgggygaaggttttggagggggagaagayggtygaggygtggaggggtagtygyggyggggygatttttatttgtttattgyggggtttgttygtggggtyggggtagatttygtaaaggaygygtagtttgtaagttygyggttygygyggygyggggatggggagygtgtgygtygaggagygygygtygagtygggttttygygtttgtgtggtyggttggyggtyggggttygtgtgtttttgygyggyggygtgtgygtgtgygtaygyggggattaygttygttyggagtygtygtygtygtygttattttttgttyggggtygagygtagygttttttttgttygtttygygyggygyggtagtttagtttggtttygttttgygggagaggygtygttttygtygygaagttaggttgggygttggagggaggygatygattatygtttttttttgtttattttataggttggggagggggtgttgtaggttaatgagygttygggggyggggttagatygagggyggtgyggtggggggygyggtggggggygtygggttgtttaattygattttattygtagtatagattggagtaggagttgyggygggaaattttagyggygggggtygggggyg

SEQ ID NO: 7938 - DNA, 362 bp, synthetic construct
  misc_feature 1..362: note = Description of Artificial Sequence: Synthetic polynucleotide
  source 1..362: mol_type = other DNA
ygygggggttatygygttygygaaygtagagtttataygtggattttygygtttgtgatgtttygattygtttygggttttygtatagataatgtygygygtttttttygtagttatttygggattygygtttygygtygttyggaygtttttttgygtttgtyggggatatttatygatattaggaattttagygtgtttatatagtttygttyggttttttggagttygttgagtaygtataygygtaggygaagttgtttttttaggtttttggygttttyggygyggttgttttygyggttgttttygtttatggtyggyggyggtgygtagygyggygttgttygtygtgttgagyg

SEQ ID NO: 7939 - DNA, 2566 bp, synthetic construct
  misc_feature 1..2566: note = Description of Artificial Sequence: Synthetic polynucleotide
  source 1..2566: mol_type = other DNA
cgtttttaacgcgggagcgtagtgtattttagtggataaattcgagaatcgtacgttgtttttcgtttttatttttgtttttttcgttcgcggttttaattcgggatttaaatgtacgagttcggtgaatgtttcggtaggagggcgagggtttagaggtagtttgtttagtaaaaacgatagttgtgttttggtgggttttgggttattttaggtagaagttagagaagttcgagaatttcggcgggttggtaaagtttgtcgagaagggtttttttggatatttttattacgggttttaggttcgaatttttttttttatttggttttggagttttagatatagataagtttcgggcgcgtcggcgggcgtatgtgcgtgtgtgtttatagcggggtggtcgtcggagttttttaagaattttagttttttcgttttagttgttcgttagttgtgagcgttcgtcgggttcggaggttattcgtaaatagttgggtcggtagttgggagtttgggaggtttttgtttagtttcggggtttcgagaaaggagaagggggagcggagtggttgtttggttgtggttttttttaatttcgtttgcgaagttttcgttgggagttcggagttttagtttttttcggtagtttcggttttcgcgttcgtcgcgtttagcggtcggcgtttcgtttcgggtttcggggaggaggcgcgtcggggtagtcggttaggatattgcgttgttggtttttagagttgcgggcgcgtttggtcggttttatttttcgggttgttggggcgggcgtcgttgtttcgatttcggacgcgcggaattttggagattcggtcgtttttcgttagggtcgcggtgttgttttaggtttcgggcgggcgttttttttcggttatcggtgtatttcgttgttcgtttgcgggaagcgaagaggggttttttgatttgtaatatagaggaaagcgtcgttttcgtttagtttggtatttacgcgtttatacgtattcggcgtcggtcgggtcgtttatttgagttttaaaagttgttgaatttatatggttacgtttcggggagcggggttttagatttggttcgtttaggttatttgcgcggcgttcgcgttcgttcgttttcgtttcgcggcgtcggttttcggttttcggttcgtcgtttttcgtcgttcgtcggtcgcggggcgtatagcgagttagagcgcggtcgcgcggggttttatgtcggtcggcgcgtcgtcgtcgttggggcgtatggtttaggttgggcggttcgcgggggcgtatatttttcggtcggggcgcggggttcgcggtttttttcgtcggcggtatagcgaaggcggtagcgaggcggggcgtgtttcggcgttgtcgcggcgtagtaaagggttggggagtcgcggtttcgtttttcggggcggcgaggagggaggtcggcggcgttgtcgtttacggtgcgtgtttttcggcgcgcggtttttgtttttagtcggagtttcgcgtcgatggggcggcgttgtttagggtttggggtgacgcgacgcggacggacgcgagtttttttcgcgttgtcgggtcggggggttttgttagaggtttcgtcgtcgatcggcgttatttaagttgttcgggggtttcgtttgagcgttcgttttgtagacggtcgcggttcggagattggtaggaggcgggtacgagaggcgcgcggggcgagggcgtcgtggagcgcggggcgtggggacgcgcggcggcggcgtcgcgcggaggaggcgcgcggggatttcggggtttcgtcgttcgcgtttatcgcgttcgtcgtagagtcgttcgcgttgtttagtcgttttttttttcgcgtttgttttttcgcgcgttcgttttcgtttttcggagtcggttttaatttcgttcgttcggttcggtttacgttattcgtttttttcgtttttcgaacgggagttcgagtttttggtttggtttcggtttttgttcgtcgttttattttgcgggggtcggggtcgtcgcgggtggtggggggcgttgtgtttagtaggggcgatagcgtaggcggggttttttgtagtttttttttttattttcggtcgcgtttcggtttttattttgcgaaaggttcgagagaggtcgtaggttaggattggatcgtcgggcgtcgtcggatggtgttgttagggtaatcggatggtacgcgaagtcgttcgaggtttcgattcggttacgggggcgtttagtggattcggagagttattttggggagggggcggtttcgaagaaggattgggtgggggcgtatggagcgggggttgcgcgaaaagttttttggggcggagttgagttacgcgggtcgcgtaggagcgtttgttcgagggtcgtttacgagggatttttttgttcggttgcgcgggtttttgcgttgatgaagttatcgcgtttcgggtcggagtttcggcgtttttgtttcgaatttagcgaagttcggttttatgtttttaattatttaacggttttttatcgtttagcg

SEQ ID NO: 7940 - DNA, 572 bp, synthetic construct
  misc_feature 1..572: note = Description of Artificial Sequence: Synthetic polynucleotide
  source 1..572: mol_type = other DNA
cgttgttcgtcgggtcggtggcgtttatttcgtatcgcgttgtttcgttcggggtattatggtttggggttggattatgttttttttattttagtcggcgttttttatttacgcgcgttgagggtgcggtgagttgagtgcggggttaagtatgttttggcgtcgatttcgtttaggggtttaggatttggcgtttaaggggttttttggcgacggagattttcgacgtagtagcgattcgcggttgtttaagttgatttcgttcgcgtttcgagcggttttgggcgcgcggggtttcggggattggaggatttcggggggcggcgtcgcgtggtggtcggaaggggacgttaagttcggggtgggcgtcggacgtttttcgtcgcgtttgttcgttttgtttatcgcgattcggcgggtcgtgcggaagcgggggttgttgcggtttttgttgtcgttttttttgttgtcggtcggcgcgtttcgggaatcggcgtttaggtagttagggtttggagagcgcgagcgttttcggaggcgcgtggttagggaggatttcgattttttgggcg

SEQ ID NO: 7941 - DNA, 989 bp, synthetic construct
  misc_feature 1..989: note = Description of Artificial Sequence: Synthetic polynucleotide
  source 1..989: mol_type = other DNA
cgtatattttgtgcggttcgagtggttcggatggtatagtttaggtgttcgggttaaagttggtatttttaaagtttagaacgtaatttgggcgcgttagtataaattcggttttcggtttttttgaagttagttaagttcgtatagggtttttagcgtttggaaatttgagaggcgtggaagggtggggagtttcgcgaagtttttagtttttgggtgtttttcggtttcgcgggggagcgggtttggagttaaatcggtcggtcgtaggttggagtagcgggcgtcggagcgcgcggtggggatgttcgaaaaggagttagaggtttagtcggagagttcgagaatacgagggatgtttattttgtaatatggttttaagtttttttttgtttacgcggaagcgtttttcgttttatttcgggttgtgtagggtcgtttcggcgattaagtcgttttcggagtcgggtattggggagtcggtgttgcgttcgttgttggagtcggggttcgattgcgtcgttaggtagtcgggttttttttgggcggttatggtgggcgcgtagcgttcgggttttcgttgtcgtcgtcgttttgtttgcgttgtcgttttcgttcgtcggtcgggtttaattggtttttagcgtcgcggcgttagttcgtttttttgtagtcgtcgacgttatcgttaacgtcgtcgtcgttattgagttttcggcgtattttagtttcgggcgtcgtttacgttattcgttatttcgggtcgcggtttcggttcgggtttagtggttgcgtcgtttttcgttagtaacgttcgcgcggaatgagcgcgtcgcgttgttcgcgtttttattcgtagggttcggcgtttttttttcgttcgtcgtttttatagtcgcgcgtttattggttcggttagtttacggggagtcgcggcgggcgggcggtttttggcgtttatatattcgcgcgcgtatatatatattacg

SEQ ID NO: 7942 - DNA, 2400 bp, synthetic construct
  misc_feature 1..2400: note = Description of Artificial Sequence: Synthetic polynucleotide
  source 1..2400: mol_type = other DNA
cggtttgatcggggcgtttcgtcgtttttttagtgtattttatcgttttcggttgggggcgtagtattttggagagaggcgtttggtttcgcgtttgggttgggggcgttttattttgcgttttgggggttaggggcgtttgtcgggtcgttgtcgaggggttttgtttatttttgtttagttcggagtttaggcgagttagcgcggcgagtttttttttttttcgtttgggtcgttttgagttcgcgttcgttttagttgttgtagttgttgttgttggcggttgcggggagcgcggggcgcgcgtcgaagaggtttgggcggcgaggacggggacgaggaggagtcggaggcggtaaggaggaagagcgagcggaggtcgaggggtttagcggcgtggcgataggattagggggtttcgagaatatgggttagtaggcggttacgggtcggcggtcggacgcggtgaatttgtcgcggtcgggcgcgtattggcgcggcgagtcggagtcgagcgtagtcgggggaggagggttggcgtaggggcgttcgggcggagggggtcgattatttattattaacgagttattatttaataagcggagagcggttcgttagtcgcgcgggaggcgttcggggaagggggttatcggtcgagcgtagcgtatattcgtggcgtacggcgggcggcgcggcgtcgaggatattcgggatcgcgcgcggagtcggggcgggttcgggggcggcgtagatttcgggcgcgggcggttcgcggcgttttttggttttcggcgttcggggttagcgtagttcggggcgagcggggcgcgggtcggggagggggagttgttcgcgtattttatttttttttttttcgggcgggcggcggcggttcgttgtatatatttcggcgtatttcgttaggtcgcgtatagcgtttcgagtttaggcgttttttcgtttttttttcgcgttttgcggcggcggcggcggcggtagtagtagtagtaatatggttgttgatgggtgtttggggtggcgttggcggcgggaggagttttttcgagtttttgcgtcggttgttcgttgttagttatggtaaatggtggcggcggcggcggcggtagtagcggcggcggcggcggcggcggaggtagtagttttagaatgagtagtaatatttacgcgaattattttagtttagacgcgttttttttttttttttttttttttttttttttttttttttttttttttttttttttttcgtttttggtttacgagtttaagatggatgcgtttattatttcggtgattatggaggtgtcgtgcgatagtcggggttaacgtatgtggtgggtttttttggttttttttatggtgatttttttcgggggtttttttattattttgttttggcggacgtttaagtatttgtggatcgtgtgttgttattgcgggggtaagacgaaggtaacgcgcgtttcgggcgttcgttttttgcgttagttttatcgtttttcggcgttttttgtagtttattttttcgtttcgcgtcgcgtcgtgtttttttttattttcgtttgtttttttttcgtcgtttttttttttttcggttttttcggtgttttcggatcggggtagcgggcggcgcgtcgggggtgaggagttgtttttagttagtgcgtttcgggacgcggacgtttaattttgtttttttgtttattgtagggttgttggcggttgcggttggggtcggggtcggggatttataggttcgggtgtcgtggtgcggggtggggatagttaatttagcggggacggaggaagttgggggtagttgggtgcgtgttttgtatcgtttatttgtcggggttcggtttttggcggtgggcgagagggagtatattcgtttatattttaggaatttgttggggagatgagttcgtggggttagaaagaagggaaaaattttttgggtaagggagagaataattttgtataagggaatttcgggggaggagtatggttcgagataatagggggatttcgaggggcgagagaagttggggagatttattttattattgggggtagtttacggggttgttatttttggaatgtgtcgaggtcgtatatttgatgtaattttttatttcgttttttaggtgttttagtggaatatattttaagtttttcggtttttgtttttttgtttttaggttatttattttgggttttcggaaatgttattagtagcgcggagttggagcgggagttcgtttgaggtcgcggttttacgcggagcgttttttttggcgttcgaggtggttagatgtcgtcggttttagttatttttggtgtagacgtttatcggtattgaggttggcgatattttcg

SEQ ID NO: 7943 - DNA, 1859 bp, synthetic construct
  misc_feature 1..1859: note = Description of Artificial Sequence: Synthetic polynucleotide
  source 1..1859: mol_type = other DNA
cgtacggaagtttttgtttagttgttagcgcgcgtcgttaggggttgtattgaagttgtggattcgggatggggaggaggttggcggttttcgaagtagggtttatagcgggggagggttagcgtcgtttggcggtggttgcgcgtggttagtgcggatttaggttcggttcggtcggcgttgtttgcgtgtggttcgggcggagcgagggtttttggagttcggttcgttttgggttttaggaagttcggcgtgtagcgttagaggtcgcgtgtgttgggggagggaggagtatagattgtgtttgggggtatttaggacgaatttatagaggggtggttttgttttatttagggggtgtcgtgggtaaaggttttggggttatttgtttggtgttttggagggcgtagggtaggagtcgtcgaggttcgcgggttattgtggggcgcggaattttagattaggtattcgcggtttaattttcgggttaggggattcgcgggggttttacgaatttgtttggtttatttgtgtaatagaaattcgttcgcgtttagtagcgttcggggtcgtttgcgtcggattcgtagtttagtatttttcgcgttttggatttcgaggaggttaggtagagagcggttcgcgcggttttcgtttgcgtttttagtttcgcgttgggtagcgggatatgtttggtttcggcgtcgttatttcggttttcgtttgtttttgagtgcggagttcggagtttttttcgcggtgcgttgggttttagagggttagaggttattagggggtcggtatcggcgggagtttagtcgggcgcgttttcggtttttttttatttacgtttttcgcggtcgttcgggtttaggggcgtagcggggaggagatttcggttagggtcggggagcgcgagggcggggcggggttcggcggggaggggcgcgggcgggcggggatcggggcgggggtcgggttcgggggcggcggcggcgcgggcgggaggaggaggagtttttcgcgcggggtaggggcggagcgagcggtcgcgtcgcggagttaagtgagttcgtttcggagtcgcgtcgtcgtcggtttagtatttcgggcgttcgtcgttttcgtcgtcgtcgttagcgcggggatgtaggatgtaggcgggcgttaggttttagcggcggcggcggtagttgtagtagtagtagtttcggcggcggtagttttttttttggtcgatggacgtagagtcgtcgtcgtcgtcgttttgggtttggatggtgtcgggttcggtcgggttgtttcggtttagcgcgggggtcgtggttttttcggtgttgttcgtttcggtttcgtcgttcgcggtttcgttgtttttcggttttttcggttggtcggtttcgagcgagtcggtgttttcgttgttgtcgttgttttttgcgttagatttcgtcgtcgtcgtcgtcgcgtatttttttttcgcgttttacgggtaggtaacgtgttttcgtttcgtttcggttcgggtcgtcgttttttttgtttttgggcgcgttttgttcggttcggttttggttttcggttcgcgcgttttttttttcggcggttttcgtcgttttaaatttttaggacggagttcggtagtcgtgtttcggcgagaaagttcgtgtttggacgttcggtcgtttattttcgtagttttggtaggtgttttcgggtgtttggacggagtcgtggagggattcgtcgtttaggttcgcgtggggatcgtagggaattcgcgttacgtcgggggttattgtttatcgcgaggtgttgaagtggtttcgtgatcgtcgcgggtcgtggttgatatcgcg

SEQ ID NO: 7944 - DNA, 902 bp, synthetic construct
  misc_feature 1..902: note = Description of Artificial Sequence: Synthetic polynucleotide
  source 1..902: mol_type = other DNA
cgggttcggttggtttttagtaggtttgtcggggtttttgtattttgtgttcgggatttttaatttgcgaatagtttggggaggttgagcgcgagttaggagcggattcgggggtgggggtaagcgttacgtgcgcgttaggtttttggtgtgttcggtaggcggcgttgcgtggttgcggttggtttcgagggtgcggggggcggcgattcgggagggaaaatttttgttttttttcggggtttgttttgttcgttttttaaattcgttttatatttttttcgattttcgtttttgtaagcgttatttgtagttttatcggttttcgtaacggtggtggtggttggtggggggtttcgaagtttgtttttggttagtcggatttcggtgggagatggaggtagaaatttcggttttttaggagaagggcgtttgtttatttttttatttttcggggtttggggagggggttgggtaggggcggaagcgagttggagtcgtgtttgtcgcggcgttgcggagtggaatagatggttggggaggggagagggtgcgtggcggggaggaggaggggtgcgggggtcggaggatagggaacgaggaatttcgaagtttggagttttttaggagaagttttttttttcgtttttttttagaaaggggggtatatatgcgtttgtttttttttcggagagttttggtttttgttttgtggtagattttgtcgcgtaattttttgttttagggcgcgttttttatttttaaattttcgtcgcgggacggggtggcggggttaggatcgttaggagcggttcgggtcgcgagggttaatggggtcgtttttttaggggcgaggaggcggcgggaaacgggttcggggtggggaacgagttttgggatcg

SEQ ID NO: 7945 - DNA, 2044 bp, synthetic construct
  misc_feature 1..2044: note = Description of Artificial Sequence: Synthetic polynucleotide
  source 1..2044: mol_type = other DNA
cggcgttttcgttttgtttgtatttttttttattgtttttttacgtttggaatgttttcgtttttgtagtttgtagatagcggaaatcgcgggtgtaaatgtgtaggggtcgttgatatgatcggttgtagaagtttatttagggttattcgaataggttagcgttcgggattgtataagaggttaggcgatgttgtgggtttttaaatttgtatagttgcgatattttgcgacgtgttattttatttttagtggggtggggtgggggatttttttcgtagttcgttgaaagcgaggtaggaattattgtaatttttttgtttaggttgaggtcgttatcgtttcgcggatgtacgcgttgtaggggcgtttttcgtcgcgggtacggcgcgggaagggatggggtttggtgggagtgggtaggtggcgggagaggcgcgtgttcgtgtattagaggttttcgtgcgtgatataggtcgatgagtttttgcgggttgtatttacgcggagttatagatcgaaaaggttagtcggtggtcggtgtgttaatatatatagagagacgttcgttaggcgcgttgtaggttgggacgaggttaggagggtttaggttggaggagggttgaggagggttgcgggggcgggtttcggcgtagggcgttcggagcggagggggcgggttcgaggcggggcgggtcgcggcgttgacgggttgtcgtcgttgtattcgtttttagttcgcggtgtcgagcgtaggcggaggtatatggtttcgacgggaggcgcgcggcgagtattcggagttcggttttttgtttgagtacggtagtcgcgttttcgttcgcgcgttttcgttttttcggtcggtagttcgcggatatgatcgtgtagtttttttttgggttgggatttgtttgaagattttttttatggaagcgatgtttttttagtaggagattttagggggatagtcggggcgttttttttttttgataggagtgtttcggttcgcgggaggtagttgtattaagaaggtgaggacgttgagcgggggttcgtgtttttcgtcgtcgtagtttttattgtcggcgcgcgtttttcgcgttcgttatagtagcgcgttaggcggacgtcgcgggaatttgacgttcgaggttcgcggtttttaatgagagttttagaatatttttcgtttttgacggttagcggtagcgtcgtcgtttttcgtagagcgttcgttttttcgtttttagagttttagttttttttcgagcgatttcgtagtttttttttcgtttttattcgtcgtcggttttgtagttcggttttttttttagtttaggcgcgcgggttgtagtgggcgatcgttttttttcgatttttcgtcgtgtttttgggtttttcgaagtggtttgggcgagtattgattgttttttggcggtgttagttttaaagttagggtcggcgatgtttgttcgggagcggtagtcggcgttgaagaaggtaggtagcggggttgcggcgttggtgggttcggtttttttatttgttcgtcgaggcgcggttgttttatagtagttttcggggggtagatatggggagtattgttttttatattagggttttggatgatttcgggttttttaggtgggggttatagtttgaggggcgattgtggatgataacgttcgatattacggggatatgtaggttcggttgggtttagaatcgagtagggtgggggcgggtgggttgtggttgggggttttgagggttgaggtgggggattttttttttgtattggtttttggtttttgggattttggtcgggttggatagggattcgggtgtcggtgtgggcgtgggggtagcgcgtgttttttgttaaagttgggagagggatgtaggtgataatttgtagcgttttatttcgataaatacggtcgttgtgttgcgggaggatttcgattcgggttaggtttcgttggaacggttttttgagtaagtgtacgtgggtcgcgggttgtcggtttttgtcgtttcg

SEQ ID NO: 7946 - DNA, 1152 bp, synthetic construct
  misc_feature 1..1152: note = Description of Artificial Sequence: Synthetic polynucleotide
  source 1..1152: mol_type = other DNA
cggcgtatataagttgaggattgtcgaggcgttttttgcgaggtaaatacgaagtcgtttggttagtgagaagaaattcgaggtggtttttggggtagatagagtaggatttgtttttgttttttgtttttttcgtttttttttttttagcggcggcgatcgtagtaatagcggtagtggcggttgttgttattgttttgtcgttgtcgagtcggttatttgggtattcgcggagtcgcgtcgttgttatcgtttcggcggtttttcggagtgcgcggagggggcggcggaggagcgagatatttatagtaatcgaggatgcgaggggcgtttagtagtagcgagtgtttgggagttaggaggaggttttcgcgcgtcggtaatttttagtgttaggcgttttgtagttttcgcgcgtcgcgtttgggttcgtatcgttttcgtagtgagggttcgttcgagcggtaagtttttttcggcggttaagtcgatatttttttttcgtttcgtcgtttatttcgggtagtagtcgcggaataatggagagcgtagttagtagttttggagacggcgttcgggggaggacgcgtcgtcgtcgtcgtcgttgtcgttagggtaggcgcgcgtcgcgtggagtcgggcgggtgcgagggcgcgcggcggggggtggggggtacgcgtcgcgcggggggcgggggtagtggggggcgcgcgcgcgggttcggggagttcgcggggagagttcggcgttcggcgtagcgcggcgcggttaagtttcgcgtttttttcgttttttttcggcgcgttcgttttcgtttcgtcgttcgtattcgttgggggcgtttagaaagatgtatagaggtaacggttaggggagcggaggtttaagttatatgtttgcgttttcgggggttagagttcgttagttttcgcggatttcggttcgcggttagttcgagcggttcgggtgagtagcggtatagcggttttttcgtttcgcggttttcgttcgtcgagacgtggttttaagaagtggtgtcgtagtcggggtagaggcggaggaagtcgagtcgggtaagtcgggaaggttgcggagacgttttgtcggggtaggtgttgtagttttagttagcggtttttacggagggggcg

SEQ ID NO: 7947 - DNA, 872 bp, synthetic construct
  misc_feature 1..872: note = Description of Artificial Sequence: Synthetic polynucleotide
  source 1..872: mol_type = other DNA
cggtcgggtttagcgatgcggttgagttgtttattcgcgtttgttgaatcggttaattagcggcgttttcggatttagcgggagcgtttttatgtcgatcgcggtaggcgtgcgtttttcggggtcgtatcgttatggcgatttgtttatttgattcgtttcgggtggattcgtcgcgatttttgggcgtttaggtttttgagggtttaacgggcgacggttttttagttttagttgtgcgttttcgttcgggcgaggtggggttgatcgcggtcgtttgtatacgttttttttggttcgcgttttcggtttgggagggcggattcgtttattttacgatggtttcggttttggaagggattgttttcgtgattcgtttttttaatagtcgttaataattttttttaacgttttttgcgcggttcgtttttgagaattttggttcgggagagcgacgcggggttttcggggttgcgtaggttgcggcgttttgtttacgttggttcgagggcgcggttcgtttcgggtcggtttatatatttacgttttttgtcgggaggcggttgggacgcggcggggttgttttaagtgtagtcgcggtagtgttgcgtttttatcgcgggggtttttgcgggtcgcgtttgtttcgttcggttttcggtgtatgtggtttgcgaggcggtagaggagatgtggggatttagggtcgtacgtcgtgttcgaggtttttacgagaggttttttttcgcgggtttttgcgtaattgcgtgaagtcggttcgggaaagttaagattgtggtttaggaagaggaaggaacgcgggcgatagagttggggtttgggacgttgagggggtcggtggtagtttttcg

SEQ ID NO: 7948 - DNA, 1070 bp, synthetic construct
  misc_feature 1..1070: note = Description of Artificial Sequence: Synthetic polynucleotide
  source 1..1070: mol_type = other DNA
cggcgttgagttttgtttagcgcgattcggatcgacggacgcgtagagattttgtcgggattcgttttttagtcggcgttcggggagtcgtcggtcggttttatttttcgttcgggagtcgggtagggcgagaaggtagcgcgagtggcggtggcgattttcgtcggggtttttgcgacgagcggtgattagtagcgttcgtagtcgcggtttcgttttttattcggacgtggttaagcggcggcggttacgacgttcggtttttcgggatcgttcggttgcgttttgggcgtatttgcgcgtttggtttcgcgtttcgcggagagggcgatgggtttcggttaggattgagtttttttttttttttttttagtttcgtttggtatttttttttttgtttcgagggcgagttacggtttgcgtcgtcgttttttttttcggtgttttcggttcgtcgttttttcgcgtttttttttttcggattcgttttcggggttattatggtcgcggttatcgttagcggtttgattcgttagaagcggtaggcgcgggagtagtattgggatcggtcgtttgttagtaggaggcggagtagttttagtaagaatcgcgggttttgtaacggtaatttggtggatattttttttaaagtgcgtattttcggttttaagaagcgtaggttgcggcgttaaggtttgtgggggttatggtcgggagatgcgtttcgggtcgtttttttttcgtttaaacggagtttttttaggttttttttttttttcggttttttcggtttatttcggtttcggttttttttttgagtattttgggtgtcgtcgcggggattttggagttcgttgtcgggtaatttgtagtcgtcgagaagtgtagtcgttagagatggtaagttggttgtttttcgtcggcggtttttgtttttcgcgtttttgtaggttgggttttgggaaatttgttttttttgagtttcggtttttcgggaggatagggattggtattggttttggaacgcggggtatttttttttgttatattcggggtcgagttatcgttcg

SEQ ID NO: 7949 - DNA, 395 bp, synthetic construct
  misc_feature 1..395: note = Description of Artificial Sequence: Synthetic polynucleotide
  source 1..395: mol_type = other DNA
cggcggtttttcgttttttttttatttttttcgtttttatttttattttttggtcgttcgaattttcgatcgggagtttagagttttgttagcgtcgtattgtgcgtcgcgtaagtcgttcgatttttttagcggtatcggttttaagtagtaaatatttgtgcgtttttgagttagggacgcgcgtggggggtgggcgtgtacgcgggtgggttagcgtagagtgggagtttgtgggtgtttttcgtcgggatttttaatttagttgttttcgagagtttaagttgagcgtcgtacgtgttcgtgttatttgttgtattggacgtagtttaatagcgtagagaggtttttattcggtatttagttcgatgtgggtcgtttttttttttttagcg

SEQ ID NO: 7950 - DNA, 265 bp, synthetic construct
  misc_feature 1..265: note = Description of Artificial Sequence: Synthetic polynucleotide
  source 1..265: mol_type = other DNA
cgtcggattcgcggaaaaggtcgttggaagttttttttgaagtcggtagtattaagaggattaatacgggcggtgggtatcgtttttattttttcgttggttttatttttcgtcgttcgtttttgtttttttttttcgtcgtttttttttttttttttttttttttttttttgcggttcggatatttttagttcgaattcggcggtttttgcgtttttgtttcgcgtttttttttttgtatttgtttcgcgtttaggtgttttcg

SEQ ID NO: 7951 - DNA, 1169 bp, synthetic construct
  misc_feature 1..1169: note = Description of Artificial Sequence: Synthetic polynucleotide
  source 1..1169: mol_type = other DNA
cgagttcgcgttaagagttacgtcgagacgcgtcgtcggtggggttacgcgagatgtaatcggagagtttaaaattagtttaggattaattttttagggattcgtttaatttttttcgtagaagagtttaagtggggtagtggtcgttataggttgaggatgattttcggacgcgttttaggcgcgatcgtattattcgtttttagtttaaagtttgagtgatttggtattatttttttaattgttttttatttttttcgtatttttgttgtgtttatcgtttttacgtatttgagagtttaaattatgttaagacgatttggagaaacgttcgatttgttttttaagttacgtaaggatttatttagacgtacgttcgcgcggagacgtacgttggtatacgcgtttatatacgcgagtatatatacgcgtatattattcggttcgtgcgcgcgggtcgttgtttttgttgtattatgtaaaggtggttgggaaagcgcgttgatttatatttatatagtttattttttttttatagtatgtgattaatacgtatttcggggaggagggagcgcggttgggggtgttaatcggaagggaatagatagtgagtgttattttgttgggaggttttagaagtaaagcgttaacgacgatagtagcggtggttttagttttattagtaattgtcgttggtaggagtattatacgttttaggagtttttcgggtattaagtatgggtttagttcgttttagttattttttttttttatggttttattttcgttgttagtatttcgattttagtttgtaattttgattttgggtttgattataaatgacgaaagatcgcggtagtttttaaagtgcgggagcgagtttcgtattggttagcgcggcggagggatttttttaggaggttttaagtttttaagtttgtggagagatttggtaatagttggtaaggtttgttttagttattttcgttggttttttgtttttgtatttagcgtttgagggcgttattcgttttttttttgcgttttacgtaagcggtttaaggaatttattcgattcggatttcgtttcgtatgttttttaagttttcgttattttcgtaggcgttttagaaaggcgtgatggttttagtttagtgttcgttagttcg

SEQ ID NO: 7952 - DNA, 1743 bp, synthetic construct
  misc_feature 1..1743: note = Description of Artificial Sequence: Synthetic polynucleotide
  source 1..1743: mol_type = other DNA
cgttttcgcggttgttttttttttagggtcgtcggtggtttaggatttggttatcggggaggggcgtggttttgtcgaagtcgatgagttatacgtcggcgcgatggtagtgatcgtgtataaagaggagcgagttgtcgattatttgcgagtttcgtatcgttaggtcgcggttttgtttagagacgtttttgtcgggttttcgttttagttttcgcggttcgggtattcgggtagtcgtcgtttatttcgtgttttttgaagaattcggatatttttagggtgtttcggatttgttgtaggcggtttagatatcgtttttgtagagggtggggtgggagaggagggtaaattaattaaacgttaaatgagtttttgttaacgatgaggagtcgggatttacgttgtgtttggtaaatgtcgttaggaggaggatttagggtttcgtttagcgtggtttagaagggaaggagcgtagagtagttgcgagttagcgcggtgagggttatggtggggatatagtcgagggtattgggttagatgataggggtagttttcggttttaggttttttaatattttagggtttgggatttcgtttttattagtatttttttatttttttgtataaattttttaaagacgcgaagtatttgttttcggtttcgcgtagttttgaagtcggtgttgtaggagtcgttcgttttttggatgtgggataggagtgttaggggtttcgggttcgttagtggggaagaggatagcgtagagtagcggtattttttagttgtaggggacggcgaggcggtgggagagggcggaggggtaggcggggcgggagcgggggatcgggaaagatagcgcgtagtggggttgcggcggtgttagcgaagcgcgtttgttttattttgatgttttcgatgcggaagtcgagggtggtgttggagttgatgttttttcgttattgtatgtagcgcggtttggtgacggcgcgttgcgcgtgtttttttttcgtgggagttttaggatttatcgttagtatttttttgtatatgttttttcgtagtttgggtcgtttacgggttttggttagttttttttttaggtaagttttgtgggggcgtaggtagcggttagggtatgagggggcgtatacggagattttttcgagtattcgtttcgggttttttttaagtagttgtttcggtttcggatttttatttgatttttttaatcgatttggtagggtacgtatatttgacgtttattttgtagtcgagtatataaggttcgtcgaagttatcgagtaggttttgtagttgtaggtagttttcgtcgtcgcgttttattacgtcgtggaaggtaggtacgtagtcgcgtagcgcgttagttattagtcgcgttaggtagtagcgtttcggtttcgagtagcgttttaggattagttcgttggtgttcgtcgttttaaaattttttgaggatcggtattcgttagcgtcgtttagttttttttcgtcgcgggtattcgtttattcgttttattgtttattagtgtgttttgttagttgtatttaggcgtagcgttttttgaaagggtttatgatcggtagattgattatggttcggattttttgttagtggtttttttgaaagcgatagggttaaggtttgataatcggcgtttcggtaatgtataagttttttttttattgaaatagggtttcgttacgttttcgatttatcg

SEQ ID NO: 7953 - DNA, 2405 bp, synthetic construct
  misc_feature 1..2405: note = Description of Artificial Sequence: Synthetic polynucleotide
  source 1..2405: mol_type = other DNA
cgggggaggggtatacgtagttttcgtgcggaaagatggtgttttttttttatagggttgcgcgggtatttattttcgttgtaaagcgttcgggttaggcgcggtttgtttcgggtcggggcgagttcgttgttttttgcggtagatagcgatgcgcgtttttcgttttagttttcggttcgttcggcggttcgcgcgttttttcggtgtagtatgcgggcgttgtgacgttttcggataaatgtcgtgtaattgtgtaggcgaatgagagttaaaaataagaacggaaaatttattattaaggtattattgcgttagcgtagttatttgaaggtttttatggttttcggcgtttgcgtttgaagttcgtttttaggttttggggggtatttgtagaaaatttttagtagcggttcgttaattagattttagggtgtacggggggtggcgtcggtaattatggtaatttttaaaataaaataatataaaataaagtaattaacgtttattaattattattttattttattttttgtattgtttttaggtagttggggaagtcgtcgggagtgtagtcggatgttggaatttaatgtgattcggttgattatgtaaagattaggattggacgtttttgtagttttatttcgttatttatttttttttttttatttcgtattagaaataaagtggggggggggggcgagtttttggaggagaaaatgataattggtatttaattttaggtttatagtgcgtcgcggtggggcgtaaagacgtaaattttcgggatggcgagttttcggggttttattgggttaaacgaaaattgatttgatttgttttttaatattcgagggagagaaggggagatgaggggagggagggtagggtttgagtgtgtgcgtgtgcgtgtgcgtgtgtgtgtgtttggggagggggaggaggtattaagttgtagtttgcgcgcggttttgcgtttcggcggggttgcgtgcgtgtgtttttgttcgcgttgttgaaacgggtttttcgagggatcggcgttatatgatttcgtttgtttttcgttagcgcgtagatcgttagttttttagtttgttcggtatcggaggagggtcgggcggtatttttcgggtattggggttttgcggagcggagaagaggttttagcggggaatggtatatttggatttaagaagtcgcggttcggcgttagattttggagtgtagatatttggggggaggggagagttagagggagcgagcgagcgagcgttagagagaggtagcgcgtagcgcgtacggacggggggttgttgcgcggagaagatgtaagcgcgtggggtttcgttggtttttgagtattatgtagaaggggattcggttgaatgatggttacgtcgcgtttttgggattgttggcgcgtaaggacggtacgcgtaaaggttatttgagtaagcggagttcggataatataaaatggtaaattaagtggttcgcgttgttgtagaatttgtttttttatttcgagagcgattcgagttcgcggttttcggggttttatttgttggagggttgcgtttgcgatcgcgcgtttttttttaagtcggcgttgtcggttaaggagtcgttggagaaataggtgaggcgagcgtcgcgttttgatttttttgcgtttcggtcgcggttttgggggtttagggttttcggttggttgatggcgtttgaattttggtttttttatttttggcgttttaggcgttttttgtatttttagcgagaggggaggtttgtttttagttaggcgagtgattgcggcgggtagagggggtagggattgagggcggggagtagatgtgggttgcggttgtttttcgtcggacgagtttcgtgggaggcgggtatagaggggtcgatatttggagatgtagaggaagatggggttttaaggattagagacgatgagtttggatatacgtttagttaaaaatggtgtttttaatttttatttttatcgtttagttttaatagtttcgatcgtttgttttatatcgggaacgtgtaatttttcgcgtttaggtatgggaagggtaagacggaggcgttcgagcgttgttagtttttgtttcgtcgtagttgagggcggagagcggtttgcgttagtttttcggagttgggttggggttatggggttatacgggtcggttcggtattatcgagcggtggtgggtttttagttggcggtcgtcggagtaataagtttaaagatttttaaggatcgttttgatgcgtcggggttagggttagggttgttgcggaggtagcgggacgaagtgggcgttttttttttttttcgttttttgcgtcgtcgtcgtcgtcgtagtcgcggttatagcgttgcg

SEQ ID NO: 7954 - DNA, 1920 bp, synthetic construct
  misc_feature 1..1920: note = Description of Artificial Sequence: Synthetic polynucleotide
  source 1..1920: mol_type = other DNA
cgggcgttgttttttgcggtttttttcgtcgaggtttgtgcgtggcggggtttttaggagcggtagttcgtgcggtttgggggcggtttttttttcgtatcgtagcggggcgtgtaaagcgtttgcggttgtagtgtgggcgtttattttacgtgttcggcggcgtgcgaggagtagtaatattttttgtgggcgatgaaggtggataggttgttgaatttgatgttgtaaagacggtagtatcggtggttgtcgttgggtagcggcgtcggcgtgtttttgttgggagtttggacgtttttgttcgagtaggaggggggcgtcggcgggggcggtacggtttcgggcgcggcggtcggggacgggggcgggtcgggcggcggtttttggggtttcgggtcgaggtcgtttcgggggttacgggattcgggttgcggggaggcggcgggggcgggagcgggcgaggggtcgcggtcggtcggcgttcgggtttcgattttcgggtcggttaggggcgcgtcgagtagtaggtcgtgcgttaggcggaaatgttttagtaggttttcgcgtatcgggtcgttcggggggtagtaggggtaggcggcggcgggtaggtcgagcgcgtcgggcggtggcgtagcggggtacgagtattttttgtgcgttaggtaggtttcgaggttgtggaagtttacgcggtaggtcgtgtattcgtggtagtcggttagcgtcggtgtcggggtttcggggagcgggcgtcgcggttttttgtttaggtcgatggggtcgtcggtcgcggggtcgggcgagcgcgtaggggcgaggtcggggtcgttttcgttttcgttttcgggtcgcggcgattcgggcgcgggggcgtggtcgggcggcggggggggcggggcgtcggtcgcgtgtagttcgtagagtttgcggcgtttgcgcgtgcgtataggcgcggcgggagagggggtcgggggcgcggtcggtttagggggtttcgggggcgcggtcggtcggcgcggcggcgggtcgtggcgcgaggcgtagtagtatcgtttgtgtacggtgtaggtttcgtggcggttgaagcggatgttgtaggtttcgtatagcgtgcggttggggtcgtttttcgcgtcgtttacggagttattcgggttttggttgttttcgttgtttcggtcgttcgcgtcgttttcgggcgtggtcgcgtttttagtttttttttcgcgcgtttcggggttcggggacgagcgcggcgcgtcgggttcggcgggttggtcggggggcgcgcgggtcgggtcggggggcgttttgggtttgcgcgcggtaggcgcgttttcgggcgtacggcggtttgaatagtagaggcgtttgtgtacgtagtagttgttgacgttgttgaaggtgatttcgtattcgaagtacgtagcgtttttgggggtttcggggaagagttcggtttgcgcgtcgtcggcgttcgcgttcgcgttttgttgtagtcggttgtgtattagttcggatattttggttaggattttcgaggcggggggcgtcgcgtcgggttcgaatacgtattgcggaaggaatagggtttcggttaggtttagttcgtcgggtatcgggttggagttcggcgtggggttggatagttcggttttgattttggtcggggcggggttgcgcggcgacggcgttcgcgacggggtttggggtttaggtttttcggggtttaggatgggggtcgttttcggtttttttatcgtttttattttgatgtttttgggggtcgtcgggggttcgttgttgtttttattttgggttagaggtttcgttttggttttttcgttggtggtttcggttagggtttttttgtttagttttggcgatggggtgggcgttaggtttaggttcgcg

SEQ ID NO: 7955 - DNA, 1403 bp, synthetic construct
  misc_feature 1..1403: note = Description of Artificial Sequence: Synthetic polynucleotide
  source 1..1403: mol_type = other DNA
cgttcgttttttttaggttcggtgggattagattcgaagttaattttcgttaggcgttaggtgtagattttaggttaggttagagtagtttttgggttttcggatcgggatgttcgttttgtttttttttttggtttcgttcggtttgttatagggggaggtttcggtttcgtatttcgggtagcgaatttcgtcggtcgaggttagtttcgtgcgggggtttttcgcgggatcgatcgttaagcggtattgttcgtttcgggcgttcgttcggttttagacgtaggttttgcggtcgtttcgtgataagtatattgacgggttattgttttttgacgagtgttaaaaagttcgtttgttttgaacgttaatttttaagtgatttttacgaggttttttttttcggttttttcgttgttgtttcgttcgtattcggtttttagtaggtgtttaagaaacgtttagtaaacggtagcgtaggcgagtttgttttgcgcgttggcgcgttttattgtttacggatggcgggcgattttacgggattttcggttcgtaggattttcgttttcgaggttgtttttgggtcgggaggggttattttagaggggcgtttattttcgacggcgggggtcggggcgtcgcgggtaggggagggcgtagtttttaagtagttttagtttggtttagatttcgcgtttagcgagtcggtcggttaggtttatattttttatttgtcgttcgttttaggggaagggttttttcgacgacgttcgagtttttttttttttcggagggtcggaggtcggcgtttattggtcggttttgggcgacgtttcgttttttcgacgttacgggttaatgagcgcgcgttgttagtttattagtcgggttggttgggcggttcgggagttcgagcggtggcggagcggcgagtagcgagtagcgtttgcgggagcggtcggtcggtcgggttttcgcgtttcgtacgttcgtacgtttagcggggttcgtattgagtatgggcgcggcggtcgtgcgttggtatttgtgcgtgttgttggttttgggtatacgcgggcggttggtcgggggtagcgggtttttaggtaagttttcgatcgaggtggggggcggcgggcgcggggggttcgggcggtcgaggcgcggtttcggagggtttttttttcgcggatttcgagttcgtttcgcgcggtttcgcgttttttgtttttttgtaaagtaatttttagggtcggttcggggcgtttttttttcgtagttcgggcggtcggggtttttgagttcggcggggtcgtattaggggtgggtgggtcggggtttcgggaggggaagcgcgagcgcgggagcgaggaagaaaggcggcggttttcggggatttcgcg

SEQ ID NO: 7956 - DNA, 1088 bp, synthetic construct
  misc_feature 1..1088: note = Description of Artificial Sequence: Synthetic polynucleotide
  source 1..1088: mol_type = other DNA
cgttgaggggtcgtatttattcgcgtaggtattagtaggtagttttggcgttcgcgggaggcggtcgggggcgggggtttttcggtgtttatcgtcgtttttgcggttgggttcgcgtttcgggtcggtcgagtttaacgttaggatttcgttcgagttttttagggtttcgttaggcgtcgcgttcgcgttcgcgtttttttgtcggtttcggttcgggttttatcggggcgtagggttggggaatcggagtttcgttcgtcgattcggagtatcgtttacgtagattcgtttcgggcgagggaggggtcgggcgcgtattcgcggggagggcggcgagcggggattagtcgaagtcgggagaggggcgtttttacggggcgggaaattggcgcgcgattttgggggaagtgtaggatggggggataggggcgttttcgcgggggtggatgggggattatagcggggttggcggggtaggggtcggcgtacgaggttggaggaggggagcgcgcgtttttattcgggttgggtcgtcgaggttcgcggcgtatcgtggcggcggtgggcggaggggggcggggggtatttttttttttttgtggcgtaggtgggcgcgttttggatcggtttgacgattttttttcgtcgttttatttttttggttaaaggtttttagtttttaattagggatatttttagtttatagtttcgaagttatgggtttttttcggttttttgaagtcgttatatttgtgttagtcggtcgcgtttttagattttttttcgcggagtttttttagtatttggagacgtagcgtagggtttcgaggacggtttggttcggagaaaagatatcgaagttttaattttttttaatttcgttttttttttttttttatttttttttttcgtttttaaagttcgggggttttatttttttttcggttcgcggagtttttcgaattttgcggggattcggcgttcggcggtgtttttttggggcgtacggggttggggcgggagcgaggagattaggtggggaggggattttagattttagacgttaggggagacggcgtttttcg

SEQ ID NO: 7957 - DNA, 1812 bp, synthetic construct
  misc_feature 1..1812: note = Description of Artificial Sequence: Synthetic polynucleotide
  source 1..1812: mol_type = other DNA
cggggtcgttgcgtttttttgattattgacggttaggacggttttagtttcgttttatttgtaagttttattttaggttcgagttttcgagggtagggatagtttttcgggtttcgaggtttgattagagtttgaaagtttttgtcgggggttgtttcgatttagcgaggcgttaggttgttcggcgcggttgggggcgtttagcgtcgggattttagttttgtttcggtcgttcgttggtttagtgcgtacgtttcggtagtttagtttttttttttacggcggtaggagagttttcggtatttgtttggggcgggggcgggggcggggcggggcgggcgtcgcgtttttttgtttgattggtaggaagatagattaatcggaggggtttttcggggggaggggcggtgtcgtgtttgagtcgggcgcgggcgatcgagggagttgtagttattcgcgtgcggtacgcgtcggtcgtttgttcggatcgcggttattagtgtcgcggtttttcgattttcgtttcgtcgagtcgcgcgcgcgattgttattttttttaattgttttttacgattttttttgtgtatgtatttattttttgtttcgttttgttttttttaaggcggtggcggcggcgatagcggcgtaagttcgtagcggggagggggcggtcggaggatgcggcgcggggttgcgttcgttacgttcgttgttgttgttcggttcgggtttgagcgtcgagtaggtgggtataggtgcgtcggggggcgggaggcgagcgttggttagagggaattcgtggattcggcgatcgaggggcggatttggcggtaagggacgcggcgatcggtgtcgtttcgttttatcgtttatttttttttttttcggttatcgcgttttttttgggttttttttttattttcgtattttattttagtggttttttatttttttatatttattttttatttttttttagatttttttgtaaaattttttagtcgttgcgtcgttttttttaatattttttttcggtttcgtttttagtttttagtttttttttacgttatttttatttttattttttttcggatttcgtttttaagttaaggagcgggagggggatttattcggtgtttgtcggagtggcgcggggggtgtggtcggttcgtttttttcgtgtttttcgtagggtaggttatagttttttagattttcgtttaggtggtaaagaagatggagttgggggtcgcgtttcggcggcgcggggttcgaaggcgaggtcgtttagttcgtattttattttacgtacggtatacgtcgtcgcggtttttgttacgtatattttcgcgttgtttcgtttacgtgggcgtcggggaggaggttcgagagatgggaagaaaggttggtatttatttttttgtcgggtcggcgcgttttgggcgtattggttttcggagatggcgcgtaaggattgattttcgtggtgttagatattttgtcgggcgttttgcgtcggggttagcggtttcgttggtttgcgttagtgcgttgcggtttcgttttttagtttttcggtttttcgttttattttttttgttgtgggtttttgagtattcggtttgggtagtttagatagaggtcgtttacgaggttggcgttttttttcgttttagaagtatttcgtttttatatattttagttcgtcggttttttgaaggttgggttagtttcggtttttcgttagtttttgttcggttttttgagttttagcgatattgtatttaatcgttagttttttttcgtcgttcg

SEQ ID NO: 7958 - DNA, 5819 bp, synthetic construct
  misc_feature 1..5819: note = Description of Artificial Sequence: Synthetic polynucleotide
  source 1..5819: mol_type = other DNA
cggagggaaatcgggtcgacgataagggtggttattttcgggtttttcgcgttcggtttaagcgtttttgggtggggtagtttaaacggggagaggggtttcgtgggtcgagggttcgaggtcgtagcgagtttagcgtttggttaaatttggttcgcgcgtttttttattgttttgttagggttgtgtgatttttcggagttttacgttttcgtttaaatagtttttagcgtttttgttggtattcggggcgtttttattttagtttttgtattcggcgcgtcgcgcgtagatcggacggaggggaaagttggtaagagcgcggcgttcgcgggagaaagcgttaatgggcggtcgggtgggagtagcgcgttcgttcgtttacgttacgtcggtgcgggttcggttgacgatcgcggcgtttggggacgtcggcgcgtttcgttcgttaggtgtttcgtttggaaatgtttttattagttgtcgtcggtttttcgttggagcgcgcgcgtcgagttttcgcgcggagttttcgcgggttgtcgggagcggtttagcgttatcgtaggtaggtgaggtttttcgttttcgttttcgtttcggggtttcgagattttttttttttttcgaggaggcggaggtttcgcgcggtcgtcgaggggagcgggcggcggcggttgcggcgatttttcggtgcgtttcgggttgcgagttgtttttcgcggtttcggtagttatacggcgcgggcgggagtttttttagtttaggtagggagtgggtttcgtcgtataaattttgcgaggattgtttttgcgtttaaggggataaagtttgttattcgtcgttaggttttttagaggtcgttgcgtttgttgtaagttgcgggaagtagggtgcgcgggtcggcgcggggcggggggtggggggttcggagtggttaggtttgagttttggacgttcggacggcgtttcgtttagttttaggtcgtatttagggagtaagcggcgggggcgtagcgggagagaggagggagagggtcgcgggtttttatggagggcggttgggaatttagagatttatcgtttgtttttgtggtttttttttttattattggtttcgagggggtttcggggttgtgaggaaatgatttgttaatttcgaggttcgttagtgcggcgttagcgatcgtgaggttttttaaatttatattttagtcgggtgtttcgagcggtgggcgggtataggcgtttttaaggtttttggttttaggttttagaaagaaaggtttttgtttggtgtttcgggttttcggtttcgtttttggttggagttaatttttttgggttggaaggagtttttttcggacgagtttttggtgcggggaattggtggtttttagggtaatttttgaagtattagggttaggttggtcgaagaagggttagggttcggtttgttttttcggaggttttttatggtttcgacggttaacggtaatttcgttaaaataggcgattcgtttgcgtttcgcgttaggggttgattattttttgttttttttgcggtttgtttcggttttggtttttcgtttttcggagcgttttaggttagcgggagtattttattttttcgaagttgagtcggtgttgtgtatttcgggagtcggttgatttttggtttatttgtttacgggtgtatttagtatcgggggtttttagagggaggaaggtttagtatttcgagtttatgtagacgcgtttagttgatatttgagatgttgagcgttttatcgttggtgaaagggatattgggtgttttcgttttaggtttggttttttggtgaaggtatttggaaaatattttagtattatttatgggagaagggtggtttagtgagaattttcggtttgggtaggcgggtttaggttaggttatagggttttagtgagatgtttcggtggtcgttaatttataggttggattgattttgtgttttggaatgagtagtggggtttgggtgaggtcgggcgggttaggaggttttttgggtagttgcgagtttttcgaggtagggtgattgtgattgggttcggattttaggcgttggggtttgttggcgggtaggaagtggagcgtgtgtgtgcggcggtttgggaaagtcgatttagaggttaggtttttgggttacggagaaagggtcgttcgttggtggggattggagcgtcgatttatgtatataggttggaaaggtaaaagagaataggagaaggtggcggtggtggttaaaggaagttttcgaaagggtttttacgtattggttgttttgggaagtggaggttgttttttttagattttgtttagaagatgaatggtcgtttgttttggggtttcggttttagttaagtttcgtcgggtttggaaggaaggaaatgtattagttttaggtttgggtgggttgagttgttgtattagagtttagaggtgtagggtataggtggttgggtttttgggttttggtttttttttttagtcggcggagtgtttatagtcgtcgaggttaggttttcgagtataggtgaggaaaggataagttatagttgaatgttttttttttgggggtttttattttttattttagtttttggttcggttgggtttatattttttttttagtcgggttttattatttggagagagcgagtagtttgtaaataataaataatgggaagtagaaggatgttcgggaaaaattagaaaattgtaaggagtggggaggagggagggtgggagaggggaggaaggagggtgggggaggggaggagtaggaggagagggaaaggggttgagagatttatttttagcgagaaatttcggtggttagttttttattatttataggaaggtgatattagcgatttaggtgagaaagaaagaaacgcggtttgtcgcgaaattaatatagaatttagaaataattattaatgttatttgattcgtgttttttatatatttttcgcggttatcgacgttaaattgtttgaataatttgtatggagcggttatttattattttcgatggtttttttttgtaagtagttcggacgtggttcgtttcggtttaacgcgatcggagaattcgtatttttatttgtaaattaaagtaattacgtagtagatattatatgatgtgtattgtggtttttagatagttattaattatttttaatcgagttgttaaaagagtaggtagatttcgtttttgggaggtaggtttgtagttggggagagggcgaggacgttattattaattagagggtgattttggggcgatttataggtttgaatttaggaatttttttgagtaagtttgtataacgttgttttgtacggttttttttttaatttattacgggaggtcggtttagggggcgagggtaatcggggcgagtttcggtttcggagggcgatggcgtagaaggcggggaacgggttcgggatggttcgggcgtttttttgtcgtttttttgtcgtttgtttattggttttcgttttgaatttgggtaaggttttagggagggtattggtcgagggagttttggggtgggcgttcggttttttttttcgattgtttcgtgcgttttagatagaaagttgggtaaaatggataggggagggcgttttcgttaggtatttaacgttttttttttcgtagttagttttgcggggcgtcgggagggacgagtttagcgggaggggtcggggtttgggttgaggaatttgttttttcgagcgcgtagggtcgttcggtagttttcggtttagtcgcgaggggtagggggaagtcggcggagtacggtcggcggaaaggggatcggggaggaaagtcggggaggcgaggtgggggcggtgggttgagcgggaatttaaaagatcgcggtggagaagatggggcgtttttcgcgatattcggttgtttagaggtgtaaagtcggtgggcgtacgttcggggcggttttatagttttcgggtcgttagttttagggtgtcgggttttaattaaggtttcgaagtttttacgtatttgagggtattttgattagtttttgcgggttgttttgcggtcgtagtgggttttgaaagtttatttcggcgtagggtggaaatcggcgggaggcgttgttgattttcgattaaataatagtgacgagacgcgtgcggggcgtttgcgagtttttttttgttattcggagtagagcgcgttagcgcgaggtcgggtcggtcgtttgcgtagcgtcgggttaattttaattgttgattatatttttagcgtgtttttttataggttttatttgtaattgagacgaatgattatagtggggcgggaaggagtagttgtttattaattaatttttaattaaaagtgtttttcgttttcgggtgattaaagagaaatatcgttcgttgggcgatattgattcggatggaatttatttgttaacgttcggaggaatggttttttcgtttatcgcgcggtcgggattgttttggtttttttcggtttgagtcgtcggcgagtgatcggcgagtttgcggttaggtcgggttgcgcgaggtggggttgacgttagagtttttttcgttttaagtcgcgtatatttgatttgacgggttcgcgcgattcgtttttttttttttttttttcgtaaaatatgtatttttgtcgtcgttgcgaggtcgttcggttttagagttttttcgagttttcggaatgcgaagttaaaggaatcgcggcggttatcgttgtttattttgttattcggttagaaaagtttgcggagcgcggggatggattaatcggtttttttgtttcgtttttttagcgtttagaagtttgtagtttcggagtagtggtcgcgttacgtcggttttagcgcgtagaattttgtaggtttcgttcgttcgtttcgggtcgcgttcgttatgttttattcgtagtttggatatttttatttttcggttttttaggtaagcggagtttcgtttcgtttaggttatcgtaggtgtcggtagggcggatggggcggggacggggggtggggagtgttcgatttacgattgtttgcggttttcgagttagtaaggtttgggtcgcgcgttttttacgtttaatttttgttttttaaattttcggggaaaggtcgaggcgttaagaaaattcgacgggtcgggttcgggttttttgatgtttgaattataaggtttaggttgtgttttaggggagttttaggattttaaggaatttttggggaaggaggtttggcgcgtaaatggcgttagaggttttggaaatttttcggggaagggtgtaggtgttcggttgggttttacgtggcggaggaggttagacgcgtataagttagtggaaaggggcgagtattttggtgtggacggcgggaggttcgggggtattcggggtacgttttcgtgggcggcgcgcgggattggtaaggtttagggttttagtttttagttcggtttttcgttagttttcgcggtttttttttgtagtttttgatggttattaattttttgagtacgtgttgcgagttcggaggtcgtacgttggcggatttcgggttcgtcgtttcggtttaggcgtcggtttattgttcggtttacgagagtcggttgttggttatcgcgcgttacgagtttaattcggtcgcggcgttgggcgtttatgggggtttttatggcggatcgtagggttatggtaattacgtgatttacggttcggaggcgttcgttttttattcg

SEQ ID NO: 7959 - DNA, 2001 bp, synthetic construct
  misc_feature 1..2001: note = Description of Artificial Sequence: Synthetic polynucleotide
  source 1..2001: mol_type = other DNA
cgttttcgtttcgtgttaagcgggtttaaggttcgaggttttttcgtttataatttcggtgttcggaatacgttttcgaggggtcgtgttgtcggggttattattcgcgattggatttcgcgtcgtgttgtttttttcgggtttcgagttcgtttagcggtttgtacggtttaggtttgagttgcgggttttttttgtggggcgcgttgggagtgagttttatttttaaagtttattttaacgttttaggtatgattacgacggtagaggtcggtcgtttattttcgttttttttttcggttagagcgtttttgtcgggagtcgacgatcgcggtttgatttcgggttttatcgtttattttcggttttcgttttttttttacggttaggggttatatatagcggacgtttcgtttttagtcgtttttttgatttttgaatttgggagttagcgtgttcgttggggtatgtattgttacgggtattgggatttttttgttgttgcggggaggagtttcgacggtaggtgggaagatttagtttgttcgcgttttcgttttttagtttttgcgattcgggtcgaggtttttagtttttgggttttttcgtttcgggtttgagggaggggtcgggttttcgggtttgtagattcgttatcgcgcgtgcgtatgcgtcggtcgcgagttttcgggtgtaggtttgggcggtttcggttcgcgtatttgtttaggcgttgcggtttagcgcgttttaatttttagttcgggcggagagcgggggcgggattgaagtatcgtgttttttaaagtattttttcgtcgtcggtagttttggtttcgtaaatgttttagcgcgtttaggcgtacgtagagattggcgcggtagttttcgggttaacggtacgcgagtaaagttggttggcgatttgggatacgtagtagaagttgaggttgtatcgattttcgtcgtttcgggggaggtatgggttcgggtaggtttaggaggaagttgtatagttcgaggttcgggcgggagtggcgggtcgcgggtaagggaacgtatatttggaaggggttaggatttcggttggagtttggttttttatggcgaggaagtcgattgggaagggttttttggcgaggtttttttgttgtgttattttttttcggtagcgtcgggcgcggggaacgcggggttgtatcggggcgggggagggggttttattcggcggtttcgaggattcgattttggggtcgggttcggcgggtaggtttgtttaggagttagttggtaaatgtagcggattgttacgttattttattgttattatttattgtaaattattgttttaagttttcgggagaattcgtcgaatttgagaggggggagggggatgggggtgggcgcgtaggaagttttataggtattagggattggtgatttaggatattagtttttcgagttttttttgggaatttttagtatttagattgtttttgattgtagggattacggtggggcgttttttttttaagtttttttcgggatatcgggcgcgtttttttcgtttttgggttagcgtatatttttttacgcgatgattagtatagttattgtgaggttcggttttggtcgcgtttgttttttgcgagtgataataataaaaattattggaattgtaaggaagtttttggtttcggttttttagtcgttgttgttttgggtgtttcggttgcggaaagatttcgtagtcgggttcgatttacgagtggaatatcgggttgcggatttagtcgggtttataggattggcgcggggtttcggggataggtttcgtagggtttttttgcgtatcgtttgggacgtcgattttgttaatttggaggataatttttgtttttattttattagtagatttttaaaaatttagtcgtcgttgaaacgtgttttttattcgttcggtttgtttgtagtttttgacgagtttcggtatagttttcg

SEQ ID NO: 7960 - DNA, 1265 bp, synthetic construct
  misc_feature 1..1265: note = Description of Artificial Sequence: Synthetic polynucleotide
  source 1..1265: mol_type = other DNA
cggttcgggcgttaggtagaattttagttcgatgttgtcgtcgtcgggggagagggaattcgttgggagggatagtcgggggttggggaaggaagagcgggtgttgggagggtttaatattggcggagttttaggtggcgacgcgggcggcgagagttgtttcgaggcgggggtttcgggtaggtcgttttttacgtagtatacggagtagaagatttgttttttggcgagggacgggcgtcgttgatttagtacgtttaggattagttcgtcggcggtttttacgcgggttttgggttttagtttttcgtcggggggcgttttttgttgtttatttttttttttttttcgatttttagttttttttttttttttttttagttttaattgtagtggtaaggtttggggattgagaggttcggtgagtgttagtttcgtaggttgcgtcggtgttcggtttttattttagttcgggggttttaggtttttcgcgggttttggggcgttggtgttcgcgtagttttagtcgttttcgtagttatcgtcgttcggtttcgcggaggcggcgcgtagcgggggcgttcgggcgttgtttttttgaggtttcgggggtttagggtggttcgtagtgttattggttagggtttgcgatttttggggttcgtcgtcgtcgtttatcgtgttttgtttttcgtttatcgtcgttcgcggttcgcgtcgtcgttgtttatttagtcgtcgggatttttattcggcgttcgcgggtagcgggggtagtggttcggttcgattcgcggtttcgtttttgttttcgggtttttttttttgggttgggacgttttaagtttttttcggggagttcgtgtttcgaggttgcggcgcgtggggagtttggttcggttcgtcgttttttttcgtattttggcgcggcggggtatcgtttcgggggcgtcgagggtcgttcgttttgggttcgggcgcgttcgttttatatgtagttcggggcggcgtcgtagttttagcgagttttaggcgggatagaggggtttgggaggagacggtcgttagtttcgcgttattatcggtttcggttgtcggacgcgcggttcgagggcggtggttaaagggtcgaggggtttgtggcgtcgtcgcggcgcgtattaggaggtgtagtcggagcgttggttagtcgtagggtttttgggggagaggtcggagcgggcgattttttttttttcgcgttttatttatagtttttttcgtcg

SEQ ID NO: 7961 - DNA, 1360 bp, synthetic construct
  misc_feature 1..1360: note = Description of Artificial Sequence: Synthetic polynucleotide
  source 1..1360: mol_type = other DNA
cgtcgaggatgtggttttcgtttttcgtagtcgtcgtaggagtttttgtttttaaagcggtaggtaggggttttagcgggtttattttaatttgggaaggtcggtgcgtttttttatagatttcgtagggcgttttttttggggattattgaagttttggtatttttaattttagttttttcgcgttacgggaaacgaagacgatatttttttgaataatttcggatgtgttattatagaggggtattttatattggtttttattttaatttttatttagtatattgtttgtttattttttaaatttcgtgcggattgcggtatttagtttcgggggattttttagttttgttttttcgattcgcgtaggtgcgttcgtttatttaagggtagggaggtatgttttttcgggttttttcggtcgtatggtttgtttgtttttttggtttttttttttcgtattaggaggggcgtgagatagttaggtcgatttttatttcggtagtttgcggcgatcggtcgtttcgagcgtagcgttagatatttgggttggggggtgttagtttgacgcgtaggaagggcgtagcggcgggagggggttttattttagatttgggaggtttgtttggcgtcggttttcgttcgtttttcgtcggtggaggtcgcggttggcggagatcgttaagttagaggaggggattcgaggtttcggttgggcgaaggttttggagggggagaagacggtcgaggcgtggaggggtagtcgcggcggggcgatttttatttgtttattgcggggtttgttcgtggggtcggggtagatttcgtaaaggacgcgtagtttgtaagttcgcggttcgcgcggcgcggggatggggagcgtgtgcgtcgaggagcgcgcgtcgagtcgggttttcgcgtttgtgtggtcggttggcggtcggggttcgtgtgtttttgcgcggcggcgtgtgcgtgtgcgtacgcggggattacgttcgttcggagtcgtcgtcgtcgtcgttattttttgttcggggtcgagcgtagcgttttttttgttcgtttcgcgcggcgcggtagtttagtttggtttcgttttgcgggagaggcgtcgttttcgtcgcgaagttaggttgggcgttggagggaggcgatcgattatcgtttttttttgtttattttataggttggggagggggtgttgtaggttaatgagcgttcgggggcggggttagatcgagggcggtgcggtggggggcgcggtggggggcgtcgggttgtttaattcgattttattcgtagtatagattggagtaggagttgcggcgggaaattttagcggcgggggtcgggggcg

SEQ ID NO: 7962 - DNA, 362 bp, synthetic construct
  misc_feature 1..362: note = Description of Artificial Sequence: Synthetic polynucleotide
  source 1..362: mol_type = other DNA
cgcgggggttatcgcgttcgcgaacgtagagtttatacgtggattttcgcgtttgtgatgtttcgattcgtttcgggttttcgtatagataatgtcgcgcgtttttttcgtagttatttcgggattcgcgtttcgcgtcgttcggacgtttttttgcgtttgtcggggatatttatcgatattaggaattttagcgtgtttatatagtttcgttcggttttttggagttcgttgagtacgtatacgcgtaggcgaagttgtttttttaggtttttggcgttttcggcgcggttgttttcgcggttgttttcgtttatggtcggcggcggtgcgtagcgcggcgttgttcgtcgtgttgagcg

SEQ ID NO: 7963 - DNA, 56 bp, Homo sapiens; identical to SEQ ID NO: 112
  source 1..56: mol_type = unassigned DNA

SEQ ID NO: 7964 - DNA, 431 bp, Homo sapiens; identical to SEQ ID NO: 374
  source 1..431: mol_type = unassigned DNA

SEQ ID NO: 7965 - DNA, 84 bp, Homo sapiens; identical to SEQ ID NO: 396
  source 1..84: mol_type = unassigned DNA

SEQ ID NO: 7966 - DNA, 50 bp, Homo sapiens; identical to SEQ ID NO: 418
  source 1..50: mol_type = unassigned DNA

SEQ ID NO: 7967 - DNA, 166 bp, Homo sapiens; identical to SEQ ID NO: 2
  source 1..166: mol_type = unassigned DNA

SEQ ID NO: 7968 - DNA, 125 bp, Homo sapiens; identical to SEQ ID NO: 13
  source 1..125: mol_type = unassigned DNA

SEQ ID NO: 7969 - DNA, 396 bp, Homo sapiens; identical to SEQ ID NO: 35
  source 1..396: mol_type = unassigned DNA

SEQ ID NO: 7970 - DNA, 173 bp, Homo sapiens; identical to SEQ ID NO: 46
  source 1..173: mol_type = unassigned DNA

SEQ ID NO: 7971 - DNA, 97 bp, Homo sapiens; identical to SEQ ID NO: 57
  source 1..97: mol_type = unassigned DNA

SEQ ID NO: 7972 - DNA, 208 bp, Homo sapiens; identical to SEQ ID NO: 68
  source 1..208: mol_type = unassigned DNA

SEQ ID NO: 7973 - DNA, 647 bp, Homo sapiens; identical to SEQ ID NO: 79
  source 1..647: mol_type = unassigned DNA

SEQ ID NO: 7974 - DNA, 282 bp, Homo sapiens; identical to SEQ ID NO: 90
  source 1..282: mol_type = unassigned DNA

SEQ ID NO: 7975 - DNA, 141 bp, Homo sapiens; identical to SEQ ID NO: 135
  source 1..141: mol_type = unassigned DNA

SEQ ID NO: 7976 - DNA, 25 bp, Homo sapiens
  source 1..25: mol_type = unassigned DNA
cgtgcaccctgaggtctggttggcg

SEQ ID NO: 7977 - DNA, 56 bp, Homo sapiens; identical to SEQ ID NO: 540
  source 1..56: mol_type = unassigned DNA

SEQ ID NO: 7978 - DNA, 431 bp, Homo sapiens; identical to SEQ ID NO: 802
  source 1..431: mol_type = unassigned DNA

SEQ ID NO: 7979 - DNA, 84 bp, Homo sapiens; identical to SEQ ID NO: 824
  source 1..84: mol_type = unassigned DNA

SEQ ID NO: 7980 - DNA, 50 bp, Homo sapiens; identical to SEQ ID NO: 846
  source 1..50: mol_type = unassigned DNA

SEQ ID NO: 7981 - DNA, 166 bp, Homo sapiens; identical to SEQ ID NO: 430
  source 1..166: mol_type = unassigned DNA

SEQ ID NO: 7982 - DNA, 125 bp, Homo sapiens; identical to SEQ ID NO: 441
  source 1..125: mol_type = unassigned DNA

SEQ ID NO: 7983 - DNA, 396 bp, Homo sapiens; identical to SEQ ID NO: 463
  source 1..396: mol_type = unassigned DNA

SEQ ID NO: 7984 - DNA, 173 bp, Homo sapiens; identical to SEQ ID NO: 474
  source 1..173: mol_type = unassigned DNA

SEQ ID NO: 7985 - DNA, 97 bp, Homo sapiens; identical to SEQ ID NO: 485
  source 1..97: mol_type = unassigned DNA

SEQ ID NO: 7986 - DNA, 208 bp, Homo sapiens; identical to SEQ ID NO: 496
  source 1..208: mol_type = unassigned DNA

SEQ ID NO: 7987 - DNA, 647 bp, Homo sapiens; identical to SEQ ID NO: 507
  source 1..647: mol_type = unassigned DNA

SEQ ID NO: 7988 - DNA, 282 bp, Homo sapiens; identical to SEQ ID NO: 518
  source 1..282: mol_type = unassigned DNA

SEQ ID NO: 7989 - DNA, 141 bp, Homo sapiens; identical to SEQ ID NO: 563
  source 1..141: mol_type = unassigned DNA

SEQ ID NO: 7990 - DNA, 25 bp, Homo sapiens
  source 1..25: mol_type = unassigned DNA
cgccaaccagacctcagggtgcacg

SEQ ID NO: 7991 - DNA, 56 bp, synthetic construct; identical to SEQ ID NO: 968
  misc_feature 1..56: note = Description of Artificial Sequence: Synthetic oligonucleotide
  source 1..56: mol_type = other DNA

SEQ ID NO: 7992 - DNA, 431 bp, synthetic construct; identical to SEQ ID NO: 1230
  misc_feature 1..431: note = Description of Artificial Sequence: Synthetic polynucleotide
  source 1..431: mol_type = other DNA

SEQ ID NO: 7993 - DNA, 84 bp, synthetic construct; identical to SEQ ID NO: 1252
  misc_feature 1..84: note = Description of Artificial Sequence: Synthetic oligonucleotide
  source 1..84: mol_type = other DNA

SEQ ID NO: 7994 - DNA, 50 bp, synthetic construct; identical to SEQ ID NO: 1274
  misc_feature 1..50: note = Description of Artificial Sequence: Synthetic oligonucleotide
  source 1..50: mol_type = other DNA

SEQ ID NO: 7995 - DNA, 166 bp, synthetic construct; identical to SEQ ID NO: 858
  misc_feature 1..166: note = Description of Artificial Sequence: Synthetic polynucleotide
  source 1..166: mol_type = other DNA

SEQ ID NO: 7996 - DNA, 125 bp, synthetic construct; identical to SEQ ID NO: 869
  misc_feature 1..125: note = Description of Artificial Sequence: Synthetic polynucleotide
  source 1..125: mol_type = other DNA

SEQ ID NO: 7997 - DNA, 396 bp, synthetic construct; identical to SEQ ID NO: 891
  misc_feature 1..396: note = Description of Artificial Sequence: Synthetic polynucleotide
  source 1..396: mol_type = other DNA

SEQ ID NO: 7998 - DNA, 173 bp, synthetic construct; identical to SEQ ID NO: 902
  misc_feature 1..173: note = Description of Artificial Sequence: Synthetic polynucleotide
  source 1..173: mol_type = other DNA

SEQ ID NO: 7999 - DNA, 97 bp, synthetic construct; identical to SEQ ID NO: 913
  misc_feature 1..97: note = Description of Artificial Sequence: Synthetic oligonucleotide
  source 1..97: mol_type = other DNA

SEQ ID NO: 8000 - DNA, 208 bp, synthetic construct; identical to SEQ ID NO: 924
  misc_feature 1..208: note = Description of Artificial Sequence: Synthetic polynucleotide
  source 1..208: mol_type = other DNA

SEQ ID NO: 8001 - DNA, 647 bp, synthetic construct; identical to SEQ ID NO: 935
  misc_feature 1..647: note = Description of Artificial Sequence: Synthetic polynucleotide
  source 1..647: mol_type = other DNA

SEQ ID NO: 8002 - DNA, 282 bp, synthetic construct; identical to SEQ ID NO: 946
  misc_feature 1..282: note = Description of Artificial Sequence: Synthetic polynucleotide
  source 1..282: mol_type = other DNA

SEQ ID NO: 8003 - DNA, 141 bp, synthetic construct; identical to SEQ ID NO: 991
  misc_feature 1..141: note = Description of Artificial Sequence: Synthetic polynucleotide
  source 1..141: mol_type = other DNA

SEQ ID NO: 8004 - DNA, 25 bp, synthetic construct
  misc_feature 1..25: note = Description of Artificial Sequence: Synthetic oligonucleotide
  source 1..25: mol_type = other DNA
ygtgtattttgaggtttggttggyg

SEQ ID NO: 8005 - DNA, 56 bp, synthetic construct; identical to SEQ ID NO: 1396
  misc_feature 1..56: note = Description of Artificial Sequence: Synthetic oligonucleotide
  source 1..56: mol_type = other DNA

SEQ ID NO: 8006 - DNA, 431 bp, synthetic construct; identical to SEQ ID NO: 1658
  misc_feature 1..431: note = Description of Artificial Sequence: Synthetic polynucleotide
  source 1..431: mol_type = other DNA

SEQ ID NO: 8007 - DNA, 84 bp, synthetic construct; identical to SEQ ID NO: 1680
  misc_feature 1..84: note = Description of Artificial Sequence: Synthetic oligonucleotide
  source 1..84: mol_type = other DNA

SEQ ID NO: 8008 - DNA, 50 bp, synthetic construct; identical to SEQ ID NO: 1702
  misc_feature 1..50: note = Description of Artificial Sequence: Synthetic oligonucleotide
  source 1..50: mol_type = other DNA

SEQ ID NO: 8009 - DNA, 166 bp, synthetic construct; identical to SEQ ID NO: 1286
  misc_feature 1..166: note = Description of Artificial Sequence: Synthetic polynucleotide
  source 1..166: mol_type = other DNA

SEQ ID NO: 8010 - DNA, 125 bp, synthetic construct; identical to SEQ ID NO: 1297
  misc_feature 1..125: note = Description of Artificial Sequence: Synthetic polynucleotide
  source 1..125: mol_type = other DNA

SEQ ID NO: 8011 - DNA, 396 bp, synthetic construct; identical to SEQ ID NO: 1319
  misc_feature 1..396: note = Description of Artificial Sequence: Synthetic polynucleotide
  source 1..396: mol_type = other DNA

SEQ ID NO: 8012 - DNA, 173 bp, synthetic construct; identical to SEQ ID NO: 1330
  misc_feature 1..173: note = Description of Artificial Sequence: Synthetic polynucleotide
  source 1..173: mol_type = other DNA

SEQ ID NO: 8013 - DNA, 97 bp, synthetic construct; identical to SEQ ID NO: 1341
  misc_feature 1..97: note = Description of Artificial Sequence: Synthetic oligonucleotide
  source 1..97: mol_type = other DNA

SEQ ID NO: 8014 - DNA, 208 bp, synthetic construct; identical to SEQ ID NO: 1352
  misc_feature 1..208: note = Description of Artificial Sequence: Synthetic polynucleotide
  source 1..208: mol_type = other DNA

SEQ ID NO: 8015 - DNA, 647 bp, synthetic construct; identical to SEQ ID NO: 1363
  misc_feature 1..647: note = Description of Artificial Sequence: Synthetic polynucleotide
  source 1..647: mol_type = other DNA

SEQ ID NO: 8016 - DNA, 282 bp, synthetic construct; identical to SEQ ID NO: 1374
  misc_feature 1..282: note = Description of Artificial Sequence: Synthetic polynucleotide
  source 1..282: mol_type = other DNA

SEQ ID NO: 8017 - DNA, 141 bp, synthetic construct; identical to SEQ ID NO: 1419
  misc_feature 1..141: note = Description of Artificial Sequence: Synthetic polynucleotide
  source 1..141: mol_type = other DNA

SEQ ID NO: 8018 - DNA, 25 bp, synthetic construct
  misc_feature 1..25: note = Description of Artificial Sequence: Synthetic oligonucleotide
  source 1..25: mol_type = other DNA
cgtgtattttgaggtttggttggcg

SEQ ID NO: 8019 - DNA, 56 bp, synthetic construct; identical to SEQ ID NO: 1824
  misc_feature 1..56: note = Description of Artificial Sequence: Synthetic oligonucleotide
  source 1..56: mol_type = other DNA

SEQ ID NO: 8020 - DNA, 431 bp, synthetic construct; identical to SEQ ID NO: 2086
  misc_feature 1..431: note = Description of Artificial Sequence: Synthetic polynucleotide
  source 1..431: mol_type = other DNA

SEQ ID NO: 8021 - DNA, 84 bp, synthetic construct; identical to SEQ ID NO: 2108
  misc_feature 1..84: note = Description of Artificial Sequence: Synthetic oligonucleotide
  source 1..84: mol_type = other DNA

SEQ ID NO: 8022 - DNA, 50 bp, synthetic construct; identical to SEQ ID NO: 2130
  misc_feature 1..50: note = Description of Artificial Sequence: Synthetic oligonucleotide
  source 1..50: mol_type = other DNA

SEQ ID NO: 8023 - DNA, 166 bp, synthetic construct; identical to SEQ ID NO: 1714
  misc_feature 1..166: note = Description of Artificial Sequence: Synthetic polynucleotide
  source 1..166: mol_type = other DNA

SEQ ID NO: 8024 - DNA, 125 bp, synthetic construct; identical to SEQ ID NO: 1725
  misc_feature 1..125: note = Description of Artificial Sequence: Synthetic polynucleotide
  source 1..125: mol_type = other DNA

SEQ ID NO: 8025 - DNA, 396 bp, synthetic construct; identical to SEQ ID NO: 1747
  misc_feature 1..396: note = Description of Artificial Sequence: Synthetic polynucleotide
  source 1..396: mol_type = other DNA

SEQ ID NO: 8026 - DNA, 173 bp, synthetic construct; identical to SEQ ID NO: 1758
  misc_feature 1..173: note = Description of Artificial Sequence: Synthetic polynucleotide
  source 1..173: mol_type = other DNA

SEQ ID NO: 8027 - DNA, 97 bp, synthetic construct; identical to SEQ ID NO: 1769
  misc_feature 1..97: note = Description of Artificial Sequence: Synthetic oligonucleotide
  source 1..97: mol_type = other DNA

SEQ ID NO: 8028 - DNA, 208 bp, synthetic construct; identical to SEQ ID NO: 1780
  misc_feature 1..208: note = Description of Artificial Sequence: Synthetic polynucleotide
  source 1..208: mol_type = other DNA

SEQ ID NO: 8029 - DNA, 647 bp, synthetic construct; identical to SEQ ID NO: 1791
  misc_feature 1..647: note = Description of Artificial Sequence: Synthetic polynucleotide
  source 1..647: mol_type = other DNA

SEQ ID NO: 8030 - DNA, 282 bp, synthetic construct; identical to SEQ ID NO: 1802
  misc_feature 1..282: note = Description of Artificial Sequence: Synthetic polynucleotide
  source 1..282: mol_type = other DNA

SEQ ID NO: 8031 - DNA, 141 bp, synthetic construct; identical to SEQ ID NO: 1847
  misc_feature 1..141: note = Description of Artificial Sequence: Synthetic polynucleotide
  source 1..141: mol_type = other DNA

SEQ ID NO: 8032 - DNA, 25 bp, synthetic construct
  misc_feature 1..25: note = Description of Artificial Sequence: Synthetic oligonucleotide
  source 1..25: mol_type = other DNA
ygttaattagattttagggtgtayg

SEQ ID NO: 8033 - DNA, 56 bp, synthetic construct; identical to SEQ ID NO: 2252
  misc_feature 1..56: note = Description of Artificial Sequence: Synthetic oligonucleotide
  source 1..56: mol_type = other DNA

SEQ ID NO: 8034 - DNA, 431 bp, synthetic construct; identical to SEQ ID NO: 2514
  misc_feature 1..431: note = Description of Artificial Sequence: Synthetic polynucleotide
  source 1..431: mol_type = other DNA

SEQ ID NO: 8035 - DNA, 84 bp, synthetic construct; identical to SEQ ID NO: 2536
  misc_feature 1..84: note = Description of Artificial Sequence: Synthetic oligonucleotide
  source 1..84: mol_type = other DNA

SEQ ID NO: 8036 - DNA, 50 bp, synthetic construct; identical to SEQ ID NO: 2558
  misc_feature 1..50: note = Description of Artificial Sequence: Synthetic oligonucleotide
  source 1..50: mol_type = other DNA

SEQ ID NO: 8037 - DNA, 166 bp, synthetic construct; identical to SEQ ID NO: 2142
  misc_feature 1..166: note = Description of Artificial Sequence: Synthetic polynucleotide
  source 1..166: mol_type = other DNA

SEQ ID NO: 8038 - DNA, 125 bp, synthetic construct; identical to SEQ ID NO: 2153
  misc_feature 1..125: note = Description of Artificial Sequence: Synthetic polynucleotide
  source 1..125: mol_type = other DNA

SEQ ID NO: 8039 - DNA, 396 bp, synthetic construct; identical to SEQ ID NO: 2175
  misc_feature 1..396: note = Description of Artificial Sequence: Synthetic polynucleotide
  source 1..396: mol_type = other DNA

SEQ ID NO: 8040 - DNA, 173 bp, synthetic construct; identical to SEQ ID NO: 2186
  misc_feature 1..173: note = Description of Artificial Sequence: Synthetic polynucleotide
  source 1..173: mol_type = other DNA

SEQ ID NO: 8041 - DNA, 97 bp, synthetic construct; identical to SEQ ID NO: 2197
  misc_feature 1..97: note = Description of Artificial Sequence: Synthetic oligonucleotide
  source 1..97: mol_type = other DNA

SEQ ID NO: 8042 - DNA, 208 bp, synthetic construct; identical to SEQ ID NO: 2208
  misc_feature 1..208: note = Description of Artificial Sequence: Synthetic polynucleotide
  source 1..208: mol_type = other DNA

SEQ ID NO: 8043 - DNA, 647 bp, synthetic construct; identical to SEQ ID NO: 2219
  misc_feature 1..647: note = Description of Artificial Sequence: Synthetic polynucleotide
  source 1..647: mol_type = other DNA

SEQ ID NO: 8044 - DNA, 282 bp, synthetic construct; identical to SEQ ID NO: 2230
  misc_feature 1..282: note = Description of Artificial Sequence: Synthetic polynucleotide
  source 1..282: mol_type = other DNA

SEQ ID NO: 8045 - DNA, 141 bp, synthetic construct; identical to SEQ ID NO: 2275
  misc_feature 1..141: note = Description of Artificial Sequence: Synthetic polynucleotide
  source 1..141: mol_type = other DNA

SEQ ID NO: 8046 - DNA, 25 bp, synthetic construct
  misc_feature 1..25: note = Description of Artificial Sequence: Synthetic oligonucleotide
  source 1..25: mol_type = other DNA
cgttaattagattttagggtgtacg

SEQ ID NO: 8047 - DNA, 255 bp, Homo sapiens; identical to SEQ ID NO: 2680
  source 1..255: mol_type = unassigned DNA

SEQ ID NO: 8048 - DNA, 630 bp, Homo sapiens; identical to SEQ ID NO: 2942
  source 1..630: mol_type = unassigned DNA

SEQ ID NO: 8049 - DNA, 283 bp, Homo sapiens; identical to SEQ ID NO: 2964
  source 1..283: mol_type = unassigned DNA

SEQ ID NO: 8050 - DNA, 249 bp, Homo sapiens; identical to SEQ ID NO: 2986
  source 1..249: mol_type = unassigned DNA

SEQ ID NO: 8051 - DNA, 365 bp, Homo sapiens; identical to SEQ ID NO: 2570
  source 1..365: mol_type = unassigned DNA

SEQ ID NO: 8052 - DNA, 324 bp, Homo sapiens; identical to SEQ ID NO: 2581
  source 1..324: mol_type = unassigned DNA

SEQ ID NO: 8053 - DNA, 595 bp, Homo sapiens; identical to SEQ ID NO: 2603
  source 1..595: mol_type = unassigned DNA

SEQ ID NO: 8054 - DNA, 372 bp, Homo sapiens; identical to SEQ ID NO: 2614
  source 1..372: mol_type = unassigned DNA

SEQ ID NO: 8055 - DNA, 296 bp, Homo sapiens; identical to SEQ ID NO: 2625
  source 1..296: mol_type = unassigned DNA

SEQ ID NO: 8056 - DNA, 407 bp, Homo sapiens; identical to SEQ ID NO: 2636
  source 1..407: mol_type = unassigned DNA

SEQ ID NO: 8057 - DNA, 846 bp, Homo sapiens; identical to SEQ ID NO: 2647
  source 1..846: mol_type = unassigned DNA

SEQ ID NO: 8058 - DNA, 481 bp, Homo sapiens; identical to SEQ ID NO: 2658
  source 1..481: mol_type = unassigned DNA

SEQ ID NO: 8059 - DNA, 340 bp, Homo sapiens; identical to SEQ ID NO: 2703
  source 1..340: mol_type = unassigned DNA

SEQ ID NO: 8060 - DNA, 224 bp, Homo sapiens; identical to SEQ ID NO: 2714
  source 1..224: mol_type = unassigned DNA

SEQ ID NO: 8061 - DNA, 255 bp, Homo sapiens; identical to SEQ ID NO: 3108
  source 1..255: mol_type = unassigned DNA

SEQ ID NO: 8062 - DNA, 630 bp, Homo sapiens; identical to SEQ ID NO: 3370
  source 1..630: mol_type = unassigned DNA

SEQ ID NO: 8063 - DNA, 283 bp, Homo sapiens; identical to SEQ ID NO: 3392
  source 1..283: mol_type = unassigned DNA

SEQ ID NO: 8064 - DNA, 249 bp, Homo sapiens; identical to SEQ ID NO: 3414
  source 1..249: mol_type = unassigned DNA

SEQ ID NO: 8065 - DNA, 365 bp, Homo sapiens; identical to SEQ ID NO: 2998
  source 1..365: mol_type = unassigned DNA

SEQ ID NO: 8066 - DNA, 324 bp, Homo sapiens; identical to SEQ ID NO: 3009
  source 1..324: mol_type = unassigned DNA

SEQ ID NO: 8067 - DNA, 595 bp, Homo sapiens; identical to SEQ ID NO: 3031
  source 1..595: mol_type = unassigned DNA

SEQ ID NO: 8068 - DNA, 372 bp, Homo sapiens; identical to SEQ ID NO: 3042
  source 1..372: mol_type = unassigned DNA

SEQ ID NO: 8069 - DNA, 296 bp, Homo sapiens; identical to SEQ ID NO: 3053
  source 1..296: mol_type = unassigned DNA

SEQ ID NO: 8070 - DNA, 407 bp, Homo sapiens; identical to SEQ ID NO: 3064
  source 1..407: mol_type = unassigned DNA

SEQ ID NO: 8071 - DNA, 846 bp, Homo sapiens; identical to SEQ ID NO: 3075
  source 1..846: mol_type = unassigned DNA

SEQ ID NO: 8072 - DNA, 481 bp, Homo sapiens; identical to SEQ ID NO: 3086
  source 1..481: mol_type = unassigned DNA

SEQ ID NO: 8073 - DNA, 340 bp, Homo sapiens; identical to SEQ ID NO: 3131
  source 1..340: mol_type = unassigned DNA

SEQ ID NO: 8074 - DNA, 224 bp, Homo sapiens; identical to SEQ ID NO: 3142
  source 1..224: mol_type = unassigned DNA

SEQ ID NO: 8075 - DNA, 255 bp, synthetic construct; identical to SEQ ID NO: 3536
  misc_feature 1..255: note = Description of Artificial Sequence: Synthetic polynucleotide
  source 1..255: mol_type = other DNA

SEQ ID NO: 8076 - DNA, 630 bp, synthetic construct; identical to SEQ ID NO: 3798
  misc_feature 1..630: note = Description of Artificial Sequence: Synthetic polynucleotide
  source 1..630: mol_type = other DNA

SEQ ID NO: 8077 - DNA, 283 bp, synthetic construct; identical to SEQ ID NO: 3820
  misc_feature 1..283: note = Description of Artificial Sequence: Synthetic polynucleotide
  source 1..283: mol_type = other DNA

SEQ ID NO: 8078 - DNA, 249 bp, synthetic construct; identical to SEQ ID NO: 3842
  misc_feature 1..249: note = Description of Artificial Sequence: Synthetic polynucleotide
  source 1..249: mol_type = other DNA

SEQ ID NO: 8079 - DNA, 365 bp, synthetic construct; identical to SEQ ID NO: 3426
  misc_feature 1..365: note = Description of Artificial Sequence: Synthetic polynucleotide
  source 1..365: mol_type = other DNA

SEQ ID NO: 8080 - DNA, 324 bp, synthetic construct; identical to SEQ ID NO: 3437
  misc_feature 1..324: note = Description of Artificial Sequence: Synthetic polynucleotide
  source 1..324: mol_type = other DNA

SEQ ID NO: 8081 - DNA, 595 bp, synthetic construct; identical to SEQ ID NO: 3459
  misc_feature 1..595: note = Description of Artificial Sequence: Synthetic polynucleotide
  source 1..595: mol_type = other DNA

SEQ ID NO: 8082 - DNA, 372 bp, synthetic construct; identical to SEQ ID NO: 3470
  misc_feature 1..372: note = Description of Artificial Sequence: Synthetic polynucleotide
  source 1..372: mol_type = other DNA

SEQ ID NO: 8083 - DNA, 296 bp, synthetic construct; identical to SEQ ID NO: 3481
  misc_feature 1..296: note = Description of Artificial Sequence: Synthetic polynucleotide
  source 1..296: mol_type = other DNA

SEQ ID NO: 8084 - DNA, 407 bp, synthetic construct; identical to SEQ ID NO: 3492
  misc_feature 1..407: note = Description of Artificial Sequence: Synthetic polynucleotide
  source 1..407: mol_type = other DNA

SEQ ID NO: 8085 - DNA, 846 bp, synthetic construct; identical to SEQ ID NO: 3503
  misc_feature 1..846: note = Description of Artificial Sequence: Synthetic polynucleotide
  source 1..846: mol_type = other DNA

SEQ ID NO: 8086 - DNA, 481 bp, synthetic construct; identical to SEQ ID NO: 3514
  misc_feature 1..481: note = Description of Artificial Sequence: Synthetic polynucleotide
  source 1..481: mol_type = other DNA

SEQ ID NO: 8087 - DNA, 340 bp, synthetic construct; identical to SEQ ID NO: 3559
  misc_feature 1..340: note = Description of Artificial Sequence: Synthetic polynucleotide
  source 1..340: mol_type = other DNA

SEQ ID NO: 8088 - DNA, 224 bp, synthetic construct; identical to SEQ ID NO: 3570
  misc_feature 1..224: note = Description of Artificial Sequence: Synthetic polynucleotide
  source 1..224: mol_type = other DNA

SEQ ID NO: 8089 - DNA, 255 bp, synthetic construct; identical to SEQ ID NO: 3964
  misc_feature 1..255: note = Description of Artificial Sequence: Synthetic polynucleotide
  source 1..255: mol_type = other DNA

SEQ ID NO: 8090 - DNA, 630 bp, synthetic construct; identical to SEQ ID NO: 4226
  misc_feature 1..630: note = Description of Artificial Sequence: Synthetic polynucleotide
  source 1..630: mol_type = other DNA

SEQ ID NO: 8091 - DNA, 283 bp, synthetic construct; identical to SEQ ID NO: 4248
  misc_feature 1..283: note = Description of Artificial Sequence: Synthetic polynucleotide
  source 1..283: mol_type = other DNA

SEQ ID NO: 8092 - DNA, 249 bp, synthetic construct; identical to SEQ ID NO: 4270
  misc_feature 1..249: note = Description of Artificial Sequence: Synthetic polynucleotide
  source 1..249: mol_type = other DNA

SEQ ID NO: 8093 - DNA, 365 bp, synthetic construct; identical to SEQ ID NO: 3854
  misc_feature 1..365: note = Description of Artificial Sequence: Synthetic polynucleotide
  source 1..365: mol_type = other DNA

SEQ ID NO: 8094 - DNA, 324 bp, synthetic construct; identical to SEQ ID NO: 3865
  misc_feature 1..324: note = Description of Artificial Sequence: Synthetic polynucleotide
  source 1..324: mol_type = other DNA

SEQ ID NO: 8095 - DNA, 595 bp, synthetic construct; identical to SEQ ID NO: 3887
  misc_feature 1..595: note = Description of Artificial Sequence: Synthetic polynucleotide
  source 1..595: mol_type = other DNA

SEQ ID NO: 8096 - DNA, 372 bp, synthetic construct; identical to SEQ ID NO: 3898
  misc_feature 1..372: note = Description of Artificial Sequence: Synthetic polynucleotide
  source 1..372: mol_type = other DNA

SEQ ID NO: 8097 - DNA, 296 bp, synthetic construct; identical to SEQ ID NO: 3909
  misc_feature 1..296: note = Description of Artificial Sequence: Synthetic polynucleotide
  source 1..296: mol_type = other DNA

SEQ ID NO: 8098 - DNA, 407 bp, synthetic construct; identical to SEQ ID NO: 3920
  misc_feature 1..407: note = Description of Artificial Sequence: Synthetic polynucleotide
  source 1..407: mol_type = other DNA

SEQ ID NO: 8099 - DNA, 846 bp, synthetic construct; identical to SEQ ID NO: 3931
  misc_feature 1..846: note = Description of Artificial Sequence: Synthetic polynucleotide
  source 1..846: mol_type = other DNA

SEQ ID NO: 8100 - DNA, 481 bp, synthetic construct; identical to SEQ ID NO: 3942
  misc_feature 1..481: note = Description of Artificial Sequence: Synthetic polynucleotide
  source 1..481: mol_type = other DNA

SEQ ID NO: 8101 - DNA, 340 bp, synthetic construct; identical to SEQ ID NO: 3987
  misc_feature 1..340: note = Description of Artificial Sequence: Synthetic polynucleotide
  source 1..340: mol_type = other DNA

SEQ ID NO: 8102 - DNA, 224 bp, synthetic construct; identical to SEQ ID NO: 3998
  misc_feature 1..224: note = Description of Artificial Sequence: Synthetic polynucleotide
  source 1..224: mol_type = other DNA

SEQ ID NO: 8103 - DNA, 255 bp, synthetic construct; identical to SEQ ID NO: 4392
  misc_feature 1..255: note = Description of Artificial Sequence: Synthetic polynucleotide
  source 1..255: mol_type = other DNA

SEQ ID NO: 8104 - DNA, 630 bp, synthetic construct; identical to SEQ ID NO: 4654
  misc_feature 1..630: note = Description of Artificial Sequence: Synthetic polynucleotide
  source 1..630: mol_type = other DNA

SEQ ID NO: 8105 - DNA, 283 bp, synthetic construct; identical to SEQ ID NO: 4676
  misc_feature 1..283: note = Description of Artificial Sequence: Synthetic polynucleotide
  source 1..283: mol_type = other DNA

SEQ ID NO: 8106 - DNA, 249 bp, synthetic construct; identical to SEQ ID NO: 4698
  misc_feature 1..249: note = Description of Artificial Sequence: Synthetic polynucleotide
  source 1..249: mol_type = other DNA

SEQ ID NO: 8107 - DNA, 365 bp, synthetic construct; identical to SEQ ID NO: 4282
  misc_feature 1..365: note = Description of Artificial Sequence: Synthetic polynucleotide
  source 1..365: mol_type = other DNA

SEQ ID NO: 8108 - DNA, 324 bp, synthetic construct; identical to SEQ ID NO: 4293
  misc_feature 1..324: note = Description of Artificial Sequence: Synthetic polynucleotide
  source 1..324: mol_type = other DNA

SEQ ID NO: 8109 - DNA, 595 bp, synthetic construct; identical to SEQ ID NO: 4315
  misc_feature 1..595: note = Description of Artificial Sequence: Synthetic polynucleotide
  source 1..595: mol_type = other DNA

SEQ ID NO: 8110 - DNA, 372 bp, synthetic construct; identical to SEQ ID NO: 4326
  misc_feature 1..372: note = Description of Artificial Sequence: Synthetic polynucleotide
  source 1..372: mol_type = other DNA

SEQ ID NO: 8111 - DNA, 296 bp, synthetic construct; identical to SEQ ID NO: 4337
  misc_feature 1..296: note = Description of Artificial Sequence: Synthetic polynucleotide
  source 1..296: mol_type = other DNA

SEQ ID NO: 8112 - DNA, 407 bp, synthetic construct; identical to SEQ ID NO: 4348
  misc_feature 1..407: note = Description of Artificial Sequence: Synthetic polynucleotide
  source 1..407: mol_type = other DNA

SEQ ID NO: 8113 - DNA, 846 bp, synthetic construct; identical to SEQ ID NO: 4359
  misc_feature 1..846: note = Description of Artificial Sequence: Synthetic polynucleotide
  source 1..846: mol_type = other DNA

SEQ ID NO: 8114 - DNA, 481 bp, synthetic construct; identical to SEQ ID NO: 4370
  misc_feature 1..481: note = Description of Artificial Sequence: Synthetic polynucleotide
  source 1..481: mol_type = other DNA

SEQ ID NO: 8115 - DNA, 340 bp, synthetic construct; identical to SEQ ID NO: 4415
  misc_feature 1..340: note = Description of Artificial Sequence: Synthetic polynucleotide
  source 1..340: mol_type = other DNA

SEQ ID NO: 8116 - DNA, 224 bp, synthetic construct; identical to SEQ ID NO: 4426
  misc_feature 1..224: note = Description of Artificial Sequence: Synthetic polynucleotide
  source 1..224: mol_type = other DNA

SEQ ID NO: 8117 - DNA, 255 bp, synthetic construct; identical to SEQ ID NO: 4820
  misc_feature 1..255: note = Description of Artificial Sequence: Synthetic polynucleotide
  source 1..255: mol_type = other DNA

SEQ ID NO: 8118 - DNA, 630 bp, synthetic construct; identical to SEQ ID NO: 5082
  misc_feature 1..630: note = Description of Artificial Sequence: Synthetic polynucleotide
  source 1..630: mol_type = other DNA

SEQ ID NO: 8119 - DNA, 283 bp, synthetic construct; identical to SEQ ID NO: 5104
  misc_feature 1..283: note = Description of Artificial Sequence: Synthetic polynucleotide
  source 1..283: mol_type = other DNA

SEQ ID NO: 8120 - DNA, 249 bp, synthetic construct; identical to SEQ ID NO: 5126
  misc_feature 1..249: note = Description of Artificial Sequence: Synthetic polynucleotide
  source 1..249: mol_type = other DNA

SEQ ID NO: 8121 - DNA, 365 bp, synthetic construct; identical to SEQ ID NO: 4710
  misc_feature 1..365: note = Description of Artificial Sequence: Synthetic polynucleotide
  source 1..365: mol_type = other DNA

SEQ ID NO: 8122 - DNA, 324 bp, synthetic construct; identical to SEQ ID NO: 4721
  misc_feature 1..324: note = Description of Artificial Sequence: Synthetic polynucleotide
  source 1..324: mol_type = other DNA

SEQ ID NO: 8123 - DNA, 595 bp, synthetic construct; identical to SEQ ID NO: 4743
  misc_feature 1..595: note = Description of Artificial Sequence: Synthetic polynucleotide
  source 1..595: mol_type = other DNA

SEQ ID NO: 8124 - DNA, 372 bp, synthetic construct; identical to SEQ ID NO: 4754
  misc_feature 1..372: note = Description of Artificial Sequence: Synthetic polynucleotide
  source 1..372: mol_type = other DNA

SEQ ID NO: 8125 - DNA, 296 bp, synthetic construct; identical to SEQ ID NO: 4765
  misc_feature 1..296: note = Description of Artificial Sequence: Synthetic polynucleotide
  source 1..296: mol_type = other DNA

SEQ ID NO: 8126 - DNA, 407 bp, synthetic construct; identical to SEQ ID NO: 4776
  misc_feature 1..407: note = Description of Artificial Sequence: Synthetic polynucleotide
  source 1..407: mol_type = other DNA

SEQ ID NO: 8127 - DNA, 846 bp, synthetic construct; identical to SEQ ID NO: 4787
  misc_feature 1..846: note = Description of Artificial Sequence: Synthetic polynucleotide
  source 1..846: mol_type = other DNA

SEQ ID NO: 8128 - DNA, 481 bp, synthetic construct; identical to SEQ ID NO: 4798
  misc_feature 1..481: note = Description of Artificial Sequence: Synthetic polynucleotide
  source 1..481: mol_type = other DNA

SEQ ID NO: 8129 - DNA, 340 bp, synthetic construct; identical to SEQ ID NO: 4843
  misc_feature 1..340: note = Description of Artificial Sequence: Synthetic polynucleotide
  source 1..340: mol_type = other DNA

SEQ ID NO: 8130 - DNA, 224 bp, synthetic construct; identical to SEQ ID NO: 4854
  misc_feature 1..224: note = Description of Artificial Sequence: Synthetic polynucleotide
  source 1..224: mol_type = other DNA

SEQ ID NO: 8131 - DNA, 395 bp, Homo sapiens; identical to SEQ ID NO: 7829
  source 1..395: mol_type = unassigned DNA

SEQ ID NO: 8132 - DNA, 5819 bp, Homo sapiens; identical to SEQ ID NO: 7838
  source 1..5819: mol_type = unassigned DNA

SEQ ID NO: 8133 - DNA, 1265 bp, Homo sapiens; identical to SEQ ID NO: 7840
  source 1..1265: mol_type = unassigned DNA

SEQ ID NO: 8134 - DNA, 362 bp, Homo sapiens; identical to SEQ ID NO: 7842
  source 1..362: mol_type = unassigned DNA

SEQ ID NO: 8135 - DNA, 572 bp, Homo sapiens; identical to SEQ ID NO: 7820
  source 1..572: mol_type = unassigned DNA

SEQ ID NO: 8136 - DNA, 2400 bp, Homo sapiens; identical to SEQ ID NO: 7822
  source 1..2400: mol_type = unassigned DNA

SEQ ID NO: 8137 - DNA, 1859 bp, Homo sapiens; identical to SEQ ID NO: 7823
  source 1..1859: mol_type = unassigned DNA

SEQ ID NO: 8138 - DNA, 902 bp, Homo sapiens; identical to SEQ ID NO: 7824
  source 1..902: mol_type = unassigned DNA

SEQ ID NO: 8139 - DNA, 2044 bp, Homo sapiens; identical to SEQ ID NO: 7825
  source 1..2044: mol_type = unassigned DNA

SEQ ID NO: 8140 - DNA, 1152 bp, Homo sapiens; identical to SEQ ID NO: 7826
  source 1..1152: mol_type = unassigned DNA

SEQ ID NO: 8141 - DNA, 872 bp, Homo sapiens; identical to SEQ ID NO: 7827
  source 1..872: mol_type = unassigned DNA

SEQ ID NO: 8142 - DNA, 1743 bp, Homo sapiens; identical to SEQ ID NO: 7832
  source 1..1743: mol_type = unassigned DNA

SEQ ID NO: 8143 - DNA, 2405 bp, Homo sapiens; identical to SEQ ID NO: 7833
  source 1..2405: mol_type = unassigned DNA

SEQ ID NO: 8144 - DNA, 395 bp, Homo sapiens; identical to SEQ ID NO: 7853
  source 1..395: mol_type = unassigned DNA

SEQ ID NO: 8145 - DNA, 5819 bp, Homo sapiens; identical to SEQ ID NO: 7862
  source 1..5819: mol_type = unassigned DNA

SEQ ID NO: 8146 - DNA, 1265 bp, Homo sapiens; identical to SEQ ID NO: 7864
  source 1..1265: mol_type = unassigned DNA

SEQ ID NO: 8147 - DNA, 362 bp, Homo sapiens; identical to SEQ ID NO: 7866
  source 1..362: mol_type = unassigned DNA

SEQ ID NO: 8148 - DNA, 572 bp, Homo sapiens; identical to SEQ ID NO: 7844
  source 1..572: mol_type = unassigned DNA

SEQ ID NO: 8149 - DNA, 2400 bp, Homo sapiens; identical to SEQ ID NO: 7846
  source 1..2400: mol_type = unassigned DNA

SEQ ID NO: 8150 - DNA, 1859 bp, Homo sapiens; identical to SEQ ID NO: 7847
  source 1..1859: mol_type = unassigned DNA

SEQ ID NO: 8151 - DNA, 902 bp, Homo sapiens; identical to SEQ ID NO: 7848
  source 1..902: mol_type = unassigned DNA

SEQ ID NO: 8152 - DNA, 2044 bp, Homo sapiens; identical to SEQ ID NO: 7849
  source 1..2044: mol_type = unassigned DNA

SEQ ID NO: 8153 - DNA, 1152 bp, Homo sapiens; identical to SEQ ID NO: 7850
  source 1..1152: mol_type = unassigned DNA

SEQ ID NO: 8154 - DNA, 872 bp, Homo sapiens; identical to SEQ ID NO: 7851
  source 1..872: mol_type = unassigned DNA

SEQ ID NO: 8155 - DNA, 1743 bp, Homo sapiens; identical to SEQ ID NO: 7856
  source 1..1743: mol_type = unassigned DNA

SEQ ID NO: 8156 - DNA, 2405 bp, Homo sapiens; identical to SEQ ID NO: 7857
  source 1..2405: mol_type = unassigned DNA

SEQ ID NO: 8157 - DNA, 395 bp, synthetic construct; identical to SEQ ID NO: 7877
  misc_feature 1..395: note = Description of Artificial Sequence: Synthetic polynucleotide
  source 1..395: mol_type = other DNA

SEQ ID NO: 8158 - DNA, 5819 bp, synthetic construct; identical to SEQ ID NO: 7886
  misc_feature 1..5819: note = Description of Artificial Sequence: Synthetic polynucleotide
  source 1..5819: mol_type = other DNA

SEQ ID NO: 8159 - DNA, 1265 bp, synthetic construct; identical to SEQ ID NO: 7888
  misc_feature 1..1265: note = Description of Artificial Sequence: Synthetic polynucleotide
  source 1..1265: mol_type = other DNA

SEQ ID NO: 8160 - DNA, 362 bp, synthetic construct; identical to SEQ ID NO: 7890
  misc_feature 1..362: note = Description of Artificial Sequence: Synthetic polynucleotide
  source 1..362: mol_type = other DNA

SEQ ID NO: 8161 - DNA, 572 bp, synthetic construct; identical to SEQ ID NO: 7868
  misc_feature 1..572: note = Description of Artificial Sequence: Synthetic polynucleotide
  source 1..572: mol_type = other DNA

SEQ ID NO: 8162 - DNA, 2400 bp, synthetic construct; identical to SEQ ID NO: 7870
  misc_feature 1..2400: note = Description of Artificial Sequence: Synthetic polynucleotide
  source 1..2400: mol_type = other DNA

SEQ ID NO: 8163 - DNA, 1859 bp, synthetic construct; identical to SEQ ID NO: 7871
  misc_feature 1..1859: note = Description of Artificial Sequence: Synthetic polynucleotide
  source 1..1859: mol_type = other DNA

SEQ ID NO: 8164 - DNA, 902 bp, synthetic construct; identical to SEQ ID NO: 7872
  misc_feature 1..902: note = Description of Artificial Sequence: Synthetic polynucleotide
  source 1..902: mol_type = other DNA

SEQ ID NO: 8165 - DNA, 2044 bp, synthetic construct; identical to SEQ ID NO: 7873
  misc_feature 1..2044: note = Description of Artificial Sequence: Synthetic polynucleotide
  source 1..2044: mol_type = other DNA

SEQ ID NO: 8166 - DNA, 1152 bp, synthetic construct; identical to SEQ ID NO: 7874
  misc_feature 1..1152: note = Description of Artificial Sequence: Synthetic polynucleotide
  source 1..1152: mol_type = other DNA

SEQ ID NO: 8167 - DNA, 872 bp, synthetic construct; identical to SEQ ID NO: 7875
  misc_feature 1..872: note = Description of Artificial Sequence: Synthetic polynucleotide
  source 1..872: mol_type = other DNA

SEQ ID NO: 8168 - DNA, 1743 bp, synthetic construct; identical to SEQ ID NO: 7880
  misc_feature 1..1743: note = Description of Artificial Sequence: Synthetic polynucleotide
  source 1..1743: mol_type = other DNA

SEQ ID NO: 8169 - DNA, 2405 bp, synthetic construct; identical to SEQ ID NO: 7881
  misc_feature 1..2405: note = Description of Artificial Sequence: Synthetic polynucleotide
  source 1..2405: mol_type = other DNA

SEQ ID NO: 8170 - DNA, 395 bp, synthetic construct; identical to SEQ ID NO: 7901
  misc_feature 1..395: note = Description of Artificial Sequence: Synthetic polynucleotide
  source 1..395: mol_type = other DNA

SEQ ID NO: 8171 - DNA, 5819 bp, synthetic construct; identical to SEQ ID NO: 7910
  misc_feature 1..5819: note = Description of Artificial Sequence: Synthetic polynucleotide
  source 1..5819: mol_type = other DNA

SEQ ID NO: 8172 - DNA, 1265 bp, synthetic construct; identical to SEQ ID NO: 7912
  misc_feature 1..1265: note = Description of Artificial Sequence: Synthetic polynucleotide
  source 1..1265: mol_type = other DNA

SEQ ID NO: 8173 - DNA, 362 bp, synthetic construct; identical to SEQ ID NO: 7914
  misc_feature 1..362: note = Description of Artificial Sequence: Synthetic polynucleotide
  source 1..362: mol_type = other DNA

SEQ ID NO: 8174 - DNA, 572 bp, synthetic construct; identical to SEQ ID NO: 7892
  misc_feature 1..572: note = Description of Artificial Sequence: Synthetic polynucleotide
  source 1..572: mol_type = other DNA

SEQ ID NO: 8175 - DNA, 2400 bp, synthetic construct; identical to SEQ ID NO: 7894
  misc_feature 1..2400: note = Description of Artificial Sequence: Synthetic polynucleotide
  source 1..2400: mol_type = other DNA

SEQ ID NO: 8176 - DNA, 1859 bp, synthetic construct; identical to SEQ ID NO: 7895
  misc_feature 1..1859: note = Description of Artificial Sequence: Synthetic polynucleotide
  source 1..1859: mol_type = other DNA

SEQ ID NO: 8177 - DNA, 902 bp, synthetic construct; identical to SEQ ID NO: 7896
  misc_feature 1..902: note = Description of Artificial Sequence: Synthetic polynucleotide
  source 1..902: mol_type = other DNA

SEQ ID NO: 8178 - DNA, 2044 bp, synthetic construct; identical to SEQ ID NO: 7897
  misc_feature 1..2044: note = Description of Artificial Sequence: Synthetic polynucleotide
  source 1..2044: mol_type = other DNA

SEQ ID NO: 8179 - DNA, 1152 bp, synthetic construct; identical to SEQ ID NO: 7898
  misc_feature 1..1152: note = Description of Artificial Sequence: Synthetic polynucleotide
  source 1..1152: mol_type = other DNA

SEQ ID NO: 8180 - DNA, 872 bp, synthetic construct; identical to SEQ ID NO: 7899
  misc_feature 1..872: note = Description of Artificial Sequence: Synthetic polynucleotide
  source 1..872: mol_type = other DNA

SEQ ID NO: 8181 - DNA, 1743 bp, synthetic construct; identical to SEQ ID NO: 7904
  misc_feature 1..1743: note = Description of Artificial Sequence: Synthetic polynucleotide
  source 1..1743: mol_type = other DNA

SEQ ID NO: 8182 - DNA, 2405 bp, synthetic construct; identical to SEQ ID NO: 7905
  misc_feature 1..2405: note = Description of Artificial Sequence: Synthetic polynucleotide
  source 1..2405: mol_type = other DNA

SEQ ID NO: 8183 - DNA, 395 bp, synthetic construct; identical to SEQ ID NO: 7925
  misc_feature 1..395: note = Description of Artificial Sequence: Synthetic polynucleotide
  source 1..395: mol_type = other DNA

SEQ ID NO: 8184 - DNA, 5819 bp, synthetic construct; identical to SEQ ID NO: 7934
  misc_feature 1..5819: note = Description of Artificial Sequence: Synthetic polynucleotide
  source 1..5819: mol_type = other DNA

SEQ ID NO: 8185 - DNA, 1265 bp, synthetic construct; identical to SEQ ID NO: 7936
  misc_feature 1..1265: note = Description of Artificial Sequence: Synthetic polynucleotide
  source 1..1265: mol_type = other DNA

SEQ ID NO: 8186 - DNA, 362 bp, synthetic construct; identical to SEQ ID NO: 7938
  misc_feature 1..362: note = Description of Artificial Sequence: Synthetic polynucleotide
  source 1..362: mol_type = other DNA

SEQ ID NO: 8187 - DNA, 572 bp, synthetic construct; identical to SEQ ID NO: 7916
  misc_feature 1..572: note = Description of Artificial Sequence: Synthetic polynucleotide
  source 1..572: mol_type = other DNA

SEQ ID NO: 8188 - DNA, 2400 bp, synthetic construct; identical to SEQ ID NO: 7918
  misc_feature 1..2400: note = Description of Artificial Sequence: Synthetic polynucleotide
  source 1..2400: mol_type = other DNA

SEQ ID NO: 8189 - DNA, 1859 bp, synthetic construct; identical to SEQ ID NO: 7919
  misc_feature 1..1859: note = Description of Artificial Sequence: Synthetic polynucleotide
  source 1..1859: mol_type = other DNA

SEQ ID NO: 8190 - DNA, 902 bp, synthetic construct; identical to SEQ ID NO: 7920
  misc_feature 1..902: note = Description of Artificial Sequence: Synthetic polynucleotide
  source 1..902: mol_type = other DNA

SEQ ID NO: 8191 - DNA, 2044 bp, synthetic construct; identical to SEQ ID NO: 7921
  misc_feature 1..2044: note = Description of Artificial Sequence: Synthetic polynucleotide
  source 1..2044: mol_type = other DNA

SEQ ID NO: 8192 - DNA, 1152 bp, synthetic construct; identical to SEQ ID NO: 7922
  misc_feature 1..1152: note = Description of Artificial Sequence: Synthetic polynucleotide
  source 1..1152: mol_type = other DNA

SEQ ID NO: 8193 - DNA, 872 bp, synthetic construct; identical to SEQ ID NO: 7923
  misc_feature 1..872: note = Description of Artificial Sequence: Synthetic polynucleotide
  source 1..872: mol_type = other DNA

SEQ ID NO: 8194 - DNA, 1743 bp, synthetic construct; identical to SEQ ID NO: 7928
  misc_feature 1..1743: note = Description of Artificial Sequence: Synthetic polynucleotide
  source 1..1743: mol_type = other DNA

SEQ ID NO: 8195 - DNA, 2405 bp, synthetic construct; identical to SEQ ID NO: 7929
  misc_feature 1..2405: note = Description of Artificial Sequence: Synthetic polynucleotide
  source 1..2405: mol_type = other DNA

SEQ ID NO: 8196 - DNA, 395 bp, synthetic construct; identical to SEQ ID NO: 7949
  misc_feature 1..395: note = Description of Artificial Sequence: Synthetic polynucleotide
  source 1..395: mol_type = other DNA

SEQ ID NO: 8197 - DNA, 5819 bp, synthetic construct; identical to SEQ ID NO: 7958
  misc_feature 1..5819: note = Description of Artificial Sequence: Synthetic polynucleotide
  source 1..5819: mol_type = other DNA

SEQ ID NO: 8198 - DNA, 1265 bp, synthetic construct; identical to SEQ ID NO: 7960
  misc_feature 1..1265: note = Description of Artificial Sequence: Synthetic polynucleotide
  source 1..1265: mol_type = other DNA

SEQ ID NO: 8199 - DNA, 362 bp, synthetic construct; identical to SEQ ID NO: 7962
  misc_feature 1..362: note = Description of Artificial Sequence: Synthetic polynucleotide
  source 1..362: mol_type = other DNA

SEQ ID NO: 8200 - DNA, 572 bp, synthetic construct; identical to SEQ ID NO: 7940
  misc_feature 1..572: note = Description of Artificial Sequence: Synthetic polynucleotide
  source 1..572: mol_type = other DNA

SEQ ID NO: 8201 - DNA, 2400 bp, synthetic construct; identical to SEQ ID NO: 7942
  misc_feature 1..2400: note = Description of Artificial Sequence: Synthetic polynucleotide
  source 1..2400: mol_type = other DNA

SEQ ID NO: 8202 - DNA, 1859 bp, synthetic construct; identical to SEQ ID NO: 7943
  misc_feature 1..1859: note = Description of Artificial Sequence: Synthetic polynucleotide
  source 1..1859: mol_type = other DNA

SEQ ID NO: 8203 - DNA, 902 bp, synthetic construct; identical to SEQ ID NO: 7944
  misc_feature 1..902: note = Description of Artificial Sequence: Synthetic polynucleotide
  source 1..902: mol_type = other DNA

SEQ ID NO: 8204 - DNA, 2044 bp, synthetic construct; identical to SEQ ID NO: 7945
  misc_feature 1..2044: note = Description of Artificial Sequence: Synthetic polynucleotide
  source 1..2044: mol_type = other DNA

SEQ ID NO: 8205 - DNA, 1152 bp, synthetic construct; identical to SEQ ID NO: 7946
  misc_feature 1..1152: note = Description of Artificial Sequence: Synthetic polynucleotide
  source 1..1152: mol_type = other DNA

SEQ ID NO: 8206 - DNA, 872 bp, synthetic construct; identical to SEQ ID NO: 7947
  misc_feature 1..872: note = Description of Artificial Sequence: Synthetic polynucleotide
  source 1..872: mol_type = other DNA

SEQ ID NO: 8207 - DNA, 1743 bp, synthetic construct; identical to SEQ ID NO: 7952
  misc_feature 1..1743: note = Description of Artificial Sequence: Synthetic polynucleotide
  source 1..1743: mol_type = other DNA

SEQ ID NO: 8208 - DNA, 2405 bp, synthetic construct; identical to SEQ ID NO: 7953
  misc_feature 1..2405: note = Description of Artificial Sequence: Synthetic polynucleotide
  source 1..2405: mol_type = other DNA

SEQ ID NO: 8209 - DNA, 355 bp, Homo sapiens
  source 1..355: mol_type = unassigned DNA
tcgaactggatgccggatggaaacctctctgcgctattagactgcgtccagtacagcagatggcacgagcacgtgcggcgctcagcttaggctctcggaggcagctgagttggaaatcccgacggaaagcacccacaagctcccactctgcgctggcccacccgcgtgcacgcccaccccccacgcgcgtccctggctcagaagcgcacagatgtttactgcttagagccggtaccgctggggagatcgagcgacttgcgcggcgcacagtgcggcgctggcagggctctgggctcccggtcgggggttcgagcggccaagggatgggggtgggggcggggagagtggggggagg

SEQ ID NO: 8210 - DNA, 730 bp, Homo sapiens
  source 1..730: mol_type = unassigned DNA
ctgctccggagctgcaggcttctaggcgctgggagggcgaagcaggagagccggttagtccatccccgcgctccgcaaacttttctaaccgggtaacaaagtgagcagcggtggccgccgcgattcctttaacttcgcattccggaggctcgagggggctctgggaccgagcggcctcgcagcggcgacagaaatacatattttacgaaaaagaaaaaaaaaaaaacgagtcgcgcgaacccgtcaagtcagatgtgcgcggcttgaagcggaggaggctctgacgtcagccccacctcgcgcagcccggcctggccgcagactcgccggtcactcgccggcggctcaggccgggaggggccaggacagtcccggccgcgcggtggacggaggggccattcctccgggcgttagcaaataaattccatccgagtcaatatcgcccagcgaacggtgtttctctttagtcacccgagaacgagaggcacttttaattagaaattaattaatgagcagctgctccttcccgccccactgtaatcattcgtctcaattacaaatgagacctatgaaaggacacgctgaagatgtaatcaacagttaaaattagcccggcgctgcgcaggcggccggcccggcctcgcgctggcgcgctctgctccgagtggcaggaaggggctcgcaggcgccccgcacgcgtctcgtcactattgtttaatcgagaatcagc

SEQ ID NO: 8211 - DNA, 383 bp, Homo sapiens
  source 1..383: mol_type = unassigned DNA
agcggcggcgcgggccgcgggcggcgatgggcgaggagcagagcacggtgagcggcggcggcgggccccaggagtcgcagaccctggccagtggcactgcgggccaccctgagcccccgaggcctcagggggacagcgcccgggcgcccccgctgcgcgccgcctccgcggagccgagcggcggtggctgcggaagcgactggggctgcgcggacaccagcgccccagagcccgcgaggagcctggggcccccgggctggagtaagagccgagcaccggcgcagcctgcgggactggcactcaccgggcctctcaatccccagaccttgccactgcagttggagctggaggaggaagaggaggaagctggggatcgaaaagag

SEQ ID NO: 8212 - DNA, 349 bp, Homo sapiens
  source 1..349: mol_type = unassigned DNA
agaccgagcgggactatgtgggcacgctggagttcctggtgtcggtgagtgtccccggcagacgcagggggacgtccgggcggcgcggggcgcgggtcccggagtggctgcgggaaggacgcgcggcattgtctgtgcggggacccgggacgggtcggggcatcacaggcgcgggaatccacgtgtggactctgcgttcgcgggcgcggtgacccccgcggggatttgttggtgccccgagactcactgagttgcgggggccttggagacctccaggtctgaaaagttagctctagagaagagagctccagtccagggaatcccggctgccctatcttccctcactttt

SEQ ID NO: 8213 - DNA, 465 bp, Homo sapiens
  source 1..465: mol_type = unassigned DNA
ccgcacggcccgccgggtcgcggtgagcaaggcgggcaggcgcggcgggaggcgtccgacgcccaccccgggcttggcgtccccttccggccaccacgcggcgccgccccccgggatcctccagtccccggagccccgcgcgcccagagccgctcggagcgcgggcggggtcagcttgggcagccgcgggtcgctgctgcgtcggaagtctccgtcgccagggagccccttgggcgccaggtcctgggcccctgggcgaagtcgacgccagaacatgcttggccccgcactcagctcaccgcaccctcagcgcgcgtgggtggggggcgccggctgaggtggggagggcatagtccagccccaggccatagtgccccgggcggggcagcgcggtgcggggtgaacgccaccggcccggcggacagcgagtggcttcaggcgagagctcccagagcctctgtttcc

SEQ ID NO: 8214 - DNA, 424 bp, Homo sapiens
  source 1..424: mol_type = unassigned DNA
acacagaggtgacgcacgagtgacccacagagagggacccctgggcctctggtgggggcctgggagacggtcgaagggggcccgggcagaagctccgcggccgggccggcggagggaagggggcggccgcgcccgggacccggctcccctcggctccacttacctgctccgaagagtggccccagctctgcgcctcttcctgcgaccccacacacagggacagccccaggcacagccccagcagcaggagcatggcggggcgagggcgcgggacgctcggggacccggcgggacacgctttgcagcgcccagggctccagccactgcgggacgctctcggggccgcccaccccgcggtcccagcccggaccccgcccaccccacggacccagcccggaccccgcccaccccgcggtcccagccc

SEQ ID NO: 8215 - DNA, 540 bp, Homo sapiens
  source 1..540: mol_type = unassigned DNA
acgaggaggaagaggaggaggaagaagaagaagaggaagaggaggaggaggaggaggaggacgcgtctaggctgagatggttcgcgtggatattgctactcattctaagactgctgcctccgccgccgccgccgccgccgctgctgccgccgccgccgccgccaccatttgccatagctagcaacgggcagccggcgcaggggctcgggggagctcctcccgccgccagcgccaccccaaacacccatcaacagccatattgctgctactgctgccgccgccgccgccgccgcggagcgcgggaggggggcggggaggcgcctgggctcggggcgctgtgcgcgacctggcggggtgcgccgagatatatacagcgagccgccgccgcccgcccgggggggagggggatggagtgcgcgggcagctccccctccccggcccgcgccccgctcgccccgggctgcgctggccccgagcgccgagagccagggggcgccgcgggccgcccgcgcccggggtctgcgccgcccccgggcccgc

SEQ ID NO: 8216 - DNA, 472 bp, Homo sapiens
  source 1..472: mol_type = unassigned DNA
tctttttaatcccatgtcttaaaagccaaactctagttctaaagtgcagtgtggcattagcgaatgtggtggactccggcaggcctggggcaggggaatctccggtaacatccctcagtaccgaaggcaggatttcccggccacttccgtcggttggaattctcttaagcattgccctgagtctattttcaaatgaaagggggaaaaacccaaaccagattagaatctgaaacagctgaaacagctatcgatttccagcttgctttcaagtctggcagagactgtgaaagtcctaacttctccgcgatgtcagccacggcccgcggcggtcacggagccacttcagcacctcgcgatggacagtgacccccggcgtggcgcgagttccctgcggtccccacgcgggcctgggcggcgggtccctccacggctccgtccagacacccggaggcacctgccaaagctgcggagg

SEQ ID NO: 8217 - DNA, 396 bp, Homo sapiens
  source 1..396: mol_type = unassigned DNA
ggggagtgggggagtgagcagacgcccttctcctaggaggccggaatttctgcctccatctcccaccggggtccggctggccagaggcaagcttcgagaccccccaccaaccaccaccaccgttgcgagggccggtgaggctgcagataacgcttgcaaggacgggagtcggggagggtgtagggcgagtttaaaggacgggcagagcaagccccgggaagaggcaggggttttccctcccgggtcgccgccccccgcaccctcggagccagccgcagccacgcagcgccgcctgccgggcacaccaaggacctggcgcgcacgtggcgcttacccccacccccgggtccgctcctggctcgcgctcagcctccccagactattcgcaaattgagg

SEQ ID NO: 8218 - DNA, 507 bp, Homo sapiens
  source 1..507: mol_type = unassigned DNA
tgactttggggctgacaccgccaaagggcagtcagtgctcgcccaggccacttcgggaggcccaggggcacggcgaggggtcggggaaaggcgatcgcccactacagcccgcgcgcctagactgagggaggagccgggctgcagaaccggcggcggatggagacgggagggaggctgcgaggtcgctcgaggagagactaaggctctagaaacggagaagcgggcgctctgcgggaggcggcggcgctgccgctggccgtcaagggcgggaagtgttctgggactctcattaggggccgcgagcctcgagcgtcaaattcccgcggcgtccgcctagcgcgctgctgtggcgggcgcggagggcgcgcgccggcagtgggggctgcggcggcggagggcacgggcccccgctcagcgtcctcaccttcttggtgcagctgcctcccgcgagccgagacactcctgtcagggaagaggagcgccccggctgtccccctagagtctcct

SEQ ID NO: 8219 - DNA, 946 bp, Homo sapiens
  source 1..946: mol_type = unassigned DNA
cgctactcacccgagccgctcgggctggccgcgagccgggatccgcgagggctggcgggctctggcccccgaggacgcagacatgtggcttgaacctccgctcccctagccgttgcctctgtgcatctttctgggcgcccccagcgaatgcgagcggcgaggcgagggcgagcgcgccgaggaagggcgggagaggcgcggagcttggccgcgccgcgctgcgccgagcgccgggctctccccgcgagctccccgggcccgcgcgcgcgccccccactgcccccgccccccgcgcggcgcgtgccccccaccccccgccgcgcgccctcgcacccgcccggctccacgcggcgcgcgcctgccctggcggcagcggcggcggcggcggcgcgtcctcccccgaacgccgtctccagggctgctggctgcgctctccattgttccgcggctgctgcccggggtgggcggcgaggcgggggggaggtgtcggcttggccgccggggagggcttaccgctcgggcggaccctcactgcgagagcgatgcgggcccaggcgcggcgcgcgggggctgcagggcgcctagcactgggggttgccggcgcgcgggggcctcctcctggctcccaggcactcgctgctgctgggcgcccctcgcatcctcggttactatggatatctcgctcctccgccgccccctccgcgcactccgggaggccgccggggcggtagcagcggcgcggctccgcgggtgcccaggtgaccggctcggcagcggcagagcagtggcagcagccgccactgccgctgttactgcggtcgccgccgctggagagaggaggacgaggagggcaaggggcagaagcaggtcctgctctgtctgccccagaggccacctcgggtttcttctcactaaccaagcgacttcgtgtttacctcgcaggaga

SEQ ID NO: 8220 - DNA, 390 bp, Homo sapiens
  source 1..390: mol_type = unassigned DNA
cggggcaggcgcggcccgcaaggacccccgcgatggagacgcaacactgccgcgactgcacttggggcagccccgccgcgtcccagccgcctcccggcaggaagcgtaggtgtgtgagccgacccggagcgagccgcgccctcgggccagcgtgggcagggcgccgcagcctgcgcagccccgaggaccccgcgtcgctctcccgagccagggttctcaggagcgggccgcgcaggagacgttagagggggttgttagcggctgttgggagaacgggtcacggaaacagtcccttccaaagccggggccatcgtggggtgggcgagtccgccctcccaggccgggggcgcggaccagaggggacgtgtgcagacggccgcggtcagcccc

SEQ ID NO: 8221 - DNA, 440 bp, Homo sapiens
  source 1..440: mol_type = unassigned DNA
ctggtgagcagtggggcgggtgggcgggtgcccgcgacgggaaggggctgggcggcgctgacggatgccggtcctcagggagttttaaggcggcgggcaccagcgggctgatcctgaagcgctgctcggagccggagcgctactgcctggcgcggctgatggctgacgcgctgcgcggctgcgtgcctgccttccacggcgtggtggagcgcgacggcgaaagctacctgcagctgcaggacctgctcgatggcttcgacggaccttgtgtgctcgactgcaaaatgggcgtcaggtatgcgtgccctgccaggtcggttggggggatcaagtaggggtccggggccgggacagctgcttgagggggacccggggcgagtgctcgaaggggtctccgtgtgcgccccctcatgccctggccgctgcctgcgcccccacag

SEQ ID NO: 8222 - DNA, 324 bp, Homo sapiens
  source 1..324: mol_type = unassigned DNA
aattccagcatccggctgcactcccggcggcttccccagctacctgaggacagtacagggggtgagatggggtggtggttggtgaacgttggttactttattttatattattttattttgagagttgccataattaccggcgccaccccccgtgcaccctgaggtctggttggcgagccgctgctgggagttttctgcaaataccccccaaagcctgaaggcgggcttcaaacgcaggcgccggggaccatgggagccttcaaatagctgcgctggcgcaatgataccttaatgatagattttccgttcttatttttagctctc

SEQ ID NO: 8223 - DNA, 355 bp, synthetic construct
  misc_feature 1..355: note = Description of Artificial Sequence: Synthetic polynucleotide
  source 1..355: mol_type = other DNA
tygaattggatgtyggatggaaatttttttgygttattagattgygtttagtatagtagatggtaygagtaygtgyggygtttagtttaggttttyggaggtagttgagttggaaatttygayggaaagtatttataagtttttattttgygttggtttattygygtgtaygtttattttttaygygygtttttggtttagaagygtatagatgtttattgtttagagtyggtatygttggggagatygagygatttgygyggygtatagtgyggygttggtagggttttgggttttyggtygggggttygagyggttaagggatgggggtgggggyggggagagtggggggagg

SEQ ID NO: 8224 - DNA, 730 bp, synthetic construct
  misc_feature 1..730: note = Description of Artificial Sequence: Synthetic polynucleotide
  source 1..730: mol_type = other DNA
ttgtttyggagttgtaggtttttaggygttgggagggygaagtaggagagtyggttagtttattttygygtttygtaaatttttttaatygggtaataaagtgagtagyggtggtygtygygatttttttaatttygtatttyggaggttygagggggttttgggatygagyggtttygtagyggygatagaaatatatattttaygaaaaagaaaaaaaaaaaaaygagtygygygaattygttaagttagatgtgygyggtttgaagyggaggaggttttgaygttagttttatttygygtagttyggtttggtygtagattygtyggttattygtyggyggtttaggtygggaggggttaggatagtttyggtygygyggtggayggaggggttattttttygggygttagtaaataaattttattygagttaatatygtttagygaayggtgtttttttttagttattygagaaygagaggtatttttaattagaaattaattaatgagtagttgttttttttygttttattgtaattattygttttaattataaatgagatttatgaaaggataygttgaagatgtaattaatagttaaaattagttyggygttgygtaggyggtyggttyggtttygygttggygygttttgtttygagtggtaggaaggggttygtaggygtttygtaygygtttygttattattgtttaatygagaattagt

SEQ ID NO: 8225 - DNA, 383 bp, synthetic construct
  misc_feature 1..383: note = Description of Artificial Sequence: Synthetic polynucleotide
  source 1..383: mol_type = other DNA
agyggyggygygggcygygggyggygatgggygaggagtagagtayggtgagyggyggyggygggttttaggagtygtagattttggttagtggtattgygggttattttgagttttygaggttttagggggatagygccygggygccccygctgygygcygccttygyggagtygagyggyggtggttgyggaagygattggggttgygyggatattagygttttagagttygygaggagtttggggttttygggttggagtaagagtygagtatyggygtagtttgygggattggtatttatygggttttttaatttttagattttgttattgtagttggagttggaggaggaagaggaggaagttggggatygaaaagag

SEQ ID NO: 8226 - DNA, 349 bp, synthetic construct
  misc_feature 1..349: note = Description of Artificial Sequence: Synthetic polynucleotide
  source 1..349: mol_type = other DNA
agatygagygggattatgtgggtaygttggagtttttggtgtyggtgagtgttttyggtagaygtagggggaygtcygggyggygyggggygygggtttyggagtggttgygggaaggaygygyggtattgtttgtgyggggattygggaygggtyggggtattataggygygggaatttaygtgtggattttgygttygygggygyggtgattttygyggggatttgttggtgtttygagatttattgagttgygggggttttggagatttttaggtttgaaaagttagttttagagaagagagttttagtttagggaatttyggttgttttatttttttttattttt

SEQ ID NO: 8227 - DNA, 465 bp, synthetic construct
  misc_feature 1..465: note = Description of Artificial Sequence: Synthetic polynucleotide
  source 1..465: mol_type = other DNA
tygtayggttygtygggtygyggtgagtaaggygggtaggygyggygggaggygttygaygtttatttygggtttggygttttttttyggttattaygyggygtygtttttygggattttttagttttyggagtttygygygtttagagtygttyggagygygggyggggttagtttgggtagtygygggtygttgttgygtyggaagttttygtygttagggagttttttgggygttaggttttgggtttttgggygaagtygaygttagaatatgtttggtttygtatttagtttatygtatttttagygygygtgggtggggggygtyggttgaggtggggagggtatagtttagttttaggttatagtgtttygggyggggtagygyggtgyggggtgaaygttatyggttyggyggatagygagtggcttcaggygagagctcccagagcctctgtttcc

SEQ ID NO: 8228 - DNA, 424 bp, synthetic construct
  misc_feature 1..424: note = Description of Artificial Sequence: Synthetic polynucleotide
  source 1..424: mol_type = other DNA
atatagaggtgaygtaygagtgatttatagagagggatttttgggtttttggtgggggtttgggagayggtygaagggggttygggtagaagttcygyggcygggcyggyggagggaagggggyggcygygccygggattyggtttttttyggttttatttatttgtttygaagagtggttttagttttgygtttttttttgygattttatatatagggatagttttaggtatagttttagtagtaggagtatggyggggygagggygygggaygttyggggattyggygggataygttttgtagygtttagggttttagttattgygggaygttttyggggtygcccacccygyggtcccagccyggacccygcccaccccayggacccagccyggacccygcccacccygyggtcccagccc

SEQ ID NO: 8229 - DNA, 540 bp, synthetic construct
  misc_feature 1..540: note = Description of Artificial Sequence: Synthetic polynucleotide
  source 1..540: mol_type = other DNA
aygaggaggaagaggaggaggaagaagaagaagaggaagaggaggaggaggaggaggaggaygygtttaggttgagatggttygygtggatattgttatttattttaagattgctgcctcygcygcygcygcygcygcygctgctgcygcygcygcygcygccaccatttgttatagttagtaaygggtagtyggygtaggggttygggggagtttttttygtygttagygttattttaaatatttattaatagttatattgttgttattgctgcygcygcygcygcygcygyggagygygggaggggggyggggaggygtttgggttyggggygttgtgygygatttggyggggtgygtygagatatatatagygagcygcygcygccygccygggggggagggggatggagtgygygggtagttttttttcccyggccygygcccygctygcccygggctgygctggcccygagygcygagagccagggggygcygygggcygccygygccyggggtctgygcygccccygggccygc

SEQ ID NO: 8230 - DNA, 472 bp, synthetic construct
  misc_feature 1..472: note = Description of Artificial Sequence: Synthetic polynucleotide
  source 1..472: mol_type = other DNA
tttttttaattttatgttttaaaagttaaattttagttttaaagtgtagtgtggtattagygaatgtggtggatttyggtaggtttggggtaggggaattttyggtaatattttttagtatygaaggtaggatttttyggttattttygtyggttggaatttttttaagtattgttttgagtttatttttaaatgaaagggggaaaaatttaaattagattagaatttgaaatagttgaaatagttatygatttttagtttgtttttaagtttggtagagattgtgaaagttttaattttttygygatgttagttayggttygyggyggttayggagttattttagtatttygygatggatagtgattttyggygtggygygagttttttgyggtttttaygygggtttgggyggygggtttttttayggtttygtttagatattyggaggtatttgttaaagttgyggagg

SEQ ID NO: 8231 - DNA, 396 bp, synthetic construct
  misc_feature 1..396: note = Description of Artificial Sequence: Synthetic polynucleotide
  source 1..396: mol_type = other DNA
ggggagtgggggagtgagtagaygttttttttttaggaggtyggaatttttgtttttattttttatyggggttyggttggttagaggtaagtttygagattttttattaattattattatygttgygagggtyggtgaggttgtagataaygtttgtaaggaygggagtyggggagggtgtagggygagtttaaaggaygggtagagtaagtttygggaagaggtaggggttttttttttygggtygtygtttttygtattttyggagttagtygtagttaygtagygtygtttgtygggtatattaaggatttggygygtaygtggygtttatttttattttygggttygtttttggttygygtttagtttttttagattattygtaaattgagg

SEQ ID NO: 8232 - DNA, 507 bp, synthetic construct
  misc_feature 1..507: note = Description of Artificial Sequence: Synthetic polynucleotide
  source 1..507: mol_type = other DNA
tgattttggggttgatatygttaaagggtagttagtgttygtttaggttatttygggaggtttaggggtayggygaggggtyggggaaaggygatygtttattatagttygygygtttagattgagggaggagtygggttgtagaatyggyggyggatggagaygggagggaggttgygaggtygttygaggagagattaaggttttagaaayggagaagygggygttttgygggaggyggyggygttgtygttggtygttaagggygggaagtgttttgggatttttattaggggtygygagtttygagygttaaattttygyggygttygtttagygygttgttgtggygggygyggagggygygygcyggcagtgggggctgyggyggyggagggcaygggccccygcttagygtttttatttttttggtgtagttgtttttygygagtygagatatttttgttagggaagaggagygtttyggttgtttttttagagtttttt

SEQ ID NO: 8233 - DNA, 946 bp, synthetic construct
  misc_feature 1..946: note = Description of Artificial Sequence: Synthetic polynucleotide
  source 1..946: mol_type = other DNA
ygttatttattygagtygttygggttggtygygagtygggattygygagggttggygggttttggttttygaggaygtagatatgtggtttgaattttygtttttttagtygttgtttttgtgtatttttttgggygtttttagygaatgygagyggygaggygagggygagygygtygaggaagggygggagaggygyggagtttggcygygcygygctgygcygagygcygggctctcccygygagctcccygggccygygygygygccccccactgccccygcccccygygyggygygtgccccccacccccygcygygygccctygcaccygccyggctccaygyggygygygcctgttttggyggcagyggyggyggyggyggygygttttttttygaaygtygtttttagggttgttggttgygttttttattgtttygyggttgttgttyggggtgggyggygaggygggggggaggtgtyggtttggtygtyggggagggtttatygttygggyggatttttattgygagagygatgygggtttaggygyggygygygggggttgtagggygtttagtattgggggttgtyggygygygggggtttttttttggtttttaggtattygttgttgttgggygtttttygtattttyggttattatggatatttygttttttygtygtttttttygygtatttygggaggtygtyggggyggtagtagyggygyggtttygygggtgtttaggtgatyggttyggtagyggtagagtagtggtagtagtygttattgtygttgttattgyggtygtygtygttggagagaggaggaygaggagggtaaggggtagaagtaggttttgttttgtttgttttagaggttatttygggtttttttttattaattaagygatttygtgtttatttygtaggaga

SEQ ID NO: 8234 - DNA, 390 bp, synthetic construct
  misc_feature 1..390: note = Description of Artificial Sequence: Synthetic polynucleotide
  source 1..390: mol_type = other DNA
yggggtaggygyggttygtaaggattttygygatggagaygtaatattgtygygattgtatttggggtagtttygtygygttttagtygtttttyggtaggaagygtaggtgtgtgagtygattyggagygagtygygttttygggttagygtgggtagggygtygtagtttgygtagtttygaggatttygygtygttttttygagttagggtttttaggagygggtygygtaggagaygttagagggggttgttagyggttgttgggagaaygggttayggaaatagttttttttaaagtyggggttatygtggggtgggygagttygtttttttaggtygggggygyggattagaggggaygtgtgtagayggtygyggttagtttt

SEQ ID NO: 8235 - DNA, 440 bp, synthetic construct
  misc_feature 1..440: note = Description of Artificial Sequence: Synthetic polynucleotide
  source 1..440: mol_type = other DNA
ttggtgagtagtggggygggtgggygggtgttygygaygggaaggggttgggyggygttgayggatgtyggtttttagggagttttaaggyggygggtattagygggttgattttgaagygttgttyggagtyggagygttattgtttggygyggttgatggttgaygygttgygyggttgygtgtttgttttttayggygtggtggagygygayggygaaagttatttgtagttgtaggatttgttygatggtttygayggattttgtgtgttygattgtaaaatgggygttaggtatgygtgttttgttaggtyggttggggggattaagtaggggttyggggtygggatagttgtttgagggggattyggggygagtgttygaaggggttttygtgtgygtttttttatgttttggtygttgtttgygtttttatag

SEQ ID NO: 8236 - DNA, 324 bp, synthetic construct
  misc_feature 1..324: note = Description of Artificial Sequence: Synthetic polynucleotide
  source 1..324: mol_type = other DNA
aattttagtattyggttgtattttyggyggtttttttagttatttgaggatagtatagggggtgagatggggtggtggttggtgaaygttggttactttattttatattattttattttgagagttgttataattatyggygttatttttygtgtattttgaggtttggttggygagtygttgttgggagttttttgtaaatattttttaaagtttgaaggygggttttaaaygtaggygtyggggattatgggagtttttaaatagttgygttggygtaatgatattttaatgatagatttttygtttttatttttagttttt

SEQ ID NO: 8237 - DNA, 355 bp, synthetic construct
  misc_feature 1..355: note = Description of Artificial Sequence: Synthetic polynucleotide
  source 1..355: mol_type = other DNA
tcgaattggatgtcggatggaaatttttttgcgttattagattgcgtttagtatagtagatggtacgagtacgtgcggcgtttagtttaggttttcggaggtagttgagttggaaatttcgacggaaagtatttataagtttttattttgcgttggtttattcgcgtgtacgtttattttttacgcgcgtttttggtttagaagcgtatagatgtttattgtttagagtcggtatcgttggggagatcgagcgatttgcgcggcgtatagtgcggcgttggtagggttttgggttttcggtcgggggttcgagcggttaagggatgggggtgggggcggggagagtggggggagg

SEQ ID NO: 8238 - DNA, 730 bp, synthetic construct
  misc_feature 1..730: note = Description of Artificial Sequence: Synthetic polynucleotide
  source 1..730: mol_type = other DNA
ttgtttcggagttgtaggtttttaggcgttgggagggcgaagtaggagagtcggttagtttattttcgcgtttcgtaaatttttttaatcgggtaataaagtgagtagcggtggtcgtcgcgatttttttaatttcgtatttcggaggttcgagggggttttgggatcgagcggtttcgtagcggcgatagaaatatatattttacgaaaaagaaaaaaaaaaaaacgagtcgcgcgaattcgttaagttagatgtgcgcggtttgaagcggaggaggttttgacgttagttttatttcgcgtagttcggtttggtcgtagattcgtcggttattcgtcggcggtttaggtcgggaggggttaggatagtttcggtcgcgcggtggacggaggggttattttttcgggcgttagtaaataaattttattcgagttaatatcgtttagcgaacggtgtttttttttagttattcgagaacgagaggtatttttaattagaaattaattaatgagtagttgttttttttcgttttattgtaattattcgttttaattataaatgagatttatgaaaggatacgttgaagatgtaattaatagttaaaattagttcggcgttgcgtaggcggtcggttcggtttcgcgttggcgcgttttgtttcgagtggtaggaaggggttcgtaggcgtttcgtacgcgtttcgttattattgtttaatcgagaattagt

SEQ ID NO: 8239 - DNA, 383 bp, synthetic construct
  misc_feature 1..383: note = Description of Artificial Sequence: Synthetic polynucleotide
  source 1..383: mol_type = other DNA
agcggcggcgcgggccgcgggcggcgatgggcgaggagtagagtacggtgagcggcggcggcgggttttaggagtcgtagattttggttagtggtattgcgggttattttgagttttcgaggttttagggggatagcgcccgggcgcccccgctgcgcgccgccttcgcggagtcgagcggcggtggttgcggaagcgattggggttgcgcggatattagcgttttagagttcgcgaggagtttggggttttcgggttggagtaagagtcgagtatcggcgtagtttgcgggattggtatttatcgggttttttaatttttagattttgttattgtagttggagttggaggaggaagaggaggaagttggggatcgaaaagag

SEQ ID NO: 8240 - DNA, 349 bp, synthetic construct
  misc_feature 1..349: note = Description of Artificial Sequence: Synthetic polynucleotide
  source 1..349: mol_type = other DNA
agatcgagcgggattatgtgggtacgttggagtttttggtgtcggtgagtgttttcggtagacgtagggggacgtccgggcggcgcggggcgcgggtttcggagtggttgcgggaaggacgcgcggtattgtttgtgcggggattcgggacgggtcggggtattataggcgcgggaatttacgtgtggattttgcgttcgcgggcgcggtgattttcgcggggatttgttggtgtttcgagatttattgagttgcgggggttttggagatttttaggtttgaaaagttagttttagagaagagagttttagtttagggaatttcggttgttttatttttttttattttt

SEQ ID NO: 8241 - DNA, 465 bp, synthetic construct
  misc_feature 1..465: note = Description of Artificial Sequence: Synthetic polynucleotide
  source 1..465: mol_type = other DNA
tcgtacggttcgtcgggtcgcggtgagtaaggcgggtaggcgcggcgggaggcgttcgacgtttatttcgggtttggcgttttttttcggttattacgcggcgtcgtttttcgggattttttagttttcggagtttcgcgcgtttagagtcgttcggagcgcgggcggggttagtttgggtagtcgcgggtcgttgttgcgtcggaagttttcgtcgttagggagttttttgggcgttaggttttgggtttttgggcgaagtcgacgttagaatatgtttggtttcgtatttagtttatcgtatttttagcgcgcgtgggtggggggcgtcggttgaggtggggagggtatagtttagttttaggttatagtgtttcgggcggggtagcgcggtgcggggtgaacgttatcggttcggcggatagcgagtggcttcaggcgagagctcccagagcctctgtttcc

SEQ ID NO: 8242 - DNA, 424 bp, synthetic construct
  misc_feature 1..424: note = Description of Artificial Sequence: Synthetic polynucleotide
  source 1..424: mol_type = other DNA
atatagaggtgacgtacgagtgatttatagagagggatttttgggtttttggtgggggtttgggagacggtcgaagggggttcgggtagaagttccgcggccgggccggcggagggaagggggcggccgcgcccgggattcggtttttttcggttttatttatttgtttcgaagagtggttttagttttgcgtttttttttgcgattttatatatagggatagttttaggtatagttttagtagtaggagtatggcggggcgagggcgcgggacgttcggggattcggcgggatacgttttgtagcgtttagggttttagttattgcgggacgttttcggggtcgcccaccccgcggtcccagcccggaccccgcccaccccacggacccagcccggaccccgcccaccccgcggtcccagccc

SEQ ID NO: 8243 - DNA, 540 bp, synthetic construct
  misc_feature 1..540: note = Description of Artificial Sequence: Synthetic polynucleotide
  source 1..540: mol_type = other DNA
acgaggaggaagaggaggaggaagaagaagaagaggaagaggaggaggaggaggaggaggacgcgtttaggttgagatggttcgcgtggatattgttatttattttaagattgctgcctccgccgccgccgccgccgccgctgctgccgccgccgccgccgccaccatttgttatagttagtaacgggtagtcggcgtaggggttcgggggagtttttttcgtcgttagcgttattttaaatatttattaatagttatattgttgttattgctgccgccgccgccgccgccgcggagcgcgggaggggggcggggaggcgtttgggttcggggcgttgtgcgcgatttggcggggtgcgtcgagatatatatagcgagccgccgccgcccgcccgggggggagggggatggagtgcgcgggtagttttttttccccggcccgcgccccgctcgccccgggctgcgctggccccgagcgccgagagccagggggcgccgcgggccgcccgcgcccggggtctgcgccgcccccgggcccgc

SEQ ID NO: 8244 - DNA, 472 bp, synthetic construct
  misc_feature 1..472: note = Description of Artificial Sequence: Synthetic polynucleotide
  source 1..472: mol_type = other DNA
tttttttaattttatgttttaaaagttaaattttagttttaaagtgtagtgtggtattagcgaatgtggtggatttcggtaggtttggggtaggggaattttcggtaatattttttagtatcgaaggtaggatttttcggttattttcgtcggttggaatttttttaagtattgttttgagtttatttttaaatgaaagggggaaaaatttaaattagattagaatttgaaatagttgaaatagttatcgatttttagtttgtttttaagtttggtagagattgtgaaagttttaattttttcgcgatgttagttacggttcgcggcggttacggagttattttagtatttcgcgatggatagtgattttcggcgtggcgcgagttttttgcggtttttacgcgggtttgggcggcgggtttttttacggtttcgtttagatattcggaggtatttgttaaagttgcggagg

SEQ ID NO: 8245 - DNA, 396 bp, synthetic construct
  misc_feature 1..396: note = Description of Artificial Sequence: Synthetic polynucleotide
  source 1..396: mol_type = other DNA
ggggagtgggggagtgagtagacgttttttttttaggaggtcggaatttttgtttttattttttatcggggttcggttggttagaggtaagtttcgagattttttattaattattattatcgttgcgagggtcggtgaggttgtagataacgtttgtaaggacgggagtcggggagggtgtagggcgagtttaaaggacgggtagagtaagtttcgggaagaggtaggggttttttttttcgggtcgtcgtttttcgtattttcggagttagtcgtagttacgtagcgtcgtttgtcgggtatattaaggatttggcgcgtacgtggcgtttatttttattttcgggttcgtttttggttcgcgtttagtttttttagattattcgtaaattgagg

SEQ ID NO: 8246 - DNA, 507 bp, synthetic construct
  misc_feature 1..507: note = Description of Artificial Sequence: Synthetic polynucleotide
  source 1..507: mol_type = other DNA
tgattttggggttgatatcgttaaagggtagttagtgttcgtttaggttatttcgggaggtttaggggtacggcgaggggtcggggaaaggcgatcgtttattatagttcgcgcgtttagattgagggaggagtcgggttgtagaatcggcggcggatggagacgggagggaggttgcgaggtcgttcgaggagagattaaggttttagaaacggagaagcgggcgttttgcgggaggcggcggcgttgtcgttggtcgttaagggcgggaagtgttttgggatttttattaggggtcgcgagtttcgagcgttaaattttcgcggcgttcgtttagcgcgttgttgtggcgggcgcggagggcgcgcgccggcagtgggggctgcggcggcggagggcacgggcccccgcttagcgtttttatttttttggtgtagttgtttttcgcgagtcgagatatttttgttagggaagaggagcgtttcggttgtttttttagagtttttt

SEQ ID NO: 8247 - DNA, 946 bp, synthetic construct
  misc_feature 1..946: note = Description of Artificial Sequence: Synthetic polynucleotide
  source 1..946: mol_type = other DNA
cgttatttattcgagtcgttcgggttggtcgcgagtcgggattcgcgagggttggcgggttttggttttcgaggacgtagatatgtggtttgaattttcgtttttttagtcgttgtttttgtgtatttttttgggcgtttttagcgaatgcgagcggcgaggcgagggcgagcgcgtcgaggaagggcgggagaggcgcggagtttggccgcgccgcgctgcgccgagcgccgggctctccccgcgagctccccgggcccgcgcgcgcgccccccactgcccccgccccccgcgcggcgcgtgccccccaccccccgccgcgcgccctcgcacccgcccggctccacgcggcgcgcgcctgttttggcggcagcggcggcggcggcggcgcgttttttttcgaacgtcgtttttagggttgttggttgcgttttttattgtttcgcggttgttgttcggggtgggcggcgaggcgggggggaggtgtcggtttggtcgtcggggagggtttatcgttcgggcggatttttattgcgagagcgatgcgggtttaggcgcggcgcgcgggggttgtagggcgtttagtattgggggttgtcggcgcgcgggggtttttttttggtttttaggtattcgttgttgttgggcgtttttcgtattttcggttattatggatatttcgttttttcgtcgtttttttcgcgtatttcgggaggtcgtcggggcggtagtagcggcgcggtttcgcgggtgtttaggtgatcggttcggtagcggtagagtagtggtagtagtcgttattgtcgttgttattgcggtcgtcgtcgttggagagaggaggacgaggagggtaaggggtagaagtaggttttgttttgtttgttttagaggttatttcgggtttttttttattaattaagcgatttcgtgtttatttcgtaggaga

SEQ ID NO: 8248 - DNA, 390 bp, synthetic construct
  misc_feature 1..390: note = Description of Artificial Sequence: Synthetic polynucleotide
  source 1..390: mol_type = other DNA
cggggtaggcgcggttcgtaaggattttcgcgatggagacgtaatattgtcgcgattgtatttggggtagtttcgtcgcgttttagtcgtttttcggtaggaagcgtaggtgtgtgagtcgattcggagcgagtcgcgttttcgggttagcgtgggtagggcgtcgtagtttgcgtagtttcgaggatttcgcgtcgttttttcgagttagggtttttaggagcgggtcgcgtaggagacgttagagggggttgttagcggttgttgggagaacgggttacggaaatagttttttttaaagtcggggttatcgtggggtgggcgagttcgtttttttaggtcgggggcgcggattagaggggacgtgtgtagacggtcgcggttagtttt

SEQ ID NO: 8249 - DNA, 440 bp, synthetic construct
  misc_feature 1..440: note = Description of Artificial Sequence: Synthetic polynucleotide
  source 1..440: mol_type = other DNA
ttggtgagtagtggggcgggtgggcgggtgttcgcgacgggaaggggttgggcggcgttgacggatgtcggtttttagggagttttaaggcggcgggtattagcgggttgattttgaagcgttgttcggagtcggagcgttattgtttggcgcggttgatggttgacgcgttgcgcggttgcgtgtttgttttttacggcgtggtggagcgcgacggcgaaagttatttgtagttgtaggatttgttcgatggtttcgacggattttgtgtgttcgattgtaaaatgggcgttaggtatgcgtgttttgttaggtcggttggggggattaagtaggggttcggggtcgggatagttgtttgagggggattcggggcgagtgttcgaaggggttttcgtgtgcgtttttttatgttttggtcgttgtttgcgtttttatag

SEQ ID NO: 8250 - DNA, 324 bp, synthetic construct
  misc_feature 1..324: note = Description of Artificial Sequence: Synthetic polynucleotide
  source 1..324: mol_type = other DNA
aattttagtattcggttgtattttcggcggtttttttagttatttgaggatagtatagggggtgagatggggtggtggttggtgaacgttggttactttattttatattattttattttgagagttgttataattatcggcgttatttttcgtgtattttgaggtttggttggcgagtcgttgttgggagttttttgtaaatattttttaaagtttgaaggcgggttttaaacgtaggcgtcggggattatgggagtttttaaatagttgcgttggcgtaatgatattttaatgatagatttttcgtttttatttttagttttt

SEQ ID NO: 8251 - DNA, 355 bp, Homo sapiens
  source 1..355: mol_type = unassigned DNA
cctccccccactctccccgcccccacccccatcccttggccgctcgaacccccgaccgggagcccagagccctgccagcgccgcactgtgcgccgcgcaagtcgctcgatctccccagcggtaccggctctaagcagtaaacatctgtgcgcttctgagccagggacgcgcgtggggggtgggcgtgcacgcgggtgggccagcgcagagtgggagcttgtgggtgctttccgtcgggatttccaactcagctgcctccgagagcctaagctgagcgccgcacgtgctcgtgccatctgctgtactggacgcagtctaatagcgcagagaggtttccatccggcatccagttcga

SEQ ID NO: 8252 - DNA, 730 bp, Homo sapiens
  source 1..730: mol_type = unassigned DNA
gctgattctcgattaaacaatagtgacgagacgcgtgcggggcgcctgcgagccccttcctgccactcggagcagagcgcgccagcgcgaggccgggccggccgcctgcgcagcgccgggctaattttaactgttgattacatcttcagcgtgtcctttcataggtctcatttgtaattgagacgaatgattacagtggggcgggaaggagcagctgctcattaattaatttctaattaaaagtgcctctcgttctcgggtgactaaagagaaacaccgttcgctgggcgatattgactcggatggaatttatttgctaacgcccggaggaatggcccctccgtccaccgcgcggccgggactgtcctggcccctcccggcctgagccgccggcgagtgaccggcgagtctgcggccaggccgggctgcgcgaggtggggctgacgtcagagcctcctccgcttcaagccgcgcacatctgacttgacgggttcgcgcgactcgtttttttttttttctttttcgtaaaatatgtatttctgtcgccgctgcgaggccgctcggtcccagagccccctcgagcctccggaatgcgaagttaaaggaatcgcggcggccaccgctgctcactttgttacccggttagaaaagtttgcggagcgcggggatggactaaccggctctcctgcttcgccctcccagcgcctagaagcctgcagctccggagcag

SEQ ID NO: 8253 - DNA, 383 bp, Homo sapiens
  source 1..383: mol_type = unassigned DNA
ctcttttcgatccccagcttcctcctcttcctcctccagctccaactgcagtggcaaggtctggggattgagaggcccggtgagtgccagtcccgcaggctgcgccggtgctcggctcttactccagcccgggggccccaggctcctcgcgggctctggggcgctggtgtccgcgcagccccagtcgcttccgcagccaccgccgctcggctccgcggaggcggcgcgcagcgggggcgcccgggcgctgtccccctgaggcctcgggggctcagggtggcccgcagtgccactggccagggtctgcgactcctggggcccgccgccgccgctcaccgtgctctgctcctcgcccatcgccgcccgcggcccgcgccgccgct

SEQ ID NO: 8254 - DNA, 349 bp, Homo sapiens
  source 1..349: mol_type = unassigned DNA
aaaagtgagggaagatagggcagccgggattccctggactggagctctcttctctagagctaacttttcagacctggaggtctccaaggcccccgcaactcagtgagtctcggggcaccaacaaatccccgcgggggtcaccgcgcccgcgaacgcagagtccacacgtggattcccgcgcctgtgatgccccgacccgtcccgggtccccgcacagacaatgccgcgcgtccttcccgcagccactccgggacccgcgccccgcgccgcccggacgtccccctgcgtctgccggggacactcaccgacaccaggaactccagcgtgcccacatagtcccgctcggtct

SEQ ID NO: 8255 - DNA, 465 bp, Homo sapiens
  source 1..465: mol_type = unassigned DNA
ggaaacagaggctctgggagctctcgcctgaagccactcgctgtccgccgggccggtggcgttcaccccgcaccgcgctgccccgcccggggcactatggcctggggctggactatgccctccccacctcagccggcgccccccacccacgcgcgctgagggtgcggtgagctgagtgcggggccaagcatgttctggcgtcgacttcgcccaggggcccaggacctggcgcccaaggggctccctggcgacggagacttccgacgcagcagcgacccgcggctgcccaagctgaccccgcccgcgctccgagcggctctgggcgcgcggggctccggggactggaggatcccggggggcggcgccgcgtggtggccggaaggggacgccaagcccggggtgggcgtcggacgcctcccgccgcgcctgcccgccttgctcaccgcgacccggcgggccgtgcgg

SEQ ID NO: 8256 - DNA, 424 bp, Homo sapiens
  source 1..424: mol_type = unassigned DNA
gggctgggaccgcggggtgggcggggtccgggctgggtccgtggggtgggcggggtccgggctgggaccgcggggtgggcggccccgagagcgtcccgcagtggctggagccctgggcgctgcaaagcgtgtcccgccgggtccccgagcgtcccgcgccctcgccccgccatgctcctgctgctggggctgtgcctggggctgtccctgtgtgtggggtcgcaggaagaggcgcagagctggggccactcttcggagcaggtaagtggagccgaggggagccgggtcccgggcgcggccgcccccttccctccgccggcccggccgcggagcttctgcccgggcccccttcgaccgtctcccaggcccccaccagaggcccaggggtccctctctgtgggtcactcgtgcgtcacctctgtgt

SEQ ID NO: 8257 - DNA, 540 bp, Homo sapiens
  source 1..540: mol_type = unassigned DNA
gcgggcccgggggcggcgcagaccccgggcgcgggcggcccgcggcgccccctggctctcggcgctcggggccagcgcagcccggggcgagcggggcgcgggccggggagggggagctgcccgcgcactccatccccctcccccccgggcgggcggcggcggctcgctgtatatatctcggcgcaccccgccaggtcgcgcacagcgccccgagcccaggcgcctccccgcccccctcccgcgctccgcggcggcggcggcggcggcagcagtagcagcaatatggctgttgatgggtgtttggggtggcgctggcggcgggaggagctcccccgagcccctgcgccggctgcccgttgctagctatggcaaatggtggcggcggcggcggcggcagcagcggcggcggcggcggcggcggaggcagcagtcttagaatgagtagcaatatccacgcgaaccatctcagcctagacgcgtcctcctcctcctcctcctcctcttcctcttcttcttcttcctcctcctcttcctcctcgt

SEQ ID NO: 8258 - DNA, 472 bp, Homo sapiens
  source 1..472: mol_type = unassigned DNA
cctccgcagctttggcaggtgcctccgggtgtctggacggagccgtggagggacccgccgcccaggcccgcgtggggaccgcagggaactcgcgccacgccgggggtcactgtccatcgcgaggtgctgaagtggctccgtgaccgccgcgggccgtggctgacatcgcggagaagttaggactttcacagtctctgccagacttgaaagcaagctggaaatcgatagctgtttcagctgtttcagattctaatctggtttgggtttttccccctttcatttgaaaatagactcagggcaatgcttaagagaattccaaccgacggaagtggccgggaaatcctgccttcggtactgagggatgttaccggagattcccctgccccaggcctgccggagtccaccacattcgctaatgccacactgcactttagaactagagtttggcttttaagacatgggattaaaaaga

SEQ ID NO: 8259 - DNA, 396 bp, Homo sapiens
  source 1..396: mol_type = unassigned DNA
cctcaatttgcgaatagtctggggaggctgagcgcgagccaggagcggacccgggggtgggggtaagcgccacgtgcgcgccaggtccttggtgtgcccggcaggcggcgctgcgtggctgcggctggctccgagggtgcggggggcggcgacccgggagggaaaacccctgcctcttcccggggcttgctctgcccgtcctttaaactcgccctacaccctccccgactcccgtccttgcaagcgttatctgcagcctcaccggccctcgcaacggtggtggtggttggtggggggtctcgaagcttgcctctggccagccggaccccggtgggagatggaggcagaaattccggcctcctaggagaagggcgtctgctcactcccccactcccc

SEQ ID NO: 8260 - DNA, 507 bp, Homo sapiens
  source 1..507: mol_type = unassigned DNA
aggagactctagggggacagccggggcgctcctcttccctgacaggagtgtctcggctcgcgggaggcagctgcaccaagaaggtgaggacgctgagcgggggcccgtgccctccgccgccgcagcccccactgccggcgcgcgccctccgcgcccgccacagcagcgcgctaggcggacgccgcgggaatttgacgctcgaggctcgcggcccctaatgagagtcccagaacacttcccgcccttgacggccagcggcagcgccgccgcctcccgcagagcgcccgcttctccgtttctagagccttagtctctcctcgagcgacctcgcagcctccctcccgtctccatccgccgccggttctgcagcccggctcctccctcagtctaggcgcgcgggctgtagtgggcgatcgcctttccccgacccctcgccgtgcccctgggcctcccgaagtggcctgggcgagcactgactgccctttggcggtgtcagccccaaagtca

SEQ ID NO: 8261 - DNA, 946 bp, Homo sapiens
  source 1..946: mol_type = unassigned DNA
tctcctgcgaggtaaacacgaagtcgcttggttagtgagaagaaacccgaggtggcctctggggcagacagagcaggacctgcttctgccccttgccctcctcgtcctcctctctccagcggcggcgaccgcagtaacagcggcagtggcggctgctgccactgctctgccgctgccgagccggtcacctgggcacccgcggagccgcgccgctgctaccgccccggcggcctcccggagtgcgcggagggggcggcggaggagcgagatatccatagtaaccgaggatgcgaggggcgcccagcagcagcgagtgcctgggagccaggaggaggcccccgcgcgccggcaacccccagtgctaggcgccctgcagcccccgcgcgccgcgcctgggcccgcatcgctctcgcagtgagggtccgcccgagcggtaagccctccccggcggccaagccgacacctcccccccgcctcgccgcccaccccgggcagcagccgcggaacaatggagagcgcagccagcagccctggagacggcgttcgggggaggacgcgccgccgccgccgccgctgccgccagggcaggcgcgcgccgcgtggagccgggcgggtgcgagggcgcgcggcggggggtggggggcacgcgccgcgcggggggcgggggcagtggggggcgcgcgcgcgggcccggggagctcgcggggagagcccggcgctcggcgcagcgcggcgcggccaagctccgcgcctctcccgcccttcctcggcgcgctcgccctcgcctcgccgctcgcattcgctgggggcgcccagaaagatgcacagaggcaacggctaggggagcggaggttcaagccacatgtctgcgtcctcgggggccagagcccgccagccctcgcggatcccggctcgcggccagcccgagcggctcgggtgagtagcg

SEQ ID NO: 8262 - DNA, 390 bp, Homo sapiens
  source 1..390: mol_type = unassigned DNA
ggggctgaccgcggccgtctgcacacgtcccctctggtccgcgcccccggcctgggagggcggactcgcccaccccacgatggccccggctttggaagggactgtttccgtgacccgttctcccaacagccgctaacaaccccctctaacgtctcctgcgcggcccgctcctgagaaccctggctcgggagagcgacgcggggtcctcggggctgcgcaggctgcggcgccctgcccacgctggcccgagggcgcggctcgctccgggtcggctcacacacctacgcttcctgccgggaggcggctgggacgcggcggggctgccccaagtgcagtcgcggcagtgttgcgtctccatcgcgggggtccttgcgggccgcgcctgccccg

SEQ ID NO: 8263 - DNA, 440 bp, Homo sapiens
  source 1..440: mol_type = unassigned DNA
ctgtgggggcgcaggcagcggccagggcatgagggggcgcacacggagaccccttcgagcactcgccccgggtccccctcaagcagctgtcccggccccggacccctacttgatccccccaaccgacctggcagggcacgcatacctgacgcccattttgcagtcgagcacacaaggtccgtcgaagccatcgagcaggtcctgcagctgcaggtagctttcgccgtcgcgctccaccacgccgtggaaggcaggcacgcagccgcgcagcgcgtcagccatcagccgcgccaggcagtagcgctccggctccgagcagcgcttcaggatcagcccgctggtgcccgccgccttaaaactccctgaggaccggcatccgtcagcgccgcccagccccttcccgtcgcgggcacccgcccacccgccccactgctcaccag

SEQ ID NO: 8264 - DNA, 324 bp, Homo sapiens
  source 1..324: mol_type = unassigned DNA
gagagctaaaaataagaacggaaaatctatcattaaggtatcattgcgccagcgcagctatttgaaggctcccatggtccccggcgcctgcgtttgaagcccgccttcaggctttggggggtatttgcagaaaactcccagcagcggctcgccaaccagacctcagggtgcacggggggtggcgccggtaattatggcaactctcaaaataaaataatataaaataaagtaaccaacgttcaccaaccaccaccccatctcaccccctgtactgtcctcaggtagctggggaagccgccgggagtgcagccggatgctggaatt

SEQ ID NO: 8265 - DNA, 355 bp, synthetic construct
  misc_feature 1..355: note = Description of Artificial Sequence: Synthetic polynucleotide
  source 1..355: mol_type = other DNA
tttttttttatttttttygtttttatttttattttttggtygttygaattttygatygggagtttagagttttgttagygtygtattgtgygtygygtaagtygttygatttttttagyggtatyggttttaagtagtaaatatttgtgygtttttgagttagggaygygygtggggggtgggygtgtaygygggtgggttagygtagagtgggagtttgtgggtgtttttygtygggatttttaatttagttgttttygagagtttaagttgagygtygtaygtgttygtgttatttgttgtattggaygtagtttaatagygtagagaggtttttattyggtatttagttyga

SEQ ID NO: 8266 - DNA, 730 bp, synthetic construct
  misc_feature 1..730: note = Description of Artificial Sequence: Synthetic polynucleotide
  source 1..730: mol_type = other DNA
gttgattttygattaaataatagtgaygagaygygtgyggggygtttgygagtttttttttgttattyggagtagagygygttagygygaggtygggtyggtygtttgygtagygtygggttaattttaattgttgattatatttttagygtgtttttttataggttttatttgtaattgagaygaatgattatagtggggygggaaggagtagttgtttattaattaatttttaattaaaagtgtttttygttttygggtgattaaagagaaatatygttygttgggygatattgattyggatggaatttatttgttaaygttyggaggaatggttttttygtttatygygyggtygggattgttttggtttttttyggtttgagtygtyggygagtgatyggygagtttgyggttaggtygggttgygygaggtggggttgaygttagagtttttttygttttaagtygygtatatttgatttgaygggttygygygattygtttttttttttttttttttygtaaaatatgtatttttgtygtygttgygaggtygttyggttttagagttttttygagttttyggaatgygaagttaaaggaatygyggyggttatygttgtttattttgttattyggttagaaaagtttgyggagygyggggatggattaatyggtttttttgtttygtttttttagygtttagaagtttgtagtttyggagtag

SEQ ID NO: 8267 - DNA, 383 bp, synthetic construct
  misc_feature 1..383: note = Description of Artificial Sequence: Synthetic polynucleotide
  source 1..383: mol_type = other DNA
tttttttygatttttagttttttttttttttttttttagttttaattgtagtggtaaggtttggggattgagaggttyggtgagtgttagtttygtaggttgygtyggtgttyggtttttattttagttygggggttttaggtttttygygggttttggggygttggtgttygygtagttttagtygttttygtagttatygtygttyggtttygyggaggyggygygtagygggggygttygggygttgtttttttgaggtttygggggtttagggtggttygtagtgttattggttagggtttgygatttttggggttygtygtygtygtttatygtgttttgtttttygtttatygtygttygyggttygygtygtygtt

SEQ ID NO: 8268 - DNA, 349 bp, synthetic construct
  misc_feature 1..349: note = Description of Artificial Sequence: Synthetic polynucleotide
  source 1..349: mol_type = other DNA
aaaagtgagggaagatagggtagtygggattttttggattggagtttttttttttagagttaattttttagatttggaggtttttaaggttttygtaatttagtgagtttyggggtattaataaattttygygggggttatygygttygygaaygtagagtttataygtggattttygygtttgtgatgtttygattygtttygggttttygtatagataatgtygygygtttttttygtagttatttygggattygygtttygygtygttyggaygtttttttgygtttgtyggggatatttatygatattaggaattttagygtgtttatatagtttygttyggttt

SEQ ID NO: 8269 - DNA, 465 bp, synthetic construct
  misc_feature 1..465: note = Description of Artificial Sequence: Synthetic polynucleotide
  source 1..465: mol_type = other DNA
ggaaatagaggttttgggagttttygtttgaagttattygttgttygtygggtyggtggygtttatttygtatygygttgtttygttyggggtattatggtttggggttggattatgttttttttattttagtyggygttttttatttaygygygttgagggtgyggtgagttgagtgyggggttaagtatgttttggygtygatttygtttaggggtttaggatttggygtttaaggggttttttggygayggagattttygaygtagtagygattygyggttgtttaagttgatttygttygygtttygagyggttttgggygygyggggtttyggggattggaggatttyggggggyggygtygygtggtggtyggaaggggaygttaagttyggggtgggygtyggaygtttttygtygygtttgttygttttgtttatygygattyggygggtygtgygg

SEQ ID NO: 8270 - DNA, 424 bp, synthetic construct
  misc_feature 1..424: note = Description of Artificial Sequence: Synthetic polynucleotide
  source 1..424: mol_type = other DNA
gggttgggatygyggggtgggyggggttygggttgggttygtggggtgggyggggttygggttgggatygyggggtgggyggtttygagagygtttygtagtggttggagttttgggygttgtaaagygtgtttygtygggttttygagygtttygygttttygtttygttatgtttttgttgttggggttgtgtttggggttgtttttgtgtgtggggtygtaggaagaggygtagagttggggttatttttyggagtaggtaagtggagtygaggggagtygggtttygggygyggtygttttttttttttygtyggttyggtygyggagtttttgttygggtttttttygatygttttttaggtttttattagaggtttaggggtttttttttgtgggttattygtgygttatttttgtgt

SEQ ID NO: 8271 - DNA, 540 bp, synthetic construct
  misc_feature 1..540: note = Description of Artificial Sequence: Synthetic polynucleotide
  source 1..540: mol_type = other DNA
gygggttygggggyggygtagatttygggygygggyggttygyggygttttttggttttyggygttyggggttagygtagttyggggygagyggggygygggtyggggagggggagttgttygygtattttatttttttttttttygggygggyggyggyggttygttgtatatatttyggygtatttygttaggtygygtatagygtttygagtttaggygttttttygtttttttttygygtttygyggyggyggyggyggyggtagtagtagtagtaatatggttgttgatgggtgtttggggtggygttggyggygggaggagttttttygagtttttgygtyggttgttygttgttagttatggtaaatggtggyggyggyggyggyggtagtagyggyggyggyggyggyggyggaggtagtagttttagaatgagtagtaatatttaygygaattattttagtttagaygygttttttttttttttttttttttttttttttttttttttttttttttttttttttttttygt

SEQ ID NO: 8272 - DNA, 472 bp, synthetic construct
  misc_feature 1..472: note = Description of Artificial Sequence: Synthetic polynucleotide
  source 1..472: mol_type = other DNA
ttttygtagttttggtaggtgttttygggtgtttggayggagtygtggagggattygtygtttaggttygygtggggatygtagggaattygygttaygtygggggttattgtttatygygaggtgttgaagtggtttygtgatygtygygggtygtggttgatatygyggagaagttaggatttttatagtttttgttagatttgaaagtaagttggaaatygatagttgttttagttgttttagattttaatttggtttgggttttttttttttttatttgaaaatagatttagggtaatgtttaagagaattttaatygayggaagtggtygggaaattttgttttyggtattgagggatgttatyggagatttttttgttttaggtttgtyggagtttattatattygttaatgttatattgtattttagaattagagtttggtttttaagatatgggattaaaaaga

SEQ ID NO: 8273 - DNA, 396 bp, synthetic construct
  misc_feature 1..396: note = Description of Artificial Sequence: Synthetic polynucleotide
  source 1..396: mol_type = other DNA
ttttaatttgygaatagtttggggaggttgagygygagttaggagyggattygggggtgggggtaagygttaygtgygygttaggtttttggtgtgttyggtaggyggygttgygtggttgyggttggtttygagggtgyggggggyggygattygggagggaaaatttttgttttttttyggggtttgttttgttygttttttaaattygttttatatttttttygattttygtttttgtaagygttatttgtagttttatyggttttygtaayggtggtggtggttggtggggggtttygaagtttgtttttggttagtyggatttyggtgggagatggaggtagaaatttyggttttttaggagaagggygtttgtttatttttttatttttt

SEQ ID NO: 8274 - DNA, 507 bp, synthetic construct
  misc_feature 1..507: note = Description of Artificial Sequence: Synthetic polynucleotide
  source 1..507: mol_type = other DNA
aggagattttagggggatagtyggggygttttttttttttgataggagtgtttyggttygygggaggtagttgtattaagaaggtgaggaygttgagygggggttygtgtttttygtygtygtagtttttattgtyggygygygtttttygygttygttatagtagygygttaggyggaygtygygggaatttgaygttygaggttygyggtttttaatgagagttttagaatatttttygtttttgayggttagyggtagygtygtygtttttygtagagygttygttttttygtttttagagttttagttttttttygagygatttygtagtttttttttygtttttattygtygtyggttttgtagttyggttttttttttagtttaggygygygggttgtagtgggygatygttttttttygatttttygtygtgtttttgggtttttygaagtggtttgggygagtattgattgttttttggyggtgttagttttaaagtta

SEQ ID NO: 8275 - DNA, 946 bp, synthetic construct
  misc_feature 1..946: note = Description of Artificial Sequence: Synthetic polynucleotide
  source 1..946: mol_type = other DNA
ttttttgygaggtaaataygaagtygtttggttagtgagaagaaattygaggtggtttttggggtagatagagtaggatttgtttttgttttttgtttttttygtttttttttttttagyggyggygatygtagtaatagyggtagtggyggttgttgttattgttttgtygttgtygagtyggttatttgggtattygyggagtygygtygttgttatygtttyggyggtttttyggagtgygyggagggggyggyggaggagygagatatttatagtaatygaggatgygaggggygtttagtagtagygagtgtttgggagttaggaggaggttttygygygtyggtaatttttagtgttaggygttttgtagttttygygygtygygtttgggttygtatygttttygtagtgagggttygttygagyggtaagtttttttyggyggttaagtygatatttttttttygtttygtygtttatttygggtagtagtygyggaataatggagagygtagttagtagttttggagayggygttygggggaggaygygtygtygtygtygtygttgtygttagggtaggygygygtygygtggagtygggygggtgygagggygygyggyggggggtggggggtaygygtygygyggggggygggggtagtggggggygygygygygggttyggggagttygyggggagagttyggygttyggygtagygyggygyggttaagtttygygtttttttygttttttttyggygygttygttttygtttygtygttygtattygttgggggygtttagaaagatgtatagaggtaayggttaggggagyggaggtttaagttatatgtttgygttttygggggttagagttygttagttttygyggatttyggttygyggttagttygagyggttygggtgagtagyg

SEQ ID NO: 8276 - DNA, 390 bp, synthetic construct
  misc_feature 1..390: note = Description of Artificial Sequence: Synthetic polynucleotide
  source 1..390: mol_type = other DNA
ggggttgatygyggtygtttgtataygttttttttggttygygttttyggtttgggagggyggattygtttattttaygatggtttyggttttggaagggattgttttygtgattygtttttttaatagtygttaataattttttttaaygttttttgygyggttygtttttgagaattttggttygggagagygaygyggggttttyggggttgygtaggttgyggygttttgtttaygttggttygagggygyggttygtttygggtyggtttatatatttaygttttttgtygggaggyggttgggaygyggyggggttgttttaagtgtagtygyggtagtgttgygtttttatygygggggtttttgygggtygygtttgtttyg

SEQ ID NO: 8277 - DNA, 440 bp, synthetic construct
  misc_feature 1..440: note = Description of Artificial Sequence: Synthetic polynucleotide
  source 1..440: mol_type = other DNA
ttgtgggggygtaggtagyggttagggtatgagggggygtatayggagattttttygagtattygtttygggttttttttaagtagttgtttyggtttyggatttttatttgatttttttaatygatttggtagggtaygtatatttgaygtttattttgtagtygagtatataaggttygtygaagttatygagtaggttttgtagttgtaggtagttttygtygtygygttttattaygtygtggaaggtaggtaygtagtygygtagygygttagttattagtygygttaggtagtagygtttyggtttygagtagygttttaggattagttygttggtgttygtygttttaaaattttttgaggatyggtattygttagygtygtttagttttttttygtygygggtattygtttattygttttattgtttattag

SEQ ID NO: 8278 - DNA, 324 bp, synthetic construct
  misc_feature 1..324: note = Description of Artificial Sequence: Synthetic polynucleotide
  source 1..324: mol_type = other DNA
gagagttaaaaataagaayggaaaatttattattaaggtattattgygttagygtagttatttgaaggtttttatggttttyggygtttgygtttgaagttygtttttaggttttggggggtatttgtagaaaatttttagtagyggttygttaattagattttagggtgtayggggggtggygtyggtaattatggtaatttttaaaataaaataatataaaataaagtaattaaygtttattaattattattttattttattttttgtattgtttttaggtagttggggaagtygtygggagtgtagtyggatgttggaatt

SEQ ID NO: 8279 - DNA, 355 bp, synthetic construct
  misc_feature 1..355: note = Description of Artificial Sequence: Synthetic polynucleotide
  source 1..355: mol_type = other DNA
tttttttttatttttttcgtttttatttttattttttggtcgttcgaattttcgatcgggagtttagagttttgttagcgtcgtattgtgcgtcgcgtaagtcgttcgatttttttagcggtatcggttttaagtagtaaatatttgtgcgtttttgagttagggacgcgcgtggggggtgggcgtgtacgcgggtgggttagcgtagagtgggagtttgtgggtgtttttcgtcgggatttttaatttagttgttttcgagagtttaagttgagcgtcgtacgtgttcgtgttatttgttgtattggacgtagtttaatagcgtagagaggtttttattcggtatttagttcga

SEQ ID NO: 8280 - DNA, 730 bp, synthetic construct
  misc_feature 1..730: note = Description of Artificial Sequence: Synthetic polynucleotide
  source 1..730: mol_type = other DNA
gttgattttcgattaaataatagtgacgagacgcgtgcggggcgtttgcgagtttttttttgttattcggagtagagcgcgttagcgcgaggtcgggtcggtcgtttgcgtagcgtcgggttaattttaattgttgattatatttttagcgtgtttttttataggttttatttgtaattgagacgaatgattatagtggggcgggaaggagtagttgtttattaattaatttttaattaaaagtgtttttcgttttcgggtgattaaagagaaatatcgttcgttgggcgatattgattcggatggaatttatttgttaacgttcggaggaatggttttttcgtttatcgcgcggtcgggattgttttggtttttttcggtttgagtcgtcggcgagtgatcggcgagtttgcggttaggtcgggttgcgcgaggtggggttgacgttagagtttttttcgttttaagtcgcgtatatttgatttgacgggttcgcgcgattcgtttttttttttttttttttcgtaaaatatgtatttttgtcgtcgttgcgaggtcgttcggttttagagttttttcgagttttcggaatgcgaagttaaaggaatcgcggcggttatcgttgtttattttgttattcggttagaaaagtttgcggagcgcggggatggattaatcggtttttttgtttcgtttttttagcgtttagaagtttgtagtttcggagtag

SEQ ID NO: 8281 - DNA, 383 bp, synthetic construct
  misc_feature 1..383: note = Description of Artificial Sequence: Synthetic polynucleotide
  source 1..383: mol_type = other DNA
tttttttcgatttttagttttttttttttttttttttagttttaattgtagtggtaaggtttggggattgagaggttcggtgagtgttagtttcgtaggttgcgtcggtgttcggtttttattttagttcgggggttttaggtttttcgcgggttttggggcgttggtgttcgcgtagttttagtcgttttcgtagttatcgtcgttcggtttcgcggaggcggcgcgtagcgggggcgttcgggcgttgtttttttgaggtttcgggggtttagggtggttcgtagtgttattggttagggtttgcgatttttggggttcgtcgtcgtcgtttatcgtgttttgtttttcgtttatcgtcgttcgcggttcgcgtcgtcgtt

SEQ ID NO: 8282 - DNA, 349 bp, synthetic construct
  misc_feature 1..349: note = Description of Artificial Sequence: Synthetic polynucleotide
  source 1..349: mol_type = other DNA
aaaagtgagggaagatagggtagtcgggattttttggattggagtttttttttttagagttaattttttagatttggaggtttttaaggttttcgtaatttagtgagtttcggggtattaataaattttcgcgggggttatcgcgttcgcgaacgtagagtttatacgtggattttcgcgtttgtgatgtttcgattcgtttcgggttttcgtatagataatgtcgcgcgtttttttcgtagttatttcgggattcgcgtttcgcgtcgttcggacgtttttttgcgtttgtcggggatatttatcgatattaggaattttagcgtgtttatatagtttcgttcggttt

SEQ ID NO: 8283 - DNA, 465 bp, synthetic construct
  misc_feature 1..465: note = Description of Artificial Sequence: Synthetic polynucleotide
  source 1..465: mol_type = other DNA
ggaaatagaggttttgggagttttcgtttgaagttattcgttgttcgtcgggtcggtggcgtttatttcgtatcgcgttgtttcgttcggggtattatggtttggggttggattatgttttttttattttagtcggcgttttttatttacgcgcgttgagggtgcggtgagttgagtgcggggttaagtatgttttggcgtcgatttcgtttaggggtttaggatttggcgtttaaggggttttttggcgacggagattttcgacgtagtagcgattcgcggttgtttaagttgatttcgttcgcgtttcgagcggttttgggcgcgcggggtttcggggattggaggatttcggggggcggcgtcgcgtggtggtcggaaggggacgttaagttcggggtgggcgtcggacgtttttcgtcgcgtttgttcgttttgtttatcgcgattcggcgggtcgtgcgg

SEQ ID NO: 8284 - DNA, 424 bp, synthetic construct
  misc_feature 1..424: note = Description of Artificial Sequence: Synthetic polynucleotide
  source 1..424: mol_type = other DNA
gggttgggatcgcggggtgggcggggttcgggttgggttcgtggggtgggcggggttcgggttgggatcgcggggtgggcggtttcgagagcgtttcgtagtggttggagttttgggcgttgtaaagcgtgtttcgtcgggttttcgagcgtttcgcgttttcgtttcgttatgtttttgttgttggggttgtgtttggggttgtttttgtgtgtggggtcgtaggaagaggcgtagagttggggttatttttcggagtaggtaagtggagtcgaggggagtcgggtttcgggcgcggtcgttttttttttttcgtcggttcggtcgcggagtttttgttcgggtttttttcgatcgttttttaggtttttattagaggtttaggggtttttttttgtgggttattcgtgcgttatttttgtgt

SEQ ID NO: 8285 - DNA, 540 bp, synthetic construct
  misc_feature 1..540: note = Description of Artificial Sequence: Synthetic polynucleotide
  source 1..540: mol_type = other DNA
gcgggttcgggggcggcgtagatttcgggcgcgggcggttcgcggcgttttttggttttcggcgttcggggttagcgtagttcggggcgagcggggcgcgggtcggggagggggagttgttcgcgtattttatttttttttttttcgggcgggcggcggcggttcgttgtatatatttcggcgtatttcgttaggtcgcgtatagcgtttcgagtttaggcgttttttcgtttttttttcgcgtttcgcggcggcggcggcggcggtagtagtagtagtaatatggttgttgatgggtgtttggggtggcgttggcggcgggaggagttttttcgagtttttgcgtcggttgttcgttgttagttatggtaaatggtggcggcggcggcggcggtagtagcggcggcggcggcggcggcggaggtagtagttttagaatgagtagtaatatttacgcgaattattttagtttagacgcgttttttttttttttttttttttttttttttttttttttttttttttttttttttttttcgt

SEQ ID NO: 8286 - DNA, 472 bp, synthetic construct
  misc_feature 1..472: note = Description of Artificial Sequence: Synthetic polynucleotide
  source 1..472: mol_type = other DNA
ttttcgtagttttggtaggtgttttcgggtgtttggacggagtcgtggagggattcgtcgtttaggttcgcgtggggatcgtagggaattcgcgttacgtcgggggttattgtttatcgcgaggtgttgaagtggtttcgtgatcgtcgcgggtcgtggttgatatcgcggagaagttaggatttttatagtttttgttagatttgaaagtaagttggaaatcgatagttgttttagttgttttagattttaatttggtttgggttttttttttttttatttgaaaatagatttagggtaatgtttaagagaattttaatcgacggaagtggtcgggaaattttgttttcggtattgagggatgttatcggagatttttttgttttaggtttgtcggagtttattatattcgttaatgttatattgtattttagaattagagtttggtttttaagatatgggattaaaaaga

SEQ ID NO: 8287 - DNA, 396 bp, synthetic construct
  misc_feature 1..396: note = Description of Artificial Sequence: Synthetic polynucleotide
  source 1..396: mol_type = other DNA
ttttaatttgcgaatagtttggggaggttgagcgcgagttaggagcggattcgggggtgggggtaagcgttacgtgcgcgttaggtttttggtgtgttcggtaggcggcgttgcgtggttgcggttggtttcgagggtgcggggggcggcgattcgggagggaaaatttttgttttttttcggggtttgttttgttcgttttttaaattcgttttatatttttttcgattttcgtttttgtaagcgttatttgtagttttatcggttttcgtaacggtggtggtggttggtggggggtttcgaagtttgtttttggttagtcggatttcggtgggagatggaggtagaaatttcggttttttaggagaagggcgtttgtttatttttttatttttt

SEQ ID NO: 8288 - DNA, 507 bp, synthetic construct
  misc_feature 1..507: note = Description of Artificial Sequence: Synthetic polynucleotide
  source 1..507: mol_type = other DNA
aggagattttagggggatagtcggggcgttttttttttttgataggagtgtttcggttcgcgggaggtagttgtattaagaaggtgaggacgttgagcgggggttcgtgtttttcgtcgtcgtagtttttattgtcggcgcgcgtttttcgcgttcgttatagtagcgcgttaggcggacgtcgcgggaatttgacgttcgaggttcgcggtttttaatgagagttttagaatatttttcgtttttgacggttagcggtagcgtcgtcgtttttcgtagagcgttcgttttttcgtttttagagttttagttttttttcgagcgatttcgtagtttttttttcgtttttattcgtcgtcggttttgtagttcggttttttttttagtttaggcgcgcgggttgtagtgggcgatcgttttttttcgatttttcgtcgtgtttttgggtttttcgaagtggtttgggcgagtattgattgttttttggcggtgttagttttaaagtta

SEQ ID NO: 8289 - DNA, 946 bp, synthetic construct
  misc_feature 1..946: note = Description of Artificial Sequence: Synthetic polynucleotide
  source 1..946: mol_type = other DNA
ttttttgcgaggtaaatacgaagtcgtttggttagtgagaagaaattcgaggtggtttttggggtagatagagtaggatttgtttttgttttttgtttttttcgtttttttttttttagcggcggcgatcgtagtaatagcggtagtggcggttgttgttattgttttgtcgttgtcgagtcggttatttgggtattcgcggagtcgcgtcgttgttatcgtttcggcggtttttcggagtgcgcggagggggcggcggaggagcgagatatttatagtaatcgaggatgcgaggggcgtttagtagtagcgagtgtttgggagttaggaggaggttttcgcgcgtcggtaatttttagtgttaggcgttttgtagttttcgcgcgtcgcgtttgggttcgtatcgttttcgtagtgagggttcgttcgagcggtaagtttttttcggcggttaagtcgatatttttttttcgtttcgtcgtttatttcgggtagtagtcgcggaataatggagagcgtagttagtagttttggagacggcgttcgggggaggacgcgtcgtcgtcgtcgtcgttgtcgttagggtaggcgcgcgtcgcgtggagtcgggcgggtgcgagggcgcgcggcggggggtggggggtacgcgtcgcgcggggggcgggggtagtggggggcgcgcgcgcgggttcggggagttcgcggggagagttcggcgttcggcgtagcgcggcgcggttaagtttcgcgtttttttcgttttttttcggcgcgttcgttttcgtttcgtcgttcgtattcgttgggggcgtttagaaagatgtatagaggtaacggttaggggagcggaggtttaagttatatgtttgcgttttcgggggttagagttcgttagttttcgcggatttcggttcgcggttagttcgagcggttcgggtgagtagcg

SEQ ID NO: 8290 - DNA, 390 bp, synthetic construct
  misc_feature 1..390: note = Description of Artificial Sequence: Synthetic polynucleotide
  source 1..390: mol_type = other DNA
ggggttgatcgcggtcgtttgtatacgttttttttggttcgcgttttcggtttgggagggcggattcgtttattttacgatggtttcggttttggaagggattgttttcgtgattcgtttttttaatagtcgttaataattttttttaacgttttttgcgcggttcgtttttgagaattttggttcgggagagcgacgcggggttttcggggttgcgtaggttgcggcgttttgtttacgttggttcgagggcgcggttcgtttcgggtcggtttatatatttacgttttttgtcgggaggcggttgggacgcggcggggttgttttaagtgtagtcgcggtagtgttgcgtttttatcgcgggggtttttgcgggtcgcgtttgtttcg

SEQ ID NO: 8291 - DNA, 440 bp, synthetic construct
  misc_feature 1..440: note = Description of Artificial Sequence: Synthetic polynucleotide
  source 1..440: mol_type = other DNA
ttgtgggggcgtaggtagcggttagggtatgagggggcgtatacggagattttttcgagtattcgtttcgggttttttttaagtagttgtttcggtttcggatttttatttgatttttttaatcgatttggtagggtacgtatatttgacgtttattttgtagtcgagtatataaggttcgtcgaagttatcgagtaggttttgtagttgtaggtagttttcgtcgtcgcgttttattacgtcgtggaaggtaggtacgtagtcgcgtagcgcgttagttattagtcgcgttaggtagtagcgtttcggtttcgagtagcgttttaggattagttcgttggtgttcgtcgttttaaaattttttgaggatcggtattcgttagcgtcgtttagttttttttcgtcgcgggtattcgtttattcgttttattgtttattag

SEQ ID NO: 8292 - DNA, 324 bp, synthetic construct
  misc_feature 1..324: note = Description of Artificial Sequence: Synthetic polynucleotide
  source 1..324: mol_type = other DNA
gagagttaaaaataagaacggaaaatttattattaaggtattattgcgttagcgtagttatttgaaggtttttatggttttcggcgtttgcgtttgaagttcgtttttaggttttggggggtatttgtagaaaatttttagtagcggttcgttaattagattttagggtgtacggggggtggcgtcggtaattatggtaatttttaaaataaaataatataaaataaagtaattaacgtttattaattattattttattttattttttgtattgtttttaggtagttggggaagtcgtcgggagtgtagtcggatgttggaatt

SEQ ID NO: 8293 - DNA, 265 bp, Homo sapiens
  source 1..265: mol_type = unassigned DNA
ttagactgcgtccagtacagcagatggcacgagcacgtgcggcgctcagcttaggctctcggaggcagctgagttggaaatcccgacggaaagcacccacaagctcccactctgcgctggcccacccgcgtgcacgcccaccccccacgcgcgtccctggctcagaagcgcacagatgtttactgcttagagccggtaccgctggggagatcgagcgacttgcgcggcgcacagtgcggcgctggcagggctctgggctcccggt

SEQ ID NO: 8294 - DNA, 235 bp, Homo sapiens
  source 1..235: mol_type = unassigned DNA
tcaggccgggaggggccaggacagtcccggccgcgcggtggacggaggggccattcctccgggcgttagcaaataaattccatccgagtcaatatcgcccagcgaacggtgtttctctttagtcacccgagaacgagaggcacttttaattagaaattaattaatgagcagctgctccttcccgccccactgtaatcattcgtctcaattacaaatgagacctatgaaaggacac

SEQ ID NO: 8295 - DNA, 270 bp, Homo sapiens
  source 1..270: mol_type = unassigned DNA
gtcgcagaccctggccagtggcactgcgggccaccctgagcccccgaggcctcagggggacagcgcccgggcgcccccgctgcgcgccgcctccgcggagccgagcggcggtggctgcggaagcgactggggctgcgcggacaccagcgccccagagcccgcgaggagcctggggcccccgggctggagtaagagccgagcaccggcgcagcctgcgggactggcactcaccgggcctctcaatccccagaccttgccactgcagttgga

SEQ ID NO: 8296 - DNA, 270 bp, Homo sapiens
  source 1..270: mol_type = unassigned DNA
tgggcacgctggagttcctggtgtcggtgagtgtccccggcagacgcagggggacgtccgggcggcgcggggcgcgggtcccggagtggctgcgggaaggacgcgcggcattgtctgtgcggggacccgggacgggtcggggcatcacaggcgcgggaatccacgtgtggactctgcgttcgcgggcgcggtgacccccgcggggatttgttggtgccccgagactcactgagttgcgggggccttggagacctccaggtctgaaaagtt

SEQ ID NO: 8297 - DNA, 149 bp, Homo sapiens
  source 1..149: mol_type = unassigned DNA
gggcgccaggtcctgggcccctgggcgaagtcgacgccagaacatgcttggccccgcactcagctcaccgcaccctcagcgcgcgtgggtggggggcgccggctgaggtggggagggcatagtccagccccaggccatagtgccccggg

SEQ ID NO: 8298 - DNA, 232 bp, Homo sapiens
  source 1..232: mol_type = unassigned DNA
cccacagagagggacccctgggcctctggtgggggcctgggagacggtcgaagggggcccgggcagaagctccgcggccgggccggcggagggaagggggcggccgcgcccgggacccggctcccctcggctccacttacctgctccgaagagtggccccagctctgcgcctcttcctgcgaccccacacacagggacagccccaggcacagccccagcagcaggagcatgg

SEQ ID NO: 8299 - DNA, 189 bp, Homo sapiens
  source 1..189: mol_type = unassigned DNA
tggatattgctactcattctaagactgctgcctccgccgccgccgccgccgccgctgctgccgccgccgccgccgccaccatttgccatagctagcaacgggcagccggcgcaggggctcgggggagctcctcccgccgccagcgccaccccaaacacccatcaacagccatattgctgctactgctgc

SEQ ID NO: 8300 - DNA, 260 bp, Homo sapiens
  source 1..260: mol_type = unassigned DNA
gccaaactctagttctaaagtgcagtgtggcattagcgaatgtggtggactccggcaggcctggggcaggggaatctccggtaacatccctcagtaccgaaggcaggatttcccggccacttccgtcggttggaattctcttaagcattgccctgagtctattttcaaatgaaagggggaaaaacccaaaccagattagaatctgaaacagctgaaacagctatcgatttccagcttgctttcaagtctggcagagactg

SEQ ID NO: 8301 - DNA, 187 bp, Homo sapiens
  source 1..187: mol_type = unassigned DNA
aggaggccggaatttctgcctccatctcccaccggggtccggctggccagaggcaagcttcgagaccccccaccaaccaccaccaccgttgcgagggccggtgaggctgcagataacgcttgcaaggacgggagtcggggagggtgtagggcgagtttaaaggacgggcagagcaagccccgggaag

SEQ ID NO: 8302 - DNA, 249 bp, Homo sapiens
  source 1..249: mol_type = unassigned DNA
cacttcgggaggcccaggggcacggcgaggggtcggggaaaggcgatcgcccactacagcccgcgcgcctagactgagggaggagccgggctgcagaaccggcggcggatggagacgggagggaggctgcgaggtcgctcgaggagagactaaggctctagaaacggagaagcgggcgctctgcgggaggcggcggcgctgccgctggccgtcaagggcgggaagtgttctgggactctcattaggggc

SEQ ID NO: 8303 - DNA, 196 bp, Homo sapiens
  source 1..196: mol_type = unassigned DNA
gccgtctccagggctgctggctgcgctctccattgttccgcggctgctgcccggggtgggcggcgaggcgggggggaggtgtcggcttggccgccggggagggcttaccgctcgggcggaccctcactgcgagagcgatgcgggcccaggcgcggcgcgcgggggctgcagggcgcctagcactgggggttgccgg

SEQ ID NO: 8304 - DNA, 176 bp, Homo sapiens
  source 1..176: mol_type = unassigned DNA
gcgactgcacttggggcagccccgccgcgtcccagccgcctcccggcaggaagcgtaggtgtgtgagccgacccggagcgagccgcgccctcgggccagcgtgggcagggcgccgcagcctgcgcagccccgaggaccccgcgtcgctctcccgagccagggttctcaggagcggg

SEQ ID NO: 8305 - DNA, 152 bp, Homo sapiens
  source 1..152: mol_type = unassigned DNA
aaagctacctgcagctgcaggacctgctcgatggcttcgacggaccttgtgtgctcgactgcaaaatgggcgtcaggtatgcgtgccctgccaggtcggttggggggatcaagtaggggtccggggccgggacagctgcttgagggggaccc

SEQ ID NO: 8306 - DNA, 232 bp, Homo sapiens
  source 1..232: mol_type = unassigned DNA
ctacctgaggacagtacagggggtgagatggggtggtggttggtgaacgttggttactttattttatattattttattttgagagttgccataattaccggcgccaccccccgtgcaccctgaggtctggttggcgagccgctgctgggagttttctgcaaataccccccaaagcctgaaggcgggcttcaaacgcaggcgccggggaccatgggagccttcaaatagctgc

SEQ ID NO: 8307 - DNA, 265 bp, synthetic construct
  misc_feature 1..265: note = Description of Artificial Sequence: Synthetic polynucleotide
  source 1..265: mol_type = other DNA
ttagattgygtttagtatagtagatggtaygagtaygtgyggygtttagtttaggttttyggaggtagttgagttggaaatttygayggaaagtatttataagtttttattttgygttggtttattygygtgtaygtttattttttaygygygtttttggtttagaagygtatagatgtttattgtttagagtyggtatygttggggagatygagygatttgygyggygtatagtgyggygttggtagggttttgggttttyggt

SEQ ID NO: 8308 - DNA, 235 bp, synthetic construct
  misc_feature 1..235: note = Description of Artificial Sequence: Synthetic polynucleotide
  source 1..235: mol_type = other DNA
ttaggtygggaggggttaggatagtttyggtygygyggtggayggaggggttattttttygggygttagtaaataaattttattygagttaatatygtttagygaayggtgtttttttttagttattygagaaygagaggtatttttaattagaaattaattaatgagtagttgttttttttygttttattgtaattattygttttaattataaatgagatttatgaaaggatat

SEQ ID NO: 8309 - DNA, 270 bp, synthetic construct
  misc_feature 1..270: note = Description of Artificial Sequence: Synthetic polynucleotide
  source 1..270: mol_type = other DNA
gtygtagattttggttagtggtattgygggttattttgagttttygaggttttagggggatagygttygggygttttygttgygygtygttttygyggagtygagyggyggtggttgyggaagygattggggttgygyggatattagygttttagagttygygaggagtttggggttttygggttggagtaagagtygagtatyggygtagtttgygggattggtatttatygggttttttaatttttagattttgttattgtagttgga

SEQ ID NO: 8310 - DNA, 270 bp, synthetic construct
  misc_feature 1..270: note = Description of Artificial Sequence: Synthetic polynucleotide
  source 1..270: mol_type = other DNA
tgggtaygttggagtttttggtgtyggtgagtgttttyggtagaygtagggggaygttygggyggygyggggygygggtttyggagtggttgygggaaggaygygyggtattgtttgtgyggggattygggaygggtyggggtattataggygygggaatttaygtgtggattttgygttygygggygyggtgattttygyggggatttgttggtgtttygagatttattgagttgygggggttttggagatttttaggtttgaaaagtt

SEQ ID NO: 8311 - DNA, 149 bp, synthetic construct
  misc_feature 1..149: note = Description of Artificial Sequence: Synthetic polynucleotide
  source 1..149: mol_type = other DNA
gggygttaggttttgggtttttgggygaagtygaygttagaatatgtttggtttygtatttagtttatygtatttttagygygygtgggtggggggygtyggttgaggtggggagggtatagtttagttttaggttatagtgtttyggg

SEQ ID NO: 8312 - DNA, 232 bp, synthetic construct
  misc_feature 1..232: note = Description of Artificial Sequence: Synthetic polynucleotide
  source 1..232: mol_type = other DNA
tttatagagagggatttttgggtttttggtgggggtttgggagayggtygaagggggttygggtagaagtttygyggtygggtyggyggagggaagggggyggtygygttygggattyggtttttttyggttttatttatttgtttygaagagtggttttagttttgygtttttttttgygattttatatatagggatagttttaggtatagttttagtagtaggagtatgg

SEQ ID NO: 8313 - DNA, 189 bp, synthetic construct
  misc_feature 1..189: note = Description of Artificial Sequence: Synthetic polynucleotide
  source 1..189: mol_type = other DNA
tggatattgttatttattttaagattgttgttttygtygtygtygtygtygtygttgttgtygtygtygtygtygttattatttgttatagttagtaaygggtagtyggygtaggggttygggggagtttttttygtygttagygttattttaaatatttattaatagttatattgttgttattgttgt

SEQ ID NO: 8314 - DNA, 260 bp, synthetic construct
  misc_feature 1..260: note = Description of Artificial Sequence: Synthetic polynucleotide
  source 1..260: mol_type = other DNA
gttaaattttagttttaaagtgtagtgtggtattagygaatgtggtggatttyggtaggtttggggtaggggaattttyggtaatattttttagtatygaaggtaggatttttyggttattttygtyggttggaatttttttaagtattgttttgagtttatttttaaatgaaagggggaaaaatttaaattagattagaatttgaaatagttgaaatagttatygatttttagtttgtttttaagtttggtagagattg

SEQ ID NO: 8315 - DNA, 187 bp, synthetic construct
  misc_feature 1..187: note = Description of Artificial Sequence: Synthetic polynucleotide
  source 1..187: mol_type = other DNA
aggaggtyggaatttttgtttttattttttatyggggttyggttggttagaggtaagtttygagattttttattaattattattatygttgygagggtyggtgaggttgtagataaygtttgtaaggaygggagtyggggagggtgtagggygagtttaaaggaygggtagagtaagtttygggaag

SEQ ID NO: 8316 - DNA, 249 bp, synthetic construct
  misc_feature 1..249: note = Description of Artificial Sequence: Synthetic polynucleotide
  source 1..249: mol_type = other DNA
tatttygggaggtttaggggtayggygaggggtyggggaaaggygatygtttattatagttygygygtttagattgagggaggagtygggttgtagaatyggyggyggatggagaygggagggaggttgygaggtygttygaggagagattaaggttttagaaayggagaagygggygttttgygggaggyggyggygttgtygttggtygttaagggygggaagtgttttgggatttttattaggggt

SEQ ID NO: 8317 - DNA, 196 bp, synthetic construct
  misc_feature 1..196: note = Description of Artificial Sequence: Synthetic polynucleotide
  source 1..196: mol_type = other DNA
gtygtttttagggttgttggttgygttttttattgtttygyggttgttgttyggggtgggyggygaggygggggggaggtgtyggtttggtygtyggggagggtttatygttygggyggatttttattgygagagygatgygggtttaggygyggygygygggggttgtagggygtttagtattgggggttgtygg

SEQ ID NO: 8318 - DNA, 176 bp, synthetic construct
  misc_feature 1..176: note = Description of Artificial Sequence: Synthetic polynucleotide
  source 1..176: mol_type = other DNA
gygattgtatttggggtagtttygtygygttttagtygtttttyggtaggaagygtaggtgtgtgagtygattyggagygagtygygttttygggttagygtgggtagggygtygtagtttgygtagtttygaggatttygygtygttttttygagttagggtttttaggagyggg

SEQ ID NO: 8319 - DNA, 152 bp, synthetic construct
  misc_feature 1..152: note = Description of Artificial Sequence: Synthetic polynucleotide
  source 1..152: mol_type = other DNA
aaagttatttgtagttgtaggatttgttygatggtttygayggattttgtgtgttygattgtaaaatgggygttaggtatgygtgttttgttaggtyggttggggggattaagtaggggttyggggtygggatagttgtttgagggggattt

SEQ ID NO: 8320 - DNA, 232 bp, synthetic construct
  misc_feature 1..232: note = Description of Artificial Sequence: Synthetic polynucleotide
  source 1..232: mol_type = other DNA
ttatttgaggatagtatagggggtgagatggggtggtggttggtgaaygttggttattttattttatattattttattttgagagttgttataattatyggygttatttttygtgtattttgaggtttggttggygagtygttgttgggagttttttgtaaatattttttaaagtttgaaggygggttttaaaygtaggygtyggggattatgggagtttttaaatagttgt

SEQ ID NO: 8321 - DNA, 265 bp, synthetic construct
  misc_feature 1..265: note = Description of Artificial Sequence: Synthetic polynucleotide
  source 1..265: mol_type = other DNA
ttagattgcgtttagtatagtagatggtacgagtacgtgcggcgtttagtttaggttttcggaggtagttgagttggaaatttcgacggaaagtatttataagtttttattttgcgttggtttattcgcgtgtacgtttattttttacgcgcgtttttggtttagaagcgtatagatgtttattgtttagagtcggtatcgttggggagatcgagcgatttgcgcggcgtatagtgcggcgttggtagggttttgggttttcggt

SEQ ID NO: 8322 - DNA, 235 bp, synthetic construct
  misc_feature 1..235: note = Description of Artificial Sequence: Synthetic polynucleotide
  source 1..235: mol_type = other DNA
ttaggtcgggaggggttaggatagtttcggtcgcgcggtggacggaggggttattttttcgggcgttagtaaataaattttattcgagttaatatcgtttagcgaacggtgtttttttttagttattcgagaacgagaggtatttttaattagaaattaattaatgagtagttgttttttttcgttttattgtaattattcgttttaattataaatgagatttatgaaaggatat

SEQ ID NO: 8323 - DNA, 270 bp, synthetic construct
  misc_feature 1..270: note = Description of Artificial Sequence: Synthetic polynucleotide
  source 1..270: mol_type = other DNA
gtcgtagattttggttagtggtattgcgggttattttgagttttcgaggttttagggggatagcgttcgggcgttttcgttgcgcgtcgttttcgcggagtcgagcggcggtggttgcggaagcgattggggttgcgcggatattagcgttttagagttcgcgaggagtttggggttttcgggttggagtaagagtcgagtatcggcgtagtttgcgggattggtatttatcgggttttttaatttttagattttgttattgtagttgga

SEQ ID NO: 8324 - DNA, 270 bp, synthetic construct
  misc_feature 1..270: note = Description of Artificial Sequence: Synthetic polynucleotide
  source 1..270: mol_type = other DNA
tgggtacgttggagtttttggtgtcggtgagtgttttcggtagacgtagggggacgttcgggcggcgcggggcgcgggtttcggagtggttgcgggaaggacgcgcggtattgtttgtgcggggattcgggacgggtcggggtattataggcgcgggaatttacgtgtggattttgcgttcgcgggcgcggtgattttcgcggggatttgttggtgtttcgagatttattgagttgcgggggttttggagatttttaggtttgaaaagtt

SEQ ID NO: 8325 - DNA, 149 bp, synthetic construct
  misc_feature 1..149: note = Description of Artificial Sequence: Synthetic polynucleotide
  source 1..149: mol_type = other DNA
gggcgttaggttttgggtttttgggcgaagtcgacgttagaatatgtttggtttcgtatttagtttatcgtatttttagcgcgcgtgggtggggggcgtcggttgaggtggggagggtatagtttagttttaggttatagtgtttcggg

SEQ ID NO: 8326 - DNA, 232 bp, synthetic construct
  misc_feature 1..232: note = Description of Artificial Sequence: Synthetic polynucleotide
  source 1..232: mol_type = other DNA
tttatagagagggatttttgggtttttggtgggggtttgggagacggtcgaagggggttcgggtagaagtttcgcggtcgggtcggcggagggaagggggcggtcgcgttcgggattcggtttttttcggttttatttatttgtttcgaagagtggttttagttttgcgtttttttttgcgattttatatatagggatagttttaggtatagttttagtagtaggagtatgg

SEQ ID NO: 8327 - DNA, 189 bp, synthetic construct
  misc_feature 1..189: note = Description of Artificial Sequence: Synthetic polynucleotide
  source 1..189: mol_type = other DNA
tggatattgttatttattttaagattgttgttttcgtcgtcgtcgtcgtcgtcgttgttgtcgtcgtcgtcgtcgttattatttgttatagttagtaacgggtagtcggcgtaggggttcgggggagtttttttcgtcgttagcgttattttaaatatttattaatagttatattgttgttattgttgt

SEQ ID NO: 8328 - DNA, 260 bp, synthetic construct
  misc_feature 1..260: note = Description of Artificial Sequence: Synthetic polynucleotide
  source 1..260: mol_type = other DNA
gttaaattttagttttaaagtgtagtgtggtattagcgaatgtggtggatttcggtaggtttggggtaggggaattttcggtaatattttttagtatcgaaggtaggatttttcggttattttcgtcggttggaatttttttaagtattgttttgagtttatttttaaatgaaagggggaaaaatttaaattagattagaatttgaaatagttgaaatagttatcgatttttagtttgtttttaagtttggtagagattg

SEQ ID NO: 8329 - DNA, 187 bp, synthetic construct
  misc_feature 1..187: note = Description of Artificial Sequence: Synthetic polynucleotide
  source 1..187: mol_type = other DNA
aggaggtcggaatttttgtttttattttttatcggggttcggttggttagaggtaagtttcgagattttttattaattattattatcgttgcgagggtcggtgaggttgtagataacgtttgtaaggacgggagtcggggagggtgtagggcgagtttaaaggacgggtagagtaagtttcgggaag

SEQ ID NO: 8330 - DNA, 249 bp, synthetic construct
  misc_feature 1..249: note = Description of Artificial Sequence: Synthetic polynucleotide
  source 1..249: mol_type = other DNA
tatttcgggaggtttaggggtacggcgaggggtcggggaaaggcgatcgtttattatagttcgcgcgtttagattgagggaggagtcgggttgtagaatcggcggcggatggagacgggagggaggttgcgaggtcgttcgaggagagattaaggttttagaaacggagaagcgggcgttttgcgggaggcggcggcgttgtcgttggtcgttaagggcgggaagtgttttgggatttttattaggggt

SEQ ID NO: 8331 - DNA, 196 bp, synthetic construct
  misc_feature 1..196: note = Description of Artificial Sequence: Synthetic polynucleotide
  source 1..196: mol_type = other DNA
gtcgtttttagggttgttggttgcgttttttattgtttcgcggttgttgttcggggtgggcggcgaggcgggggggaggtgtcggtttggtcgtcggggagggtttatcgttcgggcggatttttattgcgagagcgatgcgggtttaggcgcggcgcgcgggggttgtagggcgtttagtattgggggttgtcgg

SEQ ID NO: 8332 - DNA, 176 bp, synthetic construct
  misc_feature 1..176: note = Description of Artificial Sequence: Synthetic polynucleotide
  source 1..176: mol_type = other DNA
gcgattgtatttggggtagtttcgtcgcgttttagtcgtttttcggtaggaagcgtaggtgtgtgagtcgattcggagcgagtcgcgttttcgggttagcgtgggtagggcgtcgtagtttgcgtagtttcgaggatttcgcgtcgttttttcgagttagggtttttaggagcggg

SEQ ID NO: 8333 - DNA, 152 bp, synthetic construct
  misc_feature 1..152: note = Description of Artificial Sequence: Synthetic polynucleotide
  source 1..152: mol_type = other DNA
aaagttatttgtagttgtaggatttgttcgatggtttcgacggattttgtgtgttcgattgtaaaatgggcgttaggtatgcgtgttttgttaggtcggttggggggattaagtaggggttcggggtcgggatagttgtttgagggggattt

SEQ ID NO: 8334 - DNA, 232 bp, synthetic construct
  misc_feature 1..232: note = Description of Artificial Sequence: Synthetic polynucleotide
  source 1..232: mol_type = other DNA
ttatttgaggatagtatagggggtgagatggggtggtggttggtgaacgttggttattttattttatattattttattttgagagttgttataattatcggcgttatttttcgtgtattttgaggtttggttggcgagtcgttgttgggagttttttgtaaatattttttaaagtttgaaggcgggttttaaacgtaggcgtcggggattatgggagtttttaaatagttgt

SEQ ID NO: 8335 - DNA, 265 bp, Homo sapiens
  source 1..265: mol_type = unassigned DNA
accgggagcccagagccctgccagcgccgcactgtgcgccgcgcaagtcgctcgatctccccagcggtaccggctctaagcagtaaacatctgtgcgcttctgagccagggacgcgcgtggggggtgggcgtgcacgcgggtgggccagcgcagagtgggagcttgtgggtgctttccgtcgggatttccaactcagctgcctccgagagcctaagctgagcgccgcacgtgctcgtgccatctgctgtactggacgcagtctaa

SEQ ID NO: 8336 - DNA, 235 bp, Homo sapiens
  source 1..235: mol_type = unassigned DNA
gtgtcctttcataggtctcatttgtaattgagacgaatgattacagtggggcgggaaggagcagctgctcattaattaatttctaattaaaagtgcctctcgttctcgggtgactaaagagaaacaccgttcgctgggcgatattgactcggatggaatttatttgctaacgcccggaggaatggcccctccgtccaccgcgcggccgggactgtcctggcccctcccggcctga

SEQ ID NO: 8337 - DNA, 270 bp, Homo sapiens
  source 1..270: mol_type = unassigned DNA
tccaactgcagtggcaaggtctggggattgagaggcccggtgagtgccagtcccgcaggctgcgccggtgctcggctcttactccagcccgggggccccaggctcctcgcgggctctggggcgctggtgtccgcgcagccccagtcgcttccgcagccaccgccgctcggctccgcggaggcggcgcgcagcgggggcgcccgggcgctgtccccctgaggcctcgggggctcagggtggcccgcagtgccactggccagggtctgcgac

SEQ ID NO: 8338 - DNA, 270 bp, Homo sapiens
  source 1..270: mol_type = unassigned DNA
aacttttcagacctggaggtctccaaggcccccgcaactcagtgagtctcggggcaccaacaaatccccgcgggggtcaccgcgcccgcgaacgcagagtccacacgtggattcccgcgcctgtgatgccccgacccgtcccgggtccccgcacagacaatgccgcgcgtccttcccgcagccactccgggacccgcgccccgcgccgcccggacgtccccctgcgtctgccggggacactcaccgacaccaggaactccagcgtgccca

SEQ ID NO: 8339 - DNA, 149 bp, Homo sapiens
  source 1..149: mol_type = unassigned DNA
cccggggcactatggcctggggctggactatgccctccccacctcagccggcgccccccacccacgcgcgctgagggtgcggtgagctgagtgcggggccaagcatgttctggcgtcgacttcgcccaggggcccaggacctggcgccc

SEQ ID NO: 8340 - DNA, 232 bp, Homo sapiens
  source 1..232: mol_type = unassigned DNA
ccatgctcctgctgctggggctgtgcctggggctgtccctgtgtgtggggtcgcaggaagaggcgcagagctggggccactcttcggagcaggtaagtggagccgaggggagccgggtcccgggcgcggccgcccccttccctccgccggcccggccgcggagcttctgcccgggcccccttcgaccgtctcccaggcccccaccagaggcccaggggtccctctctgtggg

SEQ ID NO: 8341 - DNA, 189 bp, Homo sapiens
  source 1..189: mol_type = unassigned DNA
gcagcagtagcagcaatatggctgttgatgggtgtttggggtggcgctggcggcgggaggagctcccccgagcccctgcgccggctgcccgttgctagctatggcaaatggtggcggcggcggcggcggcagcagcggcggcggcggcggcggcggaggcagcagtcttagaatgagtagcaatatcca

SEQ ID NO: 8342 - DNA, 260 bp, Homo sapiens
  source 1..260: mol_type = unassigned DNA
cagtctctgccagacttgaaagcaagctggaaatcgatagctgtttcagctgtttcagattctaatctggtttgggtttttccccctttcatttgaaaatagactcagggcaatgcttaagagaattccaaccgacggaagtggccgggaaatcctgccttcggtactgagggatgttaccggagattcccctgccccaggcctgccggagtccaccacattcgctaatgccacactgcactttagaactagagtttggc

SEQ ID NO: 8343 - DNA, 187 bp, Homo sapiens
  source 1..187: mol_type = unassigned DNA
cttcccggggcttgctctgcccgtcctttaaactcgccctacaccctccccgactcccgtccttgcaagcgttatctgcagcctcaccggccctcgcaacggtggtggtggttggtggggggtctcgaagcttgcctctggccagccggaccccggtgggagatggaggcagaaattccggcctcct

SEQ ID NO: 8344 - DNA, 249 bp, Homo sapiens
  source 1..249: mol_type = unassigned DNA
gcccctaatgagagtcccagaacacttcccgcccttgacggccagcggcagcgccgccgcctcccgcagagcgcccgcttctccgtttctagagccttagtctctcctcgagcgacctcgcagcctccctcccgtctccatccgccgccggttctgcagcccggctcctccctcagtctaggcgcgcgggctgtagtgggcgatcgcctttccccgacccctcgccgtgcccctgggcctcccgaagtg

SEQ ID NO: 8345 - DNA, 196 bp, Homo sapiens
  source 1..196: mol_type = unassigned DNA
ccggcaacccccagtgctaggcgccctgcagcccccgcgcgccgcgcctgggcccgcatcgctctcgcagtgagggtccgcccgagcggtaagccctccccggcggccaagccgacacctcccccccgcctcgccgcccaccccgggcagcagccgcggaacaatggagagcgcagccagcagccctggagacggc

SEQ ID NO: 8346 - DNA, 176 bp, Homo sapiens
  source 1..176: mol_type = unassigned DNA
cccgctcctgagaaccctggctcgggagagcgacgcggggtcctcggggctgcgcaggctgcggcgccctgcccacgctggcccgagggcgcggctcgctccgggtcggctcacacacctacgcttcctgccgggaggcggctgggacgcggcggggctgccccaagtgcagtcgc

SEQ ID NO: 8347 - DNA, 152 bp, Homo sapiens
  source 1..152: mol_type = unassigned DNA
gggtccccctcaagcagctgtcccggccccggacccctacttgatccccccaaccgacctggcagggcacgcatacctgacgcccattttgcagtcgagcacacaaggtccgtcgaagccatcgagcaggtcctgcagctgcaggtagcttt

SEQ ID NO: 8348 - DNA, 232 bp, Homo sapiens
  source 1..232: mol_type = unassigned DNA
gcagctatttgaaggctcccatggtccccggcgcctgcgtttgaagcccgccttcaggctttggggggtatttgcagaaaactcccagcagcggctcgccaaccagacctcagggtgcacggggggtggcgccggtaattatggcaactctcaaaataaaataatataaaataaagtaaccaacgttcaccaaccaccaccccatctcaccccctgtactgtcctcaggtag

SEQ ID NO: 8349 - DNA, 265 bp, synthetic construct
  misc_feature 1..265: note = Description of Artificial Sequence: Synthetic polynucleotide
  source 1..265: mol_type = other DNA
atygggagtttagagttttgttagygtygtattgtgygtygygtaagtygttygatttttttagyggtatyggttttaagtagtaaatatttgtgygtttttgagttagggaygygygtggggggtgggygtgtaygygggtgggttagygtagagtgggagtttgtgggtgtttttygtygggatttttaatttagttgttttygagagtttaagttgagygtygtaygtgttygtgttatttgttgtattggaygtagtttaa

SEQ ID NO: 8350 - DNA, 235 bp, synthetic construct
  misc_feature 1..235: note = Description of Artificial Sequence: Synthetic polynucleotide
  source 1..235: mol_type = other DNA
gtgtttttttataggttttatttgtaattgagaygaatgattatagtggggygggaaggagtagttgtttattaattaatttttaattaaaagtgtttttygttttygggtgattaaagagaaatatygttygttgggygatattgattyggatggaatttatttgttaaygttyggaggaatggttttttygtttatygygyggtygggattgttttggtttttttyggtttga

SEQ ID NO: 8351 - DNA, 270 bp, synthetic construct
  misc_feature 1..270: note = Description of Artificial Sequence: Synthetic polynucleotide
  source 1..270: mol_type = other DNA
tttaattgtagtggtaaggtttggggattgagaggttyggtgagtgttagtttygtaggttgygtyggtgttyggtttttattttagttygggggttttaggtttttygygggttttggggygttggtgttygygtagttttagtygttttygtagttatygtygttyggtttygyggaggyggygygtagygggggygttygggygttgtttttttgaggtttygggggtttagggtggttygtagtgttattggttagggtttgygat

SEQ ID NO: 8352 - DNA, 270 bp, synthetic construct
  misc_feature 1..270: note = Description of Artificial Sequence: Synthetic polynucleotide
  source 1..270: mol_type = other DNA
aattttttagatttggaggtttttaaggttttygtaatttagtgagtttyggggtattaataaattttygygggggttatygygttygygaaygtagagtttataygtggattttygygtttgtgatgtttygattygtttygggttttygtatagataatgtygygygtttttttygtagttatttygggattygygtttygygtygttyggaygtttttttgygtttgtyggggatatttatygatattaggaattttagygtgttta

SEQ ID NO: 8353 - DNA, 149 bp, synthetic construct
  misc_feature 1..149: note = Description of Artificial Sequence: Synthetic polynucleotide
  source 1..149: mol_type = other DNA
ttyggggtattatggtttggggttggattatgttttttttattttagtyggygttttttatttaygygygttgagggtgyggtgagttgagtgyggggttaagtatgttttggygtygatttygtttaggggtttaggatttggygttt

SEQ ID NO: 8354 - DNA, 232 bp, synthetic construct
  misc_feature 1..232: note = Description of Artificial Sequence: Synthetic polynucleotide
  source 1..232: mol_type = other DNA
ttatgtttttgttgttggggttgtgtttggggttgtttttgtgtgtggggtygtaggaagaggygtagagttggggttatttttyggagtaggtaagtggagtygaggggagtygggtttygggygyggtygttttttttttttygtyggttyggtygyggagtttttgttygggtttttttygatygttttttaggtttttattagaggtttaggggtttttttttgtggg

SEQ ID NO: 8355 - DNA, 189 bp, synthetic construct
  misc_feature 1..189: note = Description of Artificial Sequence: Synthetic polynucleotide
  source 1..189: mol_type = other DNA
gtagtagtagtagtaatatggttgttgatgggtgtttggggtggygttggyggygggaggagttttttygagtttttgygtyggttgttygttgttagttatggtaaatggtggyggyggyggyggyggtagtagyggyggyggyggyggyggyggaggtagtagttttagaatgagtagtaatattta

SEQ ID NO: 8356 - DNA, 260 bp, synthetic construct
  misc_feature 1..260: note = Description of Artificial Sequence: Synthetic polynucleotide
  source 1..260: mol_type = other DNA
tagtttttgttagatttgaaagtaagttggaaatygatagttgttttagttgttttagattttaatttggtttgggttttttttttttttatttgaaaatagatttagggtaatgtttaagagaattttaatygayggaagtggtygggaaattttgttttyggtattgagggatgttatyggagatttttttgttttaggtttgtyggagtttattatattygttaatgttatattgtattttagaattagagtttggt

SEQ ID NO: 8357 - DNA, 187 bp, synthetic construct
  misc_feature 1..187: note = Description of Artificial Sequence: Synthetic polynucleotide
  source 1..187: mol_type = other DNA
tttttyggggtttgttttgttygttttttaaattygttttatatttttttygattttygtttttgtaagygttatttgtagttttatyggttttygtaayggtggtggtggttggtggggggtttygaagtttgtttttggttagtyggatttyggtgggagatggaggtagaaatttyggtttttt

SEQ ID NO: 8358 - DNA, 249 bp, synthetic construct
  misc_feature 1..249: note = Description of Artificial Sequence: Synthetic polynucleotide
  source 1..249: mol_type = other DNA
gtttttaatgagagttttagaatatttttygtttttgayggttagyggtagygtygtygtttttygtagagygttygttttttygtttttagagttttagttttttttygagygatttygtagtttttttttygtttttattygtygtyggttttgtagttyggttttttttttagtttaggygygygggttgtagtgggygatygttttttttygatttttygtygtgtttttgggtttttygaagtg

SEQ ID NO: 8359 - DNA, 196 bp, synthetic construct
  misc_feature 1..196: note = Description of Artificial Sequence: Synthetic polynucleotide
  source 1..196: mol_type = other DNA
tyggtaatttttagtgttaggygttttgtagttttygygygtygygtttgggttygtatygttttygtagtgagggttygttygagyggtaagtttttttyggyggttaagtygatatttttttttygtttygtygtttatttygggtagtagtygyggaataatggagagygtagttagtagttttggagayggt

SEQ ID NO: 8360 - DNA, 176 bp, synthetic construct
  misc_feature 1..176: note = Description of Artificial Sequence: Synthetic polynucleotide
  source 1..176: mol_type = other DNA
ttygtttttgagaattttggttygggagagygaygyggggttttyggggttgygtaggttgyggygttttgtttaygttggttygagggygyggttygtttygggtyggtttatatatttaygttttttgtygggaggyggttgggaygyggyggggttgttttaagtgtagtygt

SEQ ID NO: 8361 - DNA, 152 bp, synthetic construct
  misc_feature 1..152: note = Description of Artificial Sequence: Synthetic polynucleotide
  source 1..152: mol_type = other DNA
gggttttttttaagtagttgtttyggtttyggatttttatttgatttttttaatygatttggtagggtaygtatatttgaygtttattttgtagtygagtatataaggttygtygaagttatygagtaggttttgtagttgtaggtagtttt

SEQ ID NO: 8362 - DNA, 232 bp, synthetic construct
  misc_feature 1..232: note = Description of Artificial Sequence: Synthetic polynucleotide
  source 1..232: mol_type = other DNA
gtagttatttgaaggtttttatggttttyggygtttgygtttgaagttygtttttaggttttggggggtatttgtagaaaatttttagtagyggttygttaattagattttagggtgtayggggggtggygtyggtaattatggtaatttttaaaataaaataatataaaataaagtaattaaygtttattaattattattttattttattttttgtattgtttttaggtag

SEQ ID NO: 8363 - DNA, 265 bp, synthetic construct
  misc_feature 1..265: note = Description of Artificial Sequence: Synthetic polynucleotide
  source 1..265: mol_type = other DNA
atcgggagtttagagttttgttagcgtcgtattgtgcgtcgcgtaagtcgttcgatttttttagcggtatcggttttaagtagtaaatatttgtgcgtttttgagttagggacgcgcgtggggggtgggcgtgtacgcgggtgggttagcgtagagtgggagtttgtgggtgtttttcgtcgggatttttaatttagttgttttcgagagtttaagttgagcgtcgtacgtgttcgtgttatttgttgtattggacgtagtttaa

SEQ ID NO: 8364 - DNA, 235 bp, synthetic construct
  misc_feature 1..235: note = Description of Artificial Sequence: Synthetic polynucleotide
  source 1..235: mol_type = other DNA
gtgtttttttataggttttatttgtaattgagacgaatgattatagtggggcgggaaggagtagttgtttattaattaatttttaattaaaagtgtttttcgttttcgggtgattaaagagaaatatcgttcgttgggcgatattgattcggatggaatttatttgttaacgttcggaggaatggttttttcgtttatcgcgcggtcgggattgttttggtttttttcggtttga

SEQ ID NO: 8365 - DNA, 270 bp, synthetic construct
  misc_feature 1..270: note = Description of Artificial Sequence: Synthetic polynucleotide
  source 1..270: mol_type = other DNA
tttaattgtagtggtaaggtttggggattgagaggttcggtgagtgttagtttcgtaggttgcgtcggtgttcggtttttattttagttcgggggttttaggtttttcgcgggttttggggcgttggtgttcgcgtagttttagtcgttttcgtagttatcgtcgttcggtttcgcggaggcggcgcgtagcgggggcgttcgggcgttgtttttttgaggtttcgggggtttagggtggttcgtagtgttattggttagggtttgcgat

SEQ ID NO: 8366 - DNA, 270 bp, synthetic construct
  misc_feature 1..270: note = Description of Artificial Sequence: Synthetic polynucleotide
  source 1..270: mol_type = other DNA
aattttttagatttggaggtttttaaggttttcgtaatttagtgagtttcggggtattaataaattttcgcgggggttatcgcgttcgcgaacgtagagtttatacgtggattttcgcgtttgtgatgtttcgattcgtttcgggttttcgtatagataatgtcgcgcgtttttttcgtagttatttcgggattcgcgtttcgcgtcgttcggacgtttttttgcgtttgtcggggatatttatcgatattaggaattttagcgtgttta

SEQ ID NO: 8367 - DNA, 149 bp, synthetic construct
  misc_feature 1..149: note = Description of Artificial Sequence: Synthetic polynucleotide
  source 1..149: mol_type = other DNA
ttcggggtattatggtttggggttggattatgttttttttattttagtcggcgttttttatttacgcgcgttgagggtgcggtgagttgagtgcggggttaagtatgttttggcgtcgatttcgtttaggggtttaggatttggcgttt

SEQ ID NO: 8368 - DNA, 232 bp, synthetic construct
  misc_feature 1..232: note = Description of Artificial Sequence: Synthetic polynucleotide
  source 1..232: mol_type = other DNA
ttatgtttttgttgttggggttgtgtttggggttgtttttgtgtgtggggtcgtaggaagaggcgtagagttggggttatttttcggagtaggtaagtggagtcgaggggagtcgggtttcgggcgcggtcgttttttttttttcgtcggttcggtcgcggagtttttgttcgggtttttttcgatcgttttttaggtttttattagaggtttaggggtttttttttgtggg

SEQ ID NO: 8369 - DNA, 189 bp, synthetic construct
  misc_feature 1..189: note = Description of Artificial Sequence: Synthetic polynucleotide
  source 1..189: mol_type = other DNA
gtagtagtagtagtaatatggttgttgatgggtgtttggggtggcgttggcggcgggaggagttttttcgagtttttgcgtcggttgttcgttgttagttatggtaaatggtggcggcggcggcggcggtagtagcggcggcggcggcggcggcggaggtagtagttttagaatgagtagtaatattta

SEQ ID NO: 8370 - DNA, 260 bp, synthetic construct
  misc_feature 1..260: note = Description of Artificial Sequence: Synthetic polynucleotide
  source 1..260: mol_type = other DNA
tagtttttgttagatttgaaagtaagttggaaatcgatagttgttttagttgttttagattttaatttggtttgggttttttttttttttatttgaaaatagatttagggtaatgtttaagagaattttaatcgacggaagtggtcgggaaattttgttttcggtattgagggatgttatcggagatttttttgttttaggtttgtcggagtttattatattcgttaatgttatattgtattttagaattagagtttggt

SEQ ID NO: 8371 - DNA, 187 bp, synthetic construct
  misc_feature 1..187: note = Description of Artificial Sequence: Synthetic polynucleotide
  source 1..187: mol_type = other DNA
tttttcggggtttgttttgttcgttttttaaattcgttttatatttttttcgattttcgtttttgtaagcgttatttgtagttttatcggttttcgtaacggtggtggtggttggtggggggtttcgaagtttgtttttggttagtcggatttcggtgggagatggaggtagaaatttcggtttttt

SEQ ID NO: 8372 - DNA, 249 bp, synthetic construct
  misc_feature 1..249: note = Description of Artificial Sequence: Synthetic polynucleotide
  source 1..249: mol_type = other DNA
gtttttaatgagagttttagaatatttttcgtttttgacggttagcggtagcgtcgtcgtttttcgtagagcgttcgttttttcgtttttagagttttagttttttttcgagcgatttcgtagtttttttttcgtttttattcgtcgtcggttttgtagttcggttttttttttagtttaggcgcgcgggttgtagtgggcgatcgttttttttcgatttttcgtcgtgtttttgggtttttcgaagtg

SEQ ID NO: 8373 - DNA, 196 bp, synthetic construct
  misc_feature 1..196: note = Description of Artificial Sequence: Synthetic polynucleotide
  source 1..196: mol_type = other DNA
tcggtaatttttagtgttaggcgttttgtagttttcgcgcgtcgcgtttgggttcgtatcgttttcgtagtgagggttcgttcgagcggtaagtttttttcggcggttaagtcgatatttttttttcgtttcgtcgtttatttcgggtagtagtcgcggaataatggagagcgtagttagtagttttggagacggt

SEQ ID NO: 8374 - DNA, 176 bp, synthetic construct
  misc_feature 1..176: note = Description of Artificial Sequence: Synthetic polynucleotide
  source 1..176: mol_type = other DNA
ttcgtttttgagaattttggttcgggagagcgacgcggggttttcggggttgcgtaggttgcggcgttttgtttacgttggttcgagggcgcggttcgtttcgggtcggtttatatatttacgttttttgtcgggaggcggttgggacgcggcggggttgttttaagtgtagtcgt

SEQ ID NO: 8375 - DNA, 152 bp, synthetic construct
  misc_feature 1..152: note = Description of Artificial Sequence: Synthetic polynucleotide
  source 1..152: mol_type = other DNA
gggttttttttaagtagttgtttcggtttcggatttttatttgatttttttaatcgatttggtagggtacgtatatttgacgtttattttgtagtcgagtatataaggttcgtcgaagttatcgagtaggttttgtagttgtaggtagtttt

SEQ ID NO: 8376 - DNA, 232 bp, synthetic construct
  misc_feature 1..232: note = Description of Artificial Sequence: Synthetic polynucleotide
  source 1..232: mol_type = other DNA
gtagttatttgaaggtttttatggttttcggcgtttgcgtttgaagttcgtttttaggttttggggggtatttgtagaaaatttttagtagcggttcgttaattagattttagggtgtacggggggtggcgtcggtaattatggtaatttttaaaataaaataatataaaataaagtaattaacgtttattaattattattttattttattttttgtattgtttttaggtag

SEQ ID NO: 8377 - DNA, 28 bp, synthetic construct
  misc_feature 1..28: note = Description of Artificial Sequence: Synthetic primer
  source 1..28: mol_type = other DNA
ttagattgygtttagtatagtagatggt

SEQ ID NO: 8378 - DNA, 24 bp, synthetic construct
  misc_feature 1..24: note = Description of Artificial Sequence: Synthetic primer
  source 1..24: mol_type = other DNA
ttaggtygggaggggttaggatag

SEQ ID NO: 8379 - DNA, 25 bp, synthetic construct
  misc_feature 1..25: note = Description of Artificial Sequence: Synthetic primer
  source 1..25: mol_type = other DNA
gtygtagattttggttagtggtatt

SEQ ID NO: 8380 - DNA, 22 bp, synthetic construct
  misc_feature 1..22: note = Description of Artificial Sequence: Synthetic primer
  source 1..22: mol_type = other DNA
tgggtaygttggagtttttggt

SEQ ID NO: 8381 - DNA, 22 bp, synthetic construct
  misc_feature 1..22: note = Description of Artificial Sequence: Synthetic primer
  source 1..22: mol_type = other DNA
gggygttaggttttgggttttt

SEQ ID NO: 8382 - DNA, 29 bp, synthetic construct
  misc_feature 1..29: note = Description of Artificial Sequence: Synthetic primer
  source 1..29: mol_type = other DNA
tttatagagagggatttttgggtttttgg

SEQ ID NO: 8383 - DNA, 32 bp, synthetic construct
  misc_feature 1..32: note = Description of Artificial Sequence: Synthetic primer
  source 1..32: mol_type = other DNA
ggatattgttatttattttaagattgttgttt

SEQ ID NO: 8384 - DNA, 31 bp, synthetic construct
  misc_feature 1..31: note = Description of Artificial Sequence: Synthetic primer
  source 1..31: mol_type = other DNA
gttaaattttagttttaaagtgtagtgtggt

SEQ ID NO: 8385 - DNA, 25 bp, synthetic construct
  misc_feature 1..25: note = Description of Artificial Sequence: Synthetic primer
  source 1..25: mol_type = other DNA
aggaggtyggaatttttgtttttat

SEQ ID NO: 8386 - DNA, 22 bp, synthetic construct
  misc_feature 1..22: note = Description of Artificial Sequence: Synthetic primer
  source 1..22: mol_type = other DNA
tatttygggaggtttaggggta

SEQ ID NO: 8387 - DNA, 22 bp, synthetic construct
  misc_feature 1..22: note = Description of Artificial Sequence: Synthetic primer
  source 1..22: mol_type = other DNA
gtygtttttagggttgttggtt

SEQ ID NO: 8388 - DNA, 22 bp, synthetic construct
  misc_feature 1..22: note = Description of Artificial Sequence: Synthetic primer
  source 1..22: mol_type = other DNA
gygattgtatttggggtagttt

SEQ ID NO: 8389 - DNA, 28 bp, synthetic construct
  misc_feature 1..28: note = Description of Artificial Sequence: Synthetic primer
  source 1..28: mol_type = other DNA
aaagttatttgtagttgtaggatttgtt

SEQ ID NO: 8390 - DNA, 27 bp, synthetic construct
  misc_feature 1..27: note = Description of Artificial Sequence: Synthetic primer
  source 1..27: mol_type = other DNA
ttatttgaggatagtatagggggtgag

SEQ ID NO: 8391 - DNA, 24 bp, synthetic construct
  misc_feature 1..24: note = Description of Artificial Sequence: Synthetic primer
  source 1..24: mol_type = other DNA
accraaaacccaaaaccctaccaa

SEQ ID NO: 8392 - DNA, 33 bp, synthetic construct
  misc_feature 1..33: note = Description of Artificial Sequence: Synthetic primer
  source 1..33: mol_type = other DNA
atatcctttcataaatctcatttataattaaaa

SEQ ID NO: 8393 - DNA, 33 bp, synthetic construct
  misc_feature 1..33: note = Description of Artificial Sequence: Synthetic primer
  source 1..33: mol_type = other DNA
tccaactacaataacaaaatctaaaaattaaaa

SEQ ID NO: 8394 - DNA, 30 bp, synthetic construct
  misc_feature 1..30: note = Description of Artificial Sequence: Synthetic primer
  source 1..30: mol_type = other DNA
aacttttcaaacctaaaaatctccaaaacc

SEQ ID NO: 8395 - DNA, 34 bp, synthetic construct
  misc_feature 1..34: note = Description of Artificial Sequence: Synthetic primer
  source 1..34: mol_type = other DNA
cccraaacactataacctaaaactaaactatacc

SEQ ID NO: 8396 - DNA, 36 bp, synthetic construct
  misc_feature 1..36: note = Description of Artificial Sequence: Synthetic primer
  source 1..36: mol_type = other DNA
ccatactcctactactaaaactatacctaaaactat

SEQ ID NO: 8397 - DNA, 36 bp, synthetic construct
  misc_feature 1..36: note = Description of Artificial Sequence: Synthetic primer
  source 1..36: mol_type = other DNA
acaacaataacaacaatataactattaataaatatt

SEQ ID NO: 8398 - DNA, 31 bp, synthetic construct
  misc_feature 1..31: note = Description of Artificial Sequence: Synthetic primer
  source 1..31: mol_type = other DNA
caatctctaccaaacttaaaaacaaactaaa

SEQ ID NO: 8399 - DNA, 22 bp, synthetic construct
  misc_feature 1..22: note = Description of Artificial Sequence: Synthetic primer
  source 1..22: mol_type = other DNA
cttcccraaacttactctaccc

SEQ ID NO: 8400 - DNA, 25 bp, synthetic construct
  misc_feature 1..25: note = Description of Artificial Sequence: Synthetic primer
  source 1..25: mol_type = other DNA
acccctaataaaaatcccaaaacac

SEQ ID NO: 8401 - DNA, 22 bp, synthetic construct
  misc_feature 1..22: note = Description of Artificial Sequence: Synthetic primer
  source 1..22: mol_type = other DNA
ccracaacccccaatactaaac

SEQ ID NO: 8402 - DNA, 22 bp, synthetic construct
  misc_feature 1..22: note = Description of Artificial Sequence: Synthetic primer
  source 1..22: mol_type = other DNA
cccrctcctaaaaaccctaact

SEQ ID NO: 8403 - DNA, 22 bp, synthetic construct
  misc_feature 1..22: note = Description of Artificial Sequence: Synthetic primer
  source 1..22: mol_type = other DNA
aaatccccctcaaacaactatc

SEQ ID NO: 8404 - DNA, 28 bp, synthetic construct
  misc_feature 1..28: note = Description of Artificial Sequence: Synthetic primer
  source 1..28: mol_type = other DNA
acaactatttaaaaactcccataatccc

SEQ ID NO: 8405 - DNA, 116 bp, Homo sapiens
  source 1..116: mol_type = unassigned DNA
agggacagccccaggcacagccccagcagcaggagcatggcggggcgagggcgcgggacgctcggggacccggcgggacacgctttgcagcgcccagggctccagccactgcggga

SEQ ID NO: 8406 - DNA, 272 bp, Homo sapiens
  source 1..272: mol_type = unassigned DNA
gggggaaaaacccaaaccagattagaatctgaaacagctgaaacagctatcgatttccagcttgctttcaagtctggcagagactgtgaaagtcctaacttctccgcgatgtcagccacggcccgcggcggtcacggagccacttcagcacctcgcgatggacagtgacccccggcgtggcgcgagttccctgcggtccccacgcgggcctgggcggcgggtccctccacggctccgtccagacacccggaggcacctgccaaagctgcgga

SEQ ID NO: 8407 - DNA, 209 bp, Homo sapiens
  source 1..209: mol_type = unassigned DNA
agtgttctgggactctcattaggggccgcgagcctcgagcgtcaaattcccgcggcgtccgcctagcgcgctgctgtggcgggcgcggagggcgcgcgccggcagtgggggctgcggcggcggagggcacgggcccccgctcagcgtcctcaccttcttggtgcagctgcctcccgcgagccgagacactcctgtcagggaagaggagc

SEQ ID NO: 8408 - DNA, 114 bp, Homo sapiens
  source 1..114: mol_type = unassigned DNA
ggcagcggcagagcagtggcagcagccgccactgccgctgttactgcggtcgccgccgctggagagaggaggacgaggagggcaaggggcagaagcaggtcctgctctgtctgc

SEQ ID NO: 8409 - DNA, 184 bp, Homo sapiens
  source 1..184: mol_type = unassigned DNA
gatgccggtcctcagggagttttaaggcggcgggcaccagcgggctgatcctgaagcgctgctcggagccggagcgctactgcctggcgcggctgatggctgacgcgctgcgcggctgcgtgcctgccttccacggcgtggtggagcgcgacggcgaaagctacctgcagctgcaggacctgct

SEQ ID NO: 8410 - DNA, 116 bp, synthetic construct
  misc_feature 1..116: note = Description of Artificial Sequence: Synthetic polynucleotide
  source 1..116: mol_type = other DNA
agggatagttttaggtatagttttagtagtaggagtatggyggggygagggygygggaygttyggggattyggygggataygttttgtagygtttagggttttagttattgyggga

SEQ ID NO: 8411 - DNA, 272 bp, synthetic construct
  misc_feature 1..272: note = Description of Artificial Sequence: Synthetic polynucleotide
  source 1..272: mol_type = other DNA
gggggaaaaatttaaattagattagaatttgaaatagttgaaatagttatygatttttagtttgtttttaagtttggtagagattgtgaaagttttaattttttygygatgttagttayggttygyggyggttayggagttattttagtatttygygatggatagtgattttyggygtggygygagttttttgyggtttttaygygggtttgggyggygggtttttttayggtttygtttagatattyggaggtatttgttaaagttgygga

SEQ ID NO: 8412 - DNA, 209 bp, synthetic construct
  misc_feature 1..209: note = Description of Artificial Sequence: Synthetic polynucleotide
  source 1..209: mol_type = other DNA
agtgttttgggatttttattaggggtygygagtttygagygttaaattttygyggygttygtttagygygttgttgtggygggygyggagggygygygtyggtagtgggggttgyggyggyggagggtaygggttttygtttagygtttttatttttttggtgtagttgtttttygygagtygagatatttttgttagggaagaggagt

SEQ ID NO: 8413 - DNA, 114 bp, synthetic construct
  misc_feature 1..114: note = Description of Artificial Sequence: Synthetic polynucleotide
  source 1..114: mol_type = other DNA
ggtagyggtagagtagtggtagtagtygttattgtygttgttattgyggtygtygtygttggagagaggaggaygaggagggtaaggggtagaagtaggttttgttttgtttgt

SEQ ID NO: 8414 - DNA, 184 bp, synthetic construct
  misc_feature 1..184: note = Description of Artificial Sequence: Synthetic polynucleotide
  source 1..184: mol_type = other DNA
gatgtyggtttttagggagttttaaggyggygggtattagygggttgattttgaagygttgttyggagtyggagygttattgtttggygyggttgatggttgaygygttgygyggttgygtgtttgttttttayggygtggtggagygygayggygaaagttatttgtagttgtaggatttgtt

SEQ ID NO: 8415 - DNA, 116 bp, synthetic construct
  misc_feature 1..116: note = Description of Artificial Sequence: Synthetic polynucleotide
  source 1..116: mol_type = other DNA
agggatagttttaggtatagttttagtagtaggagtatggcggggcgagggcgcgggacgttcggggattcggcgggatacgttttgtagcgtttagggttttagttattgcggga

SEQ ID NO: 8416 - DNA, 272 bp, synthetic construct
  misc_feature 1..272: note = Description of Artificial Sequence: Synthetic polynucleotide
  source 1..272: mol_type = other DNA
gggggaaaaatttaaattagattagaatttgaaatagttgaaatagttatcgatttttagtttgtttttaagtttggtagagattgtgaaagttttaattttttcgcgatgttagttacggttcgcggcggttacggagttattttagtatttcgcgatggatagtgattttcggcgtggcgcgagttttttgcggtttttacgcgggtttgggcggcgggtttttttacggtttcgtttagatattcggaggtatttgttaaagttgcgga

SEQ ID NO: 8417 - DNA, 209 bp, synthetic construct
  misc_feature 1..209: note = Description of Artificial Sequence: Synthetic polynucleotide
  source 1..209: mol_type = other DNA
agtgttttgggatttttattaggggtcgcgagtttcgagcgttaaattttcgcggcgttcgtttagcgcgttgttgtggcgggcgcggagggcgcgcgtcggtagtgggggttgcggcggcggagggtacgggttttcgtttagcgtttttatttttttggtgtagttgtttttcgcgagtcgagatatttttgttagggaagaggagt

SEQ ID NO: 8418 - DNA, 114 bp, synthetic construct
  misc_feature 1..114: note = Description of Artificial Sequence: Synthetic polynucleotide
  source 1..114: mol_type = other DNA
ggtagcggtagagtagtggtagtagtcgttattgtcgttgttattgcggtcgtcgtcgttggagagaggaggacgaggagggtaaggggtagaagtaggttttgttttgtttgt

SEQ ID NO: 8419 - DNA, 184 bp, synthetic construct
  misc_feature 1..184: note = Description of Artificial Sequence: Synthetic polynucleotide
  source 1..184: mol_type = other DNA
gatgtcggtttttagggagttttaaggcggcgggtattagcgggttgattttgaagcgttgttcggagtcggagcgttattgtttggcgcggttgatggttgacgcgttgcgcggttgcgtgtttgttttttacggcgtggtggagcgcgacggcgaaagttatttgtagttgtaggatttgtt

SEQ ID NO: 8420 - DNA, 116 bp, Homo sapiens
  source 1..116: mol_type = unassigned DNA
tcccgcagtggctggagccctgggcgctgcaaagcgtgtcccgccgggtccccgagcgtcccgcgccctcgccccgccatgctcctgctgctggggctgtgcctggggctgtccct

SEQ ID NO: 8421 - DNA, 272 bp, Homo sapiens
  source 1..272: mol_type = unassigned DNA
tccgcagctttggcaggtgcctccgggtgtctggacggagccgtggagggacccgccgcccaggcccgcgtggggaccgcagggaactcgcgccacgccgggggtcactgtccatcgcgaggtgctgaagtggctccgtgaccgccgcgggccgtggctgacatcgcggagaagttaggactttcacagtctctgccagacttgaaagcaagctggaaatcgatagctgtttcagctgtttcagattctaatctggtttgggtttttccccc

SEQ ID NO: 8422 - DNA, 209 bp, Homo sapiens
  source 1..209: mol_type = unassigned DNA
gctcctcttccctgacaggagtgtctcggctcgcgggaggcagctgcaccaagaaggtgaggacgctgagcgggggcccgtgccctccgccgccgcagcccccactgccggcgcgcgccctccgcgcccgccacagcagcgcgctaggcggacgccgcgggaatttgacgctcgaggctcgcggcccctaatgagagtcccagaacact

SEQ ID NO: 8423 - DNA, 114 bp, Homo sapiens
  source 1..114: mol_type = unassigned DNA
gcagacagagcaggacctgcttctgccccttgccctcctcgtcctcctctctccagcggcggcgaccgcagtaacagcggcagtggcggctgctgccactgctctgccgctgcc

SEQ ID NO: 8424 - DNA, 184 bp, Homo sapiens
  source 1..184: mol_type = unassigned DNA
agcaggtcctgcagctgcaggtagctttcgccgtcgcgctccaccacgccgtggaaggcaggcacgcagccgcgcagcgcgtcagccatcagccgcgccaggcagtagcgctccggctccgagcagcgcttcaggatcagcccgctggtgcccgccgccttaaaactccctgaggaccggcatc

SEQ ID NO: 8425 - DNA, 116 bp, synthetic construct
  misc_feature 1..116: note = Description of Artificial Sequence: Synthetic polynucleotide
  source 1..116: mol_type = other DNA
tttygtagtggttggagttttgggygttgtaaagygtgtttygtygggttttygagygtttygygttttygtttygttatgtttttgttgttggggttgtgtttggggttgttttt

SEQ ID NO: 8426 - DNA, 272 bp, synthetic construct
  misc_feature 1..272: note = Description of Artificial Sequence: Synthetic polynucleotide
  source 1..272: mol_type = other DNA
ttygtagttttggtaggtgttttygggtgtttggayggagtygtggagggattygtygtttaggttygygtggggatygtagggaattygygttaygtygggggttattgtttatygygaggtgttgaagtggtttygtgatygtygygggtygtggttgatatygyggagaagttaggatttttatagtttttgttagatttgaaagtaagttggaaatygatagttgttttagttgttttagattttaatttggtttgggtttttttttt

SEQ ID NO: 8427 - DNA, 209 bp, synthetic construct
  misc_feature 1..209: note = Description of Artificial Sequence: Synthetic polynucleotide
  source 1..209: mol_type = other DNA
gttttttttttttgataggagtgtttyggttygygggaggtagttgtattaagaaggtgaggaygttgagygggggttygtgtttttygtygtygtagtttttattgtyggygygygtttttygygttygttatagtagygygttaggyggaygtygygggaatttgaygttygaggttygyggtttttaatgagagttttagaatatt

SEQ ID NO: 8428 - DNA, 114 bp, synthetic construct
  misc_feature 1..114: note = Description of Artificial Sequence: Synthetic polynucleotide
  source 1..114: mol_type = other DNA
gtagatagagtaggatttgtttttgttttttgtttttttygtttttttttttttagyggyggygatygtagtaatagyggtagtggyggttgttgttattgttttgtygttgtt

SEQ ID NO: 8429 - DNA, 184 bp, synthetic construct
  misc_feature 1..184: note = Description of Artificial Sequence: Synthetic polynucleotide
  source 1..184: mol_type = other DNA
agtaggttttgtagttgtaggtagttttygtygtygygttttattaygtygtggaaggtaggtaygtagtygygtagygygttagttattagtygygttaggtagtagygtttyggtttygagtagygttttaggattagttygttggtgttygtygttttaaaattttttgaggatyggtatt

SEQ ID NO: 8430 - DNA, 116 bp, synthetic construct
  misc_feature 1..116: note = Description of Artificial Sequence: Synthetic polynucleotide
  source 1..116: mol_type = other DNA
tttcgtagtggttggagttttgggcgttgtaaagcgtgtttcgtcgggttttcgagcgtttcgcgttttcgtttcgttatgtttttgttgttggggttgtgtttggggttgttttt

SEQ ID NO: 8431 - DNA, 272 bp, synthetic construct
  misc_feature 1..272: note = Description of Artificial Sequence: Synthetic polynucleotide
  source 1..272: mol_type = other DNA
ttcgtagttttggtaggtgttttcgggtgtttggacggagtcgtggagggattcgtcgtttaggttcgcgtggggatcgtagggaattcgcgttacgtcgggggttattgtttatcgcgaggtgttgaagtggtttcgtgatcgtcgcgggtcgtggttgatatcgcggagaagttaggatttttatagtttttgttagatttgaaagtaagttggaaatcgatagttgttttagttgttttagattttaatttggtttgggtttttttttt

SEQ ID NO: 8432 - DNA, 209 bp, synthetic construct
  misc_feature 1..209: note = Description of Artificial Sequence: Synthetic polynucleotide
  source 1..209: mol_type = other DNA
gttttttttttttgataggagtgtttcggttcgcgggaggtagttgtattaagaaggtgaggacgttgagcgggggttcgtgtttttcgtcgtcgtagtttttattgtcggcgcgcgtttttcgcgttcgttatagtagcgcgttaggcggacgtcgcgggaatttgacgttcgaggttcgcggtttttaatgagagttttagaatatt

SEQ ID NO: 8433 - DNA, 114 bp, synthetic construct
  misc_feature 1..114: note = Description of Artificial Sequence: Synthetic polynucleotide
  source 1..114: mol_type = other DNA
gtagatagagtaggatttgtttttgttttttgtttttttcgtttttttttttttagcggcggcgatcgtagtaatagcggtagtggcggttgttgttattgttttgtcgttgtt

SEQ ID NO: 8434 - DNA, 184 bp, synthetic construct
  misc_feature 1..184: note = Description of Artificial Sequence: Synthetic polynucleotide
  source 1..184: mol_type = other DNA
agtaggttttgtagttgtaggtagttttcgtcgtcgcgttttattacgtcgtggaaggtaggtacgtagtcgcgtagcgcgttagttattagtcgcgttaggtagtagcgtttcggtttcgagtagcgttttaggattagttcgttggtgttcgtcgttttaaaattttttgaggatcggtatt

SEQ ID NO: 8435 - DNA, 30 bp, synthetic construct
  misc_feature 1..30: note = Description of Artificial Sequence: Synthetic primer
  source 1..30: mol_type = other DNA
agggatagttttaggtatagttttagtagt

SEQ ID NO: 8436 - DNA, 31 bp, synthetic construct
  misc_feature 1..31: note = Description of Artificial Sequence: Synthetic primer
  source 1..31: mol_type = other DNA
gggggaaaaatttaaattagattagaatttg

SEQ ID NO: 8437 - DNA, 25 bp, synthetic construct
  misc_feature 1..25: note = Description of Artificial Sequence: Synthetic primer
  source 1..25: mol_type = other DNA
agtgttttgggatttttattagggg

SEQ ID NO: 8438 - DNA, 25 bp, synthetic construct
  misc_feature 1..25: note = Description of Artificial Sequence: Synthetic primer
  source 1..25: mol_type = other DNA
ggtagyggtagagtagtggtagtag

SEQ ID NO: 8439 - DNA, 22 bp, synthetic construct
  misc_feature 1..22: note = Description of Artificial Sequence: Synthetic primer
  source 1..22: mol_type = other DNA
gatgtyggtttttagggagttt

SEQ ID NO: 8440 - DNA, 23 bp, synthetic construct
  misc_feature 1..23: note = Description of Artificial Sequence: Synthetic primer
  source 1..23: mol_type = other DNA
tcccrcaataactaaaaccctaa

SEQ ID NO: 8441 - DNA, 23 bp, synthetic construct
  misc_feature 1..23: note = Description of Artificial Sequence: Synthetic primer
  source 1..23: mol_type = other DNA
tccrcaactttaacaaatacctc

SEQ ID NO: 8442 - DNA, 25 bp, synthetic construct
  misc_feature 1..25: note = Description of Artificial Sequence: Synthetic primer
  source 1..25: mol_type = other DNA
actcctcttccctaacaaaaatatc

SEQ ID NO: 8443 - DNA, 27 bp, synthetic construct
  misc_feature 1..27: note = Description of Artificial Sequence: Synthetic primer
  source 1..27: mol_type = other DNA
acaaaacaaaacctacttctacccctt

SEQ ID NO: 8444 - DNA, 28 bp, synthetic construct
  misc_feature 1..28: note = Description of Artificial Sequence: Synthetic primer
  source 1..28: mol_type = other DNA
aacaaatcctacaactacaaataacttt

SEQ ID NO: 8445 - DNA, 22 bp, synthetic construct
  misc_feature 1..22: note = Description of Artificial Sequence: Synthetic primer
  source 1..22: mol_type = other DNA
ctcrtcctcctaccrcaaaata

SEQ ID NO: 8446 - DNA, 19 bp, synthetic construct
  misc_feature 1..19: note = Description of Artificial Sequence: Synthetic primer
  source 1..19: mol_type = other DNA
gttgtttaggttgtaggtg

SEQ ID NO: 8447 - DNA, 20 bp, Homo sapiens
  source 1..20: mol_type = unassigned DNA
cgtggtgcgcgcggcgggcg

SEQ ID NO: 8448 - DNA, 116 bp, Homo sapiens
  source 1..116: mol_type = unassigned DNA
cgagcgccgtgggcggggctccagggcggcggcgcctcgcggggagggtcctccgtgctgggggcgaggccacccgaggcagctccccgcccgcccccaaccccgccccgctctcg

SEQ ID NO: 8449-8458 - skipped (10 entries)

SEQ ID NO: 8459 - DNA, 44 bp, Homo sapiens
  source 1..44: mol_type = unassigned DNA
cgcgcgccccccgggccccgctcgcacccctcacgcgccccccg

SEQ ID NO: 8460-8469 - skipped (10 entries)

SEQ ID NO: 8470 - DNA, 34 bp, Homo sapiens
  source 1..34: mol_type = unassigned DNA
cgtctgctcggcggctctagaaggtcgggctgcg

SEQ ID NO: 8471-8480 - skipped (10 entries)

SEQ ID NO: 8481 - DNA, 211 bp, Homo sapiens
  source 1..211: mol_type = unassigned DNA
cgatccccggcgcagacacagaggccgcccccagccccgccgcctcgtggtcccgcccccgctgcacgctcccttacccctcggacctcgcagggccgcggcggacacggcccgatcggggacgtgaacgcgcagaactacatttcccagcgtcccgctcgcgctggaactacacttcccggggggctcggcggtgcacccgccggggtcg

SEQ ID NO: 8482-8491 - skipped (10 entries)

SEQ ID NO: 8492 - DNA, 95 bp, Homo sapiens
  source 1..95: mol_type = unassigned DNA
cgggaaaaggggcgcggaagaggggcggggcgggccacggcgcgcagggcccttccctcccgcctcggactcaattaattgggcttgagcttccg

SEQ ID NO: 8493-8502 - skipped (10 entries)

SEQ ID NO: 8503 - DNA, 264 bp, Homo sapiens
  source 1..264: mol_type = unassigned DNA
cgggctgcaaggcggtgtactacgtgtgcgcgctcagcatgtacgccagcgtgctgctcaccggcctgctcagcctgcagcgctgcctcgcagtcacccgccccttcctggcgcctcggctgcgcagcccggccctggcccgccgcctgctgctggcggtctggctggccgccctgttgctcgccgtcccggccgccgtctaccgccacctgtggagggaccgcgtatgccagctgtgccacccgtcgccggtccacgccgccg

SEQ ID NO: 8504-8513 - skipped (10 entries)

SEQ ID NO: 8514 - DNA, 59 bp, Homo sapiens
  source 1..59: mol_type = unassigned DNA
cgttccccgtcccggagctgccggcggcatgatccgacacgccggggcgcccgcgcgcg

SEQ ID NO: 8515-8535 - skipped (21 entries)

SEQ ID NO: 8536 - DNA, 324 bp, Homo sapiens
  source 1..324: mol_type = unassigned DNA
cggcgaaggccccgtgtcccacgagatccctcttgctgtactcgaagtcacccaccacctccatggccgcgcccccggggcacacagcggacgggcgggcggcgcagtgcggcgcaggtatcagcaccgcggctccgcgggcccggagcgcgccagcgtgcggcgggtctggggcagccgcagccccgggcccgggcggactctcatgccgagagaccggagcggaaactggggaagctgccgcgcggagccagggtcagcgaggcccggcccggcccctgccgctcatggcccggcctgccgccggccgctggctgtctggcg

SEQ ID NO: 8537-8543 - skipped (7 entries)

SEQ ID NO: 8544 - DNA, 102 bp, Homo sapiens
  source 1..102: mol_type = unassigned DNA
cgttgagtccgcgctgaacaagattctctcgcagctctgcgtcccgcgccgggtgaaggggcgtgttcctgcaggcgctcggggctcggcctggagctggcg

SEQ ID NO: 8545 - DNA, 24 bp, Homo sapiens
  source 1..24: mol_type = unassigned DNA
cgcaacgactcgctgccgcccacg

SEQ ID NO: 8546 - DNA, 521 bp, Homo sapiens
  source 1..521: mol_type = unassigned DNA
cgtggtgggggtgttagctgcaggggtgccctcggtgggtgggagttggtggcctctcgctggtgccatgggactcgcatgttcgccctgcgcccctcggctcttgagcccacaggccgggatcctgcctgccagccgcgtgcgctgccgtttaacccttgcaggcgcagagcgcgcggcggcggtgacagagaactttgtttggctgcccaaatacagcctcctgcagaaggaccctgcgcccggggaaggggaggaatctcttcccctctgggcgcccgccctcctcgccatggcccggcctccacatccgcccacatctggccgcagcggggcgcccggggggaggggctgaggccgcgtctctcgccgtcccctgggcgcgggccaggcggggaggaggggggcgctccggtcgtgtgcccaggactgtcccccagcggccactcgggccccagccccccaggcctggccttgacaggcgggcggagcagccagtgcgagacagggaggccggtgcg

SEQ ID NO: 8547 - DNA, 1484 bp, Homo sapiens
  source 1..1484: mol_type = unassigned DNA
cgcaagggcgccggggagcgggaggggcgctgggggcggcaaggggtcccagatcccaggccacgaactgttttccttttccccgggcaagagccccgctcccttcaactgacagaaattcactggggcaggggggcgagtggggagagaggtcgctcagggctcgctactggctgcgcctcccccggctctggtctgggaagcggctctgggccctccgggcgagcagcttgggcgccggcgccccctgcgaggaagatcgcggggtgacggtcggtacccgttcggctgggccgcgctgccgctccgatccacctcccttccgcgcccgcgccctcccccttcctttcactaggagtccgggattcggagagggcgcgggaggcaggcacacgggcccgaccccactccagcgctcaccggggacgcgggcgggcggcgacgggacgcggcgggggcgcggggcgggcgcggccatggagcagcagcggcggcggcggcggcggcggcggcaacactagcgaccgcgggcggacgagcgggcgggcagggccgccgggctcagcggaccgaactgcacagctcagcaaaagcgccctcgccctccgcgcgccgcctcctgcgagcccaaacccaccaacattttttaacgctccaacccatcctttgaagaaaagcaaaaaaaaaaaaaaaaaaaaaaaaaaaagcaaaaaaagaaaaagcattgatcggagagacggggatatatatatatatatatatatatatatatatataaaattttttttggctcctgctaaaattagcagggctcgccgcgcgcctgtgtgccagtgtgtgcgagtgtgtgtgcgtgcgggcgtgtgtgtgtgaatgtgattactccaggactcctcgggctccggagacgccattttcccccttgatatctctctccataaatcggtggcgcggcggaggcggcagagtcgggcgggaagcgcggggccggccggggcgcccgccgctcgccgccgcctccgcgcgcccgggggccccggcgccccccgagctagggcggccagctcgcggctcgccgtttgacagatgctcatcgccatggagttgccgcagcagcacctttgggggctcgggcgagcgacgggagccgggatctgagcgagcgccggggccagcggagccggagccgccgggacatgggtgagcacgcgcggcgaccttggcccgggagcccgggcgcccagcctccctccgcgccgcgggcccccgcactcccggaaccgggggcgacgtgtgtgccctgcatgcaaaagttcacgtcgccttgctgggtctttgactttgcacccggcgggaagggggagaccgggccgagggggcgggatgccggtccgggcgaggttgcaggagatgggcgcgattccggcgggccggcgggtgggcggcgatgctggctcaattggagtggctcgttggtggcggcg

SEQ ID NO: 8548 - DNA, 34 bp, Homo sapiens
  source 1..34: mol_type = unassigned DNA
cgcgtcgcccgctcccgctccccccgcctccccg

SEQ ID NO: 8549 - DNA, 14 bp, Homo sapiens
  source 1..14: mol_type = unassigned DNA
cggcgaggggctcg

SEQ ID NO: 8550 - DNA, 37 bp, Homo sapiens
  source 1..37: mol_type = unassigned DNA
cgtggcgcgcccactccacggtgctgaagagcagccg

SEQ ID NO: 8551 - DNA, 34 bp, Homo sapiens
  source 1..34: mol_type = unassigned DNA
cgggatttgtccgcttctttgtctttggctgccg

SEQ ID NO: 8552 - DNA, 538 bp, Homo sapiens
  source 1..538: mol_type = unassigned DNA
cgcggggccacctcaccgcgagctcctcccgcagcccggcccgggtcacctcgactcgccaggcttaactcaataaccacaacaccggaaaaggaagcaaaggtcgaagttcatccgcggccctgaggcctgtgggaaacgtagtccaacaacgaaagagccctgaagctcaagcggagcccgctggccgcaggggccgcaccacgccccagaccctggagtttccgggtgcgcagacccttgccatcagcagaggctgccgctgcgcgtcccctaggcgcggaagaggcggctggtggtccctgacggcaaggtgaagtcgaggcagtaatcgggaacccaggttgggaggacagaatggggaacaggaagctggggcgagggtggtcttgggggaggtggggggccgcggaattctaggtggcccctgcctcacctctggaaagaaccggaagcccgggccggggagggtgaagggagtcgcggacccggctgctcagccgaggaggaaacccggaccccaggctgagggaggccg

SEQ ID NO: 8553 - DNA, 109 bp, Homo sapiens
  source 1..109: mol_type = unassigned DNA
cggcgtccggagcgctggactacatttcccagaggcaccgctcccggagcgtagcttcatttccgttagtttgcgagatttggaggcctcgcgtggggagagggccgcg

SEQ ID NO: 8554 - DNA, 901 bp, Homo sapiens
  source 1..901: mol_type = unassigned DNA
cgcgcggggctccggggccggccctccctcgccgggcgcctcgggctcgccgcccgggttctccgcggacagcggccggtcgcgcaggcccacggcgcgcaccaggccgcccgccagctcttccagctcctccggccgcagcgccccgagccgcgcggcgccgcggaacgcgcccagggcttcggggaggcggccggcgcgggccagcgcgtcccccagcctcaggcacaggccgcggtccggctgcgccagcccggctagcatggagcgaaagagctcggctgccatctcgtagtcgcccgcgcggaaggcctcgtcgccctcctctaagcgctgggcgatcggctccgcgcggtcgcagccaggacactggggcggcggcggcggcgggaccggctcggggctcatcaccgcggggctgcgacgacgcgggtccggagcgaaggcgcggagcagggaggatgcgctgctgctgggaactggccggcgggagcgcggtctcagccctcgccagcagccacgcgcgtctgggggcggcgcgctgcgagcggctgagaccgcgggcgggggcgggcgcctggcttgggcagcgtcctcagcgcggtgtgggcggcgagccccgcagggctgcaatcgttccggggtgggggccgggacaggcaccgcgggcgcaatctgagcccctgcccacgcgcagcggcctctcagtcccgccggcttaggtaacccaggtcgctgcggtaacgcagtgaccgcgctccaggtccgcgtctcttgcgatgcttcccccactcgcctgagggctcctgcgcgactgcgcgcgcgtcctctgcctgccgcctccccgcagaggtgccggggccctgggagcaggtggccttggccgcgggctgctggcgcg

SEQ ID NO: 8555 - DNA, 15 bp, Homo sapiens
  source 1..15: mol_type = unassigned DNA
cgggcggcgcgggcg

SEQ ID NO: 8556 - DNA, 383 bp, Homo sapiens
  source 1..383: mol_type = unassigned DNA
cgggacatccccgaaggcggcgcgctggaggcggggagcggccggggcgcacggagagggcggggagcccgcgggagggggaggagggggaggagggggaggaggcgcgaggtgggggggagcgcggcgggcggcagggagggagcgggagggaggcaagaaagtagcagaaagtgaggctggcaggcggcggcaaaggagccggcgcgcggcggcggcaggaagtctgtgcccgagaacagcagaaataagagccagggagggaccgcggccgcggcggcggcggcgagagcgaaagaggaaactgcagaggaggaagctgcgccgcagcccgagccgcccggcatccccgccgcctctgcgcccgcgccgcgcccccggcg

SEQ ID NO: 8557 - skipped

SEQ ID NO: 8558 - DNA, 624 bp, Homo sapiens
  source 1..624: mol_type = unassigned DNA
cgcggaggtgggcgagcgggcgtgcgcgcactcacttgccggcgcgagggagtgtcgggggggaagggagtggtctccaaaagggggaggggagaaggcagggggcggggagaagccggccctttaggacccggctgcggcggcgagggaggaggaagaagcggaggaggcggctcccgcgctcgcagggccgtgccacctgcccgcccgcccgctcgctcgctcgcccgccgcgccgcgctgccgaccgccagcatgctgccgagagtgggctgccccgcgctgccgctgccgccgccgccgctgctgccgctgctgctgctgctactgggcgcgagtggcggcggcggcggggcgcgcgcggaggtgctgttccgctgcccgccctgcacacccgagcgcctggccgcctgcgggcccccgccggttgcgccgcccgccgcggtggccgcagtggccggaggcgcccgcatgccatgcgcggagctcgtccgggagccgggctgcggctgctgctcggtgtgcgcccggctggagggcgaggcgtgcggcgtctacaccccgcgctgcggccaggggctgcgctgctatccccacccgggctccgagctgcccctgcaggcg

SEQ ID NO: 8559 - DNA, 94 bp, Homo sapiens
  source 1..94: mol_type = unassigned DNA
cgagatagccagcgagttcaggcggtccttgcagcgctgggagaggaatgtgcgcgaaatcaaccagagcgaaatcagccggaggagccggccg

SEQ ID NO: 8560 - DNA, 63 bp, Homo sapiens
  source 1..63: mol_type = unassigned DNA
cgtgcagggcgcagagctgggccgagccgtcgccggcgccacgcgagtcccgcagccgccgcg

SEQ ID NO: 8561 - DNA, 41 bp, Homo sapiens
  source 1..41: mol_type = unassigned DNA
cgccgcggcttctggggtccccgccctcttgtccgccatcg

SEQ ID NO: 8562 - DNA, 1041 bp, Homo sapiens
  source 1..1041: mol_type = unassigned DNA
cgcgcagggaccgggccgggtagagtcgggcggggtggagaggcaagcggagcgcgcggtggggctgaggggaggcgtggggcgagtgcccgttgctcgctctctagctctcttgctcttacgctctctcgctcgcagccgctcgcagctcggcggtgcagctgtgctggatccggcggcgccgcagccttttatcgcctcctgatgtcactggggtgcgggggcccgggcggcccggtgcgcgggccaatagctgcacggcctccgcggcccagcggcgcagggcggggcgcgcctgacagctcccccgccccccgcgtcagctgactggcggcccgagcggccccggagcggcggaggcctggcggagcgctggagcggagtgggacggccagcctgggcccacccccgtaccctgcaggtcccggcccacgcacgctcgcctggagtgcgcgccccacctctaggccaaatcaccgctttcccctcctcgcgcactctcctccctcagttccctttgcaccccacccccatcccgtgtcacccccaaggaggctcagaatgagcgccgggacaacgcctcctgggccctttgttcccaagcggcccccgcccagtgggcgacgctctgtgtgtcctcgcggcttctggccgtgtgtgtcgtgcgttcctgtttctggagatctgcgcgtatttgtatgttggggagggcgggctcgaggctccgagagttgtgttcagacccaactcttaacctcaggggacctttctcaggccaagcgagggcccctcctggcgggtgcagtcgcagagccctgaggttcgactccactggccccgccgctccccgcgttcaccccaccgcacaatgttcacagtgaaggcgacgggaaaagcagcagcccaaaggctctgaattcctcttccccgccacacgcacggaatcctgagcccccggagcctcggggccgaggccggcccgggacggtgctccgagtagctctccactgctggggagccggccctgtttttgtttgaacg

SEQ ID NO: 8563 - DNA, 23 bp, Homo sapiens
  source 1..23: mol_type = unassigned DNA
cgccttcggctcgggccatggcg

SEQ ID NO: 8564 - DNA, 515 bp, Homo sapiens
  source 1..515: mol_type = unassigned DNA
cgcagcagaataccctgacccaaaataaaaatactatgacaaaaatactccaggaggcagccggctttacttcgtttaaagccggatttcgcttagtcccgtgaaagcgaaggagcaccagcgcttcctgattccgcacagttctctcggcagagacggcccgtcctctccaagaaccggaagccggacagcgtcaggacgttttattcttctcacctgggattcagagaggcagcggccaaggacagggcccccgccgaggccaccgggcagcgtccaggtctcggcctttgggaggggagcagcgggggaggggcacggggaggggcgagggcggggcgcgcctgggcctcggcgctgggctcctcctctgcccgctccgggggacacccacaggattcttgcagacctctgccgaggcaggatggaggcctgcagggatgcaccgcgggcccgcgacccgggcggccggaacatagttctttctggccggagatcggcccggtcgtgagtcg

SEQ ID NO: 8565 - DNA, 1017 bp, Homo sapiens
  source 1..1017: mol_type = unassigned DNA
cgggccaggtctgcggaggacgcccccgggcgcgcacacacagcccgaggacgcgccctgtattttaagacgcagggtcggatttcaccccgaaacttggctcccacagccccaggccgaactgtgtctggttctcagcccccgagcccgagttctacgccgcaaagagatggggccccattgtgcctagctggcctcctagcacggacgtgtattttcttttggtctgtcttttgctaaaaaccggcagtgcgcttcgcctccctgcccagccgcagcctgccgtcccctagacaaaaagcggcgaccgcggcccggccacccgagccccgccgcgctgcgcctttgttgggcggtccacagatggtgcccagcacggggccgcgccgagggcgggggcgggaggccgcgaagagggtcgggcgggaggggaggagacggcggagcagccaatccgcgcgcggcccatcagctgaccgcctttgcttacaccaggtgcacgccggctgcggggagcacaaagcggggcgcaccgcgggcgccggcaacgagccggtgaacgaggcgaggcccgtgcgcccgcggctgcaagcgcccgcctggcggggagaggggccgacggcgtcagcccgggcggcggcatccctaggcgcctggggcgccttcctccggacctggccgctcgctgccccgccctctgcaccccacttctccgaccctccttcccagtcctgcctccccctgccctggcctctgagagccgactgagcccagccccgtgcagcagcggttgcctgtgtcgccgcctagtctccggtcttggtgctctcccgggggtgccccaaggagccagtgcgcgctgcgggctgggaaggaggcgccgctcagctagtcctcctcctcctcctcgtctttctcctcctcctgctgctgctgccgccgccgccgccgtgggtgccgggtccgcgcgcaccccaacacccccaccagctgggcctcggggtaagtccctggccg

SEQ ID NO: 8566 - skipped

SEQ ID NO: 8567 - DNA, 54 bp, Homo sapiens
  source 1..54: mol_type = unassigned DNA
cgagcgcaggcgggcggagagcagaccacgcggaagaggccgagagagaaagcg

SEQ ID NO: 8568 - DNA, 10 bp, Homo sapiens
  source 1..10: mol_type = unassigned DNA
cgcgttgtcg

SEQ ID NO: 8569 - DNA, 26 bp, Homo sapiens
  source 1..26: mol_type = unassigned DNA
cgggcaggttcgaccaggcggccgcg

SEQ ID NO: 8570 - DNA, 934 bp, Homo sapiens
  source 1..934: mol_type = unassigned DNA
cgaatcccggcggccgccgcgctttcccgcttcgcggagaccgacgcaggcgcccgcccccgaggccgaagggcactgggcggcgagggctgcggtagctggcgactccgggggcgtctgcgcggcgcgcgctagacgaggctgccccggcggccaccccgcgaccccgcgtcgccgggatttgcgcgcggagaacgccggttctggagggagcacgcctccccaaagtgcagaggagggtccggcggcgcgtctccgcggaaaccctctccactgtagttaccccggatgccgacttagtagtttgttttccgagaaaagagaggggatctgggcagaagggccccgtttgccccaaaagaaggtgcaaggatcagaagataacgaaacgtccacttcctgaagggtgggaaaaaaagaaaaagaaaaaggagccacccacgctggagatgtccgttttagatcttcttattttcttccctttcgcttcggtttttcttctcgaggctcatttaatctgctagagaaggaggaggagcagaagatgggggccgaggaggaggggaagagaaagagaagtttgccaagaataaagtttttgccggcaagcgcggggactccgcagtggagggcactgcggagtctcggggagtcacagcgggggcctcgggcccaaatgcctctgcccggagctcgagccgacacacacactcagtccgacccctctttgttcccggctcgagtttctcagcctggctcgccggctcgccgctctgcacgcctccgccggccagctctgtcaaagcaaagagctgcgccccttgagttcgcccggccgaggggaggggacgccccgagcttggccgcgtgcgaggctccgggcgcgtcctggttcctcggcccgagagcgcgcagcccgggtccctcctccgcg

SEQ ID NO: 8571 - DNA, 279 bp, Homo sapiens
  source 1..279: mol_type = unassigned DNA
cgcggggtaaggaatccgcgggcagttacctccgccaggggcagggtccggccagtcaggcgcgagaaggctaggcgaggccgactgcgcggggtgaagacgccaggccgacagctgcgggccctaccgccagccctgacgcgagcctgcgtcctggcgacggcggagggcgggcagggggcgcgggcgctgccacggcgcctgctcagaaccggccgggaacgccgcgggcgggtctccccggtcctccgcccctccagccctgctctcaggcctccg

SEQ ID NO: 8572-8573 - skipped (2 entries)

SEQ ID NO: 8574 - DNA, 11 bp, Homo sapiens
  source 1..11: mol_type = unassigned DNA
cgagcgcatcg

SEQ ID NO: 8575 - DNA, 30 bp, Homo sapiens
  source 1..30: mol_type = unassigned DNA
cgcttgtaatctcagctactcaggaggccg

SEQ ID NO: 8576 - DNA, 10 bp, Homo sapiens
  source 1..10: mol_type = unassigned DNA
cgctcccgcg

SEQ ID NO: 8577 - DNA, 56 bp, Homo sapiens
  source 1..56: mol_type = unassigned DNA
cggcgtctgatgagcggcgggcccggacacgaggggacggggccgatttgtgggcg

SEQ ID NO: 8578 - DNA, 98 bp, Homo sapiens
  source 1..98: mol_type = unassigned DNA
cggccagcagggcggggcaggaggctgggagagggacgggtgcgggggtgggggagaggaagggagcggtcacgtgtgaggggcggcccgaggtcacg

SEQ ID NO: 8579 - DNA, 33 bp, Homo sapiens
  source 1..33: mol_type = unassigned DNA
cgggaggacgcgcaggggcggccgccgccgtcg

SEQ ID NO: 8580 - DNA, 48 bp, Homo sapiens
  source 1..48: mol_type = unassigned DNA
cgtcccaccccctccaccacacacgcaccccccaccccaattccttcg

SEQ ID NO: 8581 - DNA, 93 bp, Homo sapiens
  source 1..93: mol_type = unassigned DNA
cgacctgccccggccgcacccgcctccgctccagcacgcgacgctgcccggcgcgacccctgctcccccggcccagccccaccgctgccctcg

SEQ ID NO: 8582-8588 - skipped (7 entries)

SEQ ID NO: 8589 - DNA, 42 bp, Homo sapiens
  source 1..42: mol_type = unassigned DNA
cggagcgaggcgcgcgcccggccagagagcgagcgcgcaacg

SEQ ID NO: 8590-8599 - skipped (10 entries)

SEQ ID NO: 8600 - DNA, 40 bp, Homo sapiens
  source 1..40: mol_type = unassigned DNA
cggcgcactggcgctgggagcagggccgcactccggcgcg

SEQ ID NO: 8601-8621 - skipped (21 entries)

SEQ ID NO: 8622 - DNA, 42 bp, Homo sapiens
  source 1..42: mol_type = unassigned DNA
cgggcgggcggcgttcggtctgagggagcggggcggtctccg

SEQ ID NO: 8623-8632 - skipped (10 entries)

SEQ ID NO: 8633 - DNA, 20 bp, Homo sapiens
  source 1..20: mol_type = unassigned DNA
cgcccgccgcgcgcaccacg

SEQ ID NO: 8634 - DNA, 116 bp, Homo sapiens
  source 1..116: mol_type = unassigned DNA
cgagagcggggcggggttgggggcgggcggggagctgcctcgggtggcctcgcccccagcacggaggaccctccccgcgaggcgccgccgccctggagccccgcccacggcgctcg

SEQ ID NO: 8635-8644 - skipped (10 entries)

SEQ ID NO: 8645 - DNA, 44 bp, Homo sapiens
  source 1..44: mol_type = unassigned DNA
cggggggcgcgtgaggggtgcgagcggggcccggggggcgcgcg

SEQ ID NO: 8646-8655 - skipped (10 entries)

SEQ ID NO: 8656 - DNA, 34 bp, Homo sapiens
  source 1..34: mol_type = unassigned DNA
cgcagcccgaccttctagagccgccgagcagacg

SEQ ID NO: 8657-8666 - skipped (10 entries)

SEQ ID NO: 8667 - DNA, 211 bp, Homo sapiens
  source 1..211: mol_type = unassigned DNA
cgaccccggcgggtgcaccgccgagccccccgggaagtgtagttccagcgcgagcgggacgctgggaaatgtagttctgcgcgttcacgtccccgatcgggccgtgtccgccgcggccctgcgaggtccgaggggtaagggagcgtgcagcgggggcgggaccacgaggcggcggggctgggggcggcctctgtgtctgcgccggggatcg

SEQ ID NO: 8668-8677 - skipped (10 entries)

SEQ ID NO: 8678 - DNA, 95 bp, Homo sapiens
  source 1..95: mol_type = unassigned DNA
cggaagctcaagcccaattaattgagtccgaggcgggagggaagggccctgcgcgccgtggcccgccccgcccctcttccgcgccccttttcccg

SEQ ID NO: 8679-8688 - skipped (10 entries)

SEQ ID NO: 8689 - DNA, 264 bp, Homo sapiens
  source 1..264: mol_type = unassigned DNA
cggcggcgtggaccggcgacgggtggcacagctggcatacgcggtccctccacaggtggcggtagacggcggccgggacggcgagcaacagggcggccagccagaccgccagcagcaggcggcgggccagggccgggctgcgcagccgaggcgccaggaaggggcgggtgactgcgaggcagcgctgcaggctgagcaggccggtgagcagcacgctggcgtacatgctgagcgcgcacacgtagtacaccgccttgcagcccg

SEQ ID NO: 8690-8699 - skipped (10 entries)

SEQ ID NO: 8700 - DNA, 59 bp, Homo sapiens
  source 1..59: mol_type = unassigned DNA
cgcgcgcgggcgccccggcgtgtcggatcatgccgccggcagctccgggacggggaacg

SEQ ID NO: 8701-8721 - skipped (21 entries)

SEQ ID NO: 8722 - DNA, 324 bp, Homo sapiens
  source 1..324: mol_type = unassigned DNA
cgccagacagccagcggccggcggcaggccgggccatgagcggcaggggccgggccgggcctcgctgaccctggctccgcgcggcagcttccccagtttccgctccggtctctcggcatgagagtccgcccgggcccggggctgcggctgccccagacccgccgcacgctggcgcgctccgggcccgcggagccgcggtgctgatacctgcgccgcactgcgccgcccgcccgtccgctgtgtgccccgggggcgcggccatggaggtggtgggtgacttcgagtacagcaagagggatctcgtgggacacggggccttcgccg

SEQ ID NO: 8723-8729 - skipped (7 entries)

SEQ ID NO: 8730 - DNA, 102 bp, Homo sapiens
  source 1..102: mol_type = unassigned DNA
cgccagctccaggccgagccccgagcgcctgcaggaacacgccccttcacccggcgcgggacgcagagctgcgagagaatcttgttcagcgcggactcaacg

SEQ ID NO: 8731 - DNA, 24 bp, Homo sapiens
  source 1..24: mol_type = unassigned DNA
cgtgggcggcagcgagtcgttgcg

SEQ ID NO: 8732 - DNA, 521 bp, Homo sapiens
  source 1..521: mol_type = unassigned DNA
cgcaccggcctccctgtctcgcactggctgctccgcccgcctgtcaaggccaggcctggggggctggggcccgagtggccgctgggggacagtcctgggcacacgaccggagcgcccccctcctccccgcctggcccgcgcccaggggacggcgagagacgcggcctcagcccctccccccgggcgccccgctgcggccagatgtgggcggatgtggaggccgggccatggcgaggagggcgggcgcccagaggggaagagattcctccccttccccgggcgcagggtccttctgcaggaggctgtatttgggcagccaaacaaagttctctgtcaccgccgccgcgcgctctgcgcctgcaagggttaaacggcagcgcacgcggctggcaggcaggatcccggcctgtgggctcaagagccgaggggcgcagggcgaacatgcgagtcccatggcaccagcgagaggccaccaactcccacccaccgagggcacccctgcagctaacacccccaccacg

SEQ ID NO: 8733 - DNA, 1484 bp, Homo sapiens
  source 1..1484: mol_type = unassigned DNA
cgccgccaccaacgagccactccaattgagccagcatcgccgcccacccgccggcccgccggaatcgcgcccatctcctgcaacctcgcccggaccggcatcccgccccctcggcccggtctcccccttcccgccgggtgcaaagtcaaagacccagcaaggcgacgtgaacttttgcatgcagggcacacacgtcgcccccggttccgggagtgcgggggcccgcggcgcggagggaggctgggcgcccgggctcccgggccaaggtcgccgcgcgtgctcacccatgtcccggcggctccggctccgctggccccggcgctcgctcagatcccggctcccgtcgctcgcccgagcccccaaaggtgctgctgcggcaactccatggcgatgagcatctgtcaaacggcgagccgcgagctggccgccctagctcggggggcgccggggcccccgggcgcgcggaggcggcggcgagcggcgggcgccccggccggccccgcgcttcccgcccgactctgccgcctccgccgcgccaccgatttatggagagagatatcaagggggaaaatggcgtctccggagcccgaggagtcctggagtaatcacattcacacacacacgcccgcacgcacacacactcgcacacactggcacacaggcgcgcggcgagccctgctaattttagcaggagccaaaaaaaattttatatatatatatatatatatatatatatatatatccccgtctctccgatcaatgctttttctttttttgcttttttttttttttttttttttttttttgcttttcttcaaaggatgggttggagcgttaaaaaatgttggtgggtttgggctcgcaggaggcggcgcgcggagggcgagggcgcttttgctgagctgtgcagttcggtccgctgagcccggcggccctgcccgcccgctcgtccgcccgcggtcgctagtgttgccgccgccgccgccgccgccgccgctgctgctccatggccgcgcccgccccgcgcccccgccgcgtcccgtcgccgcccgcccgcgtccccggtgagcgctggagtggggtcgggcccgtgtgcctgcctcccgcgccctctccgaatcccggactcctagtgaaaggaagggggagggcgcgggcgcggaagggaggtggatcggagcggcagcgcggcccagccgaacgggtaccgaccgtcaccccgcgatcttcctcgcagggggcgccggcgcccaagctgctcgcccggagggcccagagccgcttcccagaccagagccgggggaggcgcagccagtagcgagccctgagcgacctctctccccactcgcccccctgccccagtgaatttctgtcagttgaagggagcggggctcttgcccggggaaaaggaaaacagttcgtggcctgggatctgggaccccttgccgcccccagcgcccctcccgctccccggcgcccttgcg

SEQ ID NO: 8734 - DNA, 34 bp, Homo sapiens
  source 1..34: mol_type = unassigned DNA
cggggaggcggggggagcgggagcgggcgacgcg

SEQ ID NO: 8735 - DNA, 14 bp, Homo sapiens
  source 1..14: mol_type = unassigned DNA
cgagcccctcgccg

SEQ ID NO: 8736 - DNA, 37 bp, Homo sapiens
  source 1..37: mol_type = unassigned DNA
cggctgctcttcagcaccgtggagtgggcgcgccacg

SEQ ID NO: 8737 - DNA, 34 bp, Homo sapiens
  source 1..34: mol_type = unassigned DNA
cggcagccaaagacaaagaagcggacaaatcccg

SEQ ID NO: 8738 - DNA, 538 bp, Homo sapiens
  source 1..538: mol_type = unassigned DNA
cggcctccctcagcctggggtccgggtttcctcctcggctgagcagccgggtccgcgactcccttcaccctccccggcccgggcttccggttctttccagaggtgaggcaggggccacctagaattccgcggccccccacctcccccaagaccaccctcgccccagcttcctgttccccattctgtcctcccaacctgggttcccgattactgcctcgacttcaccttgccgtcagggaccaccagccgcctcttccgcgcctaggggacgcgcagcggcagcctctgctgatggcaagggtctgcgcacccggaaactccagggtctggggcgtggtgcggcccctgcggccagcgggctccgcttgagcttcagggctctttcgttgttggactacgtttcccacaggcctcagggccgcggatgaacttcgacctttgcttccttttccggtgttgtggttattgagttaagcctggcgagtcgaggtgacccgggccgggctgcgggaggagctcgcggtgaggtggccccgcg

SEQ ID NO: 8739 - DNA, 109 bp, Homo sapiens
  source 1..109: mol_type = unassigned DNA
cgcggccctctccccacgcgaggcctccaaatctcgcaaactaacggaaatgaagctacgctccgggagcggtgcctctgggaaatgtagtccagcgctccggacgccg

SEQ ID NO: 8740 - DNA, 901 bp, Homo sapiens
  source 1..901: mol_type = unassigned DNA
cgcgccagcagcccgcggccaaggccacctgctcccagggccccggcacctctgcggggaggcggcaggcagaggacgcgcgcgcagtcgcgcaggagccctcaggcgagtgggggaagcatcgcaagagacgcggacctggagcgcggtcactgcgttaccgcagcgacctgggttacctaagccggcgggactgagaggccgctgcgcgtgggcaggggctcagattgcgcccgcggtgcctgtcccggcccccaccccggaacgattgcagccctgcggggctcgccgcccacaccgcgctgaggacgctgcccaagccaggcgcccgcccccgcccgcggtctcagccgctcgcagcgcgccgcccccagacgcgcgtggctgctggcgagggctgagaccgcgctcccgccggccagttcccagcagcagcgcatcctccctgctccgcgccttcgctccggacccgcgtcgtcgcagccccgcggtgatgagccccgagccggtcccgccgccgccgccgccccagtgtcctggctgcgaccgcgcggagccgatcgcccagcgcttagaggagggcgacgaggccttccgcgcgggcgactacgagatggcagccgagctctttcgctccatgctagccgggctggcgcagccggaccgcggcctgtgcctgaggctgggggacgcgctggcccgcgccggccgcctccccgaagccctgggcgcgttccgcggcgccgcgcggctcggggcgctgcggccggaggagctggaagagctggcgggcggcctggtgcgcgccgtgggcctgcgcgaccggccgctgtccgcggagaacccgggcggcgagcccgaggcgcccggcgagggagggccggccccggagccccgcgcg

SEQ ID NO: 8741 - DNA, 15 bp, Homo sapiens
  source 1..15: mol_type = unassigned DNA
cgcccgcgccgcccg

SEQ ID NO: 8742 - DNA, 383 bp, Homo sapiens
  source 1..383: mol_type = unassigned DNA
cgccgggggcgcggcgcgggcgcagaggcggcggggatgccgggcggctcgggctgcggcgcagcttcctcctctgcagtttcctctttcgctctcgccgccgccgccgcggccgcggtccctccctggctcttatttctgctgttctcgggcacagacttcctgccgccgccgcgcgccggctcctttgccgccgcctgccagcctcactttctgctactttcttgcctccctcccgctccctccctgccgcccgccgcgctcccccccacctcgcgcctcctccccctcctccccctcctccccctcccgcgggctccccgccctctccgtgcgccccggccgctccccgcctccagcgcgccgccttcggggatgtcccg

SEQ ID NO: 8743 - skipped

SEQ ID NO: 8744 - DNA, 624 bp, Homo sapiens
  source 1..624: mol_type = unassigned DNA
cgcctgcaggggcagctcggagcccgggtggggatagcagcgcagcccctggccgcagcgcggggtgtagacgccgcacgcctcgccctccagccgggcgcacaccgagcagcagccgcagcccggctcccggacgagctccgcgcatggcatgcgggcgcctccggccactgcggccaccgcggcgggcggcgcaaccggcgggggcccgcaggcggccaggcgctcgggtgtgcagggcgggcagcggaacagcacctccgcgcgcgccccgccgccgccgccactcgcgcccagtagcagcagcagcagcggcagcagcggcggcggcggcagcggcagcgcggggcagcccactctcggcagcatgctggcggtcggcagcgcggcgcggcgggcgagcgagcgagcgggcgggcgggcaggtggcacggccctgcgagcgcgggagccgcctcctccgcttcttcctcctccctcgccgccgcagccgggtcctaaagggccggcttctccccgccccctgccttctcccctcccccttttggagaccactcccttcccccccgacactccctcgcgccggcaagtgagtgcgcgcacgcccgctcgcccacctccgcg

SEQ ID NO: 8745 - DNA, 94 bp, Homo sapiens
  source 1..94: mol_type = unassigned DNA
cggccggctcctccggctgatttcgctctggttgatttcgcgcacattcctctcccagcgctgcaaggaccgcctgaactcgctggctatctcg

SEQ ID NO: 8746 - DNA, 63 bp, Homo sapiens
  source 1..63: mol_type = unassigned DNA
cgcggcggctgcgggactcgcgtggcgccggcgacggctcggcccagctctgcgccctgcacg

SEQ ID NO: 8747 - DNA, 41 bp, Homo sapiens
  source 1..41: mol_type = unassigned DNA
cgatggcggacaagagggcggggaccccagaagccgcggcg

SEQ ID NO: 8748 - DNA, 1041 bp, Homo sapiens
  source 1..1041: mol_type = unassigned DNA
cgttcaaacaaaaacagggccggctccccagcagtggagagctactcggagcaccgtcccgggccggcctcggccccgaggctccgggggctcaggattccgtgcgtgtggcggggaagaggaattcagagcctttgggctgctgcttttcccgtcgccttcactgtgaacattgtgcggtggggtgaacgcggggagcggcggggccagtggagtcgaacctcagggctctgcgactgcacccgccaggaggggccctcgcttggcctgagaaaggtcccctgaggttaagagttgggtctgaacacaactctcggagcctcgagcccgccctccccaacatacaaatacgcgcagatctccagaaacaggaacgcacgacacacacggccagaagccgcgaggacacacagagcgtcgcccactgggcgggggccgcttgggaacaaagggcccaggaggcgttgtcccggcgctcattctgagcctccttgggggtgacacgggatgggggtggggtgcaaagggaactgagggaggagagtgcgcgaggaggggaaagcggtgatttggcctagaggtggggcgcgcactccaggcgagcgtgcgtgggccgggacctgcagggtacgggggtgggcccaggctggccgtcccactccgctccagcgctccgccaggcctccgccgctccggggccgctcgggccgccagtcagctgacgcggggggcgggggagctgtcaggcgcgccccgccctgcgccgctgggccgcggaggccgtgcagctattggcccgcgcaccgggccgcccgggcccccgcaccccagtgacatcaggaggcgataaaaggctgcggcgccgccggatccagcacagctgcaccgccgagctgcgagcggctgcgagcgagagagcgtaagagcaagagagctagagagcgagcaacgggcactcgccccacgcctcccctcagccccaccgcgcgctccgcttgcctctccaccccgcccgactctacccggcccggtccctgcgcg

SEQ ID NO: 8749 - DNA, 23 bp, Homo sapiens
  source 1..23: mol_type = unassigned DNA
cgccatggcccgagccgaaggcg

SEQ ID NO: 8750 - DNA, 515 bp, Homo sapiens
  source 1..515: mol_type = unassigned DNA
cgactcacgaccgggccgatctccggccagaaagaactatgttccggccgcccgggtcgcgggcccgcggtgcatccctgcaggcctccatcctgcctcggcagaggtctgcaagaatcctgtgggtgtcccccggagcgggcagaggaggagcccagcgccgaggcccaggcgcgccccgccctcgcccctccccgtgcccctcccccgctgctcccctcccaaaggccgagacctggacgctgcccggtggcctcggcgggggccctgtccttggccgctgcctctctgaatcccaggtgagaagaataaaacgtcctgacgctgtccggcttccggttcttggagaggacgggccgtctctgccgagagaactgtgcggaatcaggaagcgctggtgctccttcgctttcacgggactaagcgaaatccggctttaaacgaagtaaagccggctgcctcctggagtatttttgtcatagtatttttattttgggtcagggtattctgctgcg

SEQ ID NO: 8751 - DNA, 1017 bp, Homo sapiens
  source 1..1017: mol_type = unassigned DNA
cggccagggacttaccccgaggcccagctggtgggggtgttggggtgcgcgcggacccggcacccacggcggcggcggcggcagcagcagcaggaggaggagaaagacgaggaggaggaggaggactagctgagcggcgcctccttcccagcccgcagcgcgcactggctccttggggcacccccgggagagcaccaagaccggagactaggcggcgacacaggcaaccgctgctgcacggggctgggctcagtcggctctcagaggccagggcagggggaggcaggactgggaaggagggtcggagaagtggggtgcagagggcggggcagcgagcggccaggtccggaggaaggcgccccaggcgcctagggatgccgccgcccgggctgacgccgtcggcccctctccccgccaggcgggcgcttgcagccgcgggcgcacgggcctcgcctcgttcaccggctcgttgccggcgcccgcggtgcgccccgctttgtgctccccgcagccggcgtgcacctggtgtaagcaaaggcggtcagctgatgggccgcgcgcggattggctgctccgccgtctcctcccctcccgcccgaccctcttcgcggcctcccgcccccgccctcggcgcggccccgtgctgggcaccatctgtggaccgcccaacaaaggcgcagcgcggcggggctcgggtggccgggccgcggtcgccgctttttgtctaggggacggcaggctgcggctgggcagggaggcgaagcgcactgccggtttttagcaaaagacagaccaaaagaaaatacacgtccgtgctaggaggccagctaggcacaatggggccccatctctttgcggcgtagaactcgggctcgggggctgagaaccagacacagttcggcctggggctgtgggagccaagtttcggggtgaaatccgaccctgcgtcttaaaatacagggcgcgtcctcgggctgtgtgtgcgcgcccgggggcgtcctccgcagacctggcccg

SEQ ID NO: 8752 - skipped

SEQ ID NO: 8753 - DNA, 54 bp, Homo sapiens
  source 1..54: mol_type = unassigned DNA
cgctttctctctcggcctcttccgcgtggtctgctctccgcccgcctgcgctcg

SEQ ID NO: 8754 - DNA, 10 bp, Homo sapiens
  source 1..10: mol_type = unassigned DNA
cgacaacgcg

SEQ ID NO: 8755 - DNA, 26 bp, Homo sapiens
  source 1..26: mol_type = unassigned DNA
cgcggccgcctggtcgaacctgcccg

SEQ ID NO: 8756 - DNA, 934 bp, Homo sapiens
  source 1..934: mol_type = unassigned DNA
cgcggaggagggacccgggctgcgcgctctcgggccgaggaaccaggacgcgcccggagcctcgcacgcggccaagctcggggcgtcccctcccctcggccgggcgaactcaaggggcgcagctctttgctttgacagagctggccggcggaggcgtgcagagcggcgagccggcgagccaggctgagaaactcgagccgggaacaaagaggggtcggactgagtgtgtgtgtcggctcgagctccgggcagaggcatttgggcccgaggcccccgctgtgactccccgagactccgcagtgccctccactgcggagtccccgcgcttgccggcaaaaactttattcttggcaaacttctctttctcttcccctcctcctcggcccccatcttctgctcctcctccttctctagcagattaaatgagcctcgagaagaaaaaccgaagcgaaagggaagaaaataagaagatctaaaacggacatctccagcgtgggtggctcctttttctttttctttttttcccacccttcaggaagtggacgtttcgttatcttctgatccttgcaccttcttttggggcaaacggggcccttctgcccagatcccctctcttttctcggaaaacaaactactaagtcggcatccggggtaactacagtggagagggtttccgcggagacgcgccgccggaccctcctctgcactttggggaggcgtgctccctccagaaccggcgttctccgcgcgcaaatcccggcgacgcggggtcgcggggtggccgccggggcagcctcgtctagcgcgcgccgcgcagacgcccccggagtcgccagctaccgcagccctcgccgcccagtgcccttcggcctcgggggcgggcgcctgcgtcggtctccgcgaagcgggaaagcgcggcggccgccgggattcg

SEQ ID NO: 8757 - DNA, 279 bp, Homo sapiens
  source 1..279: mol_type = unassigned DNA
cggaggcctgagagcagggctggaggggcggaggaccggggagacccgcccgcggcgttcccggccggttctgagcaggcgccgtggcagcgcccgcgccccctgcccgccctccgccgtcgccaggacgcaggctcgcgtcagggctggcggtagggcccgcagctgtcggcctggcgtcttcaccccgcgcagtcggcctcgcctagccttctcgcgcctgactggccggaccctgcccctggcggaggtaactgcccgcggattccttaccccgcg

SEQ ID NO: 8758-8759 - skipped (2 entries)

SEQ ID NO: 8760 - DNA, 11 bp, Homo sapiens
  source 1..11: mol_type = unassigned DNA
cgatgcgctcg

SEQ ID NO: 8761 - DNA, 30 bp, Homo sapiens
  source 1..30: mol_type = unassigned DNA
cggcctcctgagtagctgagattacaagcg

SEQ ID NO: 8762 - DNA, 10 bp, Homo sapiens
  source 1..10: mol_type = unassigned DNA
cgcgggagcg

SEQ ID NO: 8763 - DNA, 56 bp, Homo sapiens
  source 1..56: mol_type = unassigned DNA
cgcccacaaatcggccccgtcccctcgtgtccgggcccgccgctcatcagacgccg

SEQ ID NO: 8764 - DNA, 98 bp, Homo sapiens
  source 1..98: mol_type = unassigned DNA
cgtgacctcgggccgcccctcacacgtgaccgctcccttcctctcccccacccccgcacccgtccctctcccagcctcctgccccgccctgctggccg

SEQ ID NO: 8765 - DNA, 33 bp, Homo sapiens
  source 1..33: mol_type = unassigned DNA
cgacggcggcggccgcccctgcgcgtcctcccg

SEQ ID NO: 8766 - DNA, 48 bp, Homo sapiens
  source 1..48: mol_type = unassigned DNA
cgaaggaattggggtggggggtgcgtgtgtggtggagggggtgggacg

SEQ ID NO: 8767 - DNA, 93 bp, Homo sapiens
  source 1..93: mol_type = unassigned DNA
cgagggcagcggtggggctgggccgggggagcaggggtcgcgccgggcagcgtcgcgtgctggagcggaggcgggtgcggccggggcaggtcg

SEQ ID NO: 8768-8774 - skipped (7 entries)

SEQ ID NO: 8775 - DNA, 42 bp, Homo sapiens
  source 1..42: mol_type = unassigned DNA
cgttgcgcgctcgctctctggccgggcgcgcgcctcgctccg

SEQ ID NO: 8776-8785 - skipped (10 entries)

SEQ ID NO: 8786 - DNA, 40 bp, Homo sapiens
  source 1..40: mol_type = unassigned DNA
cgcgccggagtgcggccctgctcccagcgccagtgcgccg

SEQ ID NO: 8787-8807 - skipped (21 entries)

SEQ ID NO: 8808 - DNA, 42 bp, Homo sapiens
  source 1..42: mol_type = unassigned DNA
cggagaccgccccgctccctcagaccgaacgccgcccgcccg

SEQ ID NO: 8809-8818 - skipped (10 entries)

SEQ ID NO: 8819 - DNA, 20 bp, synthetic construct
  misc_feature 1..20: note = Description of Artificial Sequence: Synthetic oligonucleotide
  source 1..20: mol_type = other DNA
ygtggtgygygyggygggyg

SEQ ID NO: 8820 - DNA, 116 bp, synthetic construct
  misc_feature 1..116: note = Description of Artificial Sequence: Synthetic polynucleotide
  source 1..116: mol_type = other DNA
ygagygtygtgggyggggttttagggyggyggygtttygyggggagggtttttygtgttgggggygaggttattygaggtagtttttygttygtttttaatttygtttygttttyg

SEQ ID NO: 8821-8830 - skipped (10 entries)

SEQ ID NO: 8831 - DNA, 44 bp, synthetic construct
  misc_feature 1..44: note = Description of Artificial Sequence: Synthetic oligonucleotide
  source 1..44: mol_type = other DNA
ygygygtttttygggtttygttygtattttttaygygtttttyg

SEQ ID NO: 8832-8841 - skipped (10 entries)

SEQ ID NO: 8842 - DNA, 34 bp, synthetic construct
  misc_feature 1..34: note = Description of Artificial Sequence: Synthetic oligonucleotide
  source 1..34: mol_type = other DNA
ygtttgttyggyggttttagaaggtygggttgyg

SEQ ID NO: 8843-8852 - skipped (10 entries)

SEQ ID NO: 8853 - DNA, 211 bp, synthetic construct
  misc_feature 1..211: note = Description of Artificial Sequence: Synthetic polynucleotide
  source 1..211: mol_type = other DNA
ygattttyggygtagatatagaggtygtttttagtttygtygtttygtggtttygttttygttgtaygtttttttatttttyggatttygtagggtygyggyggatayggttygatyggggaygtgaaygygtagaattatattttttagygtttygttygygttggaattatatttttyggggggttyggyggtgtattygtyggggtyg

SEQ ID NO: 8854-8863 - skipped (10 entries)

SEQ ID NO: 8864 - DNA, 95 bp, synthetic construct
  misc_feature 1..95: note = Description of Artificial Sequence: Synthetic oligonucleotide
  source 1..95: mol_type = other DNA
ygggaaaaggggygyggaagaggggyggggygggttayggygygtagggtttttttttttygtttyggatttaattaattgggtttgagtttttg

SEQ ID NO: 8865-8874 - skipped (10 entries)

SEQ ID NO: 8875 - DNA, 264 bp, synthetic construct
  misc_feature 1..264: note = Description of Artificial Sequence: Synthetic polynucleotide
  source 1..264: mol_type = other DNA
ygggttgtaaggyggtgtattaygtgtgygygtttagtatgtaygttagygtgttgtttatyggtttgtttagtttgtagygttgtttygtagttattygtttttttttggygtttyggttgygtagttyggttttggttygtygtttgttgttggyggtttggttggtygttttgttgttygtygtttyggtygtygtttatygttatttgtggagggatygygtatgttagttgtgttattygtygtyggtttaygtygtyg

SEQ ID NO: 8876-8885 - skipped (10 entries)

SEQ ID NO: 8886 - DNA, 59 bp, synthetic construct
  misc_feature 1..59: note = Description of Artificial Sequence: Synthetic oligonucleotide
  source 1..59: mol_type = other DNA
ygtttttygtttyggagttgtyggyggtatgattygataygtyggggygttygygygyg

SEQ ID NO: 8887-8907 - skipped (21 entries)

SEQ ID NO: 8908 - DNA, 324 bp, synthetic construct
  misc_feature 1..324: note = Description of Artificial Sequence: Synthetic polynucleotide
  source 1..324: mol_type = other DNA
yggygaaggtttygtgttttaygagattttttttgttgtattygaagttatttattatttttatggtygygttttyggggtatatagyggaygggygggyggygtagtgyggygtaggtattagtatygyggtttygygggttyggagygygttagygtgyggygggtttggggtagtygtagtttygggttygggyggatttttatgtygagagatyggagyggaaattggggaagttgtygygyggagttagggttagygaggttyggttyggtttttgtygtttatggttyggtttgtygtyggtygttggttgtttggyg

SEQ ID NO: 8909-8915 - skipped (7 entries)

SEQ ID NO: 8916 - DNA, 102 bp, synthetic construct
  misc_feature 1..102: note = Description of Artificial Sequence: Synthetic polynucleotide
  source 1..102: mol_type = other DNA
ygttgagttygygttgaataagattttttygtagttttgygtttygygtygggtgaaggggygtgtttttgtaggygttyggggttyggtttggagttggyg

SEQ ID NO: 8917 - DNA, 24 bp, synthetic construct
  misc_feature 1..24: note = Description of Artificial Sequence: Synthetic oligonucleotide
  source 1..24: mol_type = other DNA
ygtaaygattygttgtygtttayg

SEQ ID NO: 8918 - DNA, 521 bp, synthetic construct
  misc_feature 1..521: note = Description of Artificial Sequence: Synthetic polynucleotide
  source 1..521: mol_type = other DNA
ygtggtgggggtgttagttgtaggggtgttttyggtgggtgggagttggtggtttttygttggtgttatgggattygtatgttygttttgygtttttyggtttttgagtttataggtygggattttgtttgttagtygygtgygttgtygtttaatttttgtaggygtagagygygyggyggyggtgatagagaattttgtttggttgtttaaatatagttttttgtagaaggattttgygttyggggaaggggaggaatttttttttttttgggygttygtttttttygttatggttyggtttttatattygtttatatttggtygtagyggggygttyggggggaggggttgaggtygygtttttygtygttttttgggygygggttaggyggggaggaggggggygtttyggtygtgtgtttaggattgttttttagyggttattygggttttagttttttaggtttggttttgataggygggyggagtagttagtgygagatagggaggtyggtgyg

SEQ ID NO: 8919 - DNA, 1484 bp, synthetic construct
  misc_feature 1..1484: note = Description of Artificial Sequence: Synthetic polynucleotide
  source 1..1484: mol_type = other DNA
ygtaagggygtyggggagygggaggggygttgggggyggtaaggggttttagattttaggttaygaattgtttttttttttttygggtaagagtttygttttttttaattgatagaaatttattggggtaggggggygagtggggagagaggtygtttagggttygttattggttgygtttttttyggttttggtttgggaagyggttttgggtttttygggygagtagtttgggygtyggygttttttgygaggaagatygyggggtgayggtyggtattygttyggttgggtygygttgtygtttygatttatttttttttygygttygygtttttttttttttttttattaggagttygggattyggagagggygygggaggtaggtataygggttygattttattttagygtttatyggggaygygggygggyggygaygggaygyggygggggygyggggygggygyggttatggagtagtagyggyggyggyggyggyggyggyggtaatattagygatygygggyggaygagygggygggtagggtygtygggtttagyggatygaattgtatagtttagtaaaagygttttygtttttygygygtygttttttgygagtttaaatttattaatattttttaaygttttaatttattttttgaagaaaagtaaaaaaaaaaaaaaaaaaaaaaaaaaaagtaaaaaaagaaaaagtattgatyggagagayggggatatatatatatatatatatatatatatatatataaaattttttttggtttttgttaaaattagtagggttygtygygygtttgtgtgttagtgtgtgygagtgtgtgtgygtgygggygtgtgtgtgtgaatgtgattattttaggatttttygggtttyggagaygttatttttttttttgatatttttttttataaatyggtggygyggyggaggyggtagagtygggygggaagygyggggtyggtyggggygttygtygttygtygtygttttygygygttygggggtttyggygtttttygagttagggyggttagttygyggttygtygtttgatagatgtttatygttatggagttgtygtagtagtatttttgggggttygggygagygaygggagtygggatttgagygagygtyggggttagyggagtyggagtygtygggatatgggtgagtaygygyggygattttggttygggagttygggygtttagttttttttygygtygygggttttygtattttyggaatygggggygaygtgtgtgttttgtatgtaaaagtttaygtygttttgttgggtttttgattttgtattyggygggaagggggagatygggtygagggggygggatgtyggttygggygaggttgtaggagatgggygygatttyggygggtyggygggtgggyggygatgttggtttaattggagtggttygttggtggyggyg

SEQ ID NO: 8920 - DNA, 34 bp, synthetic construct
  misc_feature 1..34: note = Description of Artificial Sequence: Synthetic oligonucleotide
  source 1..34: mol_type = other DNA
ygygtygttygttttygtttttttygttttttyg

SEQ ID NO: 8921 - DNA, 14 bp, synthetic construct
  misc_feature 1..14: note = Description of Artificial Sequence: Synthetic oligonucleotide
  source 1..14: mol_type = other DNA
yggygaggggttyg

SEQ ID NO: 8922 - DNA, 37 bp, synthetic construct
  misc_feature 1..37: note = Description of Artificial Sequence: Synthetic oligonucleotide
  source 1..37: mol_type = other DNA
ygtggygygtttattttayggtgttgaagagtagtyg

SEQ ID NO: 8923 - DNA, 34 bp, synthetic construct
  misc_feature 1..34: note = Description of Artificial Sequence: Synthetic oligonucleotide
  source 1..34: mol_type = other DNA
ygggatttgttygtttttttgtttttggttgtyg

SEQ ID NO: 8924 - DNA, 538 bp, synthetic construct
  misc_feature 1..538: note = Description of Artificial Sequence: Synthetic polynucleotide
  source 1..538: mol_type = other DNA
ygyggggttattttatygygagtttttttygtagttyggttygggttatttygattygttaggtttaatttaataattataatatyggaaaaggaagtaaaggtygaagtttattygyggttttgaggtttgtgggaaaygtagtttaataaygaaagagttttgaagtttaagyggagttygttggtygtaggggtygtattaygttttagattttggagttttygggtgygtagatttttgttattagtagaggttgtygttgygygttttttaggygyggaagaggyggttggtggtttttgayggtaaggtgaagtygaggtagtaatygggaatttaggttgggaggatagaatggggaataggaagttggggygagggtggttttgggggaggtggggggtygyggaattttaggtggtttttgttttatttttggaaagaatyggaagttygggtyggggagggtgaagggagtygyggattyggttgtttagtygaggaggaaattyggattttaggttgagggaggtyg

SEQ ID NO: 8925 - DNA, 109 bp, synthetic construct
  misc_feature 1..109: note = Description of Artificial Sequence: Synthetic polynucleotide
  source 1..109: mol_type = other DNA
yggygttyggagygttggattatattttttagaggtatygttttyggagygtagttttattttygttagtttgygagatttggaggtttygygtggggagagggtygyg

SEQ ID NO: 8926 - DNA, 901 bp, synthetic construct
  misc_feature 1..901: note = Description of Artificial Sequence: Synthetic polynucleotide
  source 1..901: mol_type = other DNA
ygygyggggtttyggggtyggttttttttygtygggygtttygggttygtygttygggtttttygyggatagyggtyggtygygtaggtttayggygygtattaggtygttygttagtttttttagttttttyggtygtagygtttygagtygygyggygtygyggaaygygtttagggtttyggggaggyggtyggygygggttagygygttttttagttttaggtataggtygyggttyggttgygttagttyggttagtatggagygaaagagttyggttgttatttygtagtygttygygyggaaggtttygtygtttttttttaagygttgggygatyggtttygygyggtygtagttaggatattggggyggyggyggyggygggatyggttyggggtttattatygyggggttgygaygaygygggttyggagygaaggygyggagtagggaggatgygttgttgttgggaattggtyggygggagygyggttttagttttygttagtagttaygygygtttgggggyggygygttgygagyggttgagatygygggygggggygggygtttggtttgggtagygtttttagygyggtgtgggyggygagtttygtagggttgtaatygtttyggggtgggggtygggataggtatygygggygtaatttgagtttttgtttaygygtagyggttttttagtttygtyggtttaggtaatttaggtygttgyggtaaygtagtgatygygttttaggttygygttttttgygatgttttttttattygtttgagggtttttgygygattgygygygygttttttgtttgtygttttttygtagaggtgtyggggttttgggagtaggtggttttggtygygggttgttggygyg

SEQ ID NO: 8927 - DNA, 15 bp, synthetic construct
  misc_feature 1..15: note = Description of Artificial Sequence: Synthetic oligonucleotide
  source 1..15: mol_type = other DNA
ygggyggygygggyg

SEQ ID NO: 8928 - DNA, 383 bp, synthetic construct
  misc_feature 1..383: note = Description of Artificial Sequence: Synthetic polynucleotide
  source 1..383: mol_type = other DNA
ygggatattttygaaggyggygygttggaggyggggagyggtyggggygtayggagagggyggggagttygygggagggggaggagggggaggagggggaggaggygygaggtgggggggagygyggygggyggtagggagggagygggagggaggtaagaaagtagtagaaagtgaggttggtaggyggyggtaaaggagtyggygygyggyggyggtaggaagtttgtgttygagaatagtagaaataagagttagggagggatygyggtygyggyggyggyggygagagygaaagaggaaattgtagaggaggaagttgygtygtagttygagtygttyggtattttygtygtttttgygttygygtygygttttyggyg

SEQ ID NO: 8929 - skipped

SEQ ID NO: 8930 - DNA, 624 bp, synthetic construct
  misc_feature 1..624: note = Description of Artificial Sequence: Synthetic polynucleotide
  source 1..624: mol_type = other DNA
ygyggaggtgggygagygggygtgygygtatttatttgtyggygygagggagtgtygggggggaagggagtggtttttaaaagggggaggggagaaggtagggggyggggagaagtyggttttttaggattyggttgyggyggygagggaggaggaagaagyggaggaggyggttttygygttygtagggtygtgttatttgttygttygttygttygttygttygttygttgygtygygttgtygatygttagtatgttgtygagagtgggttgtttygygttgtygttgtygtygtygtygttgttgtygttgttgttgttgttattgggygygagtggyggyggyggyggggygygygyggaggtgttgtttygttgttygttttgtatattygagygtttggtygtttgygggttttygtyggttgygtygttygtygyggtggtygtagtggtyggaggygttygtatgttatgygyggagttygttygggagtygggttgyggttgttgttyggtgtgygttyggttggagggygaggygtgyggygtttatatttygygttgyggttaggggttgygttgttatttttattygggtttygagttgtttttgtaggyg

SEQ ID NO: 8931 - DNA, 94 bp, synthetic construct
  misc_feature 1..94: note = Description of Artificial Sequence: Synthetic oligonucleotide
  source 1..94: mol_type = other DNA
ygagatagttagygagtttaggyggtttttgtagygttgggagaggaatgtgygygaaattaattagagygaaattagtyggaggagtyggtyg

SEQ ID NO: 8932 - DNA, 63 bp, synthetic construct
  misc_feature 1..63: note = Description of Artificial Sequence: Synthetic oligonucleotide
  source 1..63: mol_type = other DNA
ygtgtagggygtagagttgggtygagtygtygtyggygttaygygagtttygtagtygtygyg

SEQ ID NO: 8933 - DNA, 41 bp, synthetic construct
  misc_feature 1..41: note = Description of Artificial Sequence: Synthetic oligonucleotide
  source 1..41: mol_type = other DNA
ygtygyggtttttggggttttygtttttttgttygttatyg

SEQ ID NO: 8934 - DNA, 1041 bp, synthetic construct
  misc_feature 1..1041: note = Description of Artificial Sequence: Synthetic polynucleotide
  source 1..1041: mol_type = other DNA
ygygtagggatygggtygggtagagtygggyggggtggagaggtaagyggagygygyggtggggttgaggggaggygtggggygagtgttygttgttygttttttagtttttttgtttttaygttttttygttygtagtygttygtagttyggyggtgtagttgtgttggattyggyggygtygtagttttttatygttttttgatgttattggggtgygggggttygggyggttyggtgygygggttaatagttgtayggttttygyggtttagyggygtagggyggggygygtttgatagttttttygtttttygygttagttgattggyggttygagyggtttyggagyggyggaggtttggyggagygttggagyggagtgggayggttagtttgggtttattttygtattttgtaggtttyggtttaygtaygttygtttggagtgygygttttatttttaggttaaattatygttttttttttttygygtattttttttttttagttttttttgtattttatttttatttygtgttatttttaaggaggtttagaatgagygtygggataaygttttttgggttttttgtttttaagyggttttygtttagtgggygaygttttgtgtgttttygyggtttttggtygtgtgtgtygtgygtttttgtttttggagatttgygygtatttgtatgttggggagggygggttygaggtttygagagttgtgtttagatttaatttttaattttaggggattttttttaggttaagygagggttttttttggygggtgtagtygtagagttttgaggttygattttattggtttygtygtttttygygtttattttatygtataatgtttatagtgaaggygaygggaaaagtagtagtttaaaggttttgaatttttttttttygttataygtayggaattttgagttttyggagtttyggggtygaggtyggttygggayggtgtttygagtagttttttattgttggggagtyggttttgtttttgtttgaayg

SEQ ID NO: 8935 - DNA, 23 bp, synthetic construct
  misc_feature 1..23: note = Description of Artificial Sequence: Synthetic oligonucleotide
  source 1..23: mol_type = other DNA
ygttttyggttygggttatggyg

SEQ ID NO: 8936 - DNA, 515 bp, synthetic construct
  misc_feature 1..515: note = Description of Artificial Sequence: Synthetic polynucleotide
  source 1..515: mol_type = other DNA
ygtagtagaatattttgatttaaaataaaaatattatgataaaaatattttaggaggtagtyggttttatttygtttaaagtyggatttygtttagtttygtgaaagygaaggagtattagygttttttgatttygtatagttttttyggtagagayggttygttttttttaagaatyggaagtyggatagygttaggaygttttattttttttatttgggatttagagaggtagyggttaaggatagggttttygtygaggttatygggtagygtttaggtttyggtttttgggaggggagtagygggggaggggtayggggaggggygagggyggggygygtttgggtttyggygttgggttttttttttgttygtttygggggatatttataggatttttgtagatttttgtygaggtaggatggaggtttgtagggatgtatygygggttygygattygggyggtyggaatatagttttttttggtyggagatyggttyggtygtgagtyg

SEQ ID NO: 8937 - DNA, 1017 bp, synthetic construct
  misc_feature 1..1017: note = Description of Artificial Sequence: Synthetic polynucleotide
  source 1..1017: mol_type = other DNA
ygggttaggtttgyggaggaygttttygggygygtatatatagttygaggaygygttttgtattttaagaygtagggtyggattttatttygaaatttggtttttatagttttaggtygaattgtgtttggtttttagttttygagttygagttttaygtygtaaagagatggggttttattgtgtttagttggttttttagtayggaygtgtatttttttttggtttgttttttgttaaaaatyggtagtgygtttygtttttttgtttagtygtagtttgtygttttttagataaaaagyggygatygyggttyggttattygagtttygtygygttgygtttttgttgggyggtttatagatggtgtttagtayggggtygygtygagggygggggygggaggtygygaagagggtygggygggaggggaggagayggyggagtagttaattygygygyggtttattagttgatygtttttgtttatattaggtgtaygtyggttgyggggagtataaagyggggygtatygygggygtyggtaaygagtyggtgaaygaggygaggttygtgygttygyggttgtaagygttygtttggyggggagaggggtygayggygttagttygggyggyggtatttttaggygtttggggygttttttttyggatttggtygttygttgtttygttttttgtattttattttttygatttttttttttagttttgtttttttttgttttggtttttgagagtygattgagtttagtttygtgtagtagyggttgtttgtgtygtygtttagttttyggttttggtgttttttygggggtgttttaaggagttagtgygygttgygggttgggaaggaggygtygtttagttagttttttttttttttttygttttttttttttttttgttgttgttgtygtygtygtygtygtgggtgtygggttygygygtattttaatatttttattagttgggtttyggggtaagtttttggtyg

SEQ ID NO: 8938 - skipped

SEQ ID NO: 8939 - DNA, 54 bp, synthetic construct
  misc_feature 1..54: note = Description of Artificial Sequence: Synthetic oligonucleotide
  source 1..54: mol_type = other DNA
ygagygtaggygggyggagagtagattaygyggaagaggtygagagagaaagyg

SEQ ID NO: 8940 - DNA, 10 bp, synthetic construct
  misc_feature 1..10: note = Description of Artificial Sequence: Synthetic oligonucleotide
  source 1..10: mol_type = other DNA
ygygttgtyg

SEQ ID NO: 8941 - DNA, 26 bp, synthetic construct
  misc_feature 1..26: note = Description of Artificial Sequence: Synthetic oligonucleotide
  source 1..26: mol_type = other DNA
ygggtaggttygattaggyggtygyg

SEQ ID NO: 8942 - DNA, 934 bp, synthetic construct
  misc_feature 1..934: note = Description of Artificial Sequence: Synthetic polynucleotide
  source 1..934: mol_type = other DNA
ygaatttyggyggtygtygygttttttygtttygyggagatygaygtaggygttygttttygaggtygaagggtattgggyggygagggttgyggtagttggygatttygggggygtttgygyggygygygttagaygaggttgtttyggyggttatttygygatttygygtygtygggatttgygygyggagaaygtyggttttggagggagtaygtttttttaaagtgtagaggagggttyggyggygygttttygyggaaattttttttattgtagttatttyggatgtygatttagtagtttgtttttygagaaaagagaggggatttgggtagaagggtttygtttgttttaaaagaaggtgtaaggattagaagataaygaaaygtttattttttgaagggtgggaaaaaaagaaaaagaaaaaggagttatttaygttggagatgttygttttagatttttttatttttttttttttygtttyggttttttttttygaggtttatttaatttgttagagaaggaggaggagtagaagatgggggtygaggaggaggggaagagaaagagaagtttgttaagaataaagtttttgtyggtaagygyggggatttygtagtggagggtattgyggagtttyggggagttatagygggggtttygggtttaaatgtttttgttyggagttygagtygatatatatatttagttygatttttttttgttttyggttygagttttttagtttggttygtyggttygtygttttgtaygttttygtyggttagttttgttaaagtaaagagttgygttttttgagttygttyggtygaggggaggggaygtttygagtttggtygygtgygaggtttygggygygttttggtttttyggttygagagygygtagttygggtttttttttygyg

SEQ ID NO: 8943 - DNA, 279 bp, synthetic construct
  misc_feature 1..279: note = Description of Artificial Sequence: Synthetic polynucleotide
  source 1..279: mol_type = other DNA
ygyggggtaaggaattygygggtagttattttygttaggggtagggttyggttagttaggygygagaaggttaggygaggtygattgygyggggtgaagaygttaggtygatagttgygggttttatygttagttttgaygygagtttgygttttggygayggyggagggygggtagggggygygggygttgttayggygtttgtttagaatyggtygggaaygtygygggygggttttttyggtttttygtttttttagttttgtttttaggttttyg

SEQ ID NO: 8944-8945 - skipped (2 entries)

SEQ ID NO: 8946 - DNA, 11 bp, synthetic construct
  misc_feature 1..11: note = Description of Artificial Sequence: Synthetic oligonucleotide
  source 1..11: mol_type = other DNA
ygagygtatyg

SEQ ID NO: 8947 - DNA, 30 bp, synthetic construct
  misc_feature 1..30: note = Description of Artificial Sequence: Synthetic oligonucleotide
  source 1..30: mol_type = other DNA
ygtttgtaattttagttatttaggaggtyg

SEQ ID NO: 8948 - DNA, 10 bp, synthetic construct
  misc_feature 1..10: note = Description of Artificial Sequence: Synthetic oligonucleotide
  source 1..10: mol_type = other DNA
ygttttygyg

SEQ ID NO: 8949 - DNA, 56 bp, synthetic construct
  misc_feature 1..56: note = Description of Artificial Sequence: Synthetic oligonucleotide
  source 1..56: mol_type = other DNA
yggygtttgatgagyggygggttyggataygaggggayggggtygatttgtgggyg

SEQ ID NO: 8950 - DNA, 98 bp, synthetic construct
  misc_feature 1..98: note = Description of Artificial Sequence: Synthetic oligonucleotide
  source 1..98: mol_type = other DNA
yggttagtagggyggggtaggaggttgggagagggaygggtgygggggtgggggagaggaagggagyggttaygtgtgaggggyggttygaggttayg

SEQ ID NO: 8951 - DNA, 33 bp, synthetic construct
  misc_feature 1..33: note = Description of Artificial Sequence: Synthetic oligonucleotide
  source 1..33: mol_type = other DNA
ygggaggaygygtaggggyggtygtygtygtyg

SEQ ID NO: 8952 - DNA, 48 bp, synthetic construct
  misc_feature 1..48: note = Description of Artificial Sequence: Synthetic oligonucleotide
  source 1..48: mol_type = other DNA
ygttttattttttttattatataygtattttttattttaattttttyg

SEQ ID NO: 8953 - DNA, 93 bp, synthetic construct
  misc_feature 1..93: note = Description of Artificial Sequence: Synthetic oligonucleotide
  source 1..93: mol_type = other DNA
ygatttgtttyggtygtattygttttygttttagtaygygaygttgttyggygygatttttgttttttyggtttagttttatygttgttttyg

SEQ ID NO: 8954-8960 - skipped (7 entries)

SEQ ID NO: 8961 - DNA, 42 bp, synthetic construct
  misc_feature 1..42: note = Description of Artificial Sequence: Synthetic oligonucleotide
  source 1..42: mol_type = other DNA
yggagygaggygygygttyggttagagagygagygygtaayg

SEQ ID NO: 8962-8971 - skipped (10 entries)

SEQ ID NO: 8972 - DNA, 40 bp, synthetic construct
  misc_feature 1..40: note = Description of Artificial Sequence: Synthetic oligonucleotide
  source 1..40: mol_type = other DNA
yggygtattggygttgggagtagggtygtatttyggygyg

SEQ ID NO: 8973-8993 - skipped (21 entries)

SEQ ID NO: 8994 - DNA, 42 bp, synthetic construct
  misc_feature 1..42: note = Description of Artificial Sequence: Synthetic oligonucleotide
  source 1..42: mol_type = other DNA
ygggygggyggygttyggtttgagggagyggggyggttttyg

SEQ ID NO: 8995-9004 - skipped (10 entries)

SEQ ID NO: 9005 - DNA, 20 bp, synthetic construct
  misc_feature 1..20: note = Description of Artificial Sequence: Synthetic oligonucleotide
  source 1..20: mol_type = other DNA
cgtggtgcgcgcggcgggcg

SEQ ID NO: 9006 - DNA, 116 bp, synthetic construct
  misc_feature 1..116: note = Description of Artificial Sequence: Synthetic polynucleotide
  source 1..116: mol_type = other DNA
cgagcgtcgtgggcggggttttagggcggcggcgtttcgcggggagggtttttcgtgttgggggcgaggttattcgaggtagtttttcgttcgtttttaatttcgtttcgttttcg

SEQ ID NO: 9007-9016 - skipped (10 entries)

SEQ ID NO: 9017 - DNA, 44 bp, synthetic construct
  misc_feature 1..44: note = Description of Artificial Sequence: Synthetic oligonucleotide
  source 1..44: mol_type = other DNA
cgcgcgtttttcgggtttcgttcgtattttttacgcgtttttcg

SEQ ID NO: 9018-9027 - skipped (10 entries)

SEQ ID NO: 9028 - DNA, 34 bp, synthetic construct
  misc_feature 1..34: note = Description of Artificial Sequence: Synthetic oligonucleotide
  source 1..34: mol_type = other DNA
cgtttgttcggcggttttagaaggtcgggttgcg

SEQ ID NO: 9029-9038 - skipped (10 entries)

SEQ ID NO: 9039 - DNA, 211 bp, synthetic construct
  misc_feature 1..211: note = Description of Artificial Sequence: Synthetic polynucleotide
  source 1..211: mol_type = other DNA
cgattttcggcgtagatatagaggtcgtttttagtttcgtcgtttcgtggtttcgttttcgttgtacgtttttttatttttcggatttcgtagggtcgcggcggatacggttcgatcggggacgtgaacgcgtagaattatattttttagcgtttcgttcgcgttggaattatatttttcggggggttcggcggtgtattcgtcggggtcg

SEQ ID NO: 9040-9049 - skipped (10 entries)

SEQ ID NO: 9050 - DNA, 95 bp, synthetic construct
  misc_feature 1..95: note = Description of Artificial Sequence: Synthetic oligonucleotide
  source 1..95: mol_type = other DNA
cgggaaaaggggcgcggaagaggggcggggcgggttacggcgcgtagggtttttttttttcgtttcggatttaattaattgggtttgagtttttg

SEQ ID NO: 9051-9060 - skipped (10 entries)

SEQ ID NO: 9061 - DNA, 264 bp, synthetic construct
  misc_feature 1..264: note = Description of Artificial Sequence: Synthetic polynucleotide
  source 1..264: mol_type = other DNA
cgggttgtaaggcggtgtattacgtgtgcgcgtttagtatgtacgttagcgtgttgtttatcggtttgtttagtttgtagcgttgtttcgtagttattcgtttttttttggcgtttcggttgcgtagttcggttttggttcgtcgtttgttgttggcggtttggttggtcgttttgttgttcgtcgtttcggtcgtcgtttatcgttatttgtggagggatcgcgtatgttagttgtgttattcgtcgtcggtttacgtcgtcg

SEQ ID NO: 9062-9071 - skipped (10 entries)

SEQ ID NO: 9072 - DNA, 59 bp, synthetic construct
  misc_feature 1..59: note = Description of Artificial Sequence: Synthetic oligonucleotide
  source 1..59: mol_type = other DNA
cgtttttcgtttcggagttgtcggcggtatgattcgatacgtcggggcgttcgcgcgcg

SEQ ID NO: 9073-9093 - skipped (21 entries)

SEQ ID NO: 9094 - DNA, 324 bp, synthetic construct
  misc_feature 1..324: note = Description of Artificial Sequence: Synthetic polynucleotide
  source 1..324: mol_type = other DNA
cggcgaaggtttcgtgttttacgagattttttttgttgtattcgaagttatttattatttttatggtcgcgttttcggggtatatagcggacgggcgggcggcgtagtgcggcgtaggtattagtatcgcggtttcgcgggttcggagcgcgttagcgtgcggcgggtttggggtagtcgtagtttcgggttcgggcggatttttatgtcgagagatcggagcggaaattggggaagttgtcgcgcggagttagggttagcgaggttcggttcggtttttgtcgtttatggttcggtttgtcgtcggtcgttggttgtttggcg

SEQ ID NO: 9095-9101 - skipped (7 entries)

SEQ ID NO: 9102 - DNA, 102 bp, synthetic construct
  misc_feature 1..102: note = Description of Artificial Sequence: Synthetic polynucleotide
  source 1..102: mol_type = other DNA
cgttgagttcgcgttgaataagattttttcgtagttttgcgtttcgcgtcgggtgaaggggcgtgtttttgtaggcgttcggggttcggtttggagttggcg

SEQ ID NO: 9103 - DNA, 24 bp, synthetic construct
  misc_feature 1..24: note = Description of Artificial Sequence: Synthetic oligonucleotide
  source 1..24: mol_type = other DNA
cgtaacgattcgttgtcgtttacg

SEQ ID NO: 9104 - DNA, 521 bp, synthetic construct
  misc_feature 1..521: note = Description of Artificial Sequence: Synthetic polynucleotide
  source 1..521: mol_type = other DNA
cgtggtgggggtgttagttgtaggggtgttttcggtgggtgggagttggtggtttttcgttggtgttatgggattcgtatgttcgttttgcgtttttcggtttttgagtttataggtcgggattttgtttgttagtcgcgtgcgttgtcgtttaatttttgtaggcgtagagcgcgcggcggcggtgatagagaattttgtttggttgtttaaatatagttttttgtagaaggattttgcgttcggggaaggggaggaatttttttttttttgggcgttcgtttttttcgttatggttcggtttttatattcgtttatatttggtcgtagcggggcgttcggggggaggggttgaggtcgcgtttttcgtcgttttttgggcgcgggttaggcggggaggaggggggcgtttcggtcgtgtgtttaggattgttttttagcggttattcgggttttagttttttaggtttggttttgataggcgggcggagtagttagtgcgagatagggaggtcggtgcg

SEQ ID NO: 9105 - DNA, 1484 bp, synthetic construct
  misc_feature 1..1484: note = Description of Artificial Sequence: Synthetic polynucleotide
  source 1..1484: mol_type = other DNA
cgtaagggcgtcggggagcgggaggggcgttgggggcggtaaggggttttagattttaggttacgaattgtttttttttttttcgggtaagagtttcgttttttttaattgatagaaatttattggggtaggggggcgagtggggagagaggtcgtttagggttcgttattggttgcgtttttttcggttttggtttgggaagcggttttgggtttttcgggcgagtagtttgggcgtcggcgttttttgcgaggaagatcgcggggtgacggtcggtattcgttcggttgggtcgcgttgtcgtttcgatttatttttttttcgcgttcgcgtttttttttttttttttattaggagttcgggattcggagagggcgcgggaggtaggtatacgggttcgattttattttagcgtttatcggggacgcgggcgggcggcgacgggacgcggcgggggcgcggggcgggcgcggttatggagtagtagcggcggcggcggcggcggcggcggtaatattagcgatcgcgggcggacgagcgggcgggtagggtcgtcgggtttagcggatcgaattgtatagtttagtaaaagcgttttcgtttttcgcgcgtcgttttttgcgagtttaaatttattaatattttttaacgttttaatttattttttgaagaaaagtaaaaaaaaaaaaaaaaaaaaaaaaaaaagtaaaaaaagaaaaagtattgatcggagagacggggatatatatatatatatatatatatatatatatataaaattttttttggtttttgttaaaattagtagggttcgtcgcgcgtttgtgtgttagtgtgtgcgagtgtgtgtgcgtgcgggcgtgtgtgtgtgaatgtgattattttaggatttttcgggtttcggagacgttatttttttttttgatatttttttttataaatcggtggcgcggcggaggcggtagagtcgggcgggaagcgcggggtcggtcggggcgttcgtcgttcgtcgtcgttttcgcgcgttcgggggtttcggcgtttttcgagttagggcggttagttcgcggttcgtcgtttgatagatgtttatcgttatggagttgtcgtagtagtatttttgggggttcgggcgagcgacgggagtcgggatttgagcgagcgtcggggttagcggagtcggagtcgtcgggatatgggtgagtacgcgcggcgattttggttcgggagttcgggcgtttagttttttttcgcgtcgcgggttttcgtattttcggaatcgggggcgacgtgtgtgttttgtatgtaaaagtttacgtcgttttgttgggtttttgattttgtattcggcgggaagggggagatcgggtcgagggggcgggatgtcggttcgggcgaggttgtaggagatgggcgcgatttcggcgggtcggcgggtgggcggcgatgttggtttaattggagtggttcgttggtggcggcg

SEQ ID NO: 9106 - DNA, 34 bp, synthetic construct
  misc_feature 1..34: note = Description of Artificial Sequence: Synthetic oligonucleotide
  source 1..34: mol_type = other DNA
cgcgtcgttcgttttcgtttttttcgttttttcg

SEQ ID NO: 9107 - DNA, 14 bp, synthetic construct
  misc_feature 1..14: note = Description of Artificial Sequence: Synthetic oligonucleotide
  source 1..14: mol_type = other DNA
cggcgaggggttcg

SEQ ID NO: 9108 - DNA, 37 bp, synthetic construct
  misc_feature 1..37: note = Description of Artificial Sequence: Synthetic oligonucleotide
  source 1..37: mol_type = other DNA
cgtggcgcgtttattttacggtgttgaagagtagtcg

SEQ ID NO: 9109 - DNA, 34 bp, synthetic construct
  misc_feature 1..34: note = Description of Artificial Sequence: Synthetic oligonucleotide
  source 1..34: mol_type = other DNA
cgggatttgttcgtttttttgtttttggttgtcg

SEQ ID NO: 9110 - DNA, 538 bp, synthetic construct
  misc_feature 1..538: note = Description of Artificial Sequence: Synthetic polynucleotide
  source 1..538: mol_type = other DNA
cgcggggttattttatcgcgagtttttttcgtagttcggttcgggttatttcgattcgttaggtttaatttaataattataatatcggaaaaggaagtaaaggtcgaagtttattcgcggttttgaggtttgtgggaaacgtagtttaataacgaaagagttttgaagtttaagcggagttcgttggtcgtaggggtcgtattacgttttagattttggagttttcgggtgcgtagatttttgttattagtagaggttgtcgttgcgcgttttttaggcgcggaagaggcggttggtggtttttgacggtaaggtgaagtcgaggtagtaatcgggaatttaggttgggaggatagaatggggaataggaagttggggcgagggtggttttgggggaggtggggggtcgcggaattttaggtggtttttgttttatttttggaaagaatcggaagttcgggtcggggagggtgaagggagtcgcggattcggttgtttagtcgaggaggaaattcggattttaggttgagggaggtcg

SEQ ID NO: 9111 - DNA, 109 bp, synthetic construct
  misc_feature 1..109: note = Description of Artificial Sequence: Synthetic polynucleotide
  source 1..109: mol_type = other DNA
cggcgttcggagcgttggattatattttttagaggtatcgttttcggagcgtagttttattttcgttagtttgcgagatttggaggtttcgcgtggggagagggtcgcg

SEQ ID NO: 9112 - DNA, 901 bp, synthetic construct
  misc_feature 1..901: note = Description of Artificial Sequence: Synthetic polynucleotide
  source 1..901: mol_type = other DNA
cgcgcggggtttcggggtcggttttttttcgtcgggcgtttcgggttcgtcgttcgggtttttcgcggatagcggtcggtcgcgtaggtttacggcgcgtattaggtcgttcgttagtttttttagttttttcggtcgtagcgtttcgagtcgcgcggcgtcgcggaacgcgtttagggtttcggggaggcggtcggcgcgggttagcgcgttttttagttttaggtataggtcgcggttcggttgcgttagttcggttagtatggagcgaaagagttcggttgttatttcgtagtcgttcgcgcggaaggtttcgtcgtttttttttaagcgttgggcgatcggtttcgcgcggtcgtagttaggatattggggcggcggcggcggcgggatcggttcggggtttattatcgcggggttgcgacgacgcgggttcggagcgaaggcgcggagtagggaggatgcgttgttgttgggaattggtcggcgggagcgcggttttagttttcgttagtagttacgcgcgtttgggggcggcgcgttgcgagcggttgagatcgcgggcgggggcgggcgtttggtttgggtagcgtttttagcgcggtgtgggcggcgagtttcgtagggttgtaatcgtttcggggtgggggtcgggataggtatcgcgggcgtaatttgagtttttgtttacgcgtagcggttttttagtttcgtcggtttaggtaatttaggtcgttgcggtaacgtagtgatcgcgttttaggttcgcgttttttgcgatgttttttttattcgtttgagggtttttgcgcgattgcgcgcgcgttttttgtttgtcgttttttcgtagaggtgtcggggttttgggagtaggtggttttggtcgcgggttgttggcgcg

SEQ ID NO: 9113 - DNA, 15 bp, synthetic construct
  misc_feature 1..15: note = Description of Artificial Sequence: Synthetic oligonucleotide
  source 1..15: mol_type = other DNA
cgggcggcgcgggcg

SEQ ID NO: 9114 - DNA, 383 bp, synthetic construct
  misc_feature 1..383: note = Description of Artificial Sequence: Synthetic polynucleotide
  source 1..383: mol_type = other DNA
cgggatattttcgaaggcggcgcgttggaggcggggagcggtcggggcgtacggagagggcggggagttcgcgggagggggaggagggggaggagggggaggaggcgcgaggtgggggggagcgcggcgggcggtagggagggagcgggagggaggtaagaaagtagtagaaagtgaggttggtaggcggcggtaaaggagtcggcgcgcggcggcggtaggaagtttgtgttcgagaatagtagaaataagagttagggagggatcgcggtcgcggcggcggcggcgagagcgaaagaggaaattgtagaggaggaagttgcgtcgtagttcgagtcgttcggtattttcgtcgtttttgcgttcgcgtcgcgttttcggcg

SEQ ID NO: 9115 - skipped

SEQ ID NO: 9116 - DNA, 624 bp, synthetic construct
  misc_feature 1..624: note = Description of Artificial Sequence: Synthetic polynucleotide
  source 1..624: mol_type = other DNA
cgcggaggtgggcgagcgggcgtgcgcgtatttatttgtcggcgcgagggagtgtcgggggggaagggagtggtttttaaaagggggaggggagaaggtagggggcggggagaagtcggttttttaggattcggttgcggcggcgagggaggaggaagaagcggaggaggcggttttcgcgttcgtagggtcgtgttatttgttcgttcgttcgttcgttcgttcgttcgttgcgtcgcgttgtcgatcgttagtatgttgtcgagagtgggttgtttcgcgttgtcgttgtcgtcgtcgtcgttgttgtcgttgttgttgttgttattgggcgcgagtggcggcggcggcggggcgcgcgcggaggtgttgtttcgttgttcgttttgtatattcgagcgtttggtcgtttgcgggttttcgtcggttgcgtcgttcgtcgcggtggtcgtagtggtcggaggcgttcgtatgttatgcgcggagttcgttcgggagtcgggttgcggttgttgttcggtgtgcgttcggttggagggcgaggcgtgcggcgtttatatttcgcgttgcggttaggggttgcgttgttatttttattcgggtttcgagttgtttttgtaggcg

SEQ ID NO: 9117 - DNA, 94 bp, synthetic construct
  misc_feature 1..94: note = Description of Artificial Sequence: Synthetic oligonucleotide
  source 1..94: mol_type = other DNA
cgagatagttagcgagtttaggcggtttttgtagcgttgggagaggaatgtgcgcgaaattaattagagcgaaattagtcggaggagtcggtcg

SEQ ID NO: 9118 - DNA, 63 bp, synthetic construct
  misc_feature 1..63: note = Description of Artificial Sequence: Synthetic oligonucleotide
  source 1..63: mol_type = other DNA
cgtgtagggcgtagagttgggtcgagtcgtcgtcggcgttacgcgagtttcgtagtcgtcgcg

SEQ ID NO: 9119 - DNA, 41 bp, synthetic construct
  misc_feature 1..41: note = Description of Artificial Sequence: Synthetic oligonucleotide
  source 1..41: mol_type = other DNA
cgtcgcggtttttggggttttcgtttttttgttcgttatcg

SEQ ID NO: 9120 - DNA, 1041 bp, synthetic construct
  misc_feature 1..1041: note = Description of Artificial Sequence: Synthetic polynucleotide
  source 1..1041: mol_type = other DNA
cgcgtagggatcgggtcgggtagagtcgggcggggtggagaggtaagcggagcgcgcggtggggttgaggggaggcgtggggcgagtgttcgttgttcgttttttagtttttttgtttttacgttttttcgttcgtagtcgttcgtagttcggcggtgtagttgtgttggattcggcggcgtcgtagttttttatcgttttttgatgttattggggtgcgggggttcgggcggttcggtgcgcgggttaatagttgtacggttttcgcggtttagcggcgtagggcggggcgcgtttgatagttttttcgtttttcgcgttagttgattggcggttcgagcggtttcggagcggcggaggtttggcggagcgttggagcggagtgggacggttagtttgggtttattttcgtattttgtaggtttcggtttacgtacgttcgtttggagtgcgcgttttatttttaggttaaattatcgttttttttttttcgcgtattttttttttttagttttttttgtattttatttttatttcgtgttatttttaaggaggtttagaatgagcgtcgggataacgttttttgggttttttgtttttaagcggttttcgtttagtgggcgacgttttgtgtgttttcgcggtttttggtcgtgtgtgtcgtgcgtttttgtttttggagatttgcgcgtatttgtatgttggggagggcgggttcgaggtttcgagagttgtgtttagatttaatttttaattttaggggattttttttaggttaagcgagggttttttttggcgggtgtagtcgtagagttttgaggttcgattttattggtttcgtcgtttttcgcgtttattttatcgtataatgtttatagtgaaggcgacgggaaaagtagtagtttaaaggttttgaatttttttttttcgttatacgtacggaattttgagttttcggagtttcggggtcgaggtcggttcgggacggtgtttcgagtagttttttattgttggggagtcggttttgtttttgtttgaacg

SEQ ID NO: 9121 - DNA, 23 bp, synthetic construct
  misc_feature 1..23: note = Description of Artificial Sequence: Synthetic oligonucleotide
  source 1..23: mol_type = other DNA
cgttttcggttcgggttatggcg

SEQ ID NO: 9122 - DNA, 515 bp, synthetic construct
  misc_feature 1..515: note = Description of Artificial Sequence: Synthetic polynucleotide
  source 1..515: mol_type = other DNA
cgtagtagaatattttgatttaaaataaaaatattatgataaaaatattttaggaggtagtcggttttatttcgtttaaagtcggatttcgtttagtttcgtgaaagcgaaggagtattagcgttttttgatttcgtatagttttttcggtagagacggttcgttttttttaagaatcggaagtcggatagcgttaggacgttttattttttttatttgggatttagagaggtagcggttaaggatagggttttcgtcgaggttatcgggtagcgtttaggtttcggtttttgggaggggagtagcgggggaggggtacggggaggggcgagggcggggcgcgtttgggtttcggcgttgggttttttttttgttcgtttcgggggatatttataggatttttgtagatttttgtcgaggtaggatggaggtttgtagggatgtatcgcgggttcgcgattcgggcggtcggaatatagttttttttggtcggagatcggttcggtcgtgagtcg

SEQ ID NO: 9123 - DNA, 1017 bp, synthetic construct
  misc_feature 1..1017: note = Description of Artificial Sequence: Synthetic polynucleotide
  source 1..1017: mol_type = other DNA
cgggttaggtttgcggaggacgttttcgggcgcgtatatatagttcgaggacgcgttttgtattttaagacgtagggtcggattttatttcgaaatttggtttttatagttttaggtcgaattgtgtttggtttttagttttcgagttcgagttttacgtcgtaaagagatggggttttattgtgtttagttggttttttagtacggacgtgtatttttttttggtttgttttttgttaaaaatcggtagtgcgtttcgtttttttgtttagtcgtagtttgtcgttttttagataaaaagcggcgatcgcggttcggttattcgagtttcgtcgcgttgcgtttttgttgggcggtttatagatggtgtttagtacggggtcgcgtcgagggcgggggcgggaggtcgcgaagagggtcgggcgggaggggaggagacggcggagtagttaattcgcgcgcggtttattagttgatcgtttttgtttatattaggtgtacgtcggttgcggggagtataaagcggggcgtatcgcgggcgtcggtaacgagtcggtgaacgaggcgaggttcgtgcgttcgcggttgtaagcgttcgtttggcggggagaggggtcgacggcgttagttcgggcggcggtatttttaggcgtttggggcgttttttttcggatttggtcgttcgttgtttcgttttttgtattttattttttcgatttttttttttagttttgtttttttttgttttggtttttgagagtcgattgagtttagtttcgtgtagtagcggttgtttgtgtcgtcgtttagttttcggttttggtgttttttcgggggtgttttaaggagttagtgcgcgttgcgggttgggaaggaggcgtcgtttagttagttttttttttttttttcgttttttttttttttttgttgttgttgtcgtcgtcgtcgtcgtgggtgtcgggttcgcgcgtattttaatatttttattagttgggtttcggggtaagtttttggtcg

SEQ ID NO: 9124 - skipped

SEQ ID NO: 9125 - DNA, 54 bp, synthetic construct
  misc_feature 1..54: note = Description of Artificial Sequence: Synthetic oligonucleotide
  source 1..54: mol_type = other DNA
cgagcgtaggcgggcggagagtagattacgcggaagaggtcgagagagaaagcg

SEQ ID NO: 9126 - DNA, 10 bp, synthetic construct
  misc_feature 1..10: note = Description of Artificial Sequence: Synthetic oligonucleotide
  source 1..10: mol_type = other DNA
cgcgttgtcg

SEQ ID NO: 9127 - DNA, 26 bp, synthetic construct
  misc_feature 1..26: note = Description of Artificial Sequence: Synthetic oligonucleotide
  source 1..26: mol_type = other DNA
cgggtaggttcgattaggcggtcgcg

SEQ ID NO: 9128 - DNA, 934 bp, synthetic construct
  misc_feature 1..934: note = Description of Artificial Sequence: Synthetic polynucleotide
  source 1..934: mol_type = other DNA
cgaatttcggcggtcgtcgcgttttttcgtttcgcggagatcgacgtaggcgttcgttttcgaggtcgaagggtattgggcggcgagggttgcggtagttggcgatttcgggggcgtttgcgcggcgcgcgttagacgaggttgtttcggcggttatttcgcgatttcgcgtcgtcgggatttgcgcgcggagaacgtcggttttggagggagtacgtttttttaaagtgtagaggagggttcggcggcgcgttttcgcggaaattttttttattgtagttatttcggatgtcgatttagtagtttgtttttcgagaaaagagaggggatttgggtagaagggtttcgtttgttttaaaagaaggtgtaaggattagaagataacgaaacgtttattttttgaagggtgggaaaaaaagaaaaagaaaaaggagttatttacgttggagatgttcgttttagatttttttatttttttttttttcgtttcggttttttttttcgaggtttatttaatttgttagagaaggaggaggagtagaagatgggggtcgaggaggaggggaagagaaagagaagtttgttaagaataaagtttttgtcggtaagcgcggggatttcgtagtggagggtattgcggagtttcggggagttatagcgggggtttcgggtttaaatgtttttgttcggagttcgagtcgatatatatatttagttcgatttttttttgttttcggttcgagttttttagtttggttcgtcggttcgtcgttttgtacgttttcgtcggttagttttgttaaagtaaagagttgcgttttttgagttcgttcggtcgaggggaggggacgtttcgagtttggtcgcgtgcgaggtttcgggcgcgttttggtttttcggttcgagagcgcgtagttcgggtttttttttcgcg

SEQ ID NO: 9129 - DNA, 279 bp, synthetic construct
  misc_feature 1..279: note = Description of Artificial Sequence: Synthetic polynucleotide
  source 1..279: mol_type = other DNA
cgcggggtaaggaattcgcgggtagttattttcgttaggggtagggttcggttagttaggcgcgagaaggttaggcgaggtcgattgcgcggggtgaagacgttaggtcgatagttgcgggttttatcgttagttttgacgcgagtttgcgttttggcgacggcggagggcgggtagggggcgcgggcgttgttacggcgtttgtttagaatcggtcgggaacgtcgcgggcgggttttttcggtttttcgtttttttagttttgtttttaggttttcg

SEQ ID NO: 9130-9131 - skipped (2 entries)

SEQ ID NO: 9132 - DNA, 11 bp, synthetic construct
  misc_feature 1..11: note = Description of Artificial Sequence: Synthetic oligonucleotide
  source 1..11: mol_type = other DNA
cgagcgtatcg

SEQ ID NO: 9133 - DNA, 30 bp, synthetic construct
  misc_feature 1..30: note = Description of Artificial Sequence: Synthetic oligonucleotide
  source 1..30: mol_type = other DNA
cgtttgtaattttagttatttaggaggtcg

SEQ ID NO: 9134 - DNA, 10 bp, synthetic construct
  misc_feature 1..10: note = Description of Artificial Sequence: Synthetic oligonucleotide
  source 1..10: mol_type = other DNA
cgttttcgcg

SEQ ID NO: 9135 - DNA, 56 bp, synthetic construct
  misc_feature 1..56: note = Description of Artificial Sequence: Synthetic oligonucleotide
  source 1..56: mol_type = other DNA
cggcgtttgatgagcggcgggttcggatacgaggggacggggtcgatttgtgggcg

SEQ ID NO: 9136 - DNA, 98 bp, synthetic construct
  misc_feature 1..98: note = Description of Artificial Sequence: Synthetic oligonucleotide
  source 1..98: mol_type = other DNA
cggttagtagggcggggtaggaggttgggagagggacgggtgcgggggtgggggagaggaagggagcggttacgtgtgaggggcggttcgaggttacg

SEQ ID NO: 9137 - DNA, 33 bp, synthetic construct
  misc_feature 1..33: note = Description of Artificial Sequence: Synthetic oligonucleotide
  source 1..33: mol_type = other DNA
cgggaggacgcgtaggggcggtcgtcgtcgtcg

SEQ ID NO: 9138 - DNA, 48 bp, synthetic construct
  misc_feature 1..48: note = Description of Artificial Sequence: Synthetic oligonucleotide
  source 1..48: mol_type = other DNA
cgttttattttttttattatatacgtattttttattttaattttttcg

SEQ ID NO: 9139 - DNA, 93 bp, synthetic construct
  misc_feature 1..93: note = Description of Artificial Sequence: Synthetic oligonucleotide
  source 1..93: mol_type = other DNA
cgatttgtttcggtcgtattcgttttcgttttagtacgcgacgttgttcggcgcgatttttgttttttcggtttagttttatcgttgttttcg

SEQ ID NO: 9140-9146 - skipped (7 entries)

SEQ ID NO: 9147 - DNA, 42 bp, synthetic construct
  misc_feature 1..42: note = Description of Artificial Sequence: Synthetic oligonucleotide
  source 1..42: mol_type = other DNA
cggagcgaggcgcgcgttcggttagagagcgagcgcgtaacg

SEQ ID NO: 9148-9157 - skipped (10 entries)

SEQ ID NO: 9158 - DNA, 40 bp, synthetic construct
  misc_feature 1..40: note = Description of Artificial Sequence: Synthetic oligonucleotide
  source 1..40: mol_type = other DNA
cggcgtattggcgttgggagtagggtcgtatttcggcgcg

SEQ ID NO: 9159-9179 - skipped (21 entries)

SEQ ID NO: 9180 - DNA, 42 bp, synthetic construct
  misc_feature 1..42: note = Description of Artificial Sequence: Synthetic oligonucleotide
  source 1..42: mol_type = other DNA
cgggcgggcggcgttcggtttgagggagcggggcggttttcg

SEQ ID NO: 9181-9190 - skipped (10 entries)

SEQ ID NO: 9191 - DNA, 20 bp, synthetic construct
  misc_feature 1..20: note = Description of Artificial Sequence: Synthetic oligonucleotide
  source 1..20: mol_type = other DNA
ygttygtygygygtattayg

SEQ ID NO: 9192 - DNA, 116 bp, synthetic construct
  misc_feature 1..116: note = Description of Artificial Sequence: Synthetic polynucleotide
  source 1..116: mol_type = other DNA
ygagagyggggyggggttgggggygggyggggagttgtttygggtggtttygtttttagtayggaggatttttttygygaggygtygtygttttggagtttygtttayggygttyg

SEQ ID NO: 9193-9202 - skipped (10 entries)

SEQ ID NO: 9203 - DNA, 44 bp, synthetic construct
  misc_feature 1..44: note = Description of Artificial Sequence: Synthetic oligonucleotide
  source 1..44: mol_type = other DNA
yggggggygygtgaggggtgygagyggggttyggggggygygyg

SEQ ID NO: 9204-9213 - skipped (10 entries)

SEQ ID NO: 9214 - DNA, 34 bp, synthetic construct
  misc_feature 1..34: note = Description of Artificial Sequence: Synthetic oligonucleotide
  source 1..34: mol_type = other DNA
ygtagttygattttttagagtygtygagtagayg

SEQ ID NO: 9215-9224 - skipped (10 entries)

SEQ ID NO: 9225 - DNA, 211 bp, synthetic construct
  misc_feature 1..211: note = Description of Artificial Sequence: Synthetic polynucleotide
  source 1..211: mol_type = other DNA
ygatttyggygggtgtatygtygagtttttygggaagtgtagttttagygygagygggaygttgggaaatgtagttttgygygtttaygttttygatygggtygtgttygtygyggttttgygaggttygaggggtaagggagygtgtagygggggygggattaygaggyggyggggttgggggyggtttttgtgtttgygtyggggatyg

SEQ ID NO: 9226-9235 - skipped (10 entries)

SEQ ID NO: 9236 - DNA, 95 bp, synthetic construct
  misc_feature 1..95: note = Description of Artificial Sequence: Synthetic oligonucleotide
  source 1..95: mol_type = other DNA
yggaagtttaagtttaattaattgagttygaggygggagggaagggttttgygygtygtggttygtttygtttttttttygygttttttttttyg

SEQ ID NO: 9237-9246 - skipped (10 entries)

SEQ ID NO: 9247 - DNA, 264 bp, synthetic construct
  misc_feature 1..264: note = Description of Artificial Sequence: Synthetic polynucleotide
  source 1..264: mol_type = other DNA
yggyggygtggatyggygaygggtggtatagttggtataygyggtttttttataggtggyggtagayggyggtygggayggygagtaatagggyggttagttagatygttagtagtaggyggygggttagggtygggttgygtagtygaggygttaggaaggggygggtgattgygaggtagygttgtaggttgagtaggtyggtgagtagtaygttggygtatatgttgagygygtataygtagtatatygttttgtagttyg

SEQ ID NO: 9248-9257 - skipped (10 entries)

SEQ ID NO: 9258 - DNA, 59 bp, synthetic construct
  misc_feature 1..59: note = Description of Artificial Sequence: Synthetic oligonucleotide
  source 1..59: mol_type = other DNA
ygygygygggygtttyggygtgtyggattatgtygtyggtagtttygggayggggaayg

SEQ ID NO: 9259-9279 - skipped (21 entries)

SEQ ID NO: 9280 - DNA, 324 bp, synthetic construct
  misc_feature 1..324: note = Description of Artificial Sequence: Synthetic polynucleotide
  source 1..324: mol_type = other DNA
ygttagatagttagyggtyggyggtaggtygggttatgagyggtaggggtygggtygggtttygttgattttggtttygygyggtagtttttttagttttygtttyggtttttyggtatgagagttygttygggttyggggttgyggttgttttagattygtygtaygttggygygtttygggttygyggagtygyggtgttgatatttgygtygtattgygtygttygttygttygttgtgtgtttygggggygyggttatggaggtggtgggtgatttygagtatagtaagagggatttygtgggatayggggttttygtyg

SEQ ID NO: 9281-9287 - skipped (7 entries)

SEQ ID NO: 9288 - DNA, 102 bp, synthetic construct
  misc_feature 1..102: note = Description of Artificial Sequence: Synthetic polynucleotide
  source 1..102: mol_type = other DNA
ygttagttttaggtygagtttygagygtttgtaggaataygtttttttattyggygygggaygtagagttgygagagaattttgtttagygyggatttaayg

SEQ ID NO: 9289 - DNA, 24 bp, synthetic construct
  misc_feature 1..24: note = Description of Artificial Sequence: Synthetic oligonucleotide
  source 1..24: mol_type = other DNA
ygtgggyggtagygagtygttgyg

SEQ ID NO: 9290 - DNA, 521 bp, synthetic construct
  misc_feature 1..521: note = Description of Artificial Sequence: Synthetic polynucleotide
  source 1..521: mol_type = other DNA
ygtatyggtttttttgtttygtattggttgtttygttygtttgttaaggttaggtttggggggttggggttygagtggtygttgggggatagttttgggtataygatyggagygtttttttttttttygtttggttygygtttaggggayggygagagaygyggttttagttttttttttygggygtttygttgyggttagatgtgggyggatgtggaggtygggttatggygaggagggygggygtttagaggggaagagattttttttttttttygggygtagggtttttttgtaggaggttgtatttgggtagttaaataaagttttttgttatygtygtygygygttttgygtttgtaagggttaaayggtagygtaygyggttggtaggtaggatttyggtttgtgggtttaagagtygaggggygtagggygaatatgygagttttatggtattagygagaggttattaatttttatttatygagggtatttttgtagttaatatttttattayg

SEQ ID NO: 9291 - DNA, 1484 bp, synthetic construct
  misc_feature 1..1484: note = Description of Artificial Sequence: Synthetic polynucleotide
  source 1..1484: mol_type = other DNA
ygtygttattaaygagttattttaattgagttagtatygtygtttattygtyggttygtyggaatygygtttattttttgtaatttygttyggatyggtatttygttttttyggttyggttttttttttttygtygggtgtaaagttaaagatttagtaaggygaygtgaatttttgtatgtagggtatataygtygttttyggtttygggagtgygggggttygyggygyggagggaggttgggygttygggttttygggttaaggtygtygygygtgtttatttatgtttyggyggtttyggtttygttggtttyggygttygtttagatttyggttttygtygttygttygagtttttaaaggtgttgttgyggtaattttatggygatgagtatttgttaaayggygagtygygagttggtygttttagttyggggggygtyggggttttygggygygyggaggyggyggygagyggygggygtttyggtyggtttygygtttttygttygattttgtygttttygtygygttatygatttatggagagagatattaagggggaaaatggygttttyggagttygaggagttttggagtaattatatttatatatataygttygtaygtatatatattygtatatattggtatataggygygyggygagttttgttaattttagtaggagttaaaaaaaattttatatatatatatatatatatatatatatatatattttygttttttygattaatgttttttttttttttgtttttttttttttttttttttttttttttgtttttttttaaaggatgggttggagygttaaaaaatgttggtgggtttgggttygtaggaggyggygygyggagggygagggygtttttgttgagttgtgtagttyggttygttgagttyggyggttttgttygttygttygttygttygyggtygttagtgttgtygtygtygtygtygtygtygtygttgttgttttatggtygygttygtttygygttttygtygygtttygtygtygttygttygygttttyggtgagygttggagtggggtygggttygtgtgtttgtttttygygtttttttygaatttyggatttttagtgaaaggaagggggagggygygggygyggaagggaggtggatyggagyggtagygyggtttagtygaaygggtatygatygttatttygygatttttttygtagggggygtyggygtttaagttgttygttyggagggtttagagtygttttttagattagagtygggggaggygtagttagtagygagttttgagygatttttttttttattygtttttttgttttagtgaatttttgttagttgaagggagyggggtttttgttyggggaaaaggaaaatagttygtggtttgggatttgggattttttgtygtttttagygtttttttygtttttyggygtttttgyg

SEQ ID NO: 9292 - DNA, 34 bp, synthetic construct
  misc_feature 1..34: note = Description of Artificial Sequence: Synthetic oligonucleotide
  source 1..34: mol_type = other DNA
yggggaggyggggggagygggagygggygaygyg

SEQ ID NO: 9293 - DNA, 14 bp, synthetic construct
  misc_feature 1..14: note = Description of Artificial Sequence: Synthetic oligonucleotide
  source 1..14: mol_type = other DNA
ygagtttttygtyg

SEQ ID NO: 9294 - DNA, 37 bp, synthetic construct
  misc_feature 1..37: note = Description of Artificial Sequence: Synthetic oligonucleotide
  source 1..37: mol_type = other DNA
yggttgttttttagtatygtggagtgggygygttayg

SEQ ID NO: 9295 - DNA, 34 bp, synthetic construct
  misc_feature 1..34: note = Description of Artificial Sequence: Synthetic oligonucleotide
  source 1..34: mol_type = other DNA
yggtagttaaagataaagaagyggataaatttyg

SEQ ID NO: 9296 - DNA, 538 bp, synthetic construct
  misc_feature 1..538: note = Description of Artificial Sequence: Synthetic polynucleotide
  source 1..538: mol_type = other DNA
yggttttttttagtttggggttygggtttttttttyggttgagtagtygggttygygattttttttatttttttyggttygggttttyggttttttttagaggtgaggtaggggttatttagaatttygyggttttttattttttttaagattattttygttttagttttttgttttttattttgtttttttaatttgggttttygattattgtttygattttattttgtygttagggattattagtygtttttttygygtttaggggaygygtagyggtagtttttgttgatggtaagggtttgygtattyggaaattttagggtttggggygtggtgyggtttttgyggttagygggtttygtttgagttttagggttttttygttgttggattaygttttttataggttttagggtygyggatgaatttygatttttgttttttttttyggtgttgtggttattgagttaagtttggygagtygaggtgattygggtygggttgygggaggagttygyggtgaggtggtttygyg

SEQ ID NO: 9297 - DNA, 109 bp, synthetic construct
  misc_feature 1..109: note = Description of Artificial Sequence: Synthetic polynucleotide
  source 1..109: mol_type = other DNA
ygyggttttttttttaygygaggtttttaaatttygtaaattaayggaaatgaagttaygtttygggagyggtgtttttgggaaatgtagtttagygtttyggaygtyg

SEQ ID NO: 9298 - DNA, 901 bp, synthetic construct
  misc_feature 1..901: note = Description of Artificial Sequence: Synthetic polynucleotide
  source 1..901: mol_type = other DNA
ygygttagtagttygyggttaaggttatttgtttttagggtttyggtatttttgyggggaggyggtaggtagaggaygygygygtagtygygtaggagtttttaggygagtgggggaagtatygtaagagaygyggatttggagygyggttattgygttatygtagygatttgggttatttaagtyggygggattgagaggtygttgygygtgggtaggggtttagattgygttygyggtgtttgtttyggtttttatttyggaaygattgtagttttgyggggttygtygtttatatygygttgaggaygttgtttaagttaggygttygttttygttygyggttttagtygttygtagygygtygtttttagaygygygtggttgttggygagggttgagatygygttttygtyggttagtttttagtagtagygtattttttttgtttygygttttygtttyggattygygtygtygtagtttygyggtgatgagtttygagtyggtttygtygtygtygtygttttagtgttttggttgygatygygyggagtygatygtttagygtttagaggagggygaygaggtttttygygygggygattaygagatggtagtygagttttttygttttatgttagtygggttggygtagtyggatygyggtttgtgtttgaggttgggggaygygttggttygygtyggtygttttttygaagttttgggygygtttygyggygtygygyggttyggggygttgyggtyggaggagttggaagagttggygggyggtttggtgygygtygtgggtttgygygatyggtygttgttygyggagaattygggyggygagttygaggygttyggygagggagggtyggtttyggagtttygygyg

SEQ ID NO: 9299 - DNA, 15 bp, synthetic construct
  misc_feature 1..15: note = Description of Artificial Sequence: Synthetic oligonucleotide
  source 1..15: mol_type = other DNA
ygttygygtygttyg

SEQ ID NO: 9300 - DNA, 383 bp, synthetic construct
  misc_feature 1..383: note = Description of Artificial Sequence: Synthetic polynucleotide
  source 1..383: mol_type = other DNA
ygtygggggygyggygygggygtagaggyggyggggatgtygggyggttygggttgyggygtagtttttttttttgtagttttttttttygttttygtygtygtygtygyggtygyggtttttttttggtttttatttttgttgttttygggtatagattttttgtygtygtygygygtyggtttttttgtygtygtttgttagttttattttttgttatttttttgtttttttttygttttttttttgtygttygtygygtttttttttatttygygttttttttttttttttttttttttttttttttygygggtttttygtttttttygtgygtttyggtygtttttygtttttagygygtygttttyggggatgtttyg

SEQ ID NO: 9301 - skipped

SEQ ID NO: 9302 - DNA, 624 bp, synthetic construct
  misc_feature 1..624: note = Description of Artificial Sequence: Synthetic polynucleotide
  source 1..624: mol_type = other DNA
ygtttgtaggggtagttyggagttygggtggggatagtagygtagtttttggtygtagygyggggtgtagaygtygtaygtttygttttttagtygggygtatatygagtagtagtygtagttyggttttyggaygagtttygygtatggtatgygggygttttyggttattgyggttatygyggygggyggygtaatyggygggggttygtaggyggttaggygttygggtgtgtagggygggtagyggaatagtattttygygygygtttygtygtygtygttattygygtttagtagtagtagtagtagyggtagtagyggyggyggyggtagyggtagygyggggtagtttattttyggtagtatgttggyggtyggtagygyggygtggygggygagygagygagygggygggygggtaggtggtayggttttgygagygygggagtygtttttttygttttttttttttttttygtygtygtagtygggttttaaagggtyggttttttttygttttttgttttttttttttttttttttggagattatttttttttttttygatattttttygygtyggtaagtgagtgygygtaygttygttygtttattttygyg

SEQ ID NO: 9303 - DNA, 94 bp, synthetic construct
  misc_feature 1..94: note = Description of Artificial Sequence: Synthetic oligonucleotide
  source 1..94: mol_type = other DNA
yggtyggttttttyggttgatttygttttggttgatttygygtatattttttttttagygttgtaaggatygtttgaattygttggttatttyg

SEQ ID NO: 9304 - DNA, 63 bp, synthetic construct
  misc_feature 1..63: note = Description of Artificial Sequence: Synthetic oligonucleotide
  source 1..63: mol_type = other DNA
ygyggyggttgygggattygygtggygtyggygayggttyggtttagttttgygttttgtayg

SEQ ID NO: 9305 - DNA, 41 bp, synthetic construct
  misc_feature 1..41: note = Description of Artificial Sequence: Synthetic oligonucleotide
  source 1..41: mol_type = other DNA
ygatggyggataagagggyggggattttagaagtygyggyg

SEQ ID NO: 9306 - DNA, 1041 bp, synthetic construct
  misc_feature 1..1041: note = Description of Artificial Sequence: Synthetic polynucleotide
  source 1..1041: mol_type = other DNA
ygtttaaataaaaatagggtyggttttttagtagtggagagttattyggagtatygtttygggtyggtttyggtttygaggtttygggggtttaggatttygtgygtgtggyggggaagaggaatttagagtttttgggttgttgtttttttygtygtttttattgtgaatattgtgyggtggggtgaaygyggggagyggyggggttagtggagtygaattttagggttttgygattgtattygttaggaggggttttygtttggtttgagaaaggttttttgaggttaagagttgggtttgaatataattttyggagtttygagttygttttttttaatatataaataygygtagatttttagaaataggaaygtaygatatatayggttagaagtygygaggatatatagagygtygtttattgggygggggtygtttgggaataaagggtttaggaggygttgtttyggygtttattttgagtttttttgggggtgataygggatgggggtggggtgtaaagggaattgagggaggagagtgygygaggaggggaaagyggtgatttggtttagaggtggggygygtattttaggygagygtgygtgggtygggatttgtagggtaygggggtgggtttaggttggtygttttatttygttttagygtttygttaggttttygtygtttyggggtygttygggtygttagttagttgaygyggggggygggggagttgttaggygygtttygttttgygtygttgggtygyggaggtygtgtagttattggttygygtatygggtygttygggttttygtattttagtgatattaggaggygataaaaggttgyggygtygtyggatttagtatagttgtatygtygagttgygagyggttgygagygagagagygtaagagtaagagagttagagagygagtaaygggtattygttttaygtttttttttagttttatygygygtttygtttgtttttttatttygttygattttattyggttyggtttttgygyg

SEQ ID NO: 9307 - DNA, 23 bp, synthetic construct
  misc_feature 1..23: note = Description of Artificial Sequence: Synthetic oligonucleotide
  source 1..23: mol_type = other DNA
ygttatggttygagtygaaggyg

SEQ ID NO: 9308 - DNA, 515 bp, synthetic construct
  misc_feature 1..515: note = Description of Artificial Sequence: Synthetic polynucleotide
  source 1..515: mol_type = other DNA
ygatttaygatygggtygattttyggttagaaagaattatgtttyggtygttygggtygygggttygyggtgtatttttgtaggtttttattttgtttyggtagaggtttgtaagaattttgtgggtgtttttyggagygggtagaggaggagtttagygtygaggtttaggygygtttygttttygttttttttygtgtttttttttygttgttttttttttaaaggtygagatttggaygttgttyggtggtttyggygggggttttgtttttggtygttgtttttttgaattttaggtgagaagaataaaaygttttgaygttgttyggttttyggtttttggagaggaygggtygtttttgtygagagaattgtgyggaattaggaagygttggtgttttttygtttttaygggattaagygaaattyggttttaaaygaagtaaagtyggttgttttttggagtatttttgttatagtatttttattttgggttagggtattttgttgyg

SEQ ID NO: 9309 - DNA, 1017 bp, synthetic construct
  misc_feature 1..1017: note = Description of Artificial Sequence: Synthetic polynucleotide
  source 1..1017: mol_type = other DNA
yggttagggatttatttygaggtttagttggtgggggtgttggggtgygygyggattyggtatttayggyggyggyggyggtagtagtagtaggaggaggagaaagaygaggaggaggaggaggattagttgagyggygttttttttttagttygtagygygtattggttttttggggtattttygggagagtattaagatyggagattaggyggygatataggtaatygttgttgtayggggttgggtttagtyggtttttagaggttagggtagggggaggtaggattgggaaggagggtyggagaagtggggtgtagagggyggggtagygagyggttaggttyggaggaaggygttttaggygtttagggatgtygtygttygggttgaygtygtyggttttttttttygttaggygggygtttgtagtygygggygtaygggtttygtttygtttatyggttygttgtyggygttygyggtgygtttygttttgtgtttttygtagtyggygtgtatttggtgtaagtaaaggyggttagttgatgggtygygygyggattggttgtttygtygtttttttttttttygttygatttttttygyggtttttygttttygttttyggygyggtttygtgttgggtattatttgtggatygtttaataaaggygtagygyggyggggttygggtggtygggtygyggtygtygttttttgtttaggggayggtaggttgyggttgggtagggaggygaagygtattgtyggtttttagtaaaagatagattaaaagaaaatataygttygtgttaggaggttagttaggtataatggggttttatttttttgyggygtagaattygggttygggggttgagaattagatatagttyggtttggggttgtgggagttaagtttyggggtgaaattygattttgygttttaaaatatagggygygttttygggttgtgtgtgygygttygggggygtttttygtagatttggttyg

SEQ ID NO: 9310 - skipped

SEQ ID NO: 9311 - DNA, 54 bp, synthetic construct
  misc_feature 1..54: note = Description of Artificial Sequence: Synthetic oligonucleotide
  source 1..54: mol_type = other DNA
ygttttttttttyggtttttttygygtggtttgtttttygttygtttgygttyg

SEQ ID NO: 9312 - DNA, 10 bp, synthetic construct
  misc_feature 1..10: note = Description of Artificial Sequence: Synthetic oligonucleotide
  source 1..10: mol_type = other DNA
ygataaygyg

SEQ ID NO: 9313 - DNA, 26 bp, synthetic construct
  misc_feature 1..26: note = Description of Artificial Sequence: Synthetic oligonucleotide
  source 1..26: mol_type = other DNA
ygyggtygtttggtygaatttgttyg

SEQ ID NO: 9314 - DNA, 934 bp, synthetic construct
  misc_feature 1..934: note = Description of Artificial Sequence: Synthetic polynucleotide
  source 1..934: mol_type = other DNA
ygyggaggagggattygggttgygygttttygggtygaggaattaggaygygttyggagtttygtaygyggttaagttyggggygtttttttttttyggtygggygaatttaaggggygtagttttttgttttgatagagttggtyggyggaggygtgtagagyggygagtyggygagttaggttgagaaattygagtygggaataaagaggggtyggattgagtgtgtgtgtyggttygagtttygggtagaggtatttgggttygaggttttygttgtgatttttygagatttygtagtgttttttattgyggagttttygygtttgtyggtaaaaattttatttttggtaaatttttttttttttttttttttttttyggtttttattttttgttttttttttttttttagtagattaaatgagtttygagaagaaaaatygaagygaaagggaagaaaataagaagatttaaaayggatatttttagygtgggtggttttttttttttttttttttttttttattttttaggaagtggaygtttygttattttttgatttttgtatttttttttggggtaaayggggtttttttgtttagatttttttttttttttyggaaaataaattattaagtyggtattyggggtaattatagtggagagggttttygyggagaygygtygtyggatttttttttgtattttggggaggygtgttttttttagaatyggygtttttygygygtaaatttyggygaygyggggtygyggggtggtygtyggggtagtttygtttagygygygtygygtagaygttttyggagtygttagttatygtagttttygtygtttagtgtttttyggtttygggggygggygtttgygtyggttttygygaagygggaaagygyggyggtygtygggattyg

SEQ ID NO: 9315 - DNA, 279 bp, synthetic construct
  misc_feature 1..279: note = Description of Artificial Sequence: Synthetic polynucleotide
  source 1..279: mol_type = other DNA
yggaggtttgagagtagggttggaggggyggaggatyggggagattygttygyggygttttyggtyggttttgagtaggygtygtggtagygttygygttttttgttygtttttygtygtygttaggaygtaggttygygttagggttggyggtagggttygtagttgtyggtttggygtttttatttygygtagtyggtttygtttagttttttygygtttgattggtyggattttgtttttggyggaggtaattgttygyggattttttatttygyg

SEQ ID NO: 9316-9317 - skipped (2 entries)

SEQ ID NO: 9318 - DNA, 11 bp, synthetic construct
  misc_feature 1..11: note = Description of Artificial Sequence: Synthetic oligonucleotide
  source 1..11: mol_type = other DNA
ygatgygttyg

SEQ ID NO: 9319 - DNA, 30 bp, synthetic construct
  misc_feature 1..30: note = Description of Artificial Sequence: Synthetic oligonucleotide
  source 1..30: mol_type = other DNA
yggttttttgagtagttgagattataagyg

SEQ ID NO: 9320 - DNA, 10 bp, synthetic construct
  misc_feature 1..10: note = Description of Artificial Sequence: Synthetic oligonucleotide
  source 1..10: mol_type = other DNA
ygygggagyg

SEQ ID NO: 9321 - DNA, 56 bp, synthetic construct
  misc_feature 1..56: note = Description of Artificial Sequence: Synthetic oligonucleotide
  source 1..56: mol_type = other DNA
ygtttataaatyggtttygttttttygtgttygggttygtygtttattagaygtyg

SEQ ID NO: 9322 - DNA, 98 bp, synthetic construct
  misc_feature 1..98: note = Description of Artificial Sequence: Synthetic oligonucleotide
  source 1..98: mol_type = other DNA
ygtgatttygggtygttttttataygtgatygtttttttttttttttttattttygtattygttttttttttagttttttgtttygttttgttggtyg

SEQ ID NO: 9323 - DNA, 33 bp, synthetic construct
  misc_feature 1..33: note = Description of Artificial Sequence: Synthetic oligonucleotide
  source 1..33: mol_type = other DNA
ygayggyggyggtygtttttgygygttttttyg

SEQ ID NO: 9324 - DNA, 48 bp, synthetic construct
  misc_feature 1..48: note = Description of Artificial Sequence: Synthetic oligonucleotide
  source 1..48: mol_type = other DNA
ygaaggaattggggtggggggtgygtgtgtggtggagggggtgggayg

SEQ ID NO: 9325 - DNA, 93 bp, synthetic construct
  misc_feature 1..93: note = Description of Artificial Sequence: Synthetic oligonucleotide
  source 1..93: mol_type = other DNA
ygagggtagyggtggggttgggtygggggagtaggggtygygtygggtagygtygygtgttggagyggaggygggtgyggtyggggtaggtyg

SEQ ID NO: 9326-9332 - skipped (7 entries)

SEQ ID NO: 9333 - DNA, 42 bp, synthetic construct
  misc_feature 1..42: note = Description of Artificial Sequence: Synthetic oligonucleotide
  source 1..42: mol_type = other DNA
ygttgygygttygttttttggtygggygygygtttygtttyg

SEQ ID NO: 9334-9343 - skipped (10 entries)

SEQ ID NO: 9344 - DNA, 40 bp, synthetic construct
  misc_feature 1..40: note = Description of Artificial Sequence: Synthetic oligonucleotide
  source 1..40: mol_type = other DNA
ygygtyggagtgyggttttgtttttagygttagtgygtyg

SEQ ID NO: 9345-9365 - skipped (21 entries)

SEQ ID NO: 9366 - DNA, 42 bp, synthetic construct
  misc_feature 1..42: note = Description of Artificial Sequence: Synthetic oligonucleotide
  source 1..42: mol_type = other DNA
yggagatygtttygtttttttagatygaaygtygttygttyg

SEQ ID NO: 9367-9376 - skipped (10 entries)

SEQ ID NO: 9377 - DNA, 20 bp, synthetic construct
  misc_feature 1..20: note = Description of Artificial Sequence: Synthetic oligonucleotide
  source 1..20: mol_type = other DNA
cgttcgtcgcgcgtattacg

SEQ ID NO: 9378 - DNA, 116 bp, synthetic construct
  misc_feature 1..116: note = Description of Artificial Sequence: Synthetic polynucleotide
  source 1..116: mol_type = other DNA
cgagagcggggcggggttgggggcgggcggggagttgtttcgggtggtttcgtttttagtacggaggatttttttcgcgaggcgtcgtcgttttggagtttcgtttacggcgttcg

SEQ ID NO: 9379-9388 - skipped (10 entries)

SEQ ID NO: 9389 - DNA, 44 bp, synthetic construct
  misc_feature 1..44: note = Description of Artificial Sequence: Synthetic oligonucleotide
  source 1..44: mol_type = other DNA
cggggggcgcgtgaggggtgcgagcggggttcggggggcgcgcg

SEQ ID NO: 9390-9399 - skipped (10 entries)

SEQ ID NO: 9400 - DNA, 34 bp, synthetic construct
  misc_feature 1..34: note = Description of Artificial Sequence: Synthetic oligonucleotide
  source 1..34: mol_type = other DNA
cgtagttcgattttttagagtcgtcgagtagacg

SEQ ID NO: 9401-9410 - skipped (10 entries)

SEQ ID NO: 9411 - DNA, 211 bp, synthetic construct
  misc_feature 1..211: note = Description of Artificial Sequence: Synthetic polynucleotide
  source 1..211: mol_type = other DNA
cgatttcggcgggtgtatcgtcgagtttttcgggaagtgtagttttagcgcgagcgggacgttgggaaatgtagttttgcgcgtttacgttttcgatcgggtcgtgttcgtcgcggttttgcgaggttcgaggggtaagggagcgtgtagcgggggcgggattacgaggcggcggggttgggggcggtttttgtgtttgcgtcggggatcg

SEQ ID NO: 9412-9421 - skipped (10 entries)

SEQ ID NO: 9422 - DNA, 95 bp, synthetic construct
  misc_feature 1..95: note = Description of Artificial Sequence: Synthetic oligonucleotide
  source 1..95: mol_type = other DNA
cggaagtttaagtttaattaattgagttcgaggcgggagggaagggttttgcgcgtcgtggttcgtttcgtttttttttcgcgttttttttttcg

SEQ ID NO: 9423-9432 - skipped (10 entries)

SEQ ID NO: 9433 - DNA, 264 bp, synthetic construct
  misc_feature 1..264: note = Description of Artificial Sequence: Synthetic polynucleotide
  source 1..264: mol_type = other DNA
cggcggcgtggatcggcgacgggtggtatagttggtatacgcggtttttttataggtggcggtagacggcggtcgggacggcgagtaatagggcggttagttagatcgttagtagtaggcggcgggttagggtcgggttgcgtagtcgaggcgttaggaaggggcgggtgattgcgaggtagcgttgtaggttgagtaggtcggtgagtagtacgttggcgtatatgttgagcgcgtatacgtagtatatcgttttgtagttcg

SEQ ID NO: 9434-9443 - skipped (10 entries)

SEQ ID NO: 9444 - DNA, 59 bp, synthetic construct
  misc_feature 1..59: note = Description of Artificial Sequence: Synthetic oligonucleotide
  source 1..59: mol_type = other DNA
cgcgcgcgggcgtttcggcgtgtcggattatgtcgtcggtagtttcgggacggggaacg

SEQ ID NO: 9445-9465 - skipped (21 entries)

SEQ ID NO: 9466 - DNA, 324 bp, synthetic construct
  misc_feature 1..324: note = Description of Artificial Sequence: Synthetic polynucleotide
  source 1..324: mol_type = other DNA
cgttagatagttagcggtcggcggtaggtcgggttatgagcggtaggggtcgggtcgggtttcgttgattttggtttcgcgcggtagtttttttagttttcgtttcggtttttcggtatgagagttcgttcgggttcggggttgcggttgttttagattcgtcgtacgttggcgcgtttcgggttcgcggagtcgcggtgttgatatttgcgtcgtattgcgtcgttcgttcgttcgttgtgtgtttcgggggcgcggttatggaggtggtgggtgatttcgagtatagtaagagggatttcgtgggatacggggttttcgtcg

SEQ ID NO: 9467-9473 - skipped (7 entries)

SEQ ID NO: 9474 - DNA, 102 bp, synthetic construct
  misc_feature 1..102: note = Description of Artificial Sequence: Synthetic polynucleotide
  source 1..102: mol_type = other DNA
cgttagttttaggtcgagtttcgagcgtttgtaggaatacgtttttttattcggcgcgggacgtagagttgcgagagaattttgtttagcgcggatttaacg

SEQ ID NO: 9475 - DNA, 24 bp, synthetic construct
  misc_feature 1..24: note = Description of Artificial Sequence: Synthetic oligonucleotide
  source 1..24: mol_type = other DNA
cgtgggcggtagcgagtcgttgcg

SEQ ID NO: 9476 - DNA, 521 bp, synthetic construct
  misc_feature 1..521: note = Description of Artificial Sequence: Synthetic polynucleotide
  source 1..521: mol_type = other DNA
cgtatcggtttttttgtttcgtattggttgtttcgttcgtttgttaaggttaggtttggggggttggggttcgagtggtcgttgggggatagttttgggtatacgatcggagcgtttttttttttttcgtttggttcgcgtttaggggacggcgagagacgcggttttagttttttttttcgggcgtttcgttgcggttagatgtgggcggatgtggaggtcgggttatggcgaggagggcgggcgtttagaggggaagagattttttttttttttcgggcgtagggtttttttgtaggaggttgtatttgggtagttaaataaagttttttgttatcgtcgtcgcgcgttttgcgtttgtaagggttaaacggtagcgtacgcggttggtaggtaggatttcggtttgtgggtttaagagtcgaggggcgtagggcgaatatgcgagttttatggtattagcgagaggttattaatttttatttatcgagggtatttttgtagttaatatttttattacg

SEQ ID NO: 9477 - DNA, 1484 bp, synthetic construct
  misc_feature 1..1484: note = Description of Artificial Sequence: Synthetic polynucleotide
  source 1..1484: mol_type = other DNA
cgtcgttattaacgagttattttaattgagttagtatcgtcgtttattcgtcggttcgtcggaatcgcgtttattttttgtaatttcgttcggatcggtatttcgttttttcggttcggttttttttttttcgtcgggtgtaaagttaaagatttagtaaggcgacgtgaatttttgtatgtagggtatatacgtcgttttcggtttcgggagtgcgggggttcgcggcgcggagggaggttgggcgttcgggttttcgggttaaggtcgtcgcgcgtgtttatttatgtttcggcggtttcggtttcgttggtttcggcgttcgtttagatttcggttttcgtcgttcgttcgagtttttaaaggtgttgttgcggtaattttatggcgatgagtatttgttaaacggcgagtcgcgagttggtcgttttagttcggggggcgtcggggttttcgggcgcgcggaggcggcggcgagcggcgggcgtttcggtcggtttcgcgtttttcgttcgattttgtcgttttcgtcgcgttatcgatttatggagagagatattaagggggaaaatggcgttttcggagttcgaggagttttggagtaattatatttatatatatacgttcgtacgtatatatattcgtatatattggtatataggcgcgcggcgagttttgttaattttagtaggagttaaaaaaaattttatatatatatatatatatatatatatatatatattttcgttttttcgattaatgttttttttttttttgtttttttttttttttttttttttttttttgtttttttttaaaggatgggttggagcgttaaaaaatgttggtgggtttgggttcgtaggaggcggcgcgcggagggcgagggcgtttttgttgagttgtgtagttcggttcgttgagttcggcggttttgttcgttcgttcgttcgttcgcggtcgttagtgttgtcgtcgtcgtcgtcgtcgtcgtcgttgttgttttatggtcgcgttcgtttcgcgttttcgtcgcgtttcgtcgtcgttcgttcgcgttttcggtgagcgttggagtggggtcgggttcgtgtgtttgtttttcgcgtttttttcgaatttcggatttttagtgaaaggaagggggagggcgcgggcgcggaagggaggtggatcggagcggtagcgcggtttagtcgaacgggtatcgatcgttatttcgcgatttttttcgtagggggcgtcggcgtttaagttgttcgttcggagggtttagagtcgttttttagattagagtcgggggaggcgtagttagtagcgagttttgagcgatttttttttttattcgtttttttgttttagtgaatttttgttagttgaagggagcggggtttttgttcggggaaaaggaaaatagttcgtggtttgggatttgggattttttgtcgtttttagcgtttttttcgtttttcggcgtttttgcg

SEQ ID NO: 9478 - DNA, 34 bp, synthetic construct; identical to SEQ ID NO: 8734
  misc_feature 1..34: note = Description of Artificial Sequence: Synthetic oligonucleotide
  source 1..34: mol_type = other DNA

SEQ ID NO: 9479 - DNA, 14 bp, synthetic construct
  misc_feature 1..14: note = Description of Artificial Sequence: Synthetic oligonucleotide
  source 1..14: mol_type = other DNA
cgagtttttcgtcg

SEQ ID NO: 9480 - DNA, 37 bp, synthetic construct
  misc_feature 1..37: note = Description of Artificial Sequence: Synthetic oligonucleotide
  source 1..37: mol_type = other DNA
cggttgttttttagtatcgtggagtgggcgcgttacg

SEQ ID NO: 9481 - DNA, 34 bp, synthetic construct
  misc_feature 1..34: note = Description of Artificial Sequence: Synthetic oligonucleotide
  source 1..34: mol_type = other DNA
cggtagttaaagataaagaagcggataaatttcg

SEQ ID NO: 9482 - DNA, 538 bp, synthetic construct
  misc_feature 1..538: note = Description of Artificial Sequence: Synthetic polynucleotide
  source 1..538: mol_type = other DNA
cggttttttttagtttggggttcgggtttttttttcggttgagtagtcgggttcgcgattttttttatttttttcggttcgggttttcggttttttttagaggtgaggtaggggttatttagaatttcgcggttttttattttttttaagattattttcgttttagttttttgttttttattttgtttttttaatttgggttttcgattattgtttcgattttattttgtcgttagggattattagtcgtttttttcgcgtttaggggacgcgtagcggtagtttttgttgatggtaagggtttgcgtattcggaaattttagggtttggggcgtggtgcggtttttgcggttagcgggtttcgtttgagttttagggttttttcgttgttggattacgttttttataggttttagggtcgcggatgaatttcgatttttgttttttttttcggtgttgtggttattgagttaagtttggcgagtcgaggtgattcgggtcgggttgcgggaggagttcgcggtgaggtggtttcgcg

SEQ ID NO: 9483 - DNA, 109 bp, synthetic construct
  misc_feature 1..109: note = Description of Artificial Sequence: Synthetic polynucleotide
  source 1..109: mol_type = other DNA
cgcggttttttttttacgcgaggtttttaaatttcgtaaattaacggaaatgaagttacgtttcgggagcggtgtttttgggaaatgtagtttagcgtttcggacgtcg

SEQ ID NO: 9484 - DNA, 901 bp, synthetic construct
  misc_feature 1..901: note = Description of Artificial Sequence: Synthetic polynucleotide
  source 1..901: mol_type = other DNA
cgcgttagtagttcgcggttaaggttatttgtttttagggtttcggtatttttgcggggaggcggtaggtagaggacgcgcgcgtagtcgcgtaggagtttttaggcgagtgggggaagtatcgtaagagacgcggatttggagcgcggttattgcgttatcgtagcgatttgggttatttaagtcggcgggattgagaggtcgttgcgcgtgggtaggggtttagattgcgttcgcggtgtttgtttcggtttttatttcggaacgattgtagttttgcggggttcgtcgtttatatcgcgttgaggacgttgtttaagttaggcgttcgttttcgttcgcggttttagtcgttcgtagcgcgtcgtttttagacgcgcgtggttgttggcgagggttgagatcgcgttttcgtcggttagtttttagtagtagcgtattttttttgtttcgcgttttcgtttcggattcgcgtcgtcgtagtttcgcggtgatgagtttcgagtcggtttcgtcgtcgtcgtcgttttagtgttttggttgcgatcgcgcggagtcgatcgtttagcgtttagaggagggcgacgaggtttttcgcgcgggcgattacgagatggtagtcgagttttttcgttttatgttagtcgggttggcgtagtcggatcgcggtttgtgtttgaggttgggggacgcgttggttcgcgtcggtcgttttttcgaagttttgggcgcgtttcgcggcgtcgcgcggttcggggcgttgcggtcggaggagttggaagagttggcgggcggtttggtgcgcgtcgtgggtttgcgcgatcggtcgttgttcgcggagaattcgggcggcgagttcgaggcgttcggcgagggagggtcggtttcggagtttcgcgcg

SEQ ID NO: 9485 - DNA, 15 bp, synthetic construct
  misc_feature 1..15: note = Description of Artificial Sequence: Synthetic oligonucleotide
  source 1..15: mol_type = other DNA
cgttcgcgtcgttcg

SEQ ID NO: 9486 - DNA, 383 bp, synthetic construct
  misc_feature 1..383: note = Description of Artificial Sequence: Synthetic polynucleotide
  source 1..383: mol_type = other DNA
cgtcgggggcgcggcgcgggcgtagaggcggcggggatgtcgggcggttcgggttgcggcgtagtttttttttttgtagttttttttttcgttttcgtcgtcgtcgtcgcggtcgcggtttttttttggtttttatttttgttgttttcgggtatagattttttgtcgtcgtcgcgcgtcggtttttttgtcgtcgtttgttagttttattttttgttatttttttgtttttttttcgttttttttttgtcgttcgtcgcgtttttttttatttcgcgttttttttttttttttttttttttttttttttcgcgggtttttcgtttttttcgtgcgtttcggtcgtttttcgtttttagcgcgtcgttttcggggatgtttcg

SEQ ID NO: 9487 - skipped

SEQ ID NO: 9488 - DNA, 624 bp, synthetic construct
  misc_feature 1..624: note = Description of Artificial Sequence: Synthetic polynucleotide
  source 1..624: mol_type = other DNA
cgtttgtaggggtagttcggagttcgggtggggatagtagcgtagtttttggtcgtagcgcggggtgtagacgtcgtacgtttcgttttttagtcgggcgtatatcgagtagtagtcgtagttcggttttcggacgagtttcgcgtatggtatgcgggcgttttcggttattgcggttatcgcggcgggcggcgtaatcggcgggggttcgtaggcggttaggcgttcgggtgtgtagggcgggtagcggaatagtattttcgcgcgcgtttcgtcgtcgtcgttattcgcgtttagtagtagtagtagtagcggtagtagcggcggcggcggtagcggtagcgcggggtagtttattttcggtagtatgttggcggtcggtagcgcggcgtggcgggcgagcgagcgagcgggcgggcgggtaggtggtacggttttgcgagcgcgggagtcgtttttttcgttttttttttttttttcgtcgtcgtagtcgggttttaaagggtcggttttttttcgttttttgttttttttttttttttttttggagattatttttttttttttcgatattttttcgcgtcggtaagtgagtgcgcgtacgttcgttcgtttattttcgcg

SEQ ID NO: 9489 - DNA, 94 bp, synthetic construct
  misc_feature 1..94: note = Description of Artificial Sequence: Synthetic oligonucleotide
  source 1..94: mol_type = other DNA
cggtcggttttttcggttgatttcgttttggttgatttcgcgtatattttttttttagcgttgtaaggatcgtttgaattcgttggttatttcg

SEQ ID NO: 9490 - DNA, 63 bp, synthetic construct
  misc_feature 1..63: note = Description of Artificial Sequence: Synthetic oligonucleotide
  source 1..63: mol_type = other DNA
cgcggcggttgcgggattcgcgtggcgtcggcgacggttcggtttagttttgcgttttgtacg

SEQ ID NO: 9491 - DNA, 41 bp, synthetic construct
  misc_feature 1..41: note = Description of Artificial Sequence: Synthetic oligonucleotide
  source 1..41: mol_type = other DNA
cgatggcggataagagggcggggattttagaagtcgcggcg

SEQ ID NO: 9492 - DNA, 1041 bp, synthetic construct
  misc_feature 1..1041: note = Description of Artificial Sequence: Synthetic polynucleotide
  source 1..1041: mol_type = other DNA
cgtttaaataaaaatagggtcggttttttagtagtggagagttattcggagtatcgtttcgggtcggtttcggtttcgaggtttcgggggtttaggatttcgtgcgtgtggcggggaagaggaatttagagtttttgggttgttgtttttttcgtcgtttttattgtgaatattgtgcggtggggtgaacgcggggagcggcggggttagtggagtcgaattttagggttttgcgattgtattcgttaggaggggttttcgtttggtttgagaaaggttttttgaggttaagagttgggtttgaatataattttcggagtttcgagttcgttttttttaatatataaatacgcgtagatttttagaaataggaacgtacgatatatacggttagaagtcgcgaggatatatagagcgtcgtttattgggcgggggtcgtttgggaataaagggtttaggaggcgttgtttcggcgtttattttgagtttttttgggggtgatacgggatgggggtggggtgtaaagggaattgagggaggagagtgcgcgaggaggggaaagcggtgatttggtttagaggtggggcgcgtattttaggcgagcgtgcgtgggtcgggatttgtagggtacgggggtgggtttaggttggtcgttttatttcgttttagcgtttcgttaggttttcgtcgtttcggggtcgttcgggtcgttagttagttgacgcggggggcgggggagttgttaggcgcgtttcgttttgcgtcgttgggtcgcggaggtcgtgtagttattggttcgcgtatcgggtcgttcgggttttcgtattttagtgatattaggaggcgataaaaggttgcggcgtcgtcggatttagtatagttgtatcgtcgagttgcgagcggttgcgagcgagagagcgtaagagtaagagagttagagagcgagtaacgggtattcgttttacgtttttttttagttttatcgcgcgtttcgtttgtttttttatttcgttcgattttattcggttcggtttttgcgcg

SEQ ID NO: 9493 - DNA, 23 bp, synthetic construct
  misc_feature 1..23: note = Description of Artificial Sequence: Synthetic oligonucleotide
  source 1..23: mol_type = other DNA
cgttatggttcgagtcgaaggcg

SEQ ID NO: 9494 - DNA, 515 bp, synthetic construct
  misc_feature 1..515: note = Description of Artificial Sequence: Synthetic polynucleotide
  source 1..515: mol_type = other DNA
cgatttacgatcgggtcgattttcggttagaaagaattatgtttcggtcgttcgggtcgcgggttcgcggtgtatttttgtaggtttttattttgtttcggtagaggtttgtaagaattttgtgggtgtttttcggagcgggtagaggaggagtttagcgtcgaggtttaggcgcgtttcgttttcgttttttttcgtgtttttttttcgttgttttttttttaaaggtcgagatttggacgttgttcggtggtttcggcgggggttttgtttttggtcgttgtttttttgaattttaggtgagaagaataaaacgttttgacgttgttcggttttcggtttttggagaggacgggtcgtttttgtcgagagaattgtgcggaattaggaagcgttggtgttttttcgtttttacgggattaagcgaaattcggttttaaacgaagtaaagtcggttgttttttggagtatttttgttatagtatttttattttgggttagggtattttgttgcg

SEQ ID NO: 9495 - DNA, 1017 bp, synthetic construct
  misc_feature 1..1017: note = Description of Artificial Sequence: Synthetic polynucleotide
  source 1..1017: mol_type = other DNA
cggttagggatttatttcgaggtttagttggtgggggtgttggggtgcgcgcggattcggtatttacggcggcggcggcggtagtagtagtaggaggaggagaaagacgaggaggaggaggaggattagttgagcggcgttttttttttagttcgtagcgcgtattggttttttggggtattttcgggagagtattaagatcggagattaggcggcgatataggtaatcgttgttgtacggggttgggtttagtcggtttttagaggttagggtagggggaggtaggattgggaaggagggtcggagaagtggggtgtagagggcggggtagcgagcggttaggttcggaggaaggcgttttaggcgtttagggatgtcgtcgttcgggttgacgtcgtcggttttttttttcgttaggcgggcgtttgtagtcgcgggcgtacgggtttcgtttcgtttatcggttcgttgtcggcgttcgcggtgcgtttcgttttgtgtttttcgtagtcggcgtgtatttggtgtaagtaaaggcggttagttgatgggtcgcgcgcggattggttgtttcgtcgtttttttttttttcgttcgatttttttcgcggtttttcgttttcgttttcggcgcggtttcgtgttgggtattatttgtggatcgtttaataaaggcgtagcgcggcggggttcgggtggtcgggtcgcggtcgtcgttttttgtttaggggacggtaggttgcggttgggtagggaggcgaagcgtattgtcggtttttagtaaaagatagattaaaagaaaatatacgttcgtgttaggaggttagttaggtataatggggttttatttttttgcggcgtagaattcgggttcgggggttgagaattagatatagttcggtttggggttgtgggagttaagtttcggggtgaaattcgattttgcgttttaaaatatagggcgcgttttcgggttgtgtgtgcgcgttcgggggcgtttttcgtagatttggttcg

SEQ ID NO: 9496 - skipped

SEQ ID NO: 9497 - DNA, 54 bp, synthetic construct
  misc_feature 1..54: note = Description of Artificial Sequence: Synthetic oligonucleotide
  source 1..54: mol_type = other DNA
cgttttttttttcggtttttttcgcgtggtttgtttttcgttcgtttgcgttcg

SEQ ID NO: 9498 - DNA, 10 bp, synthetic construct
  misc_feature 1..10: note = Description of Artificial Sequence: Synthetic oligonucleotide
  source 1..10: mol_type = other DNA
cgataacgcg

SEQ ID NO: 9499 - DNA, 26 bp, synthetic construct
  misc_feature 1..26: note = Description of Artificial Sequence: Synthetic oligonucleotide
  source 1..26: mol_type = other DNA
cgcggtcgtttggtcgaatttgttcg

SEQ ID NO: 9500 - DNA, 934 bp, synthetic construct
  misc_feature 1..934: note = Description of Artificial Sequence: Synthetic polynucleotide
  source 1..934: mol_type = other DNA
cgcggaggagggattcgggttgcgcgttttcgggtcgaggaattaggacgcgttcggagtttcgtacgcggttaagttcggggcgtttttttttttcggtcgggcgaatttaaggggcgtagttttttgttttgatagagttggtcggcggaggcgtgtagagcggcgagtcggcgagttaggttgagaaattcgagtcgggaataaagaggggtcggattgagtgtgtgtgtcggttcgagtttcgggtagaggtatttgggttcgaggttttcgttgtgatttttcgagatttcgtagtgttttttattgcggagttttcgcgtttgtcggtaaaaattttatttttggtaaatttttttttttttttttttttttttcggtttttattttttgttttttttttttttttagtagattaaatgagtttcgagaagaaaaatcgaagcgaaagggaagaaaataagaagatttaaaacggatatttttagcgtgggtggttttttttttttttttttttttttttattttttaggaagtggacgtttcgttattttttgatttttgtatttttttttggggtaaacggggtttttttgtttagatttttttttttttttcggaaaataaattattaagtcggtattcggggtaattatagtggagagggttttcgcggagacgcgtcgtcggatttttttttgtattttggggaggcgtgttttttttagaatcggcgtttttcgcgcgtaaatttcggcgacgcggggtcgcggggtggtcgtcggggtagtttcgtttagcgcgcgtcgcgtagacgttttcggagtcgttagttatcgtagttttcgtcgtttagtgtttttcggtttcgggggcgggcgtttgcgtcggttttcgcgaagcgggaaagcgcggcggtcgtcgggattcg

SEQ ID NO: 9501 - DNA, 279 bp, synthetic construct
  misc_feature 1..279: note = Description of Artificial Sequence: Synthetic polynucleotide
  source 1..279: mol_type = other DNA
cggaggtttgagagtagggttggaggggcggaggatcggggagattcgttcgcggcgttttcggtcggttttgagtaggcgtcgtggtagcgttcgcgttttttgttcgtttttcgtcgtcgttaggacgtaggttcgcgttagggttggcggtagggttcgtagttgtcggtttggcgtttttatttcgcgtagtcggtttcgtttagttttttcgcgtttgattggtcggattttgtttttggcggaggtaattgttcgcggattttttatttcgcg

SEQ ID NO: 9502-9503 - skipped (2 entries)

SEQ ID NO: 9504 - DNA, 11 bp, synthetic construct
  misc_feature 1..11: note = Description of Artificial Sequence: Synthetic oligonucleotide
  source 1..11: mol_type = other DNA
cgatgcgttcg

SEQ ID NO: 9505 - DNA, 30 bp, synthetic construct
  misc_feature 1..30: note = Description of Artificial Sequence: Synthetic oligonucleotide
  source 1..30: mol_type = other DNA
cggttttttgagtagttgagattataagcg

SEQ ID NO: 9506 - DNA, 10 bp, synthetic construct
  misc_feature 1..10: note = Description of Artificial Sequence: Synthetic oligonucleotide
  source 1..10: mol_type = other DNA
cgcgggagcg

SEQ ID NO: 9507 - DNA, 56 bp, synthetic construct
  misc_feature 1..56: note = Description of Artificial Sequence: Synthetic oligonucleotide
  source 1..56: mol_type = other DNA
cgtttataaatcggtttcgttttttcgtgttcgggttcgtcgtttattagacgtcg

SEQ ID NO: 9508 - DNA, 98 bp, synthetic construct
  misc_feature 1..98: note = Description of Artificial Sequence: Synthetic oligonucleotide
  source 1..98: mol_type = other DNA
cgtgatttcgggtcgttttttatacgtgatcgtttttttttttttttttattttcgtattcgttttttttttagttttttgtttcgttttgttggtcg

SEQ ID NO: 9509 - DNA, 33 bp, synthetic construct
  misc_feature 1..33: note = Description of Artificial Sequence: Synthetic oligonucleotide
  source 1..33: mol_type = other DNA
cgacggcggcggtcgtttttgcgcgttttttcg

SEQ ID NO: 9510 - DNA, 48 bp, synthetic construct; identical to SEQ ID NO: 8766
  misc_feature 1..48: note = Description of Artificial Sequence: Synthetic oligonucleotide
  source 1..48: mol_type = other DNA

SEQ ID NO: 9511 - DNA, 93 bp, synthetic construct
  misc_feature 1..93: note = Description of Artificial Sequence: Synthetic oligonucleotide
  source 1..93: mol_type = other DNA
cgagggtagcggtggggttgggtcgggggagtaggggtcgcgtcgggtagcgtcgcgtgttggagcggaggcgggtgcggtcggggtaggtcg

SEQ ID NO: 9512-9518 - skipped (7 entries)

SEQ ID NO: 9519 - DNA, 42 bp, synthetic construct
  misc_feature 1..42: note = Description of Artificial Sequence: Synthetic oligonucleotide
  source 1..42: mol_type = other DNA
cgttgcgcgttcgttttttggtcgggcgcgcgtttcgtttcg

SEQ ID NO: 9520-9529 - skipped (10 entries)

SEQ ID NO: 9530 - DNA, 40 bp, synthetic construct
  misc_feature 1..40: note = Description of Artificial Sequence: Synthetic oligonucleotide
  source 1..40: mol_type = other DNA
cgcgtcggagtgcggttttgtttttagcgttagtgcgtcg

SEQ ID NO: 9531-9551 - skipped (21 entries)

SEQ ID NO: 9552 - DNA, 42 bp, synthetic construct
  misc_feature 1..42: note = Description of Artificial Sequence: Synthetic oligonucleotide
  source 1..42: mol_type = other DNA
cggagatcgtttcgtttttttagatcgaacgtcgttcgttcg

SEQ ID NO: 9553-9562 - skipped (10 entries)

SEQ ID NO: 9563 - DNA, 219 bp, Homo sapiens
  source 1..219: mol_type = unassigned DNA
cctagggagggggcgggaggcctcccctgcccagctccgagccggtggtgcagcgtccgcccccggtcgcgggcgcagactggcggccgcctccgggccacgtggtgcgcgcggcgggcgcgtccgaggagcctgcggctgctcctggctcacagcgctccgggcgaggagagcgggcggacgccgggggctgggccggtgcgggcggcgaggcaggcg

SEQ ID NO: 9564 - DNA, 315 bp, Homo sapiens
  source 1..315: mol_type = unassigned DNA
cgagccccgagccccgccccgggggcctcatcccgccccttcgcgtccgcggctcgttttcccccactgagcgcccagctcccgcagtttccccggccgtcgagcgccgtgggcggggctccagggcggcggcgcctcgcggggagggtcctccgtgctgggggcgaggccacccgaggcagctccccgcccgcccccaaccccgccccgctctcggagcctataaagggaggcgacccgcggcccgcccggctggcatcccccagccgccgccagccccgccgaggggagccagcgccgtctctgaggggcgtc

SEQ ID NO: 9565 - DNA, 201 bp, Homo sapiens
  source 1..201: mol_type = unassigned DNA
gcacccggcccagggctggagctggctgcagggctggcccgcggcgacctgggcagggtggcggctgctccctctcctcccaccccgccccgaggcgcagcgcgcggcagagcggctcggtgcccggcgggcgggcggcccgggcgggcctgcggtcgggatgaggacggcgcctccgctgcagagcgctggggcggcgcg

SEQ ID NO: 9566 - DNA, 201 bp, Homo sapiens
  source 1..201: mol_type = unassigned DNA
aataatagggacgctgagaataacaactacgaccagcacggcgaaggcgcccctctcgcgggtcagaggtcggcgccccagctccgcagaacccggcgcccggccagcgccccctggcagcccctcccggcagcctcaggtccccaagacctgcaggcccgccccgaagccccccgtccgcccctcacggccgctccgagc

SEQ ID NO: 9567 - DNA, 201 bp, Homo sapiens
  source 1..201: mol_type = unassigned DNA
cgcgcaccctccccgcccgcctgcccgcggttctcctcctgctcccggagcgccagtcgccccaccccgtgaccggctccccgtcttgtcccgcaggacccgcccggacgggaccacgccgccgccgccgccgccgccgcccggagccgcgcttcgggtcctgcctgagccgagccgcgcgcggggccgcagtcaccgccg

SEQ ID NO: 9568 - DNA, 201 bp, Homo sapiens
  source 1..201: mol_type = unassigned DNA
atagagttgcttttccctttcttgggctttgcaagtctccgaattggaggcggaaatgggggaagggttggaagttgtgtgtgaaaaacaattattgcaacgggttttccccaggagcttagtccggcctgcatcctggtggaactgctgttaccggtccacagcgcccaggccgagccggcagggctgggcgggaggctt

SEQ ID NO: 9569 - DNA, 201 bp, Homo sapiens
  source 1..201: mol_type = unassigned DNA
cagccaccgcggcggctgcggcggcggcatctccgcctccactcccgcccgggactgccccccactgtctccccgcccctcccggacagtgagcccgcggcggggcgggggaaggagccgcccccaccccctccaagcccacccctaaagagatccctcctcccctcccccgccgcctggcgcggagccgggacgatgctg

SEQ ID NO: 9570 - DNA, 201 bp, Homo sapiens
  source 1..201: mol_type = unassigned DNA
aacaagcagcccgggagataccctcccctttcccagcccccgctcctccaccttgctaccccctagcccgtgaccagctgcctcccctccccctcgcgggcgctcagggttgagcaaacactccgggccgcccgccccgccaccagctggctccgaccggcgcaccgctggcgatcccccaggcaattcggcgtcatgaga

SEQ ID NO: 9571 - DNA, 201 bp, Homo sapiens
  source 1..201: mol_type = unassigned DNA
cgtggcctggccgaggagccaatgggccgggaggggcgcgcgggggaggagctcaggtgcagagtgccgattggccagttcgccctccggtatgcagatacggtgggagtcacgtgctaggggccgggacgacttcctgttggaggccaacgcggggcggggaagggggcgcgagcgccccgtctggctgaagcgggggga

SEQ ID NO: 9572 - DNA, 201 bp, Homo sapiens
  source 1..201: mol_type = unassigned DNA
ggaggaggggaggcgttgcccgacgcgccctttcaagtctccgcgctcccccccggcggcggctgcccgggggcggtggctcggcgtcgcctcccccgaccgccccctccagggcccctcctccgtgccgcggccaggctgcccggccggcggcgcgctggaaatatgaagagacgctgcagctgcggtggcggtggcggc

SEQ ID NO: 9573 - DNA, 201 bp, Homo sapiens
  source 1..201: mol_type = unassigned DNA
cccatctgggacgcgatccacaggggcgctgtcccgtcctgcgggaagaggaggcggcggccgccgtgactggggcgcccggccccacccgctcacagaacgtctttaacaccaggggtctgaaagcgaaaactccgggaaggcactccctgaccgcagatcacactctgcagctgatccacaccgcccaggaggcagtga

SEQ ID NO: 9574 - DNA, 201 bp, Homo sapiens
  source 1..201: mol_type = unassigned DNA
acaaaagagcagctcccgcggagcgggtccagagtctgcccggactgtccgatggccctcggccctctgagcgccgcggctgccgggctttgtgtccgcgcggggggcgggaaggacggccggggtccccagtgcgcgtcccgcggagcggcgcgcggcgcccgaactggaaagttgtcgccggcgcctgtcgcctccacg

SEQ ID NO: 9575 - DNA, 243 bp, Homo sapiens
  source 1..243: mol_type = unassigned DNA
gctaaggcccggaccgtcatcccagcaacagcctcagtcatgtgaccggcaatggcggcgctgacgagaggtaggtgagcccggcgccccccacacccaccgcgcgccccccgggccccgctcgcacccctcacgcgccccccgctcccccggcgccccctcctccacctcccctccccgcgcgcggctccgggctccccgctccgtgcccggccgatcatctttctagcaccctccagcctt

SEQ ID NO: 9576 - DNA, 201 bp, Homo sapiens
  source 1..201: mol_type = unassigned DNA
cagcccgctcacctcttcctggagaagcccgacgcagcgcccgccactccctcccctccgtgtgcagctccccggctctaaagcactcacttgtctaacccgattctcaccctacaagaccgcaaccggccatcacttctgccctccgccaggacaccgaggccagctgtgtcactgccccgaggggttgcaggtgcagag

SEQ ID NO: 9577 - DNA, 201 bp, Homo sapiens
  source 1..201: mol_type = unassigned DNA
tcgcagcaccggtcaccccactgccaagggtgttctttgtacctgttgcgatattttgggtcgttttcagcccagtttgcacagcacccttggccacgttcgcagcaccggtgaccccactgcagacagtgtccttggtaccggtcagcacggtcttggccgtgtctacacccatctggacggcccccttggccacattcg

SEQ ID NO: 9578 - DNA, 201 bp, Homo sapiens
  source 1..201: mol_type = unassigned DNA
tcccgggccgaggggaacccgcgaccggacttgtgggggagaatgaggatgaaaacgtggagcttccattgtctagggtttgaccggccgacagggatttcgacgggggaccggggatctggggagggggtcgcactttctcgcctctttcgcggcttcccggcttctgcttgcttccctgaccgttcccaggggcgcggc

SEQ ID NO: 9579 - DNA, 201 bp, Homo sapiens
  source 1..201: mol_type = unassigned DNA
agccggggcagaaggaggagcctgaaggtccaccatggggtggaggctgcctgctcgcgggcccgcccccagagcccggggctcatcacgctgctctatgcgcctctgttggctcctgccaaacagtccctcccttctgtgcctcagtttcctggctgtaaaaagggggtgctcacagagcccccttgaggagtcgtcaca

SEQ ID NO: 9580 - DNA, 201 bp, Homo sapiens
  source 1..201: mol_type = unassigned DNA
ttggcttttacctggtctgcgagaaatcaaactttgggcacaagtcatgaagccgacaagcccgggagacacagtgtcagaattacaaggtgagatcagccgcccggccaagctatcttctcgctagcaggtgaggcccgtgaacagccaagctccccttggcacggcggaaccgcagtggacgcgtggaggggctccgta

SEQ ID NO: 9581 - DNA, 201 bp, Homo sapiens
  source 1..201: mol_type = unassigned DNA
aaccctccactcaccaacgccggcgccgccatgggcccagggggctgggtgaggccgtgagagtcggcgaggaagccggtcctgcgggctcggccgaccccgggctccggctctgggctgcgagggacctcagtccccgccgtcgtgtaaaatgcacacaaggttcgcggcgccgcctctgcgcgccgtgaggacacaggg

SEQ ID NO: 9582 - DNA, 201 bp, Homo sapiens
  source 1..201: mol_type = unassigned DNA
gacagaaggggagagtggccaggaaggaggggaggatggacacagggcgtctgcagaattggtgggcagatggacggagggacgggccgtgcagtgcagccggcggggccagggccaggccgagggcgcgaggtggcagccggcccggggaggcggaggctgagcgagcggtggtgtttgtggagctgtcggctgcggtgg

SEQ ID NO: 9583 - DNA, 201 bp, Homo sapiens
  source 1..201: mol_type = unassigned DNA
ggggctgggacgccccggcggagcaggcggcggcggtggcgagttggggagccctaggctcggcgctgccggaggggcccgagccgagccgcctgcgccccggccgggcagcgccgggcccgcttcccgcggggccacgccctgtcaaactttgttgcggcggctagcgcagcgggcccgcaagcgggcgggaggggcgcc

SEQ ID NO: 9584 - DNA, 201 bp, Homo sapiens
  source 1..201: mol_type = unassigned DNA
ttactggtgagcttggtagggcacagagaggatggcactaccagctggagggggacaggccccaaccatgagcccaggatgcagagagcggcagggatcaccggagcccccccggctctggtgtcttggctcttcctgcacacggtctccacatgacgcccagcaagccggatctcaatttgttcacccatcctttatttt

SEQ ID NO: 9585 - DNA, 201 bp, Homo sapiens
  source 1..201: mol_type = unassigned DNA
gaggccaaggcgggcagaccactcgaggtcaggagccagagaccagcccggtcaacagggcgaaaccccgtctcctccaaaaatacaaaaaccagtcaggcgtggcggcgcccgcccgcaatcccaggcacttggcaggccgaggcaggagaaccacgggagcccggggcagggaggctgcagtgacccgagaccacggca

SEQ ID NO: 9586 - DNA, 233 bp, Homo sapiens
  source 1..233: mol_type = unassigned DNA
ggagagagagagagagagagagagacggagtcggagagggagggagcgagagaaagcgagagctcctcgccaccctccgccgcctctagaattcaccgggcgtctgctcggcggctctagaaggtcgggctgcgctgtgggctgcggggagccggaggcctcttgattggctctttgacgctttcggaccaattgtgttgctgcataggcgtggttttcacaggtcgagtgct

SEQ ID NO: 9587 - DNA, 201 bp, Homo sapiens
  source 1..201: mol_type = unassigned DNA
cgcggcacagccactttctccgccgaggcggtaccctaaccctgtgcctccccaggatcgcgggctgcaggcactcggttcccgaagcggaggccggagccgcgcggagaagccaacggtaatgacgccccctgccgaccttcaggaggggataggctgagggcctggacgaggtcggaagcgcttctactgcagctccgg

SEQ ID NO: 9588 - DNA, 201 bp, Homo sapiens
  source 1..201: mol_type = unassigned DNA
tcctgagaagcagcagcagctggcctgcctgttgccccgcccccgtgcatggctgcccagcgctggccccagtgcccagcgtctccgcccagcacccccccggccctccctccccaccccccgcctccgagctgcggggagtcccagcctgggatctttgcctcatgtccttgggctcctgccctggctggcccgtccccc

SEQ ID NO: 9589 - DNA, 201 bp, Homo sapiens
  source 1..201: mol_type = unassigned DNA
ggccccgccgggccggtcgctgcgagcctcgccccggtctcggccaccgccggggaggacgacgacgacgtggtgggggacgtgctggcactgctggccgcgcccctggccccggggccgcgggcgccgcgcgtggaggccgctttcctctgccgcctgcgccgggacgcgttggtggagcggcgcgcgctgcacgagctt

SEQ ID NO: 9590 - DNA, 201 bp, Homo sapiens
  source 1..201: mol_type = unassigned DNA
tttcctccagtacactttatgcaaaagtcagtaaaaatatttctcctataagtctaaacaaatgtttaaaaatatgtaagttaggaagttatttccaacacgcatattcttttcacatgcagaagtaatggtgagaatttttcatatcctttgcagcagactcccggccccggggctgggccctcagcaagctcattcctg

SEQ ID NO: 9591 - DNA, 201 bp, Homo sapiens
  source 1..201: mol_type = unassigned DNA
ctcggccgtacccccgccccacccccacggcagggcccccagtgcttgatcaagttcaagctcgagctcctcggcgcgctgcccaccggctgcccctccgcgcccctcccccttccccatccgcaccgtctcgctcttcactcttcctttgtctctttcccaccacttagtttacaccccctccgccctcctccccgcccc

SEQ ID NO: 9592 - DNA, 201 bp, Homo sapiens
  source 1..201: mol_type = unassigned DNA
gggactgggaacgggatagggacgcgccccaactcactcagcggtggagctggggggcggcgcggtcacgtgggatggcgggcagctcaggggatccgggcgacggggtctggcgggcagggttgttccagccgcctttataaagccggcctccccgacccctcctcctctctgcagctctcccctcctcccttgggggct

SEQ ID NO: 9593 - DNA, 201 bp, Homo sapiens
  source 1..201: mol_type = unassigned DNA
cagccacccacctgccccccacgccccactcaccagcgcgcacggccccggcaacctcacccggagcggggcgccgccgccgcctctgccgcagcccggccgggccgctgggcgcaggggactccgcgccgccgctgccgctgccgccgccgccgccgccgctgccgctgctgcatcccccggcgagcgctgctgctcctc

SEQ ID NO: 9594 - DNA, 201 bp, Homo sapiens
  source 1..201: mol_type = unassigned DNA
tttgggggacgccggacgccatgttgtggaaaataaccgataatgtcaagtacgaagaggactgcgaggtgagctggggctccggggtgcagccccgccccgccgaggacagtccgggaggcaggggccactggaccgaggtcggggacgagggcataggagccctggcctctcggtgggacgggatccacttctccggac

SEQ ID NO: 9595 - DNA, 201 bp, Homo sapiens
  source 1..201: mol_type = unassigned DNA
gggagggaagaaggaggcggcgagcgggaagaggaagaagacgcaggcagcgctaggcgagctcaggggcgccgggagcgcggagctcgggctacggactcgcgggagttcactgcgcctccgggccctggagggctgcccctgcccgcaggcccgggcgcttccgccaggaggcgacagcgccatgttcctccaggttcc

SEQ ID NO: 9596 - DNA, 201 bp, Homo sapiens
  source 1..201: mol_type = unassigned DNA
ttcagccggtccctcgcatgactggatcacatgagggacccaagcccggccagctgccacctttcggaccacatgcgtgctcagggaccgctctccaactcggcatggggacttggaaaaaaagatcagggcagagggactggggccgggcccggtgaccgctcctcggcaaccaaaggacagtaaaggacggtccctgac

SEQ ID NO: 9597 - DNA, 410 bp, Homo sapiens
  source 1..410: mol_type = unassigned DNA
cgcatgcgcccaggccggtccgcaggcctttctcgccccagccggcagccagctcgttcgcgctggggtcaccgcgagccggtccgcagcggggtcaccgcgatccccggcgcagacacagaggccgcccccagccccgccgcctcgtggtcccgcccccgctgcacgctcccttacccctcggacctcgcagggccgcggcggacacggcccgatcggggacgtgaacgcgcagaactacatttcccagcgtcccgctcgcgctggaactacacttcccggggggctcggcggtgcacccgccggggtcgcggattggaggtttccggttggaaaagccccttggcggctaactggggaggactggaagaaatctaggatggagccagcactgctggcccaacatgtct

SEQ ID NO: 9598 - DNA, 201 bp, Homo sapiens
  source 1..201: mol_type = unassigned DNA
aagtccttgggaaagatccgtcccattcccggaagctagagggcgttagttgtcgggttgaaaaggggtgtggggaggggaagcagctttaccccgggctcggagtttgcaggagagagaagtggggagcaagaagtgaacctcaggggctcacagggttcccgcagatgctcaggccggccaggaatgcatctctggctc

SEQ ID NO: 9599 - DNA, 201 bp, Homo sapiens
  source 1..201: mol_type = unassigned DNA
tctaccacgtcggggcgacccgctgcctgagcgagcacgccccgcacctcctccgcgacgcgcgcatgttgttcggcgcttcggccggggcgttgcactgcgtcggcgtcctctccggtatcccgctgggtgcgtctggggacgctgcccgggctccacgtgcggagtgggtgccccctaggccggggagcgggggatccc

SEQ ID NO: 9600 - DNA, 201 bp, Homo sapiens
  source 1..201: mol_type = unassigned DNA
actcttggatcaggaaacagtgtgtgtgtacacgagagagagggacagagagaggggggacatgtggagtgcactggaaccaccataacccccatgaaggcggcaccggagttattggcattatttgtgcaactcttcttcatgcttgacgtcgtttcaaaataaagagtgagctgagcaaatcaactcggcagggcacat

SEQ ID NO: 9601 - DNA, 201 bp, Homo sapiens
  source 1..201: mol_type = unassigned DNA
gcggcggggctgggtctggggctggacgttgacctaggaccccgcccctgcccgccctgcgccgcgcccctcccgggccggccttgaccgagcagctccacgcgggcccggggctcgtccacccgacaggagcggggggctgcagcccacgagcccacgagcccgcagcgacgcacccggagtgtaacctcgcagagtcac

SEQ ID NO: 9602 - DNA, 201 bp, Homo sapiens
  source 1..201: mol_type = unassigned DNA
gcaccgcgcggcggcgcctggcgggcactgttgcccgcggagggacggtgggggggtttcagcagctggcgggggtggagggggcgggagagggagcctgcgccgggctgagcctggaggtgcggggcgggctcggggagcgctcttggggctcctcctgccacagccggggcggctggaactctctccctttctccctcc

SEQ ID NO: 9603 - DNA, 201 bp, Homo sapiens
  source 1..201: mol_type = unassigned DNA
gccgcgccgccgggcctcggggacacccctcgccgcctcccccgactcgcgccgccggggccgccgggccgcagggcacggggccggcgcggggggggagcggagaggggctggggagccccaggggtccggggcccgcccgcgggggatgggcagggaccccgggccgcgtggggtgcgggggccgcccgcattgaggac

SEQ ID NO: 9604 - DNA, 201 bp, Homo sapiens
  source 1..201: mol_type = unassigned DNA
ttcccttttaaaaagagcctcccagagctgtcgaaatctccgcggggtgaaagctaaacttttggagtcgctgtgtagccgggtagaggacacggcggcgcgagccggaaagataagtgtccaggcgaatgggaaaggaaagatcttaatttttgttcctactgttagctgaatgtccataaaaatcaaagggaatgcggg

SEQ ID NO: 9605 - DNA, 201 bp, Homo sapiens
  source 1..201: mol_type = unassigned DNA
atggctcactgcgcaagctcacacccagtcccaggaagcgagccccacgtcgccccagctctgcattcacagccgccaagcggtcccggaagccgaatgccggataggtcaaagacagcgccgctgctccggcactgccgccagagggcgcggagtcgccgtgttggcctgcacctcccttgtcacgtcagccgaacggct

SEQ ID NO: 9606 - DNA, 201 bp, Homo sapiens
  source 1..201: mol_type = unassigned DNA
gcggcccggaaatgagcgccctccggggacagggggctctgcggggcggcgacagctggattcccagcgcgcacaaagcctgcgggaggatccattgtagcggtcgctcctccccgcttagcgagggcgggcgcaggggcgggggatgtcgaagggtcaggtttgtccaggccgcgccaccttcgtttcagacgttcagtt

SEQ ID NO: 9607 - DNA, 201 bp, Homo sapiens
  source 1..201: mol_type = unassigned DNA
cctcgagggccgcgcgggctcaggcgcccacggccccgcagcgccgcgcttctcgcgagaacgcagagacccgggtccgccctgagccgccgattgcgggcgggagccggcgggcaaggcgcgcggccggcagccggagcggcgcgtaacgcagctgagtgaggtcgtcggtggaggcacggagcagcaggcgcccggggc

SEQ ID NO: 9608 - DNA, 294 bp, Homo sapiens
  source 1..294: mol_type = unassigned DNA
tcccgcgaaggccccggcccggccgggcggggtggggcggccccggcctcattaatcagcggcttgttgtggatgccggcggaggagatgccacccagggcgggaaaaggggcgcggaagaggggcggggcgggccacggcgcgcagggcccttccctcccgcctcggactcaattaattgggcttgagcttccgccggggagggggcgccgggcggggccgcggctgggcggggcgggggatcgggatcggcggcgggggctgcggccttgcagtggaagcatgggcggcgag

SEQ ID NO: 9609 - DNA, 201 bp, Homo sapiens
  source 1..201: mol_type = unassigned DNA
gtgtggaggctcacgcagcgcttctggctggaacggggaagcctgcacttagctttgggagtgggtttgggagagggaggaggagccgccgggagtctggcgggagggcggtgttcccgtctgggttcctctctgctgtcccagccccggtagcttccacagcagcctcgaagggtgagaatttgctcttctatggacttg

SEQ ID NO: 9610 - DNA, 201 bp, Homo sapiens
  source 1..201: mol_type = unassigned DNA
cttcccagcctccagagcaagccaatcagggacacgctctcgtggcccagttcggaaacaatgcttggtgggaacctgcaatcttggctgccggaaccttcggggaggattaacgccggcgcaccgtgcggccggggcggggcgccgcccaaactcaggccctgtgacagcgactgtggcggtctggaaagcgtgggcctc

SEQ ID NO: 9611 - DNA, 201 bp, Homo sapiens
  source 1..201: mol_type = unassigned DNA
aaccacccccaaaataacccctccggggggtgagaggcaattataaccccagcgagcggagggcgcgggggatgggcgccgggcgggcgggggcggggagcgcggcgcgggtccccaggtggcgagcggaggtgctcccgccgcggggggaggggcgggggcgcacgcggccggcggcggggggaggcggcgcgcggggga

SEQ ID NO: 9612 - DNA, 201 bp, Homo sapiens
  source 1..201: mol_type = unassigned DNA
aggccttcgcacccaccgcgtgggctcctgccctggcctcacctgcccccgacactccccgtccccgcgatgcccaactccggcccgagaaggctggccgcgacctcgcccggtacccgccgccccgacaccaccattcgcctcctcgacctcccccggcgccgctgcccacccgcccctcgccccgctcaccggggccgc

SEQ ID NO: 9613 - DNA, 201 bp, Homo sapiens
  source 1..201: mol_type = unassigned DNA
ggggacgcccgcccctcttccgggcagccccttccacccaggcgggatctgggtccccgctggactcagggccgccttcccgcaggcggggccggcccggcgcgcaccttgtctcggatgccctggcgcacggcctcgcgctccgcctccatcttggcgtacttggccttgcgctcctcctccgcctggcgcagcgcctcc

SEQ ID NO: 9614 - DNA, 201 bp, Homo sapiens
  source 1..201: mol_type = unassigned DNA
cactttttctttgcgcgtctgtcccttcctcgcctgcaggatttcgctcctggcccgtcctccccttccctgctgggcaggctcttccggagcccacccccggcggcggcggcggtagccgcggccgcggccgctggattccgagaggcgcggggaacttttttaccccctgccctggttttatctgtttcttttctcttt

SEQ ID NO: 9615 - DNA, 201 bp, Homo sapiens
  source 1..201: mol_type = unassigned DNA
cagggaatcacaaaagacggccggcggcgagcaggctggggtgacggggaccccgtggataacgggcttgaggacgcccagggcttcagccttttccaggcgtccctcgccggggcaacgcagagcagctgccgttcttcccgcgccccagcagatggtggtgtcagcccggcctcgtgcccggccgccgctgcgcccgcg

SEQ ID NO: 9616 - DNA, 201 bp, Homo sapiens
  source 1..201: mol_type = unassigned DNA
ccagataggcatggtcaaggcagcctgtgactcatttcacaaaaccagagactcttgttctttgtggagcaagacttcccggaggctagagcaggatgatcgtcaacttttctccttagagccggttcagtctgataaagcaggggccaccccggagtttggaggggaagagagcccaggcacaaggccatccctgggaaa

SEQ ID NO: 9617 - DNA, 201 bp, Homo sapiens
  source 1..201: mol_type = unassigned DNA
gggcgcgcggcgccctccatccacgcccggccggggcgcggcgcggcggcgggcacccggacggccggcggaggcaggccggcccgggtactagcctgggcggcccgcgggccggggcggcggcggggtggcggtggcggcggcagcagcgcggagccggtgggcgcagccgcgcgccaggccggcggtcggggtttgggg

SEQ ID NO: 9618 - DNA, 201 bp, Homo sapiens
  source 1..201: mol_type = unassigned DNA
cttgccacagacaagtccccgaagccgccttggtgcaggccacctggtttcccagcccctggtgtgtggtcagtgcctggtgttcctggaaagccactcccgggcagctcctgacagtgcgacccggcgcccaagcagcctgggaccttgcgcggacctgaccccttcagaccgcaggcagtctgggaggaggtccggccg

SEQ ID NO: 9619 - DNA, 463 bp, Homo sapiens
  source 1..463: mol_type = unassigned DNA
acgcttgtgctgcacctggcgctggccgacggcgcggtgctgctgctcacgccgctctttgtggccttcctgacccggcaggcctggccgctgggccaggcgggctgcaaggcggtgtactacgtgtgcgcgctcagcatgtacgccagcgtgctgctcaccggcctgctcagcctgcagcgctgcctcgcagtcacccgccccttcctggcgcctcggctgcgcagcccggccctggcccgccgcctgctgctggcggtctggctggccgccctgttgctcgccgtcccggccgccgtctaccgccacctgtggagggaccgcgtatgccagctgtgccacccgtcgccggtccacgccgccgcccacctgagcctggagactctgaccgctttcgtgcttcctttcgggctgatgctcggctgctacagcgtgacgctggcacggctgcggggcgcccgct

SEQ ID NO: 9620 - DNA, 201 bp, Homo sapiens
  source 1..201: mol_type = unassigned DNA
accgggagtgcccagcgacttcaggccagctcgggggaaagaagcggccgccgccgccgaggctctctggcctcgggactccggcgctgcctcttcctcccgcacctgctggggtgggctggagccgtaaccgaatcccggccgcggcgcctgcaaagtttttccctcgaagctccgcggctccagtccactggcgtcccc

SEQ ID NO: 9621 - DNA, 201 bp, Homo sapiens
  source 1..201: mol_type = unassigned DNA
gctccacagccccggccagaacttggtgggggacgcggggggggggtgtttgacggggagggggcacagtcctttcgggccaacttccacattcctgctccgcccaggcggggggtgagtcggggtgagcagccggctccaagctggccggcttcctggaaagggagggccagcaggagaactgcagatcctcccagccct

SEQ ID NO: 9622 - DNA, 201 bp, Homo sapiens
  source 1..201: mol_type = unassigned DNA
gggaccgcttcaagcagttcgtcaacaacgtggcggtggtgaaggagctcgacggcgtcaagttcgtggtgctgaggaagaagccccggcccccggagcccgagcccgcacccttcggccccccgggggcagcggcccagccgtcgaaacccacttcgacggtcttgccgcggagcgcctctgccccgggagctccgccct

SEQ ID NO: 9623 - DNA, 201 bp, Homo sapiens
  source 1..201: mol_type = unassigned DNA
gcttccagaggcccagccctgtcccctactacacacagctaccaccccacccgcccctggggctcggctgcccttcccggtgtctcttaaacccctcccccgacctgggtgttaagcccacccacctcccggcgccgcccccggtcgaacagcctcttgcccttccttcgcctgggccggagccccccgcagcctcctccg

SEQ ID NO: 9624 - DNA, 201 bp, Homo sapiens
  source 1..201: mol_type = unassigned DNA
ggtccggcttggggctgggctggggagcgcggcggctgcggctggggcacggggcggccgggtgagctggccggcgctcgctctctccattcagtgagcacggcagacaccggagacgcggggcccacccctccggcccccccccgaccaagaaacgccaactccgcctcccattggctgcgccgcgcgtcatgtcgacta

SEQ ID NO: 9625 - DNA, 201 bp, Homo sapiens
  source 1..201: mol_type = unassigned DNA
accgagcccaaaagccgccggcggcacatcccagcggcctccctcctcccgggctgggattcgcctctgcaagaaacgtcatgttttctctcccagacatcgttccgggagccccagatgtaaaatcagaggtctcttatctggcattattgatctctgtgctaataaaatgtcagtccccaagggaaaacttaaaaaaag

SEQ ID NO: 9626 - DNA, 201 bp, Homo sapiens
  source 1..201: mol_type = unassigned DNA
gccgcgcgggacggggcagggacctcgagaacaccggggacttgcgggccggtggccccgggcaggccacttctgacgcgggtgcgaggccttccgcgggcgtgcacggttgggccggagccgcgccgggggccgggacacgcctggggtcagcgctggcgtcgccgctcgggtggggtgggccgggttcgggtccagtct

SEQ ID NO: 9627 - DNA, 201 bp, Homo sapiens
  source 1..201: mol_type = unassigned DNA
ggcggcgcgcggcagagctgggtctcccgccaggtggccgggggtgtgccctcagggtaccctacccgctacccccgcgcctccagtcccggcggccgcgcggaccccgcccctgctgaccccggcgcacgctcccgcgccgcgcgcagcctcccgcctcccgccgaccccgccgcgccgccggcagccctccccagcccc

SEQ ID NO: 9628 - DNA, 201 bp, Homo sapiens
  source 1..201: mol_type = unassigned DNA
tcctccctctgctgttccaaaacacccttcgacgccagcaaaatacaatgcgcctcggccgccgtaaacagccgggagggagagcacacattcggcgcggcgcggccgccggctcggctcccacccccttcccgttcctagaaaatgccataaaagcgggcagggcgcggggagggcggctgcgcgcccggcggccggggc

SEQ ID NO: 9629 - DNA, 201 bp, Homo sapiens
  source 1..201: mol_type = unassigned DNA
agccaggaaatgcggggcctggtggggtgaggagcacggggttcctccttcatcctcgcggggactttgccaccggctcagtgtggaggcctcaccgtcccgcccggatccgtggggctccgacagtgtggcccctgcgaggaccccccccatcctcctcgccctggggctgctgcgggagggcgcccgggcagcactagg

SEQ ID NO: 9630 - DNA, 258 bp, Homo sapiens
  source 1..258: mol_type = unassigned DNA
gcggcggcagcggcggcctggcccttccagagggccagagccagggacatgcgggcgcccgggactccgcgttccgcgcggcccggcgcctgagcgcctccgttccccgtcccggagctgccggcggcatgatccgacacgccggggcgcccgcgcgcggggaccccacggggtaagtccgggcggccgccccctcctccctcgcgatccccacggcccgcgtcctggccgccccactccacttcttgtcccagagag

SEQ ID NO: 9631 - DNA, 201 bp, Homo sapiens
  source 1..201: mol_type = unassigned DNA
ccgacggccaaggaaagcccaccagccctccgcaccgtgggcgacgggccaagacccggccctaaacggccagacccagcccctagtcggctgccgcccccgccccacgcaggcgcgctccggggccctcccctcccccaccgcgcgctcgcggggcccgacgggggcggagcgaccctcggaaggggcgtggcgaccggg

SEQ ID NO: 9632 - DNA, 201 bp, Homo sapiens
  source 1..201: mol_type = unassigned DNA
agggggacggccagacgggatgtcggaagccaagggacgcagaggccggcgggtggcggcgatggagaggacagatccggctcccagaggaggtcgtgagcgcggggcctgcgccggccggaggagggacccggggggctgcaatatggctgctcgggcgccgtcccctccctgccaagccagggctctggggagctgctg

SEQ ID NO: 9633 - DNA, 201 bp, Homo sapiens
  source 1..201: mol_type = unassigned DNA
cccgtcgcgccccggccgggatggacccacacgcccgatgagccccgcgccggcggctgcgagcgccgagcctccccctgctgcggccccagccgccccccgcgcgcccggctccgcggaccaggacccctgggctccccggctgagggcgcggccgctccggagaggccgagcggggacgggcccgagatggcgcgggga

SEQ ID NO: 9634 - DNA, 201 bp, Homo sapiens
  source 1..201: mol_type = unassigned DNA
cagtcaggacagtacaaaatctctttatcgctcattttctgtaaaaaatcgtggctctcggcggaccctggagataggaggtgcaaagggcgctcacacgcggcccgggtccgcggccgagagctggggggatctggagcggggccgggtcgcaagaagaccctgaccctgctccggcgctggggcgcgtgctaagggccc

SEQ ID NO: 9635 - DNA, 201 bp, Homo sapiens
  source 1..201: mol_type = unassigned DNA
tgccgggctcgacgtgcacagtccagcgctcctccccactagttactgcccaggccccccgatcctgcacccgccggaatgagagaaagtagcccctcgccgcccagctcccgggtagctgctccggccgggccttgcgttggtgagaaagttccatctagaggcggccgcgcgcaactgcaggcggcgccctaggcccgg

SEQ ID NO: 9636 - DNA, 201 bp, Homo sapiens
  source 1..201: mol_type = unassigned DNA
cgcgggtaaggaaagcgcgcaggccctgcagacctctccaccccggccccctggcccggctcgcccctccgccccggggcggcggcttcctgctctgcagcgagcgtccgcaggagggacgccaggaccccggacgccacctctgaggtctctctgcacctgggtctctgacagccgggaacaggcaggaggtggggcgag

SEQ ID NO: 9637 - DNA, 201 bp, Homo sapiens
  source 1..201: mol_type = unassigned DNA
gtgggaggccggcagcgcgggcgccgcgtccccggaggagctcgcgtcccctgaggagcgcgcgtgcccggaagagcccgcggcgccgtcccccgaaccgcgcgtttggcttgaggaccccgcgtcccccgaggagcccggggagcccgcgcccgtacccccggggttcggggcggtgtacggggagccggacctggtgct

SEQ ID NO: 9638 - DNA, 201 bp, Homo sapiens
  source 1..201: mol_type = unassigned DNA
agtgcggatttcggtcgcgtgcggctctgaccgcgtcgccccatccctggcggggccacgcacggacgccatggctggcgccgcggagccgggcgatgcgcgcggactctcccggggccctgactgtccctgagtcctccctgcggggggcgtgcgcggcccgccccccgcggcgccacgcggcccctcctcggccgggga

SEQ ID NO: 9639 - DNA, 201 bp, Homo sapiens
  source 1..201: mol_type = unassigned DNA
gcctgcggagggtgggaccccacagcttgtccacctgcccaggctgagacctcgtgtcctagtcctggatgccccacgggtttctcgtcccgggcagcggcgcacgggaggagaagactcccggtctgcagtcagacctccctctgagaccctccctagctcaggcttagagctttgggatttttctcgatcctttctagc

SEQ ID NO: 9640 - DNA, 201 bp, Homo sapiens
  source 1..201: mol_type = unassigned DNA
ccggcccctcctcccgcggggggctccgtcccgcgccccgtccctccgggctgcagccggcagcccacgtccagggagggcggagggaggaggagaggcgcggagaggagggaggggagaggggagggaggaaggcgagagaaagggagctgcttccatcccggacttcccagagcctgcctggagcgcgtactcagcggc

SEQ ID NO: 9641 - DNA, 203 bp, Homo sapiens
  source 1..203: mol_type = unassigned DNA
gcgagcggctacggggtggggagcaaggggcgcgcgggcggcaggcatggaacggacgcggcgcatctcgcccaccgcgggacgcccggacggcggccggcgcgcgcggcccgcctcgagcccgagagggcggggagacaatgcctgtccggcggggcagtccaggccgcacgctcccgcccgcggacacgggccgctcctac

SEQ ID NO: 9642 - DNA, 201 bp, Homo sapiens
  source 1..201: mol_type = unassigned DNA
tcgtggagccgcgctaggccacggggtcccggccagacgggagcgccagcccctccccctgtcccgatgtccccaaacccaggctcagcccctccctccccgacccgatgacacccctgggtcctagaatgctgctgggggcgggagaccggagaagaagcaggtgcacggggaggtgggtgtcctgccctctgcgaggag

SEQ ID NO: 9643 - DNA, 201 bp, Homo sapiens
  source 1..201: mol_type = unassigned DNA
cctgggggggcgggccggacctgaaggccacaggcctcctcctgcgcctacccctcctgcaacccccacagcctcccccgccgaccccttcatgcccccccgcccccctgcccggcgctcctccccggccgcgggctaattggctgtgacagctggagccctgggcagctgagcggtgtcactgcaaattaggcaggcgct

SEQ ID NO: 9644 - DNA, 201 bp, Homo sapiens
  source 1..201: mol_type = unassigned DNA
ctggaagggcgggggcggtgacagcggcaggggcgggacccggaggcggggcgtttgctcacgtcgtccagtagcggagggaggcgcggtcccagctccgcgctcaggagccgcacaggcgcccggggccgcagcaggagcctcctcagggcgcccagcgctgcacccacgagccgcgcgtcgccttcgcccagtgcgccc

SEQ ID NO: 9645 - DNA, 201 bp, Homo sapiens
  source 1..201: mol_type = unassigned DNA
ccgcaccccgcccgcctgctcttcaccggccaggccctgccgggtcgccgcggcctcggcgccccaccccctcccgggccagcggggggctgggagggggcgaggaggaagggggttctcctctcccctccccggagggggccgcagcggcggctccggctcctcctctccctcacaccccctcccgcccccctctacctg

SEQ ID NO: 9646 - DNA, 201 bp, Homo sapiens
  source 1..201: mol_type = unassigned DNA
ccggagggagggggcaaaggaagaaaaagaaagcgcgctcggaaagccggcttgggtcctgctaattattctgaaggcaaagtacctgcactctccccgccgaggctggctggcggcgccgcgccggaggggaggaggctcgggaggaggaggagaaagagcagcgggaggactcgggctgggaggggagcgcagggttgg

SEQ ID NO: 9647 - DNA, 201 bp, Homo sapiens
  source 1..201: mol_type = unassigned DNA
tcgccggggagccgcaaagcctgacggaagaggctgcggttctcgcgcttcagccgccggttctcgagccgcagccgggcgttctcctgacgcagccgcgcgttctgccggtcccactcgtcccgcgcacggatggcctccaagtggctcgccgccaggtcggcaaaccgctcctccagctgctgtcgggcgccgtccgcg

SEQ ID NO: 9648 - DNA, 201 bp, Homo sapiens
  source 1..201: mol_type = unassigned DNA
gcggcgggacgctacctgcgaccgggaccatgaggagctgccagacccgtggggccggtaacgagagcagtcgcggcacctgctgagaggaaagagggagcggtccggcgcggctggggcgcggcagaggcttgcccgatcctcggccatgtcactgctctgcgtgcgcggtgagtgcgcggactgaggcggggaggcggg

SEQ ID NO: 9649 - DNA, 201 bp, Homo sapiens
  source 1..201: mol_type = unassigned DNA
gcgtcagacttcctcactatactctcccaccccaggcgacccgccctggccccgggtgtccccagcctgcgcgggccgcttccagtccccggtggatatccgcccccagctcgccgccttctgcccggccctgcgccccctggaactcctgggcttccagctcccgccgctcccagaactgcgcctgcgcaacaatggcca

SEQ ID NO: 9650 - DNA, 201 bp, Homo sapiens
  source 1..201: mol_type = unassigned DNA
aaccatcagagaatcctctcaaaaacacagacccgatgaggagtggcttccccgcctttcccctgtgccgagaagggatcccggtcgccaacaacaaagacgcttcccgctcccctccccccgccggcccgggctcgtccctcccgcgctgcggctcccggcctagcgccccctccccgagccgggctgcggcgtccccaa

SEQ ID NO: 9651 - DNA, 201 bp, Homo sapiens
  source 1..201: mol_type = unassigned DNA
ggagggccgcggagacgcaggcgctccgggtcgcccgcgctgcccctgtctgccccgtgcgggagccggggtccctggctccctggctccctggctcccgcggcccgggcgaacccagagcgcacccgtacgccggccccggccggtccctagcgcccgggctccacgggccgcgcccccacgcggcgcctcccagagacc

SEQ ID NO: 9652 - DNA, 523 bp, Homo sapiens
  source 1..523: mol_type = unassigned DNA
ctgcgccaagtttcagaaccacctagccccgtgcctgccgcccggggcccggcctcgccccggccggcgctcacctggcggtgccgcccccggaagaccacggcgaaggccccgtgtcccacgagatccctcttgctgtactcgaagtcacccaccacctccatggccgcgcccccggggcacacagcggacgggcgggcggcgcagtgcggcgcaggtatcagcaccgcggctccgcgggcccggagcgcgccagcgtgcggcgggtctggggcagccgcagccccgggcccgggcggactctcatgccgagagaccggagcggaaactggggaagctgccgcgcggagccagggtcagcgaggcccggcccggcccctgccgctcatggcccggcctgccgccggccgctggctgtctggcgaagcggcctcggcgctgccgggccaggggtgccgtcaccgtcactgtgcgcgcccagagccgcacacgcgctctgaggcagtgaggggcccggtactct

SEQ ID NO: 9653 - DNA, 201 bp, Homo sapiens
  source 1..201: mol_type = unassigned DNA
cggcccgtatccctccgccgccagccccagctctaaacccggcggctcagcgggcgcaccatggcactggagtagcgcggggagcgcgcccggagccccgcggcccgctgcgccccgcccgggaccccgctgcgccgcgcgccccccccgcggcccgcggggccgcccctgcacccccaccccctcccccgcctgccgccg

SEQ ID NO: 9654 - DNA, 201 bp, Homo sapiens
  source 1..201: mol_type = unassigned DNA
gcctccgcccaagtgtggctcccttgggcccacaccccatcaggccagcaaggagggggatagcggggggcggggcaggtgctgggactccgggcaggtgcggggaaggcagggggcggggggggaaggggttgggcgatgcaggtgttgggggccgggacagttgcgggggtaggcaggtaccgggaaggcgggagggcg

SEQ ID NO: 9655 - DNA, 201 bp, Homo sapiens
  source 1..201: mol_type = unassigned DNA
cgcagatcctgggccccggccttgctatccagggggaccttccctaacgatgggaccggtgctcggagtggagtatggggagtgcgccttcgggagtcggcgctggccggatatgtgacaactgtgggtcgctggaggcccgcctgcgctgggatagggcctggacttcacgtgcgtcgcctgtgttccgtcagaccgggg

SEQ ID NO: 9656 - DNA, 201 bp, Homo sapiens
  source 1..201: mol_type = unassigned DNA
gggtcggctccgcggccgacctggggcaccgcgccggggtgaggcctggcgaggaggcgaaggctgcaggcgtgaggtgaaggccgcaggccggccgggccgattttcgctatgtaaatatcggtgagggggggggagggacgggggacaagatggcggcggctcggcgcctgctgcaggggacgatagagggggttgccg

SEQ ID NO: 9657 - DNA, 201 bp, Homo sapiens
  source 1..201: mol_type = unassigned DNA
ccctcgcgcccctcccgcgccctacatccaccgcccggcggagggggctcagtccgcagccgccgccgccaccgccgcgcctcggcctcggtgcaggcagcggccgccgccgccgagacagctgcgcgggcgagcatccccacgcagtaagcccgctttctttccgcttgtgcgcgcgtgtgtgcctcccgcccgccggcg

SEQ ID NO: 9658 - DNA, 201 bp, Homo sapiens
  source 1..201: mol_type = unassigned DNA
gcgggggcccttcacgtggcggaggcttcccggcctgggggccacgggcccggaggaatttgcctggaagttttccatcacggcagagccttctggagctcgccccgtgctcgacaaggggagccccagacttgatttctccagcagccccgcggggcggggccgagaaggggcgggcgggcggaggacgctggcgggaga

SEQ ID NO: 9659 - DNA, 201 bp, Homo sapiens
  source 1..201: mol_type = unassigned DNA
aatgtgattatagttaacacatgacccttctagcgtcccagccagtgtttttcctgacctctgttctttggagaggaggatggaagggaggggtccggcacgctgctggcattttgctgtgtcctgcagcccctttccgggacacctgggttcacacagctttttagcttacataactggtgcagattttctgtgtggaga

SEQ ID NO: 9660 - DNA, 301 bp, Homo sapiens
  source 1..301: mol_type = unassigned DNA
tttttttccaatttctggcggcgggcggctggggaagcagctctgtggtctcccggcgggtgaggccgagacagagaccaacctctaggcggcgccctggcgttgagtccgcgctgaacaagattctctcgcagctctgcgtcccgcgccgggtgaaggggcgtgttcctgcaggcgctcggggctcggcctggagctggcggccggcacgtcgcctttggcgccctctgccaaccaagagaaacacggttaaatgagtgcgctgggacagaaatccacagctaatcaaggccccatccgc

SEQ ID NO: 9661 - DNA, 223 bp, Homo sapiens
  source 1..223: mol_type = unassigned DNA
gcgggggcggcggcggccgtgagccccgatgaggcccgagcgtccccggccgcgcggcagcgcccccggcccgatggagaccccgccgtgggacccagcccgcaacgactcgctgccgcccacgctgaccccggccgtgcccccctacgtgaagcttggcctcaccgtcgtctacaccgtgttctacgcgctgctcttcgtgttcatctacgtgcagctctgg

SEQ ID NO: 9662 - DNA, 720 bp, Homo sapiens
  source 1..720: mol_type = unassigned DNA
gacagccgtgttccatccccgccctgtgccccttctcccggacagtgccttctccagggctcacccaggagggtgcagcggtggcccccggggcggtggtcgtggtgggggtgttagctgcaggggtgccctcggtgggtgggagttggtggcctctcgctggtgccatgggactcgcatgttcgccctgcgcccctcggctcttgagcccacaggccgggatcctgcctgccagccgcgtgcgctgccgtttaacccttgcaggcgcagagcgcgcggcggcggtgacagagaactttgtttggctgcccaaatacagcctcctgcagaaggaccctgcgcccggggaaggggaggaatctcttcccctctgggcgcccgccctcctcgccatggcccggcctccacatccgcccacatctggccgcagcggggcgcccggggggaggggctgaggccgcgtctctcgccgtcccctgggcgcgggccaggcggggaggaggggggcgctccggtcgtgtgcccaggactgtcccccagcggccactcgggccccagccccccaggcctggccttgacaggcgggcggagcagccagtgcgagacagggaggccggtgcgggtgcgggaacctgatccgcccgggaggcgggggcggggcgggggcgcagcgcgcggggaggggccggcgcccgccttcctcccccattcattcagctg

SEQ ID NO: 9663 - DNA, 1683 bp, Homo sapiens
  source 1..1683: mol_type = unassigned DNA
tagtggcagtgttgagcccaggaatacgcgcggagcccgcggcgatccccgcggccgctcagtcttcgcggcggactccggcgcgcaggagccactgggccgcaagggcgccggggagcgggaggggcgctgggggcggcaaggggtcccagatcccaggccacgaactgttttccttttccccgggcaagagccccgctcccttcaactgacagaaattcactggggcaggggggcgagtggggagagaggtcgctcagggctcgctactggctgcgcctcccccggctctggtctgggaagcggctctgggccctccgggcgagcagcttgggcgccggcgccccctgcgaggaagatcgcggggtgacggtcggtacccgttcggctgggccgcgctgccgctccgatccacctcccttccgcgcccgcgccctcccccttcctttcactaggagtccgggattcggagagggcgcgggaggcaggcacacgggcccgaccccactccagcgctcaccggggacgcgggcgggcggcgacgggacgcggcgggggcgcggggcgggcgcggccatggagcagcagcggcggcggcggcggcggcggcggcaacactagcgaccgcgggcggacgagcgggcgggcagggccgccgggctcagcggaccgaactgcacagctcagcaaaagcgccctcgccctccgcgcgccgcctcctgcgagcccaaacccaccaacattttttaacgctccaacccatcctttgaagaaaagcaaaaaaaaaaaaaaaaaaaaaaaaaaaagcaaaaaaagaaaaagcattgatcggagagacggggatatatatatatatatatatatatatatatatataaaattttttttggctcctgctaaaattagcagggctcgccgcgcgcctgtgtgccagtgtgtgcgagtgtgtgtgcgtgcgggcgtgtgtgtgtgaatgtgattactccaggactcctcgggctccggagacgccattttcccccttgatatctctctccataaatcggtggcgcggcggaggcggcagagtcgggcgggaagcgcggggccggccggggcgcccgccgctcgccgccgcctccgcgcgcccgggggccccggcgccccccgagctagggcggccagctcgcggctcgccgtttgacagatgctcatcgccatggagttgccgcagcagcacctttgggggctcgggcgagcgacgggagccgggatctgagcgagcgccggggccagcggagccggagccgccgggacatgggtgagcacgcgcggcgaccttggcccgggagcccgggcgcccagcctccctccgcgccgcgggcccccgcactcccggaaccgggggcgacgtgtgtgccctgcatgcaaaagttcacgtcgccttgctgggtctttgactttgcacccggcgggaagggggagaccgggccgagggggcgggatgccggtccgggcgaggttgcaggagatgggcgcgattccggcgggccggcgggtgggcggcgatgctggctcaattggagtggctcgttggtggcggcgatggtggaagctttgggctggagggctgggagcttattgagtttcgcctaatctgatctaccccccctccgccccccgccttttgcaccctccctcggt

SEQ ID NO: 9664 - DNA, 233 bp, Homo sapiens
  source 1..233: mol_type = unassigned DNA
ccccgcccgggccgctcggctcggctgtgctctgctcggctagggcgggcgggtccgcccctcctccggccggcgccctccccctggctccccccttccccgcgtcgcccgctcccgctccccccgcctccccggcgccggcgcagcccccgcgaacccgggcgcaccaccccgggtgtcccggcctggggaccgctgccgccccggccgctgctcctttaatctttttgttt

SEQ ID NO: 9665 - DNA, 213 bp, Homo sapiens
  source 1..213: mol_type = unassigned DNA
gactgcgcgtgcgtagagcacgccggcgcggccccgggactctcgcgataactgtactgagataaagtgtggcaactcgagctggctggtgattcatcctcggcgaggggctcgcgtgtgggccacgtcgccgtctccaccgggaaagcggggaccagtggggggggcccagctgcagggtagtgggaggatgctgtttgctttgggggaagg

SEQ ID NO: 9666 - DNA, 236 bp, Homo sapiens
  source 1..236: mol_type = unassigned DNA
ggcagcgccgcctgcgccgcgttcagcacgaagagctcgctccagctcaggcgcagcagcgccacctggtcggccaccggcagctcggggaagaagggcgcgtggcgcgcccactccacggtgctgaagagcagccgcgccgccagctcgcacacgttgtcgatgcccagcaccgcgcccgccgcgccgccccctgcgccgaagcgtccggccgccgcagggtagggctcagcgcg

SEQ ID NO: 9667 - DNA, 233 bp, Homo sapiens
  source 1..233: mol_type = unassigned DNA
gagggtggggttttaaacgttatccaatcagcgacgctgggctgggaactgtccaatcaggcacgcagcttgagcggagaggacggcttccgggatgtggcgggatttgtccgcttctttgtctttggctgccgctggaactccgggtctcgtcttcactgctctgtgtcctctgctcctagaggcccagcctctggtcctgtgacctgcaggtattgggaatccacagctaa

SEQ ID NO: 9668 - DNA, 737 bp, Homo sapiens
  source 1..737: mol_type = unassigned DNA
aatgacgtcgtaaacaatagcactaaccaccatcgtccgcagctcccgcgtacagaggcctcaggctcccggctccacgtggaccgacctcgcccggcagcgcggggccacctcaccgcgagctcctcccgcagcccggcccgggtcacctcgactcgccaggcttaactcaataaccacaacaccggaaaaggaagcaaaggtcgaagttcatccgcggccctgaggcctgtgggaaacgtagtccaacaacgaaagagccctgaagctcaagcggagcccgctggccgcaggggccgcaccacgccccagaccctggagtttccgggtgcgcagacccttgccatcagcagaggctgccgctgcgcgtcccctaggcgcggaagaggcggctggtggtccctgacggcaaggtgaagtcgaggcagtaatcgggaacccaggttgggaggacagaatggggaacaggaagctggggcgagggtggtcttgggggaggtggggggccgcggaattctaggtggcccctgcctcacctctggaaagaaccggaagcccgggccggggagggtgaagggagtcgcggacccggctgctcagccgaggaggaaacccggaccccaggctgagggaggccgaagaaggaactggagggccgggctgggaaggcctgaagcgggtacagcctttaggctggggagggtcgaggggagaactcggagcctgagtcgggcgag

SEQ ID NO: 9669 - DNA, 308 bp, Homo sapiens
  source 1..308: mol_type = unassigned DNA
tccacaggccgagcccacgagcccctcgaggggtgagcggcccgggcctcctggcgttctggccggctagccaagcgctggactacatttcccagaggcacggcgtccggagcgctggactacatttcccagaggcaccgctcccggagcgtagcttcatttccgttagtttgcgagatttggaggcctcgcgtggggagagggccgcgtctgtggaggagcttggctccgcacctgctgggctggcgaacccgaaattgggcttggaacccgggagccagatcttggaccctgaactgcacctctgt

SEQ ID NO: 9670 - DNA, 1100 bp, Homo sapiens
  source 1..1100: mol_type = unassigned DNA
ctggctccacgcagcgcttgcagactgtgagcccgcagggcagcgtcaccggcttatgcagcagccgccggcagcgcgggcagccgagcaggtcgcggggcgcgcggggctccggggccggccctccctcgccgggcgcctcgggctcgccgcccgggttctccgcggacagcggccggtcgcgcaggcccacggcgcgcaccaggccgcccgccagctcttccagctcctccggccgcagcgccccgagccgcgcggcgccgcggaacgcgcccagggcttcggggaggcggccggcgcgggccagcgcgtcccccagcctcaggcacaggccgcggtccggctgcgccagcccggctagcatggagcgaaagagctcggctgccatctcgtagtcgcccgcgcggaaggcctcgtcgccctcctctaagcgctgggcgatcggctccgcgcggtcgcagccaggacactggggcggcggcggcggcgggaccggctcggggctcatcaccgcggggctgcgacgacgcgggtccggagcgaaggcgcggagcagggaggatgcgctgctgctgggaactggccggcgggagcgcggtctcagccctcgccagcagccacgcgcgtctgggggcggcgcgctgcgagcggctgagaccgcgggcgggggcgggcgcctggcttgggcagcgtcctcagcgcggtgtgggcggcgagccccgcagggctgcaatcgttccggggtgggggccgggacaggcaccgcgggcgcaatctgagcccctgcccacgcgcagcggcctctcagtcccgccggcttaggtaacccaggtcgctgcggtaacgcagtgaccgcgctccaggtccgcgtctcttgcgatgcttcccccactcgcctgagggctcctgcgcgactgcgcgcgcgtcctctgcctgccgcctccccgcagaggtgccggggccctgggagcaggtggccttggccgcgggctgctggcgcgccggcaccgcggcacctgctcttccccagaggcctggccgcccccacaacctgtggctccgcttaagcaagaacccaggaaaagtcaccaaacgcatca

SEQ ID NO: 9671 - DNA, 214 bp, Homo sapiens
  source 1..214: mol_type = unassigned DNA
ggcgagagcaaaaaaaaaaaaaaaaaaaaaaaaaaaaaccctaactgtaaatattatttggaggtgggcgagggcgcggcgtgcgcgcggcggcgggtggcgggcggcgcgggcgcccttgcggggattcccggtctctcagcgcgccctagtggacgccctgcctttcgctggctccccgtgctcgttacaatctgcaatatattatttcttc

SEQ ID NO: 9672 - DNA, 582 bp, Homo sapiens
  source 1..582: mol_type = unassigned DNA
ctctcccgcgtgcgccccgcacctgccgggggcccgtacccgccctcgccggggctccagggggcacgacggccgtggcccggcgctcttgggaggggagcgggacatccccgaaggcggcgcgctggaggcggggagcggccggggcgcacggagagggcggggagcccgcgggagggggaggagggggaggagggggaggaggcgcgaggtgggggggagcgcggcgggcggcagggagggagcgggagggaggcaagaaagtagcagaaagtgaggctggcaggcggcggcaaaggagccggcgcgcggcggcggcaggaagtctgtgcccgagaacagcagaaataagagccagggagggaccgcggccgcggcggcggcggcgagagcgaaagaggaaactgcagaggaggaagctgcgccgcagcccgagccgcccggcatccccgccgcctctgcgcccgcgccgcgcccccggcgccccctccccagcgcgcccccggccgctcctccgcgccgcgctcgtcggccatggcccgggagaacggcgagagcagctcctcctggaaaaagcaagct

SEQ ID NO: 9673 - DNA, 203 bp, Homo sapiens
  source 1..203: mol_type = unassigned DNA
ggcgacactcgcgccagctcccgggacggctgggctcgggctggtcgccgacctccgaccctccactagatgcctggcagagcccggcgcgtccggagcccgcgcccctcagagggaaggggtcgcgcgtcgccgcggcggccctgaggctgacggtcgggaggtgaaaggccggagtgcggggtcaggacgcctcctggagg

SEQ ID NO: 9674 - DNA, 823 bp, Homo sapiens
  source 1..823: mol_type = unassigned DNA
cgagttatccgtattctccttcaggagtcatagtcaggccagaagagtgcggagggacggggcccgggaagagcagggaacccccagagcccgcagccaacgcggaggtgggcgagcgggcgtgcgcgcactcacttgccggcgcgagggagtgtcgggggggaagggagtggtctccaaaagggggaggggagaaggcagggggcggggagaagccggccctttaggacccggctgcggcggcgagggaggaggaagaagcggaggaggcggctcccgcgctcgcagggccgtgccacctgcccgcccgcccgctcgctcgctcgcccgccgcgccgcgctgccgaccgccagcatgctgccgagagtgggctgccccgcgctgccgctgccgccgccgccgctgctgccgctgctgctgctgctactgggcgcgagtggcggcggcggcggggcgcgcgcggaggtgctgttccgctgcccgccctgcacacccgagcgcctggccgcctgcgggcccccgccggttgcgccgcccgccgcggtggccgcagtggccggaggcgcccgcatgccatgcgcggagctcgtccgggagccgggctgcggctgctgctcggtgtgcgcccggctggagggcgaggcgtgcggcgtctacaccccgcgctgcggccaggggctgcgctgctatccccacccgggctccgagctgcccctgcaggcgctggtcatgggcgagggcacttgtgagaagcgccgggacgccgagtatggcgccagcccggagcaggttgcaggtaacgcggtctggaacaagtagttg

SEQ ID NO: 9675 - DNA, 293 bp, Homo sapiens
  source 1..293: mol_type = unassigned DNA
ccgcgcggccctcataatgcagggactcctctgagtggtggccgtcctcgtcccagccctcggtcacccgcagcttcacaccgggccactggttcatcaccgagatagccagcgagttcaggcggtccttgcagcgctgggagaggaatgtgcgcgaaatcaaccagagcgaaatcagccggaggagccggccgaggtgcaggtgtaggcgcagcctcgcccagaactctcccgccacacccaagggagctggaagcccgggagggtgctgtccctctcccttaggaacagag

SEQ ID NO: 9676 - DNA, 262 bp, Homo sapiens
  source 1..262: mol_type = unassigned DNA
cggacgcgctgattggctccaggggaagcgggaggcgagaacaatggccccctccccccgttaaaagggagcggctgccgggcccggggacagggacgcgcgtgcagggcgcagagctgggccgagccgtcgccggcgccacgcgagtcccgcagccgccgcgcccgggcaatgggccgggggcactgagggccgccggggccgagcgcggaggggggaccgagccagtgccgtgccctcgggccgcgccaacatgccccgc

SEQ ID NO: 9677 - DNA, 240 bp, Homo sapiens
  source 1..240: mol_type = unassigned DNA
ccgctgcggggtggagggacccgcgccccccagcttctcgggcccgggccgcggggaccgtgcgcgcgtccccctcccgggcaaggccgggcggcgggcgcgccgcggcttctggggtccccgccctcttgtccgccatcgcctgcgggagcctctggcctggaggggctcggggcgcgctggcgactgcgggctcggcgacaggggcggctggtggcgggaggacagtgggaggaaggc

SEQ ID NO: 9678 - DNA, 1240 bp, Homo sapiens
  source 1..1240: mol_type = unassigned DNA
agcgggccggggccgccggccaagcctttgtctggggacgcggcggcgcgccggagagtcccgaggctgcctgcaccgccccagagctctgggctgtgcccgcgcagggaccgggccgggtagagtcgggcggggtggagaggcaagcggagcgcgcggtggggctgaggggaggcgtggggcgagtgcccgttgctcgctctctagctctcttgctcttacgctctctcgctcgcagccgctcgcagctcggcggtgcagctgtgctggatccggcggcgccgcagccttttatcgcctcctgatgtcactggggtgcgggggcccgggcggcccggtgcgcgggccaatagctgcacggcctccgcggcccagcggcgcagggcggggcgcgcctgacagctcccccgccccccgcgtcagctgactggcggcccgagcggccccggagcggcggaggcctggcggagcgctggagcggagtgggacggccagcctgggcccacccccgtaccctgcaggtcccggcccacgcacgctcgcctggagtgcgcgccccacctctaggccaaatcaccgctttcccctcctcgcgcactctcctccctcagttccctttgcaccccacccccatcccgtgtcacccccaaggaggctcagaatgagcgccgggacaacgcctcctgggccctttgttcccaagcggcccccgcccagtgggcgacgctctgtgtgtcctcgcggcttctggccgtgtgtgtcgtgcgttcctgtttctggagatctgcgcgtatttgtatgttggggagggcgggctcgaggctccgagagttgtgttcagacccaactcttaacctcaggggacctttctcaggccaagcgagggcccctcctggcgggtgcagtcgcagagccctgaggttcgactccactggccccgccgctccccgcgttcaccccaccgcacaatgttcacagtgaaggcgacgggaaaagcagcagcccaaaggctctgaattcctcttccccgccacacgcacggaatcctgagcccccggagcctcggggccgaggccggcccgggacggtgctccgagtagctctccactgctggggagccggccctgtttttgtttgaacgttttgtaacgattaagcagatcccggcgtcagcccgccgcggagaggctcaaacaggcataaagtgcgaccccaagtggccactgtgcgcaaaggcgcc

SEQ ID NO: 9679 - DNA, 222 bp, Homo sapiens
  source 1..222: mol_type = unassigned DNA
gggcgacctgctgcttccgagtgttcctgggctgcgccttcttctcctacttgggcggccgcgccaagcgcagaggccgcgggcgctccggggccagaggcgccttcggctcgggccatggcgcccggcgccgggggcgcgaggagcggctcatctagtcagaccccccaccccgccaccgccaccagacaccaccatcgctgtgtagtgtgggtttttatt

SEQ ID NO: 9680 - DNA, 714 bp, Homo sapiens
  source 1..714: mol_type = unassigned DNA
ttcagggaaagtctttgaaagtacaatccggaaaactcagcaattcttaaaaaaaaatggctttccgctgttataagcctccttcctaagactcagggtccgcagcagaataccctgacccaaaataaaaatactatgacaaaaatactccaggaggcagccggctttacttcgtttaaagccggatttcgcttagtcccgtgaaagcgaaggagcaccagcgcttcctgattccgcacagttctctcggcagagacggcccgtcctctccaagaaccggaagccggacagcgtcaggacgttttattcttctcacctgggattcagagaggcagcggccaaggacagggcccccgccgaggccaccgggcagcgtccaggtctcggcctttgggaggggagcagcgggggaggggcacggggaggggcgagggcggggcgcgcctgggcctcggcgctgggctcctcctctgcccgctccgggggacacccacaggattcttgcagacctctgccgaggcaggatggaggcctgcagggatgcaccgcgggcccgcgacccgggcggccggaacatagttctttctggccggagatcggcccggtcgtgagtcgtgtctgtgccaggccccccacgctgtgctccagggcctcagtgcccggcgcgccgggggctgtatcgccagccacttggggcaggaaaaaggaatcaca

SEQ ID NO: 9681 - DNA, 1216 bp, Homo sapiens
  source 1..1216: mol_type = unassigned DNA
aagtttcagaaacgttttcggaaagcctcctccaatgggaagcgacttcgccgctgagttaagcgtccgaatcctccttcccgcggcagggacaccggcccgggccaggtctgcggaggacgcccccgggcgcgcacacacagcccgaggacgcgccctgtattttaagacgcagggtcggatttcaccccgaaacttggctcccacagccccaggccgaactgtgtctggttctcagcccccgagcccgagttctacgccgcaaagagatggggccccattgtgcctagctggcctcctagcacggacgtgtattttcttttggtctgtcttttgctaaaaaccggcagtgcgcttcgcctccctgcccagccgcagcctgccgtcccctagacaaaaagcggcgaccgcggcccggccacccgagccccgccgcgctgcgcctttgttgggcggtccacagatggtgcccagcacggggccgcgccgagggcgggggcgggaggccgcgaagagggtcgggcgggaggggaggagacggcggagcagccaatccgcgcgcggcccatcagctgaccgcctttgcttacaccaggtgcacgccggctgcggggagcacaaagcggggcgcaccgcgggcgccggcaacgagccggtgaacgaggcgaggcccgtgcgcccgcggctgcaagcgcccgcctggcggggagaggggccgacggcgtcagcccgggcggcggcatccctaggcgcctggggcgccttcctccggacctggccgctcgctgccccgccctctgcaccccacttctccgaccctccttcccagtcctgcctccccctgccctggcctctgagagccgactgagcccagccccgtgcagcagcggttgcctgtgtcgccgcctagtctccggtcttggtgctctcccgggggtgccccaaggagccagtgcgcgctgcgggctgggaaggaggcgccgctcagctagtcctcctcctcctcctcgtctttctcctcctcctgctgctgctgccgccgccgccgccgtgggtgccgggtccgcgcgcaccccaacacccccaccagctgggcctcggggtaagtccctggccggccgcgccgcggcaggaggtgtgggaggcagcgaggggaagtcgaggcaaacttggtggcgtgggagaccctacggggtctggggaacctcagggtaag

SEQ ID NO: 9682 - DNA, 207 bp, Homo sapiens
  source 1..207: mol_type = unassigned DNA
agttccccgcaaattccgcccttcccgcctggcacggttcccttgcaccgctgtgctccgctcccaggtttctgcccgccaagaatgcttgccccgggggcgcgctcgctggtcaggaacctgtcggcagcccccgggaacccctgaggatgcggaggtgggcccgagagctgcggcttcgatgccggggtgggagctaggcaggcc

SEQ ID NO: 9683 - DNA, 253 bp, Homo sapiens
  source 1..253: mol_type = unassigned DNA
acgtccagggacaaactgggagccgtgactgtcaggccgcgcggaggctgccctggccgcctttgcggtcaggtgaaggcgcagaggcagggaggccgggcgagcgcaggcgggcggagagcagaccacgcggaagaggccgagagagaaagcggggcacccggccgggggggtcatttacaagggacgctgggcacgaaggaggctggggcgaagatgagtccaggggttgggttgagagcgctgcgcagcc

SEQ ID NO: 9684 - DNA, 209 bp, Homo sapiens
  source 1..209: mol_type = unassigned DNA
ggacggcctgtgagggatgcgccgcccactgccccgcgccgcctgaccgtccccgcctcgactcgcggtgcgccacagccgggcccgcggccgtccccgccgcgttgtcgcccggtcgccgcgcccgcggggccgcgcccggcacggccatgtggacccccacggaggaggagaaatacggcgtaggtaggtgaggctcaggcctggcc

SEQ ID NO: 9685 - DNA, 225 bp, Homo sapiens
  source 1..225: mol_type = unassigned DNA
cgctcggccccgtcccgcaggctgcaggcggccctggagggggcgccctcgccgagcgcgcgccccgcgccgccgccccggactcctccccggcgccgcgcgggcaggttcgaccaggcggccgcgggctccggttcccggccagctccccagggcccgcggcccgccccgccccgcgcgcccgccccgctgcgcaactcgacccaagttggaagccgatcgcag

SEQ ID NO: 9686 - DNA, 1133 bp, Homo sapiens
  source 1..1133: mol_type = unassigned DNA
aaggagagttggaagggttcgtgcagcaggacagcgggcggaagcggggcgggcgagcgcggggccgccggccggcagccggagcagctgccgcggcgcccgaatcccggcggccgccgcgctttcccgcttcgcggagaccgacgcaggcgcccgcccccgaggccgaagggcactgggcggcgagggctgcggtagctggcgactccgggggcgtctgcgcggcgcgcgctagacgaggctgccccggcggccaccccgcgaccccgcgtcgccgggatttgcgcgcggagaacgccggttctggagggagcacgcctccccaaagtgcagaggagggtccggcggcgcgtctccgcggaaaccctctccactgtagttaccccggatgccgacttagtagtttgttttccgagaaaagagaggggatctgggcagaagggccccgtttgccccaaaagaaggtgcaaggatcagaagataacgaaacgtccacttcctgaagggtgggaaaaaaagaaaaagaaaaaggagccacccacgctggagatgtccgttttagatcttcttattttcttccctttcgcttcggtttttcttctcgaggctcatttaatctgctagagaaggaggaggagcagaagatgggggccgaggaggaggggaagagaaagagaagtttgccaagaataaagtttttgccggcaagcgcggggactccgcagtggagggcactgcggagtctcggggagtcacagcgggggcctcgggcccaaatgcctctgcccggagctcgagccgacacacacactcagtccgacccctctttgttcccggctcgagtttctcagcctggctcgccggctcgccgctctgcacgcctccgccggccagctctgtcaaagcaaagagctgcgccccttgagttcgcccggccgaggggaggggacgccccgagcttggccgcgtgcgaggctccgggcgcgtcctggttcctcggcccgagagcgcgcagcccgggtccctcctccgcgccctgccccgcaggtgagcggctgcgcctccccactgcttctcctcctcccgcgcctcgccggcgctgaaaagctacccacttgcgtcgcttctcctcc

SEQ ID NO: 9687 - DNA, 478 bp, Homo sapiens
  source 1..478: mol_type = unassigned DNA
cggcccgggaggcggaaggtcgcggacctgcccgacagaagagtagatgaggggagaccgaggacgcccgggtccggggagcttacgaggaggccaggatcgcggggtaaggaatccgcgggcagttacctccgccaggggcagggtccggccagtcaggcgcgagaaggctaggcgaggccgactgcgcggggtgaagacgccaggccgacagctgcgggccctaccgccagccctgacgcgagcctgcgtcctggcgacggcggagggcgggcagggggcgcgggcgctgccacggcgcctgctcagaaccggccgggaacgccgcgggcgggtctccccggtcctccgcccctccagccctgctctcaggcctccgcccgggccctctaagctgccagccgcgcccgcctccgggctcctcgcccctcctcccgcgcgctcccctcctcagcggccgccggaccccctcagttca

SEQ ID NO: 9688 - DNA, 201 bp, Homo sapiens
  source 1..201: mol_type = unassigned DNA
ccgtacgcggagtccataagttgtctgtgtcgtcactttctcggttctggcaccgctagtatctcctaggaacttcctaaacccgttttacggtgcagaacggtaattgcaccgagcctctgtgccaactagtacttccgtaataccgttagccggctcttttcctgtcacaacacattaaaacgtgttaaaacacattaa

SEQ ID NO: 9689 - DNA, 208 bp, Homo sapiens
  source 1..208: mol_type = unassigned DNA
gatgagcgccgtgtagtactcctggctcgcgttgtctgcccgtgccggccacaggctgcaggtcagcagggcgagcgcggcgagccgggcagggcccgcccgccccgcgcagctcatcgtccctccggcagccgccgctgctcgcggaccgggctccggggccggcgcctagaggcggggcgggcgcggcccgggcggcggcgggagc

SEQ ID NO: 9690 - DNA, 210 bp, Homo sapiens
  source 1..210: mol_type = unassigned DNA
actccgtatacgtgtacaaggtgctgaaacaggtccaccccgacaccggcatctcctctaaagccatggggatcatgaattcctttgtcaacgacatcttcgagcgcatcgccggcgaggcttcccgcctggcgcattacaacaagcgctcgaccatcacctccagggagatccagacggccgtgcgcctgctgcttcccggggagctgg

SEQ ID NO: 9691 - DNA, 229 bp, Homo sapiens
  source 1..229: mol_type = unassigned DNA
tggctcacctgagctcaggggtttgagaccaggatgaccaatatggtgaaaccctgtctctactaaaaaatacaaaaattagccgggctatggtggctgacgcttgtaatctcagctactcaggaggccgaggcaggagaatcacttgaacccaggagcggacgttgcagcgaccggagatcgtaccaccgcactccagcccgggcgagagggagaccctgtcttaaaa

SEQ ID NO: 9692 - DNA, 209 bp, Homo sapiens
  source 1..209: mol_type = unassigned DNA
aggcgggggagagagatgacgctggcggacgtggccagcgcgggggccgggcggtgcgctgcaggccatctgccggcgccctgagacccaggagcctccgcgctcccgcgtgggcctcacagggccggtccacagctccaacatagtagctgaactcccttcgttgcgttcctctttttctggaggggaatgttagaagagagagagag

SEQ ID NO: 9693 - DNA, 255 bp, Homo sapiens
  source 1..255: mol_type = unassigned DNA
gaaggggcctggagtcttcctcctggggcattgtgctgggaccttgaggactggggacccggagggagggtaggcgtgccctcaactcgctgcgccggaacggcgtctgatgagcggcgggcccggacacgaggggacggggccgatttgtgggcggggccttggcgccgtactaaaaccgcgtggggcggaggccggcagaggtcgcgtagcgggcccagggtagggagtggctttgactcgctgcggaataac

SEQ ID NO: 9694 - DNA, 297 bp, Homo sapiens
  source 1..297: mol_type = unassigned DNA
aggccccgcccactcgacgtaatttgcccgcccctctccaccctccgaagggtggagcctgaggccccgcctccaagcggcctctccccggagtgcctggcggccagcagggcggggcaggaggctgggagagggacgggtgcgggggtgggggagaggaagggagcggtcacgtgtgaggggcggcccgaggtcacgtgacggagcgccggagcggagggagccggggctgggagttctcctgagggaagaggagtggagtaggggggacgcggcggcggcgttgacaatggtgag

SEQ ID NO: 9695 - DNA, 232 bp, Homo sapiens
  source 1..232: mol_type = unassigned DNA
gtgagctggctggaaagagggggcggagtgcgcggagtcagagccgccaccgctgccgcagttgccgccactgcggcgtctgggctgagccggagggaggcgggaggacgcgcaggggcggccgccgccgtcgtcaggccaccggggcgaaaatgcggccgctgccggaggctcgctaactttccggggcggaagaggaggaggaggaggaggaaggggcttggagcgacta

SEQ ID NO: 9696 - DNA, 247 bp, Homo sapiens
  source 1..247: mol_type = unassigned DNA
ccgcgcccgcagccgcgttcctgtctccccgacctccgcacccccacttggcccggcctcctcgccttcctcccggctcctcccctcaggacacctgtgtcgtcccaccccctccaccacacacgcaccccccaccccaattccttcgcctccctgtcctccctcccccgccggtctcccctccccgctgctgccccgagagcccgatgtgggagggaaggcgcgggggaggggaggccgcgaaggg

SEQ ID NO: 9697 - DNA, 292 bp, Homo sapiens
  source 1..292: mol_type = unassigned DNA
gccccccgagccccctgcggcgactccgattcacccccgcgggtgcggggcgcggacccgcccggcccagctcctgctccccaggcgcttcctcctcccgcgacctgccccggccgcacccgcctccgctccagcacgcgacgctgcccggcgcgacccctgctcccccggcccagccccaccgctgccctcgactcaatcccagttgaacgcccgcagcctcagtcccacccccggcccagccccagcgcccccagtcccacccccggccccagcttcagcctcagcgccc

SEQ ID NO: 9698 - DNA, 201 bp, Homo sapiens
  source 1..201: mol_type = unassigned DNA
gcagctcggccaacggacgggccagctggttcccttcaggggcagccttgccccctctcccgccccgtctccctcccccccaccacaccgggctgtaacccgagccgccgagccactgcctcccctccggatcctccccggaggctctgcggcccgggcccccgcgccttgctgccccatgcagccctgagccccacagca

SEQ ID NO: 9699 - DNA, 201 bp, Homo sapiens
  source 1..201: mol_type = unassigned DNA
ggccacgcgtgtttctggcgcgagtgtgcggggccaggccgggagggcgtgcgcggaccgggcgtgtttacgcgcggcagggaggggccacgagggtgcgcgcgtttctggcgcgagtgggaagtgtggggatccggcgggcccggtgtgaggggcgtgtttctggggcgagagtggggagtgagtgtgaggagcaagggt

SEQ ID NO: 9700 - DNA, 201 bp, Homo sapiens
  source 1..201: mol_type = unassigned DNA
gggcgcggccgggcaggttggggggcaggtaggggccgcttccgcggggcgggaatcccgcgccccctccccccgagcctcaccttttatggtaaagcggcgcggggcggcggggcggagggagccgagggggcggggagggcggacgggcggaggggacgggaggcccagcggctccgggctccgctggctcgggcgtcg

SEQ ID NO: 9701 - DNA, 201 bp, Homo sapiens
  source 1..201: mol_type = unassigned DNA
acccccttcctccatcctccctcttcttcccccattgtcctccccatccttcccttcctcccgcctcctcccctggctcctcctctccccgtccgggactcggggggaggcgcgctgggtggtccggcagccgggggcgggcggtagcctgcaggcgtaattggcatgcacgccgttgtagctgagaccgcttaataaagc

SEQ ID NO: 9702 - DNA, 201 bp, Homo sapiens
  source 1..201: mol_type = unassigned DNA
ccgtttccgccaaaggcttttccaaggggtcgtcccagggccccgctccgtgtcccgccccggcgcccaccccggcgcccgcctcctcctcctcctgctgcggctccggcaggggctgctgcggcgactcaggctgctgcggctccagctccaccagttgctgctgcttcccaaggagacgccgccgacagcggagtagtg

SEQ ID NO: 9703 - DNA, 201 bp, Homo sapiens
  source 1..201: mol_type = unassigned DNA
gtgcggccggggcgctgcccggcagtgcggtgtccacgggactgacaggcaggcaggccgcgggctgggatccggacaccaaagcaaaagcaccgctgggcgccggaggagccgcggggcttccatccttcctttgactgatttttaaattttaatttgtattttccccgccgccccgccccttttcctccgaccccgccc

SEQ ID NO: 9704 - DNA, 201 bp, Homo sapiens
  source 1..201: mol_type = unassigned DNA
catcgcgccgtgcgtccgcgcccggccgccaggtgccccagtagcccgaccgccgagatgcccagcccgccggggctccgggcgctatggctttgcgccgcgctgtgcgcttcccggagggccggcggcgccccccagcccggcccggggcccaccgcctgcccggccccctgccactgccaggaggacggcatcatgctg

SEQ ID NO: 9705 - DNA, 241 bp, Homo sapiens
  source 1..241: mol_type = unassigned DNA
ctgcgcgccctggcggcaggaggcggggccgggggcggggcgtgagctggccggggcggggcctatggaggggcgggaccgcggcgccctataagtactgcggagcgaggcgcgcgcccggccagagagcgagcgcgcaacggcggcgacggcggcgaccccaccgcgcatcctgccaggcctccggcgcccagcgccccacgcgcccccgcgcccccgcgcccccgcgcccctttcttcg

SEQ ID NO: 9706 - DNA, 201 bp, Homo sapiens
  source 1..201: mol_type = unassigned DNA
ggcggcaggcggcgcggcgggctgggcgcggcggtggttaggtcggtgcggttgtagtccatgcacagcgtgtcagggttgccttgctcgggcagccggtcgcagcgcatgcggtcgggccaggcgaagccgtactggcgcatgagcggcgcgcagccggccttggcgcgctcgcacaccgagcggcagggcggcagcggc

SEQ ID NO: 9707 - DNA, 201 bp, Homo sapiens
  source 1..201: mol_type = unassigned DNA
aagtggggtgaaaatgacctcagtgaatagcccagctccctgggacagtggcctggtatttttgacgtgggagtggcgtctgctctgactcaacctggaccggcccagggacaacacctccttcggagtagccgctttgtttcgtttcgagcagcccagctgcgttctgcatgaccgaattggacacctctcacttcctct

SEQ ID NO: 9708 - DNA, 201 bp, Homo sapiens
  source 1..201: mol_type = unassigned DNA
cccgcgcctgctccgcaccacggagccgggcctccagagcagcaaggtcaccaggtggcggtgctggcgcagcaggcggagcgccgggtgcgcggggtcgcgcctctggccctcgaaggtgatgaagatgggtctgcgggtgagctccagcagccggcacaggccctccctgcggggcgggaccgtcaggggggtgggtgc

SEQ ID NO: 9709 - DNA, 201 bp, Homo sapiens
  source 1..201: mol_type = unassigned DNA
acggctgggccccaggagacactcggaggggtccgcgggctcggcccggtccctccgctggggggttaccagccggccggcagcgagatacccagaggcccgtttttccaccgcgttgccatagcaacggcctggccggctgcgccccgggccgcccgccccatcccgcgggcccgccctgagccagtgactccagggacc

SEQ ID NO: 9710 - DNA, 201 bp, Homo sapiens
  source 1..201: mol_type = unassigned DNA
tccagatggtttcaatcactggaggaaaaaagcggctcttctggtatgcgtgaaaagccggagctgggagagtctgggaaaagctgcctgcaccgcccgccggccttcaaacaaaccgatgagctctttcccttctcccagttctcgggcctcgggggagccctacaaaacccaaatgaaattcaaagaagctacttttgg

SEQ ID NO: 9711 - DNA, 201 bp, Homo sapiens
  source 1..201: mol_type = unassigned DNA
ccacaaagcatcagtggtgtctccccgaggaatccaagaccccccggccggttgccaagccgccggaatttcagcaggagaggaaggctcaccctcccaccgcatggcgatgcccgggagactggagaagctcaggcaggcttggaagccaatccccggcatacagcagctctcgggaatgcagagccctagagcaagacc

SEQ ID NO: 9712 - DNA, 201 bp, Homo sapiens
  source 1..201: mol_type = unassigned DNA
tagtagagacggggtttcaacatgttgcccagggtggtttcgaactcctgagctcaggcaatccgcccacctcatcctcccaaagtactgggattacaggcgtgagtcaccgcgcccggtctgacagcctttccagaatgaagtttgtctcggaaaaaagagccctggccagtgtctcctctggggatcagcggaaagcac

SEQ ID NO: 9713 - DNA, 201 bp, Homo sapiens
  source 1..201: mol_type = unassigned DNA
aggggagctgaggggcggagtcaccggggcgcgcccccgcggctgcgctcctccccgccggggagcgcgggcacgtaactcggagggtgctgggccggcccggagcacgcgagcagcgggaggagggaccggggaatgactgacggaggcgggccgtagaggccgctgtgccccgccggcccgcacccggccggagtgtgc

SEQ ID NO: 9714 - DNA, 201 bp, Homo sapiens
  source 1..201: mol_type = unassigned DNA
ggtccccgcctcccctgcaggcggactcgcccgctcccaggccggacccgcgcccgggacagggacccggccgagtcgagccgtcgcgccagcgctgcgccgccggtcggtgcgcctagcggatcggagctgcgcgcggaaccgtgctgccccgccccgctccacccgtgagggtgagtacgcggcggcggtgcgcggggg

SEQ ID NO: 9715 - DNA, 201 bp, Homo sapiens
  source 1..201: mol_type = unassigned DNA
cggggagggaggcttccggaaccccgagagagcacccgtgcctcgcgggccccgtgccccgtccccgggctccccttcctctaacgcaggggacccagcccggggcagtgccgggcactggcgctggcgccccgctcagccctgcgatccttctccgccccgcccctccccgctccgccccgcccctccccgctccgcccc

SEQ ID NO: 9716 - DNA, 239 bp, Homo sapiens
  source 1..239: mol_type = unassigned DNA
agagggcgagcgagagagagacacacacacacacgcacacgcacacgcaggttacatgaatgggaggcggtagccaatcctacgaggccggcgagccgcgcggcgcactggcgctgggagcagggccgcactccggcgcgggggggcgccacgcaggtgatgggcgcctctccgggggccacgcgcggccgctccctcaccccagtctcggttcctctgtctccttcccccttcctctc

SEQ ID NO: 9717 - DNA, 201 bp, Homo sapiens
  source 1..201: mol_type = unassigned DNA
ttttccgtttccacccatcccttcccatttccttctccctttccccgccagcttcgcatccatctcccccaccccgtaaccccctcctgcctccatccaccggggctatggccgcagaagaggtattgcagacggtggaccattataagactgagatagagaggctaaccaaggagctcacggagaccacccacgagaaga

SEQ ID NO: 9718 - DNA, 201 bp, Homo sapiens
  source 1..201: mol_type = unassigned DNA
ctgccggggagaacatgcaccaggtggctgatggctctgtggatgtggtggtctgcaccctggtgctgtgctctgtgaagaaccaggagcggattctccgcgaggtgtgcagagtgctgagaccggtgagtgaaagggtgtgaggaggactagttagtagcagctattatcatagagggcaggcctgtcaatttcaggtgg

SEQ ID NO: 9719 - DNA, 201 bp, Homo sapiens
  source 1..201: mol_type = unassigned DNA
gaggcggaactcaacggaagtgaagaaaagactaacgggaaagaaggacgagtacgcggtcccgggacagacctccaaagcttcttcctgcgccccctggcggccggagggggagcagcgcggacacgtcccccggccaaccgttggttaccaggctggagtggggtttttttctgttgttttccatgagactactgtttt

SEQ ID NO: 9720 - DNA, 201 bp, Homo sapiens
  source 1..201: mol_type = unassigned DNA
gcgatcacgggccccggcgaagatgcgtcgcctgagcgcccgcgcggcccccgtccggggcgggcgtgacccctgctgaacggagacctcccctcccccccgacttcggacggcgcaggccggcgccaggatagccctcaccgacagcgccccttcccacccggagagaggcatcgacccccaaggagggcttcgtcaggc

SEQ ID NO: 9721 - DNA, 201 bp, Homo sapiens
  source 1..201: mol_type = unassigned DNA
tcgcccccgccgctcggggcaggcgcgccgatggcgtttctgaggtgacgccgcccacaccgggcttctccgggggcggaggaaacacctatgaaccctccggcagccttccttgccgggcgccaggtaagcagcggttccgggcgcggcggggcgccgcgggaacggtgcacattggtcgaaatctattgcttctcaaga

SEQ ID NO: 9722 - DNA, 201 bp, Homo sapiens
  source 1..201: mol_type = unassigned DNA
cccgccacttggggcgcctggggggctctggggcgggggaggcgggggctttgtctaactccgccactgccaccaccggccaggccgcggcttggcaacccgtgaacaggaggcagggctgcagggcgtgagggatgatgacaaggaagccggaggagcagcggcggcagcggagagtccatcttggatgcaaatggcagg

SEQ ID NO: 9723 - DNA, 201 bp, Homo sapiens
  source 1..201: mol_type = unassigned DNA
accccgcgccctgcgccttaaccaggactgctccgcgcgcccctgagcctcgggctccggcccggacctgcagcctcccaggtggctgggaaggtaggtgcgtcgctgtccccggcgcgcggcgtcccgcgaggtcttcagccctcgccctggtggatccccgctgggtgggagccgggagtggaggcggccgccctaggg

SEQ ID NO: 9724 - DNA, 201 bp, Homo sapiens
  source 1..201: mol_type = unassigned DNA
cgactcggccgtgagcgtgccccgctgcagctcgctgcccgccaggtccgggtggcagcgcaggatgccctcctggcctgcggagaagcacagacaccggcgggagcgcgtcaaccgcgcccgtcccgcaccgcgcactcgagggggcgcgtaggccgcgcccggcccccctgccccgccccgccccgcccggccccaaag

SEQ ID NO: 9725 - DNA, 201 bp, Homo sapiens
  source 1..201: mol_type = unassigned DNA
cggcctgggaaggcttcggctcctcggctgcggctccagcccggacggcgccgcgcaactttgccatccttctggcccagccccggctacaggaggaccccgcgggcaacgcgcggagttcctggcacttcccggcggtgtctcttgttgtctgcccggggaccgacttcgcatgctctcaggctgacctgtccaagcccg

SEQ ID NO: 9726 - DNA, 201 bp, Homo sapiens
  source 1..201: mol_type = unassigned DNA
gcaacctcggcggagtcggcgcctctgggcacctctggcttccgcgccccggccgcacggtgaccacccgggaggggatcccgggcgccccgcaacctcccggcccccgtgggccttcgggtcgccccgcttcccgccgccgcgtacccttcgcgcctcccggccctcggtgccggcccccgccccgcgtagctccgagtc

SEQ ID NO: 9727 - DNA, 201 bp, Homo sapiens
  source 1..201: mol_type = unassigned DNA
aggaagcccgaggtcggggcgttaccccaagggccctcccgcttcccctccgagggcagagaggcgtccgcgcccggacgcactgcgggaacacctggagcgccggcggagctcggctgtccccgcgggagggagcccgacgcgcatccttgggacccggacccggcgcccgcgcctcgggacggatttctgcctcggctg

SEQ ID NO: 9728 - DNA, 201 bp, Homo sapiens
  source 1..201: mol_type = unassigned DNA
ccgcctgcaggctgtcccgggccgagtcggagcgacgctgccgcgcacctgggcagcccccgggggccgcgctgtgccacggccggggccgctgcgactgcggcgtctgcatctgccacgtgactgagccgggcatgttcttcgggcccctgtgtgagtgccatgagtgggtgtgcgagacctacgacgggagcacctgtg

SEQ ID NO: 9729 - DNA, 201 bp, Homo sapiens
  source 1..201: mol_type = unassigned DNA
cacgcctggggcggccgggggcggggcctggctggaattgacgcgtggagctccggtggagggggcggggcctggctgggccgctgcctacagcggcttccggggcttggaggtcacggggctcggaggtcacggggctcggaggtcacggggctggctgtgtggggggctcaggggcgtagagtggccaagcagcggtct

SEQ ID NO: 9730 - DNA, 201 bp, Homo sapiens
  source 1..201: mol_type = unassigned DNA
ggccctgcagccctgcagcgttcggggcggtgcaggagccccggggtgccgcggcgcccgcccggctgcatcgctggtcccccggctcgggctccaggcccggcgcctcccacccccaggccgcgcgcgtcccgccctcccgacgacccccagccccgggcctccgccacttacgagtccccgtcctcggtgagctgctgc

SEQ ID NO: 9731 - DNA, 201 bp, Homo sapiens
  source 1..201: mol_type = unassigned DNA
gcgctcccgggggctgcgccgtgccgcctgttgtgcgcgcgcagaggccggacagcccggctgcgggaagggacccgagcgcagggtctgccccgcgtcccggaaagtgcctagtctgcggagccggaggttgagctggggcagatcggcgccagacgggggcctgggtgagatacgagttgggggtgcggcctgcagaat

SEQ ID NO: 9732 - DNA, 201 bp, Homo sapiens
  source 1..201: mol_type = unassigned DNA
ctctccctatcacccccccgcccccccacctctctcctttttctgctctgcaggactgagcagctaggcgcgagcgaaaacaaacagctggggctgcgagcgcccccgccccggccccgagagcacgccggcccagtcccccacctggggcgcccgtctgcccaccatgaggaagatccgcgccaatgccatcgccatcct

SEQ ID NO: 9733 - DNA, 201 bp, Homo sapiens
  source 1..201: mol_type = unassigned DNA
gctcgtgccgctgctgctggctccagcgcccgggtcctcggtgagtgcggtcctgccccggcccccggaggaacctgcaggggagtcgggggcggggacgcgcgggcccgcaggcaacgtccccaggaaaggggcgatgtcagggaagctgggctgggaggaggcgagcccgcaccgctgagctccctcagaaagggctgg

SEQ ID NO: 9734 - DNA, 201 bp, Homo sapiens
  source 1..201: mol_type = unassigned DNA
cgctgggcgtcgcccgccggtctaggcgcgcgaacctggcgttcccagtgaatcacccgcggcccgggcgcccgggttcgggaccggccccctcccctcccgctgagccgcggccgagctggctccctgcaccctacccagcgtcgccgggacgcgatcacaccgagatggcaccgagcctccttcaaaggcttcggcttg

SEQ ID NO: 9735 - DNA, 201 bp, Homo sapiens
  source 1..201: mol_type = unassigned DNA
gcctcagtctctgggccggaagccccctctcctcccccgccgcagccccctcctagtccctctccctccgccgatgcgggaaaccttctccgccccgtcccgccctcttcctccagttgcatctccgcccggctcctccgtccagtctccaacccaggccccgcccctccccacccatttcccgccctgggccgggccccc

SEQ ID NO: 9736 - DNA, 201 bp, Homo sapiens
  source 1..201: mol_type = unassigned DNA
gatggcgacgcggatctgcaccgccgtcttgggcccgggccgagcctccccgccggactgggccatggctcgcgggactgcggcgccgccggggtcctcacgccgcaaggcccagccagccggtcggcagcgactgcgacgagggggcgggggcggtgcgagcgcgcctgccgctcggcccaggggagggacaggggtcgc

SEQ ID NO: 9737 - DNA, 201 bp, Homo sapiens
  source 1..201: mol_type = unassigned DNA
gtctgtctcgccgcccgggctttgtggctggccacccgcgagctcgcctcgcctcctctgccccggcccgtccggcccgtcccggggctcccgccgcaaccgagcggagcccagcgacccgccgggcttacatcagcggccgcctcccccgaagcgccctccggcagcgctcgggctcccgcgccccggaatattcatgaa

SEQ ID NO: 9738 - DNA, 241 bp, Homo sapiens
  source 1..241: mol_type = unassigned DNA
cgcgctggcccggcccccagctcctccggccgccgccccccgcccgccgcgccgcggcgccaggagggcggggccggggcgcgcgccgctcctcagcaagcgggcgggcggcgttcggtctgagggagcggggcggtctccgccggcgtcgcgcgcgctgtgtgtgagcggggtcgcgcgcgcgcgcggcaggcgagtgagggaacgaggagcggccgggtgtgagtgtgtgggagtgaga

SEQ ID NO: 9739 - DNA, 201 bp, Homo sapiens
  source 1..201: mol_type = unassigned DNA
ggtgccaagcgtggggcgcgggcccgcggcgggagctgtccgcgaaacctagtgctgaagtaggcgcggacgtgcccggtgcctggcgcgtggtagcaggcgcccggtgccccggccggcgaagaccatggcgttcatggtgaagaccatggtgggcggccagctgaagaacctcactgggagcctgggaggcggcgagga

SEQ ID NO: 9740 - DNA, 201 bp, Homo sapiens
  source 1..201: mol_type = unassigned DNA
gcgcgggacggagctccatgaaagttggaagaagtgattacaaatcgggacccgactctcgcagccttggcgctcgcccctccacgcaggcccgggatgccggcctcagcccccagatgtcgggaagacggcgccggccagtccaaggaagagcttccaggaggctggggagcaagggtgccgggctcctcatgccgggtc

SEQ ID NO: 9741 - DNA, 201 bp, Homo sapiens
  source 1..201: mol_type = unassigned DNA
ccctgctggccagagccgggcacgggccgggcgggcggcggggatcgtgaccgcggctgcgtgcgtccgcgtccgggcgcttctgtgcggggtcctggcacgccggcgggggcgacccgggtgccggcccgtgcgggcgacacgcgcgtctctgcggggctgcgcggggtccggagcggctgggggctctctgccgggcgc

SEQ ID NO: 9742 - DNA, 201 bp, Homo sapiens
  source 1..201: mol_type = unassigned DNA
cagaccccgccggccggcgcgccacccgcgccagcaccatggacagcggccgccccagccgcgcgctcagggccaggcccgggctggcttccaccgcggacggctgcggggtcggggcagccccgcaatcccaaatcccggcagcccccgctcagcagggaggggccccgggggcgaagagtgggggagaagccgggaagg

SEQ ID NO: 9743 - DNA, 201 bp, Homo sapiens
  source 1..201: mol_type = unassigned DNA
gtgtgagtctcgggggtccgggccggcggccctgccagccgggtcgtgcggttgcgggggtggggcggcggcgccgctgccatattagccccgggagcggcgagagggaggctggggtgggggcgcgaggggggcggcgcgaggggggccgattctgcgggcaggtgacatcacacctcgaaggccccagtgcgcgggcgg

SEQ ID NO: 9744 - DNA, 201 bp, Homo sapiens
  source 1..201: mol_type = unassigned DNA
gccgcgccatggtgagccgggcggggcaggccgcgcgctcgggccgggcgggggcgccggggcccgggggcgggaagggggaggccaggacgaggaggggcgcgcgcggcggcggggccgggccggggtctgcgggcgggggaggggcggcccggcgggcgcggctcgggggagggtccgttccaggggccgcgcccgcgg

SEQ ID NO: 9745 - DNA, 201 bp, Homo sapiens
  source 1..201: mol_type = unassigned DNA
caaccgggcacccccgcgcgcacacgcccgtgcccacgtgtgcacgctcacacccttgcacacacccaggcgcgcgctggcacacttacccggagaacttcgcacacacacgcactcgcaaacacgcgggctccctgcgccaccaggaagcagccgccagaatcgccgggtgttccccaactactcctgggagacctggcc

SEQ ID NO: 9746 - DNA, 201 bp, Homo sapiens
  source 1..201: mol_type = unassigned DNA
acacgacatggccaagcgccgccgcccgaaccggccgccgccgacaccccgctccggcccggggctgaggaggaagccgagaaggaggaggaggaggcggcggcggagggcgggggaagaggacggccgttccgggttccgcctgagcccgcagggcaggacgagggagcggcgcggtgagagaggcggatgaaggcgagg

SEQ ID NO: 9747 - DNA, 201 bp, Homo sapiens
  source 1..201: mol_type = unassigned DNA
cgcgcacagcggcggcgagtgggtcgtgcacgcggatgcggggtgggagtgggggcgcacgcgcgggcgtgggcgagcgggccccggcagtgcacacacacggcaggggcgggcgacagatgcagtgcgtgcgccggagcccaagcgcacaaacggaaagagcgggcgcggtgcgcaggggcgggcgcccagcgggcttgg

SEQ ID NO: 9748 - DNA, 201 bp, Homo sapiens
  source 1..201: mol_type = unassigned DNA
cctcaggggagctaagcagctcgcctgaagccccccatctggaaatgacgtgtttaactcggcgcccctgcagctccggccgcccttttttgtttaactccgcgcccctccagctccggccgcccttttcgtcgctctcccctcgcggtcgctcacccctgagatccctggttccactgagacgctcagcttcattcggca

SEQ ID NO: 9749 - DNA, 219 bp, Homo sapiens
  source 1..219: mol_type = unassigned DNA
cgcctgcctcgccgcccgcaccggcccagcccccggcgtccgcccgctctcctcgcccggagcgctgtgagccaggagcagccgcaggctcctcggacgcgcccgccgcgcgcaccacgtggcccggaggcggccgccagtctgcgcccgcgaccgggggcggacgctgcaccaccggctcggagctgggcaggggaggcctcccgccccctccctagg

SEQ ID NO: 9750 - DNA, 315 bp, Homo sapiens
  source 1..315: mol_type = unassigned DNA
gacgcccctcagagacggcgctggctcccctcggcggggctggcggcggctgggggatgccagccgggcgggccgcgggtcgcctccctttataggctccgagagcggggcggggttgggggcgggcggggagctgcctcgggtggcctcgcccccagcacggaggaccctccccgcgaggcgccgccgccctggagccccgcccacggcgctcgacggccggggaaactgcgggagctgggcgctcagtgggggaaaacgagccgcggacgcgaaggggcgggatgaggcccccggggcggggctcggggctcg

SEQ ID NO: 9751 - DNA, 201 bp, Homo sapiens
  source 1..201: mol_type = unassigned DNA
cgcgccgccccagcgctctgcagcggaggcgccgtcctcatcccgaccgcaggcccgcccgggccgcccgcccgccgggcaccgagccgctctgccgcgcgctgcgcctcggggcggggtgggaggagagggagcagccgccaccctgcccaggtcgccgcgggccagccctgcagccagctccagccctgggccgggtgc

SEQ ID NO: 9752 - DNA, 201 bp, Homo sapiens
  source 1..201: mol_type = unassigned DNA
gctcggagcggccgtgaggggcggacggggggcttcggggcgggcctgcaggtcttggggacctgaggctgccgggaggggctgccagggggcgctggccgggcgccgggttctgcggagctggggcgccgacctctgacccgcgagaggggcgccttcgccgtgctggtcgtagttgttattctcagcgtccctattatt

SEQ ID NO: 9753 - DNA, 201 bp, Homo sapiens
  source 1..201: mol_type = unassigned DNA
cggcggtgactgcggccccgcgcgcggctcggctcaggcaggacccgaagcgcggctccgggcggcggcggcggcggcggcggcgtggtcccgtccgggcgggtcctgcgggacaagacggggagccggtcacggggtggggcgactggcgctccgggagcaggaggagaaccgcgggcaggcgggcggggagggtgcgcg

SEQ ID NO: 9754 - DNA, 201 bp, Homo sapiens
  source 1..201: mol_type = unassigned DNA
aagcctcccgcccagccctgccggctcggcctgggcgctgtggaccggtaacagcagttccaccaggatgcaggccggactaagctcctggggaaaacccgttgcaataattgtttttcacacacaacttccaacccttcccccatttccgcctccaattcggagacttgcaaagcccaagaaagggaaaagcaactctat

SEQ ID NO: 9755 - DNA, 201 bp, Homo sapiens
  source 1..201: mol_type = unassigned DNA
cagcatcgtcccggctccgcgccaggcggcgggggaggggaggagggatctctttaggggtgggcttggagggggtgggggcggctccttcccccgccccgccgcgggctcactgtccgggaggggcggggagacagtggggggcagtcccgggcgggagtggaggcggagatgccgccgccgcagccgccgcggtggctg

SEQ ID NO: 9756 - DNA, 201 bp, Homo sapiens
  source 1..201: mol_type = unassigned DNA
tctcatgacgccgaattgcctgggggatcgccagcggtgcgccggtcggagccagctggtggcggggcgggcggcccggagtgtttgctcaaccctgagcgcccgcgagggggaggggaggcagctggtcacgggctagggggtagcaaggtggaggagcgggggctgggaaaggggagggtatctcccgggctgcttgtt

SEQ ID NO: 9757 - DNA, 201 bp, Homo sapiens
  source 1..201: mol_type = unassigned DNA
tccccccgcttcagccagacggggcgctcgcgcccccttccccgccccgcgttggcctccaacaggaagtcgtcccggcccctagcacgtgactcccaccgtatctgcataccggagggcgaactggccaatcggcactctgcacctgagctcctcccccgcgcgcccctcccggcccattggctcctcggccaggccacg

SEQ ID NO: 9758 - DNA, 201 bp, Homo sapiens
  source 1..201: mol_type = unassigned DNA
gccgccaccgccaccgcagctgcagcgtctcttcatatttccagcgcgccgccggccgggcagcctggccgcggcacggaggaggggccctggagggggcggtcgggggaggcgacgccgagccaccgcccccgggcagccgccgccgggggggagcgcggagacttgaaagggcgcgtcgggcaacgcctcccctcctcc

SEQ ID NO: 9759 - DNA, 201 bp, Homo sapiens
  source 1..201: mol_type = unassigned DNA
tcactgcctcctgggcggtgtggatcagctgcagagtgtgatctgcggtcagggagtgccttcccggagttttcgctttcagacccctggtgttaaagacgttctgtgagcgggtggggccgggcgccccagtcacggcggccgccgcctcctcttcccgcaggacgggacagcgcccctgtggatcgcgtcccagatggg

SEQ ID NO: 9760 - DNA, 201 bp, Homo sapiens
  source 1..201: mol_type = unassigned DNA
cgtggaggcgacaggcgccggcgacaactttccagttcgggcgccgcgcgccgctccgcgggacgcgcactggggaccccggccgtccttcccgccccccgcgcggacacaaagcccggcagccgcggcgctcagagggccgagggccatcggacagtccgggcagactctggacccgctccgcgggagctgctcttttgt

SEQ ID NO: 9761 - DNA, 243 bp, Homo sapiens
  source 1..243: mol_type = unassigned DNA
aaggctggagggtgctagaaagatgatcggccgggcacggagcggggagcccggagccgcgcgcggggaggggaggtggaggagggggcgccgggggagcggggggcgcgtgaggggtgcgagcggggcccggggggcgcgcggtgggtgtggggggcgccgggctcacctacctctcgtcagcgccgccattgccggtcacatgactgaggctgttgctgggatgacggtccgggccttagc

SEQ ID NO: 9762 - DNA, 201 bp, Homo sapiens
  source 1..201: mol_type = unassigned DNA
ctctgcacctgcaacccctcggggcagtgacacagctggcctcggtgtcctggcggagggcagaagtgatggccggttgcggtcttgtagggtgagaatcgggttagacaagtgagtgctttagagccggggagctgcacacggaggggagggagtggcgggcgctgcgtcgggcttctccaggaagaggtgagcgggctg

SEQ ID NO: 9763 - DNA, 201 bp, Homo sapiens
  source 1..201: mol_type = unassigned DNA
cgaatgtggccaagggggccgtccagatgggtgtagacacggccaagaccgtgctgaccggtaccaaggacactgtctgcagtggggtcaccggtgctgcgaacgtggccaagggtgctgtgcaaactgggctgaaaacgacccaaaatatcgcaacaggtacaaagaacacccttggcagtggggtgaccggtgctgcga

SEQ ID NO: 9764 - DNA, 201 bp, Homo sapiens
  source 1..201: mol_type = unassigned DNA
gccgcgcccctgggaacggtcagggaagcaagcagaagccgggaagccgcgaaagaggcgagaaagtgcgaccccctccccagatccccggtcccccgtcgaaatccctgtcggccggtcaaaccctagacaatggaagctccacgttttcatcctcattctcccccacaagtccggtcgcgggttcccctcggcccggga

SEQ ID NO: 9765 - DNA, 201 bp, Homo sapiens
  source 1..201: mol_type = unassigned DNA
tgtgacgactcctcaagggggctctgtgagcaccccctttttacagccaggaaactgaggcacagaagggagggactgtttggcaggagccaacagaggcgcatagagcagcgtgatgagccccgggctctgggggcgggcccgcgagcaggcagcctccaccccatggtggaccttcaggctcctccttctgccccggct

SEQ ID NO: 9766 - DNA, 201 bp, Homo sapiens
  source 1..201: mol_type = unassigned DNA
tacggagcccctccacgcgtccactgcggttccgccgtgccaaggggagcttggctgttcacgggcctcacctgctagcgagaagatagcttggccgggcggctgatctcaccttgtaattctgacactgtgtctcccgggcttgtcggcttcatgacttgtgcccaaagtttgatttctcgcagaccaggtaaaagccaa

SEQ ID NO: 9767 - DNA, 201 bp, Homo sapiens
  source 1..201: mol_type = unassigned DNA
ccctgtgtcctcacggcgcgcagaggcggcgccgcgaaccttgtgtgcattttacacgacggcggggactgaggtccctcgcagcccagagccggagcccggggtcggccgagcccgcaggaccggcttcctcgccgactctcacggcctcacccagccccctgggcccatggcggcgccggcgttggtgagtggagggtt

SEQ ID NO: 9768 - DNA, 201 bp, Homo sapiens
  source 1..201: mol_type = unassigned DNA
ccaccgcagccgacagctccacaaacaccaccgctcgctcagcctccgcctccccgggccggctgccacctcgcgccctcggcctggccctggccccgccggctgcactgcacggcccgtccctccgtccatctgcccaccaattctgcagacgccctgtgtccatcctcccctccttcctggccactctccccttctgtc

SEQ ID NO: 9769 - DNA, 201 bp, Homo sapiens
  source 1..201: mol_type = unassigned DNA
ggcgcccctcccgcccgcttgcgggcccgctgcgctagccgccgcaacaaagtttgacagggcgtggccccgcgggaagcgggcccggcgctgcccggccggggcgcaggcggctcggctcgggcccctccggcagcgccgagcctagggctccccaactcgccaccgccgccgcctgctccgccggggcgtcccagcccc

SEQ ID NO: 9770 - DNA, 201 bp, Homo sapiens
  source 1..201: mol_type = unassigned DNA
aaaataaaggatgggtgaacaaattgagatccggcttgctgggcgtcatgtggagaccgtgtgcaggaagagccaagacaccagagccgggggggctccggtgatccctgccgctctctgcatcctgggctcatggttggggcctgtccccctccagctggtagtgccatcctctctgtgccctaccaagctcaccagtaa

SEQ ID NO: 9771 - DNA, 201 bp, Homo sapiens
  source 1..201: mol_type = unassigned DNA
tgccgtggtctcgggtcactgcagcctccctgccccgggctcccgtggttctcctgcctcggcctgccaagtgcctgggattgcgggcgggcgccgccacgcctgactggtttttgtatttttggaggagacggggtttcgccctgttgaccgggctggtctctggctcctgacctcgagtggtctgcccgccttggcctc

SEQ ID NO: 9772 - DNA, 233 bp, Homo sapiens
  source 1..233: mol_type = unassigned DNA
agcactcgacctgtgaaaaccacgcctatgcagcaacacaattggtccgaaagcgtcaaagagccaatcaagaggcctccggctccccgcagcccacagcgcagcccgaccttctagagccgccgagcagacgcccggtgaattctagaggcggcggagggtggcgaggagctctcgctttctctcgctccctccctctccgactccgtctctctctctctctctctctctcc

SEQ ID NO: 9773 - DNA, 201 bp, Homo sapiens
  source 1..201: mol_type = unassigned DNA
ccggagctgcagtagaagcgcttccgacctcgtccaggccctcagcctatcccctcctgaaggtcggcagggggcgtcattaccgttggcttctccgcgcggctccggcctccgcttcgggaaccgagtgcctgcagcccgcgatcctggggaggcacagggttagggtaccgcctcggcggagaaagtggctgtgccgcg

SEQ ID NO: 9774 - DNA, 201 bp, Homo sapiens
  source 1..201: mol_type = unassigned DNA
gggggacgggccagccagggcaggagcccaaggacatgaggcaaagatcccaggctgggactccccgcagctcggaggcggggggtggggagggagggccgggggggtgctgggcggagacgctgggcactggggccagcgctgggcagccatgcacgggggcggggcaacaggcaggccagctgctgctgcttctcagga

SEQ ID NO: 9775 - DNA, 201 bp, Homo sapiens
  source 1..201: mol_type = unassigned DNA
aagctcgtgcagcgcgcgccgctccaccaacgcgtcccggcgcaggcggcagaggaaagcggcctccacgcgcggcgcccgcggccccggggccaggggcgcggccagcagtgccagcacgtcccccaccacgtcgtcgtcgtcctccccggcggtggccgagaccggggcgaggctcgcagcgaccggcccggcggggcc

SEQ ID NO: 9776 - DNA, 201 bp, Homo sapiens
  source 1..201: mol_type = unassigned DNA
caggaatgagcttgctgagggcccagccccggggccgggagtctgctgcaaaggatatgaaaaattctcaccattacttctgcatgtgaaaagaatatgcgtgttggaaataacttcctaacttacatatttttaaacatttgtttagacttataggagaaatatttttactgacttttgcataaagtgtactggaggaaa

SEQ ID NO: 9777 - DNA, 201 bp, Homo sapiens
  source 1..201: mol_type = unassigned DNA
ggggcggggaggagggcggagggggtgtaaactaagtggtgggaaagagacaaaggaagagtgaagagcgagacggtgcggatggggaagggggaggggcgcggaggggcagccggtgggcagcgcgccgaggagctcgagcttgaacttgatcaagcactgggggccctgccgtgggggtggggcgggggtacggccgag

SEQ ID NO: 9778 - DNA, 201 bp, Homo sapiens
  source 1..201: mol_type = unassigned DNA
agcccccaagggaggaggggagagctgcagagaggaggaggggtcggggaggccggctttataaaggcggctggaacaaccctgcccgccagaccccgtcgcccggatcccctgagctgcccgccatcccacgtgaccgcgccgccccccagctccaccgctgagtgagttggggcgcgtccctatcccgttcccagtccc

SEQ ID NO: 9779 - DNA, 201 bp, Homo sapiens
  source 1..201: mol_type = unassigned DNA
gaggagcagcagcgctcgccgggggatgcagcagcggcagcggcggcggcggcggcggcagcggcagcggcggcgcggagtcccctgcgcccagcggcccggccgggctgcggcagaggcggcggcggcgccccgctccgggtgaggttgccggggccgtgcgcgctggtgagtggggcgtggggggcaggtgggtggctg

SEQ ID NO: 9780 - DNA, 201 bp, Homo sapiens
  source 1..201: mol_type = unassigned DNA
gtccggagaagtggatcccgtcccaccgagaggccagggctcctatgccctcgtccccgacctcggtccagtggcccctgcctcccggactgtcctcggcggggcggggctgcaccccggagccccagctcacctcgcagtcctcttcgtacttgacattatcggttattttccacaacatggcgtccggcgtcccccaaa

SEQ ID NO: 9781 - DNA, 201 bp, Homo sapiens
  source 1..201: mol_type = unassigned DNA
ggaacctggaggaacatggcgctgtcgcctcctggcggaagcgcccgggcctgcgggcaggggcagccctccagggcccggaggcgcagtgaactcccgcgagtccgtagcccgagctccgcgctcccggcgcccctgagctcgcctagcgctgcctgcgtcttcttcctcttcccgctcgccgcctccttcttccctccc

SEQ ID NO: 9782 - DNA, 201 bp, Homo sapiens
  source 1..201: mol_type = unassigned DNA
gtcagggaccgtcctttactgtcctttggttgccgaggagcggtcaccgggcccggccccagtccctctgccctgatctttttttccaagtccccatgccgagttggagagcggtccctgagcacgcatgtggtccgaaaggtggcagctggccgggcttgggtccctcatgtgatccagtcatgcgagggaccggctgaa

SEQ ID NO: 9783 - DNA, 410 bp, Homo sapiens
  source 1..410: mol_type = unassigned DNA
agacatgttgggccagcagtgctggctccatcctagatttcttccagtcctccccagttagccgccaaggggcttttccaaccggaaacctccaatccgcgaccccggcgggtgcaccgccgagccccccgggaagtgtagttccagcgcgagcgggacgctgggaaatgtagttctgcgcgttcacgtccccgatcgggccgtgtccgccgcggccctgcgaggtccgaggggtaagggagcgtgcagcgggggcgggaccacgaggcggcggggctgggggcggcctctgtgtctgcgccggggatcgcggtgaccccgctgcggaccggctcgcggtgaccccagcgcgaacgagctggctgccggctggggcgagaaaggcctgcggaccggcctgggcgcatgcg

SEQ ID NO: 9784 - DNA, 201 bp, Homo sapiens
  source 1..201: mol_type = unassigned DNA
gagccagagatgcattcctggccggcctgagcatctgcgggaaccctgtgagcccctgaggttcacttcttgctccccacttctctctcctgcaaactccgagcccggggtaaagctgcttcccctccccacaccccttttcaacccgacaactaacgccctctagcttccgggaatgggacggatctttcccaaggactt

SEQ ID NO: 9785 - DNA, 201 bp, Homo sapiens
  source 1..201: mol_type = unassigned DNA
gggatcccccgctccccggcctagggggcacccactccgcacgtggagcccgggcagcgtccccagacgcacccagcgggataccggagaggacgccgacgcagtgcaacgccccggccgaagcgccgaacaacatgcgcgcgtcgcggaggaggtgcggggcgtgctcgctcaggcagcgggtcgccccgacgtggtaga

SEQ ID NO: 9786 - DNA, 201 bp, Homo sapiens
  source 1..201: mol_type = unassigned DNA
atgtgccctgccgagttgatttgctcagctcactctttattttgaaacgacgtcaagcatgaagaagagttgcacaaataatgccaataactccggtgccgccttcatgggggttatggtggttccagtgcactccacatgtcccccctctctctgtccctctctctcgtgtacacacacactgtttcctgatccaagagt

SEQ ID NO: 9787 - DNA, 201 bp, Homo sapiens
  source 1..201: mol_type = unassigned DNA
gtgactctgcgaggttacactccgggtgcgtcgctgcgggctcgtgggctcgtgggctgcagccccccgctcctgtcgggtggacgagccccgggcccgcgtggagctgctcggtcaaggccggcccgggaggggcgcggcgcagggcgggcaggggcggggtcctaggtcaacgtccagccccagacccagccccgccgc

SEQ ID NO: 9788 - DNA, 201 bp, Homo sapiens
  source 1..201: mol_type = unassigned DNA
ggagggagaaagggagagagttccagccgccccggctgtggcaggaggagccccaagagcgctccccgagcccgccccgcacctccaggctcagcccggcgcaggctccctctcccgccccctccacccccgccagctgctgaaacccccccaccgtccctccgcgggcaacagtgcccgccaggcgccgccgcgcggtgc

SEQ ID NO: 9789 - DNA, 201 bp, Homo sapiens
  source 1..201: mol_type = unassigned DNA
gtcctcaatgcgggcggcccccgcaccccacgcggcccggggtccctgcccatcccccgcgggcgggccccggacccctggggctccccagcccctctccgctccccccccgcgccggccccgtgccctgcggcccggcggccccggcggcgcgagtcgggggaggcggcgaggggtgtccccgaggcccggcggcgcggc

SEQ ID NO: 9790 - DNA, 201 bp, Homo sapiens
  source 1..201: mol_type = unassigned DNA
cccgcattccctttgatttttatggacattcagctaacagtaggaacaaaaattaagatctttcctttcccattcgcctggacacttatctttccggctcgcgccgccgtgtcctctacccggctacacagcgactccaaaagtttagctttcaccccgcggagatttcgacagctctgggaggctctttttaaaagggaa

SEQ ID NO: 9791 - DNA, 201 bp, Homo sapiens
  source 1..201: mol_type = unassigned DNA
agccgttcggctgacgtgacaagggaggtgcaggccaacacggcgactccgcgccctctggcggcagtgccggagcagcggcgctgtctttgacctatccggcattcggcttccgggaccgcttggcggctgtgaatgcagagctggggcgacgtggggctcgcttcctgggactgggtgtgagcttgcgcagtgagccat

SEQ ID NO: 9792 - DNA, 201 bp, Homo sapiens
  source 1..201: mol_type = unassigned DNA
aactgaacgtctgaaacgaaggtggcgcggcctggacaaacctgacccttcgacatcccccgcccctgcgcccgccctcgctaagcggggaggagcgaccgctacaatggatcctcccgcaggctttgtgcgcgctgggaatccagctgtcgccgccccgcagagccccctgtccccggagggcgctcatttccgggccgc

SEQ ID NO: 9793 - DNA, 201 bp, Homo sapiens
  source 1..201: mol_type = unassigned DNA
gccccgggcgcctgctgctccgtgcctccaccgacgacctcactcagctgcgttacgcgccgctccggctgccggccgcgcgccttgcccgccggctcccgcccgcaatcggcggctcagggcggacccgggtctctgcgttctcgcgagaagcgcggcgctgcggggccgtgggcgcctgagcccgcgcggccctcgagg

SEQ ID NO: 9794 - DNA, 294 bp, Homo sapiens
  source 1..294: mol_type = unassigned DNA
ctcgccgcccatgcttccactgcaaggccgcagcccccgccgccgatcccgatcccccgccccgcccagccgcggccccgcccggcgccccctccccggcggaagctcaagcccaattaattgagtccgaggcgggagggaagggccctgcgcgccgtggcccgccccgcccctcttccgcgccccttttcccgccctgggtggcatctcctccgccggcatccacaacaagccgctgattaatgaggccggggccgccccaccccgcccggccgggccggggccttcgcggga

SEQ ID NO: 9795 - DNA, 201 bp, Homo sapiens
  source 1..201: mol_type = unassigned DNA
caagtccatagaagagcaaattctcacccttcgaggctgctgtggaagctaccggggctgggacagcagagaggaacccagacgggaacaccgccctcccgccagactcccggcggctcctcctccctctcccaaacccactcccaaagctaagtgcaggcttccccgttccagccagaagcgctgcgtgagcctccacac

SEQ ID NO: 9796 - DNA, 201 bp, Homo sapiens
  source 1..201: mol_type = unassigned DNA
gaggcccacgctttccagaccgccacagtcgctgtcacagggcctgagtttgggcggcgccccgccccggccgcacggtgcgccggcgttaatcctccccgaaggttccggcagccaagattgcaggttcccaccaagcattgtttccgaactgggccacgagagcgtgtccctgattggcttgctctggaggctgggaag

SEQ ID NO: 9797 - DNA, 201 bp, Homo sapiens
  source 1..201: mol_type = unassigned DNA
tcccccgcgcgccgcctccccccgccgccggccgcgtgcgcccccgcccctccccccgcggcgggagcacctccgctcgccacctggggacccgcgccgcgctccccgcccccgcccgcccggcgcccatcccccgcgccctccgctcgctggggttataattgcctctcaccccccggaggggttattttgggggtggtt

SEQ ID NO: 9798 - DNA, 201 bp, Homo sapiens
  source 1..201: mol_type = unassigned DNA
gcggccccggtgagcggggcgaggggcgggtgggcagcggcgccgggggaggtcgaggaggcgaatggtggtgtcggggcggcgggtaccgggcgaggtcgcggccagccttctcgggccggagttgggcatcgcggggacggggagtgtcgggggcaggtgaggccagggcaggagcccacgcggtgggtgcgaaggcct

SEQ ID NO: 9799 - DNA, 201 bp, Homo sapiens
  source 1..201: mol_type = unassigned DNA
ggaggcgctgcgccaggcggaggaggagcgcaaggccaagtacgccaagatggaggcggagcgcgaggccgtgcgccagggcatccgagacaaggtgcgcgccgggccggccccgcctgcgggaaggcggccctgagtccagcggggacccagatcccgcctgggtggaaggggctgcccggaagaggggcgggcgtcccc

SEQ ID NO: 9800 - DNA, 201 bp, Homo sapiens
  source 1..201: mol_type = unassigned DNA
aaagagaaaagaaacagataaaaccagggcagggggtaaaaaagttccccgcgcctctcggaatccagcggccgcggccgcggctaccgccgccgccgccgggggtgggctccggaagagcctgcccagcagggaaggggaggacgggccaggagcgaaatcctgcaggcgaggaagggacagacgcgcaaagaaaaagtg

SEQ ID NO: 9801 - DNA, 201 bp, Homo sapiens
  source 1..201: mol_type = unassigned DNA
cgcgggcgcagcggcggccgggcacgaggccgggctgacaccaccatctgctggggcgcgggaagaacggcagctgctctgcgttgccccggcgagggacgcctggaaaaggctgaagccctgggcgtcctcaagcccgttatccacggggtccccgtcaccccagcctgctcgccgccggccgtcttttgtgattccctg

SEQ ID NO: 9802 - DNA, 201 bp, Homo sapiens
  source 1..201: mol_type = unassigned DNA
tttcccagggatggccttgtgcctgggctctcttcccctccaaactccggggtggcccctgctttatcagactgaaccggctctaaggagaaaagttgacgatcatcctgctctagcctccgggaagtcttgctccacaaagaacaagagtctctggttttgtgaaatgagtcacaggctgccttgaccatgcctatctgg

SEQ ID NO: 9803 - DNA, 201 bp, Homo sapiens
  source 1..201: mol_type = unassigned DNA
ccccaaaccccgaccgccggcctggcgcgcggctgcgcccaccggctccgcgctgctgccgccgccaccgccaccccgccgccgccccggcccgcgggccgcccaggctagtacccgggccggcctgcctccgccggccgtccgggtgcccgccgccgcgccgcgccccggccgggcgtggatggagggcgccgcgcgccc

SEQ ID NO: 9804 - DNA, 201 bp, Homo sapiens
  source 1..201: mol_type = unassigned DNA
cggccggacctcctcccagactgcctgcggtctgaaggggtcaggtccgcgcaaggtcccaggctgcttgggcgccgggtcgcactgtcaggagctgcccgggagtggctttccaggaacaccaggcactgaccacacaccaggggctgggaaaccaggtggcctgcaccaaggcggcttcggggacttgtctgtggcaag

SEQ ID NO: 9805 - DNA, 463 bp, Homo sapiens
  source 1..463: mol_type = unassigned DNA
agcgggcgccccgcagccgtgccagcgtcacgctgtagcagccgagcatcagcccgaaaggaagcacgaaagcggtcagagtctccaggctcaggtgggcggcggcgtggaccggcgacgggtggcacagctggcatacgcggtccctccacaggtggcggtagacggcggccgggacggcgagcaacagggcggccagccagaccgccagcagcaggcggcgggccagggccgggctgcgcagccgaggcgccaggaaggggcgggtgactgcgaggcagcgctgcaggctgagcaggccggtgagcagcacgctggcgtacatgctgagcgcgcacacgtagtacaccgccttgcagcccgcctggcccagcggccaggcctgccgggtcaggaaggccacaaagagcggcgtgagcagcagcaccgcgccgtcggccagcgccaggtgcagcacaagcgt

SEQ ID NO: 9806 - DNA, 201 bp, Homo sapiens
  source 1..201: mol_type = unassigned DNA
ggggacgccagtggactggagccgcggagcttcgagggaaaaactttgcaggcgccgcggccgggattcggttacggctccagcccaccccagcaggtgcgggaggaagaggcagcgccggagtcccgaggccagagagcctcggcggcggcggccgcttctttcccccgagctggcctgaagtcgctgggcactcccggt

SEQ ID NO: 9807 - DNA, 201 bp, Homo sapiens
  source 1..201: mol_type = unassigned DNA
agggctgggaggatctgcagttctcctgctggccctccctttccaggaagccggccagcttggagccggctgctcaccccgactcaccccccgcctgggcggagcaggaatgtggaagttggcccgaaaggactgtgccccctccccgtcaaacaccccccccccgcgtcccccaccaagttctggccggggctgtggagc

SEQ ID NO: 9808 - DNA, 201 bp, Homo sapiens
  source 1..201: mol_type = unassigned DNA
agggcggagctcccggggcagaggcgctccgcggcaagaccgtcgaagtgggtttcgacggctgggccgctgcccccggggggccgaagggtgcgggctcgggctccgggggccggggcttcttcctcagcaccacgaacttgacgccgtcgagctccttcaccaccgccacgttgttgacgaactgcttgaagcggtccc

SEQ ID NO: 9809 - DNA, 201 bp, Homo sapiens
  source 1..201: mol_type = unassigned DNA
cggaggaggctgcggggggctccggcccaggcgaaggaagggcaagaggctgttcgaccgggggcggcgccgggaggtgggtgggcttaacacccaggtcgggggaggggtttaagagacaccgggaagggcagccgagccccaggggcgggtggggtggtagctgtgtgtagtaggggacagggctgggcctctggaagc

SEQ ID NO: 9810 - DNA, 201 bp, Homo sapiens
  source 1..201: mol_type = unassigned DNA
tagtcgacatgacgcgcggcgcagccaatgggaggcggagttggcgtttcttggtcgggggggggccggaggggtgggccccgcgtctccggtgtctgccgtgctcactgaatggagagagcgagcgccggccagctcacccggccgccccgtgccccagccgcagccgccgcgctccccagcccagccccaagccggacc

SEQ ID NO: 9811 - DNA, 201 bp, Homo sapiens
  source 1..201: mol_type = unassigned DNA
ctttttttaagttttcccttggggactgacattttattagcacagagatcaataatgccagataagagacctctgattttacatctggggctcccggaacgatgtctgggagagaaaacatgacgtttcttgcagaggcgaatcccagcccgggaggagggaggccgctgggatgtgccgccggcggcttttgggctcggt

SEQ ID NO: 9812 - DNA, 201 bp, Homo sapiens
  source 1..201: mol_type = unassigned DNA
agactggacccgaacccggcccaccccacccgagcggcgacgccagcgctgaccccaggcgtgtcccggcccccggcgcggctccggcccaaccgtgcacgcccgcggaaggcctcgcacccgcgtcagaagtggcctgcccggggccaccggcccgcaagtccccggtgttctcgaggtccctgccccgtcccgcgcggc

SEQ ID NO: 9813 - DNA, 201 bp, Homo sapiens
  source 1..201: mol_type = unassigned DNA
ggggctggggagggctgccggcggcgcggcggggtcggcgggaggcgggaggctgcgcgcggcgcgggagcgtgcgccggggtcagcaggggcggggtccgcgcggccgccgggactggaggcgcgggggtagcgggtagggtaccctgagggcacacccccggccacctggcgggagacccagctctgccgcgcgccgcc

SEQ ID NO: 9814 - DNA, 201 bp, Homo sapiens
  source 1..201: mol_type = unassigned DNA
gccccggccgccgggcgcgcagccgccctccccgcgccctgcccgcttttatggcattttctaggaacgggaagggggtgggagccgagccggcggccgcgccgcgccgaatgtgtgctctccctcccggctgtttacggcggccgaggcgcattgtattttgctggcgtcgaagggtgttttggaacagcagagggagga

SEQ ID NO: 9815 - DNA, 201 bp, Homo sapiens
  source 1..201: mol_type = unassigned DNA
cctagtgctgcccgggcgccctcccgcagcagccccagggcgaggaggatggggggggtcctcgcaggggccacactgtcggagccccacggatccgggcgggacggtgaggcctccacactgagccggtggcaaagtccccgcgaggatgaaggaggaaccccgtgctcctcaccccaccaggccccgcatttcctggct

SEQ ID NO: 9816 - DNA, 258 bp, Homo sapiens
  source 1..258: mol_type = unassigned DNA
ctctctgggacaagaagtggagtggggcggccaggacgcgggccgtggggatcgcgagggaggagggggcggccgcccggacttaccccgtggggtccccgcgcgcgggcgccccggcgtgtcggatcatgccgccggcagctccgggacggggaacggaggcgctcaggcgccgggccgcgcggaacgcggagtcccgggcgcccgcatgtccctggctctggccctctggaagggccaggccgccgctgccgccgc

SEQ ID NO: 9817 - DNA, 201 bp, Homo sapiens
  source 1..201: mol_type = unassigned DNA
cccggtcgccacgccccttccgagggtcgctccgcccccgtcgggccccgcgagcgcgcggtgggggaggggagggccccggagcgcgcctgcgtggggcgggggcggcagccgactaggggctgggtctggccgtttagggccgggtcttggcccgtcgcccacggtgcggagggctggtgggctttccttggccgtcgg

SEQ ID NO: 9818 - DNA, 201 bp, Homo sapiens
  source 1..201: mol_type = unassigned DNA
cagcagctccccagagccctggcttggcagggaggggacggcgcccgagcagccatattgcagccccccgggtccctcctccggccggcgcaggccccgcgctcacgacctcctctgggagccggatctgtcctctccatcgccgccacccgccggcctctgcgtcccttggcttccgacatcccgtctggccgtccccct

SEQ ID NO: 9819 - DNA, 201 bp, Homo sapiens
  source 1..201: mol_type = unassigned DNA
tccccgcgccatctcgggcccgtccccgctcggcctctccggagcggccgcgccctcagccggggagcccaggggtcctggtccgcggagccgggcgcgcggggggcggctggggccgcagcagggggaggctcggcgctcgcagccgccggcgcggggctcatcgggcgtgtgggtccatcccggccggggcgcgacggg

SEQ ID NO: 9820 - DNA, 201 bp, Homo sapiens
  source 1..201: mol_type = unassigned DNA
gggcccttagcacgcgccccagcgccggagcagggtcagggtcttcttgcgacccggccccgctccagatccccccagctctcggccgcggacccgggccgcgtgtgagcgccctttgcacctcctatctccagggtccgccgagagccacgattttttacagaaaatgagcgataaagagattttgtactgtcctgactg

SEQ ID NO: 9821 - DNA, 201 bp, Homo sapiens
  source 1..201: mol_type = unassigned DNA
ccgggcctagggcgccgcctgcagttgcgcgcggccgcctctagatggaactttctcaccaacgcaaggcccggccggagcagctacccgggagctgggcggcgaggggctactttctctcattccggcgggtgcaggatcggggggcctgggcagtaactagtggggaggagcgctggactgtgcacgtcgagcccggca

SEQ ID NO: 9822 - DNA, 201 bp, Homo sapiens
  source 1..201: mol_type = unassigned DNA
ctcgccccacctcctgcctgttcccggctgtcagagacccaggtgcagagagacctcagaggtggcgtccggggtcctggcgtccctcctgcggacgctcgctgcagagcaggaagccgccgccccggggcggaggggcgagccgggccagggggccggggtggagaggtctgcagggcctgcgcgctttccttacccgcg

SEQ ID NO: 9823 - DNA, 201 bp, Homo sapiens
  source 1..201: mol_type = unassigned DNA
agcaccaggtccggctccccgtacaccgccccgaaccccgggggtacgggcgcgggctccccgggctcctcgggggacgcggggtcctcaagccaaacgcgcggttcgggggacggcgccgcgggctcttccgggcacgcgcgctcctcaggggacgcgagctcctccggggacgcggcgcccgcgctgccggcctcccac

SEQ ID NO: 9824 - DNA, 201 bp, Homo sapiens
  source 1..201: mol_type = unassigned DNA
tccccggccgaggaggggccgcgtggcgccgcggggggcgggccgcgcacgccccccgcagggaggactcagggacagtcagggccccgggagagtccgcgcgcatcgcccggctccgcggcgccagccatggcgtccgtgcgtggccccgccagggatggggcgacgcggtcagagccgcacgcgaccgaaatccgcact

SEQ ID NO: 9825 - DNA, 201 bp, Homo sapiens
  source 1..201: mol_type = unassigned DNA
gctagaaaggatcgagaaaaatcccaaagctctaagcctgagctagggagggtctcagagggaggtctgactgcagaccgggagtcttctcctcccgtgcgccgctgcccgggacgagaaacccgtggggcatccaggactaggacacgaggtctcagcctgggcaggtggacaagctgtggggtcccaccctccgcaggc

SEQ ID NO: 9826 - DNA, 201 bp, Homo sapiens
  source 1..201: mol_type = unassigned DNA
gccgctgagtacgcgctccaggcaggctctgggaagtccgggatggaagcagctccctttctctcgccttcctccctcccctctcccctccctcctctccgcgcctctcctcctccctccgccctccctggacgtgggctgccggctgcagcccggagggacggggcgcgggacggagccccccgcgggaggaggggccgg

SEQ ID NO: 9827 - DNA, 203 bp, Homo sapiens
  source 1..203: mol_type = unassigned DNA
gtaggagcggcccgtgtccgcgggcgggagcgtgcggcctggactgccccgccggacaggcattgtctccccgccctctcgggctcgaggcgggccgcgcgcgccggccgccgtccgggcgtcccgcggtgggcgagatgcgccgcgtccgttccatgcctgccgcccgcgcgccccttgctccccaccccgtagccgctcgc

SEQ ID NO: 9828 - DNA, 201 bp, Homo sapiens
  source 1..201: mol_type = unassigned DNA
ctcctcgcagagggcaggacacccacctccccgtgcacctgcttcttctccggtctcccgcccccagcagcattctaggacccaggggtgtcatcgggtcggggagggaggggctgagcctgggtttggggacatcgggacagggggaggggctggcgctcccgtctggccgggaccccgtggcctagcgcggctccacga

SEQ ID NO: 9829 - DNA, 201 bp, Homo sapiens
  source 1..201: mol_type = unassigned DNA
agcgcctgcctaatttgcagtgacaccgctcagctgcccagggctccagctgtcacagccaattagcccgcggccggggaggagcgccgggcaggggggcgggggggcatgaaggggtcggcgggggaggctgtgggggttgcaggaggggtaggcgcaggaggaggcctgtggccttcaggtccggcccgcccccccagg

SEQ ID NO: 9830 - DNA, 201 bp, Homo sapiens
  source 1..201: mol_type = unassigned DNA
gggcgcactgggcgaaggcgacgcgcggctcgtgggtgcagcgctgggcgccctgaggaggctcctgctgcggccccgggcgcctgtgcggctcctgagcgcggagctgggaccgcgcctccctccgctactggacgacgtgagcaaacgccccgcctccgggtcccgcccctgccgctgtcaccgcccccgcccttccag

SEQ ID NO: 9831 - DNA, 201 bp, Homo sapiens
  source 1..201: mol_type = unassigned DNA
caggtagaggggggcgggagggggtgtgagggagaggaggagccggagccgccgctgcggccccctccggggaggggagaggagaacccccttcctcctcgccccctcccagccccccgctggcccgggagggggtggggcgccgaggccgcggcgacccggcagggcctggccggtgaagagcaggcgggcggggtgcgg

SEQ ID NO: 9832 - DNA, 201 bp, Homo sapiens
  source 1..201: mol_type = unassigned DNA
ccaaccctgcgctcccctcccagcccgagtcctcccgctgctctttctcctcctcctcccgagcctcctcccctccggcgcggcgccgccagccagcctcggcggggagagtgcaggtactttgccttcagaataattagcaggacccaagccggctttccgagcgcgctttctttttcttcctttgccccctccctccgg

SEQ ID NO: 9833 - DNA, 201 bp, Homo sapiens
  source 1..201: mol_type = unassigned DNA
cgcggacggcgcccgacagcagctggaggagcggtttgccgacctggcggcgagccacttggaggccatccgtgcgcgggacgagtgggaccggcagaacgcgcggctgcgtcaggagaacgcccggctgcggctcgagaaccggcggctgaagcgcgagaaccgcagcctcttccgtcaggctttgcggctccccggcga

SEQ ID NO: 9834 - DNA, 201 bp, Homo sapiens
  source 1..201: mol_type = unassigned DNA
cccgcctccccgcctcagtccgcgcactcaccgcgcacgcagagcagtgacatggccgaggatcgggcaagcctctgccgcgccccagccgcgccggaccgctccctctttcctctcagcaggtgccgcgactgctctcgttaccggccccacgggtctggcagctcctcatggtcccggtcgcaggtagcgtcccgccgc

SEQ ID NO: 9835 - DNA, 201 bp, Homo sapiens
  source 1..201: mol_type = unassigned DNA
tggccattgttgcgcaggcgcagttctgggagcggcgggagctggaagcccaggagttccagggggcgcagggccgggcagaaggcggcgagctgggggcggatatccaccggggactggaagcggcccgcgcaggctggggacacccggggccagggcgggtcgcctggggtgggagagtatagtgaggaagtctgacgc

SEQ ID NO: 9836 - DNA, 201 bp, Homo sapiens
  source 1..201: mol_type = unassigned DNA
ttggggacgccgcagcccggctcggggagggggcgctaggccgggagccgcagcgcgggagggacgagcccgggccggcggggggaggggagcgggaagcgtctttgttgttggcgaccgggatcccttctcggcacaggggaaaggcggggaagccactcctcatcgggtctgtgtttttgagaggattctctgatggtt

SEQ ID NO: 9837 - DNA, 201 bp, Homo sapiens
  source 1..201: mol_type = unassigned DNA
ggtctctgggaggcgccgcgtgggggcgcggcccgtggagcccgggcgctagggaccggccggggccggcgtacgggtgcgctctgggttcgcccgggccgcgggagccagggagccagggagccagggaccccggctcccgcacggggcagacaggggcagcgcgggcgacccggagcgcctgcgtctccgcggccctcc

SEQ ID NO: 9838 - DNA, 523 bp, Homo sapiens
  source 1..523: mol_type = unassigned DNA
agagtaccgggcccctcactgcctcagagcgcgtgtgcggctctgggcgcgcacagtgacggtgacggcacccctggcccggcagcgccgaggccgcttcgccagacagccagcggccggcggcaggccgggccatgagcggcaggggccgggccgggcctcgctgaccctggctccgcgcggcagcttccccagtttccgctccggtctctcggcatgagagtccgcccgggcccggggctgcggctgccccagacccgccgcacgctggcgcgctccgggcccgcggagccgcggtgctgatacctgcgccgcactgcgccgcccgcccgtccgctgtgtgccccgggggcgcggccatggaggtggtgggtgacttcgagtacagcaagagggatctcgtgggacacggggccttcgccgtggtcttccgggggcggcaccgccaggtgagcgccggccggggcgaggccgggccccgggcggcaggcacggggctaggtggttctgaaacttggcgcag

SEQ ID NO: 9839 - DNA, 201 bp, Homo sapiens
  source 1..201: mol_type = unassigned DNA
cggcggcaggcgggggagggggtgggggtgcaggggcggccccgcgggccgcggggggggcgcgcggcgcagcggggtcccgggcggggcgcagcgggccgcggggctccgggcgcgctccccgcgctactccagtgccatggtgcgcccgctgagccgccgggtttagagctggggctggcggcggagggatacgggccg

SEQ ID NO: 9840 - DNA, 201 bp, Homo sapiens
  source 1..201: mol_type = unassigned DNA
cgccctcccgccttcccggtacctgcctacccccgcaactgtcccggcccccaacacctgcatcgcccaaccccttccccccccgccccctgccttccccgcacctgcccggagtcccagcacctgccccgccccccgctatccccctccttgctggcctgatggggtgtgggcccaagggagccacacttgggcggaggc

SEQ ID NO: 9841 - DNA, 201 bp, Homo sapiens
  source 1..201: mol_type = unassigned DNA
ccccggtctgacggaacacaggcgacgcacgtgaagtccaggccctatcccagcgcaggcgggcctccagcgacccacagttgtcacatatccggccagcgccgactcccgaaggcgcactccccatactccactccgagcaccggtcccatcgttagggaaggtccccctggatagcaaggccggggcccaggatctgcg

SEQ ID NO: 9842 - DNA, 201 bp, Homo sapiens
  source 1..201: mol_type = unassigned DNA
cggcaaccccctctatcgtcccctgcagcaggcgccgagccgccgccatcttgtcccccgtccctccccccccctcaccgatatttacatagcgaaaatcggcccggccggcctgcggccttcacctcacgcctgcagccttcgcctcctcgccaggcctcaccccggcgcggtgccccaggtcggccgcggagccgaccc

SEQ ID NO: 9843 - DNA, 201 bp, Homo sapiens
  source 1..201: mol_type = unassigned DNA
cgccggcgggcgggaggcacacacgcgcgcacaagcggaaagaaagcgggcttactgcgtggggatgctcgcccgcgcagctgtctcggcggcggcggccgctgcctgcaccgaggccgaggcgcggcggtggcggcggcggctgcggactgagccccctccgccgggcggtggatgtagggcgcgggaggggcgcgaggg

SEQ ID NO: 9844 - DNA, 201 bp, Homo sapiens
  source 1..201: mol_type = unassigned DNA
tctcccgccagcgtcctccgcccgcccgccccttctcggccccgccccgcggggctgctggagaaatcaagtctggggctccccttgtcgagcacggggcgagctccagaaggctctgccgtgatggaaaacttccaggcaaattcctccgggcccgtggcccccaggccgggaagcctccgccacgtgaagggcccccgc

SEQ ID NO: 9845 - DNA, 201 bp, Homo sapiens
  source 1..201: mol_type = unassigned DNA
tctccacacagaaaatctgcaccagttatgtaagctaaaaagctgtgtgaacccaggtgtcccggaaaggggctgcaggacacagcaaaatgccagcagcgtgccggacccctcccttccatcctcctctccaaagaacagaggtcaggaaaaacactggctgggacgctagaagggtcatgtgttaactataatcacatt

SEQ ID NO: 9846 - DNA, 301 bp, Homo sapiens
  source 1..301: mol_type = unassigned DNA
gcggatggggccttgattagctgtggatttctgtcccagcgcactcatttaaccgtgtttctcttggttggcagagggcgccaaaggcgacgtgccggccgccagctccaggccgagccccgagcgcctgcaggaacacgccccttcacccggcgcgggacgcagagctgcgagagaatcttgttcagcgcggactcaacgccagggcgccgcctagaggttggtctctgtctcggcctcacccgccgggagaccacagagctgcttccccagccgcccgccgccagaaattggaaaaaaa

SEQ ID NO: 9847 - DNA, 223 bp, Homo sapiens
  source 1..223: mol_type = unassigned DNA
ccagagctgcacgtagatgaacacgaagagcagcgcgtagaacacggtgtagacgacggtgaggccaagcttcacgtaggggggcacggccggggtcagcgtgggcggcagcgagtcgttgcgggctgggtcccacggcggggtctccatcgggccgggggcgctgccgcgcggccggggacgctcgggcctcatcggggctcacggccgccgccgcccccgc

SEQ ID NO: 9848 - DNA, 720 bp, Homo sapiens
  source 1..720: mol_type = unassigned DNA
cagctgaatgaatgggggaggaaggcgggcgccggcccctccccgcgcgctgcgcccccgccccgcccccgcctcccgggcggatcaggttcccgcacccgcaccggcctccctgtctcgcactggctgctccgcccgcctgtcaaggccaggcctggggggctggggcccgagtggccgctgggggacagtcctgggcacacgaccggagcgcccccctcctccccgcctggcccgcgcccaggggacggcgagagacgcggcctcagcccctccccccgggcgccccgctgcggccagatgtgggcggatgtggaggccgggccatggcgaggagggcgggcgcccagaggggaagagattcctccccttccccgggcgcagggtccttctgcaggaggctgtatttgggcagccaaacaaagttctctgtcaccgccgccgcgcgctctgcgcctgcaagggttaaacggcagcgcacgcggctggcaggcaggatcccggcctgtgggctcaagagccgaggggcgcagggcgaacatgcgagtcccatggcaccagcgagaggccaccaactcccacccaccgagggcacccctgcagctaacacccccaccacgaccaccgccccgggggccaccgctgcaccctcctgggtgagccctggagaaggcactgtccgggagaaggggcacagggcggggatggaacacggctgtc

SEQ ID NO: 9849 - DNA, 1683 bp, Homo sapiens
  source 1..1683: mol_type = unassigned DNA
accgagggagggtgcaaaaggcggggggcggagggggggtagatcagattaggcgaaactcaataagctcccagccctccagcccaaagcttccaccatcgccgccaccaacgagccactccaattgagccagcatcgccgcccacccgccggcccgccggaatcgcgcccatctcctgcaacctcgcccggaccggcatcccgccccctcggcccggtctcccccttcccgccgggtgcaaagtcaaagacccagcaaggcgacgtgaacttttgcatgcagggcacacacgtcgcccccggttccgggagtgcgggggcccgcggcgcggagggaggctgggcgcccgggctcccgggccaaggtcgccgcgcgtgctcacccatgtcccggcggctccggctccgctggccccggcgctcgctcagatcccggctcccgtcgctcgcccgagcccccaaaggtgctgctgcggcaactccatggcgatgagcatctgtcaaacggcgagccgcgagctggccgccctagctcggggggcgccggggcccccgggcgcgcggaggcggcggcgagcggcgggcgccccggccggccccgcgcttcccgcccgactctgccgcctccgccgcgccaccgatttatggagagagatatcaagggggaaaatggcgtctccggagcccgaggagtcctggagtaatcacattcacacacacacgcccgcacgcacacacactcgcacacactggcacacaggcgcgcggcgagccctgctaattttagcaggagccaaaaaaaattttatatatatatatatatatatatatatatatatatccccgtctctccgatcaatgctttttctttttttgcttttttttttttttttttttttttttttgcttttcttcaaaggatgggttggagcgttaaaaaatgttggtgggtttgggctcgcaggaggcggcgcgcggagggcgagggcgcttttgctgagctgtgcagttcggtccgctgagcccggcggccctgcccgcccgctcgtccgcccgcggtcgctagtgttgccgccgccgccgccgccgccgccgctgctgctccatggccgcgcccgccccgcgcccccgccgcgtcccgtcgccgcccgcccgcgtccccggtgagcgctggagtggggtcgggcccgtgtgcctgcctcccgcgccctctccgaatcccggactcctagtgaaaggaagggggagggcgcgggcgcggaagggaggtggatcggagcggcagcgcggcccagccgaacgggtaccgaccgtcaccccgcgatcttcctcgcagggggcgccggcgcccaagctgctcgcccggagggcccagagccgcttcccagaccagagccgggggaggcgcagccagtagcgagccctgagcgacctctctccccactcgcccccctgccccagtgaatttctgtcagttgaagggagcggggctcttgcccggggaaaaggaaaacagttcgtggcctgggatctgggaccccttgccgcccccagcgcccctcccgctccccggcgcccttgcggcccagtggctcctgcgcgccggagtccgccgcgaagactgagcggccgcggggatcgccgcgggctccgcgcgtattcctgggctcaacactgccacta

SEQ ID NO: 9850 - DNA, 233 bp, Homo sapiens
  source 1..233: mol_type = unassigned DNA
aaacaaaaagattaaaggagcagcggccggggcggcagcggtccccaggccgggacacccggggtggtgcgcccgggttcgcgggggctgcgccggcgccggggaggcggggggagcgggagcgggcgacgcggggaaggggggagccagggggagggcgccggccggaggaggggcggacccgcccgccctagccgagcagagcacagccgagccgagcggcccgggcgggg

SEQ ID NO: 9851 - DNA, 213 bp, Homo sapiens
  source 1..213: mol_type = unassigned DNA
ccttcccccaaagcaaacagcatcctcccactaccctgcagctgggccccccccactggtccccgctttcccggtggagacggcgacgtggcccacacgcgagcccctcgccgaggatgaatcaccagccagctcgagttgccacactttatctcagtacagttatcgcgagagtcccggggccgcgccggcgtgctctacgcacgcgcagtc

SEQ ID NO: 9852 - DNA, 236 bp, Homo sapiens
  source 1..236: mol_type = unassigned DNA
cgcgctgagccctaccctgcggcggccggacgcttcggcgcagggggcggcgcggcgggcgcggtgctgggcatcgacaacgtgtgcgagctggcggcgcggctgctcttcagcaccgtggagtgggcgcgccacgcgcccttcttccccgagctgccggtggccgaccaggtggcgctgctgcgcctgagctggagcgagctcttcgtgctgaacgcggcgcaggcggcgctgcc

SEQ ID NO: 9853 - DNA, 233 bp, Homo sapiens
  source 1..233: mol_type = unassigned DNA
ttagctgtggattcccaatacctgcaggtcacaggaccagaggctgggcctctaggagcagaggacacagagcagtgaagacgagacccggagttccagcggcagccaaagacaaagaagcggacaaatcccgccacatcccggaagccgtcctctccgctcaagctgcgtgcctgattggacagttcccagcccagcgtcgctgattggataacgtttaaaaccccaccctc

SEQ ID NO: 9854 - DNA, 737 bp, Homo sapiens
  source 1..737: mol_type = unassigned DNA
ctcgcccgactcaggctccgagttctcccctcgaccctccccagcctaaaggctgtacccgcttcaggccttcccagcccggccctccagttccttcttcggcctccctcagcctggggtccgggtttcctcctcggctgagcagccgggtccgcgactcccttcaccctccccggcccgggcttccggttctttccagaggtgaggcaggggccacctagaattccgcggccccccacctcccccaagaccaccctcgccccagcttcctgttccccattctgtcctcccaacctgggttcccgattactgcctcgacttcaccttgccgtcagggaccaccagccgcctcttccgcgcctaggggacgcgcagcggcagcctctgctgatggcaagggtctgcgcacccggaaactccagggtctggggcgtggtgcggcccctgcggccagcgggctccgcttgagcttcagggctctttcgttgttggactacgtttcccacaggcctcagggccgcggatgaacttcgacctttgcttccttttccggtgttgtggttattgagttaagcctggcgagtcgaggtgacccgggccgggctgcgggaggagctcgcggtgaggtggccccgcgctgccgggcgaggtcggtccacgtggagccgggagcctgaggcctctgtacgcgggagctgcggacgatggtggttagtgctattgtttacgacgtcatt

SEQ ID NO: 9855 - DNA, 308 bp, Homo sapiens
  source 1..308: mol_type = unassigned DNA
acagaggtgcagttcagggtccaagatctggctcccgggttccaagcccaatttcgggttcgccagcccagcaggtgcggagccaagctcctccacagacgcggccctctccccacgcgaggcctccaaatctcgcaaactaacggaaatgaagctacgctccgggagcggtgcctctgggaaatgtagtccagcgctccggacgccgtgcctctgggaaatgtagtccagcgcttggctagccggccagaacgccaggaggcccgggccgctcacccctcgaggggctcgtgggctcggcctgtgga

SEQ ID NO: 9856 - DNA, 1100 bp, Homo sapiens
  source 1..1100: mol_type = unassigned DNA
tgatgcgtttggtgacttttcctgggttcttgcttaagcggagccacaggttgtgggggcggccaggcctctggggaagagcaggtgccgcggtgccggcgcgccagcagcccgcggccaaggccacctgctcccagggccccggcacctctgcggggaggcggcaggcagaggacgcgcgcgcagtcgcgcaggagccctcaggcgagtgggggaagcatcgcaagagacgcggacctggagcgcggtcactgcgttaccgcagcgacctgggttacctaagccggcgggactgagaggccgctgcgcgtgggcaggggctcagattgcgcccgcggtgcctgtcccggcccccaccccggaacgattgcagccctgcggggctcgccgcccacaccgcgctgaggacgctgcccaagccaggcgcccgcccccgcccgcggtctcagccgctcgcagcgcgccgcccccagacgcgcgtggctgctggcgagggctgagaccgcgctcccgccggccagttcccagcagcagcgcatcctccctgctccgcgccttcgctccggacccgcgtcgtcgcagccccgcggtgatgagccccgagccggtcccgccgccgccgccgccccagtgtcctggctgcgaccgcgcggagccgatcgcccagcgcttagaggagggcgacgaggccttccgcgcgggcgactacgagatggcagccgagctctttcgctccatgctagccgggctggcgcagccggaccgcggcctgtgcctgaggctgggggacgcgctggcccgcgccggccgcctccccgaagccctgggcgcgttccgcggcgccgcgcggctcggggcgctgcggccggaggagctggaagagctggcgggcggcctggtgcgcgccgtgggcctgcgcgaccggccgctgtccgcggagaacccgggcggcgagcccgaggcgcccggcgagggagggccggccccggagccccgcgcgccccgcgacctgctcggctgcccgcgctgccggcggctgctgcataagccggtgacgctgccctgcgggctcacagtctgcaagcgctgcgtggagccag

SEQ ID NO: 9857 - DNA, 214 bp, Homo sapiens
  source 1..214: mol_type = unassigned DNA
gaagaaataatatattgcagattgtaacgagcacggggagccagcgaaaggcagggcgtccactagggcgcgctgagagaccgggaatccccgcaagggcgcccgcgccgcccgccacccgccgccgcgcgcacgccgcgccctcgcccacctccaaataatatttacagttagggtttttttttttttttttttttttttttttgctctcgcc

SEQ ID NO: 9858 - DNA, 582 bp, Homo sapiens
  source 1..582: mol_type = unassigned DNA
agcttgctttttccaggaggagctgctctcgccgttctcccgggccatggccgacgagcgcggcgcggaggagcggccgggggcgcgctggggagggggcgccgggggcgcggcgcgggcgcagaggcggcggggatgccgggcggctcgggctgcggcgcagcttcctcctctgcagtttcctctttcgctctcgccgccgccgccgcggccgcggtccctccctggctcttatttctgctgttctcgggcacagacttcctgccgccgccgcgcgccggctcctttgccgccgcctgccagcctcactttctgctactttcttgcctccctcccgctccctccctgccgcccgccgcgctcccccccacctcgcgcctcctccccctcctccccctcctccccctcccgcgggctccccgccctctccgtgcgccccggccgctccccgcctccagcgcgccgccttcggggatgtcccgctcccctcccaagagcgccgggccacggccgtcgtgccccctggagccccggcgagggcgggtacgggcccccggcaggtgcggggcgcacgcgggagag

SEQ ID NO: 9859 - DNA, 203 bp, Homo sapiens
  source 1..203: mol_type = unassigned DNA
cctccaggaggcgtcctgaccccgcactccggcctttcacctcccgaccgtcagcctcagggccgccgcggcgacgcgcgaccccttccctctgaggggcgcgggctccggacgcgccgggctctgccaggcatctagtggagggtcggaggtcggcgaccagcccgagcccagccgtcccgggagctggcgcgagtgtcgcc

SEQ ID NO: 9860 - DNA, 823 bp, Homo sapiens
  source 1..823: mol_type = unassigned DNA
caactacttgttccagaccgcgttacctgcaacctgctccgggctggcgccatactcggcgtcccggcgcttctcacaagtgccctcgcccatgaccagcgcctgcaggggcagctcggagcccgggtggggatagcagcgcagcccctggccgcagcgcggggtgtagacgccgcacgcctcgccctccagccgggcgcacaccgagcagcagccgcagcccggctcccggacgagctccgcgcatggcatgcgggcgcctccggccactgcggccaccgcggcgggcggcgcaaccggcgggggcccgcaggcggccaggcgctcgggtgtgcagggcgggcagcggaacagcacctccgcgcgcgccccgccgccgccgccactcgcgcccagtagcagcagcagcagcggcagcagcggcggcggcggcagcggcagcgcggggcagcccactctcggcagcatgctggcggtcggcagcgcggcgcggcgggcgagcgagcgagcgggcgggcgggcaggtggcacggccctgcgagcgcgggagccgcctcctccgcttcttcctcctccctcgccgccgcagccgggtcctaaagggccggcttctccccgccccctgccttctcccctcccccttttggagaccactcccttcccccccgacactccctcgcgccggcaagtgagtgcgcgcacgcccgctcgcccacctccgcgttggctgcgggctctgggggttccctgctcttcccgggccccgtccctccgcactcttctggcctgactatgactcctgaaggagaatacggataactcg

SEQ ID NO: 9861 - DNA, 293 bp, Homo sapiens
  source 1..293: mol_type = unassigned DNA
ctctgttcctaagggagagggacagcaccctcccgggcttccagctcccttgggtgtggcgggagagttctgggcgaggctgcgcctacacctgcacctcggccggctcctccggctgatttcgctctggttgatttcgcgcacattcctctcccagcgctgcaaggaccgcctgaactcgctggctatctcggtgatgaaccagtggcccggtgtgaagctgcgggtgaccgagggctgggacgaggacggccaccactcagaggagtccctgcattatgagggccgcgcgg

SEQ ID NO: 9862 - DNA, 262 bp, Homo sapiens
  source 1..262: mol_type = unassigned DNA
gcggggcatgttggcgcggcccgagggcacggcactggctcggtcccccctccgcgctcggccccggcggccctcagtgcccccggcccattgcccgggcgcggcggctgcgggactcgcgtggcgccggcgacggctcggcccagctctgcgccctgcacgcgcgtccctgtccccgggcccggcagccgctcccttttaacggggggagggggccattgttctcgcctcccgcttcccctggagccaatcagcgcgtccg

SEQ ID NO: 9863 - DNA, 240 bp, Homo sapiens
  source 1..240: mol_type = unassigned DNA
gccttcctcccactgtcctcccgccaccagccgcccctgtcgccgagcccgcagtcgccagcgcgccccgagcccctccaggccagaggctcccgcaggcgatggcggacaagagggcggggaccccagaagccgcggcgcgcccgccgcccggccttgcccgggagggggacgcgcgcacggtccccgcggcccgggcccgagaagctggggggcgcgggtccctccaccccgcagcgg

SEQ ID NO: 9864 - DNA, 1240 bp, Homo sapiens
  source 1..1240: mol_type = unassigned DNA
ggcgcctttgcgcacagtggccacttggggtcgcactttatgcctgtttgagcctctccgcggcgggctgacgccgggatctgcttaatcgttacaaaacgttcaaacaaaaacagggccggctccccagcagtggagagctactcggagcaccgtcccgggccggcctcggccccgaggctccgggggctcaggattccgtgcgtgtggcggggaagaggaattcagagcctttgggctgctgcttttcccgtcgccttcactgtgaacattgtgcggtggggtgaacgcggggagcggcggggccagtggagtcgaacctcagggctctgcgactgcacccgccaggaggggccctcgcttggcctgagaaaggtcccctgaggttaagagttgggtctgaacacaactctcggagcctcgagcccgccctccccaacatacaaatacgcgcagatctccagaaacaggaacgcacgacacacacggccagaagccgcgaggacacacagagcgtcgcccactgggcgggggccgcttgggaacaaagggcccaggaggcgttgtcccggcgctcattctgagcctccttgggggtgacacgggatgggggtggggtgcaaagggaactgagggaggagagtgcgcgaggaggggaaagcggtgatttggcctagaggtggggcgcgcactccaggcgagcgtgcgtgggccgggacctgcagggtacgggggtgggcccaggctggccgtcccactccgctccagcgctccgccaggcctccgccgctccggggccgctcgggccgccagtcagctgacgcggggggcgggggagctgtcaggcgcgccccgccctgcgccgctgggccgcggaggccgtgcagctattggcccgcgcaccgggccgcccgggcccccgcaccccagtgacatcaggaggcgataaaaggctgcggcgccgccggatccagcacagctgcaccgccgagctgcgagcggctgcgagcgagagagcgtaagagcaagagagctagagagcgagcaacgggcactcgccccacgcctcccctcagccccaccgcgcgctccgcttgcctctccaccccgcccgactctacccggcccggtccctgcgcgggcacagcccagagctctggggcggtgcaggcagcctcgggactctccggcgcgccgccgcgtccccagacaaaggcttggccggcggccccggcccgct

SEQ ID NO: 9865 - DNA, 222 bp, Homo sapiens
  source 1..222: mol_type = unassigned DNA
aataaaaacccacactacacagcgatggtggtgtctggtggcggtggcggggtggggggtctgactagatgagccgctcctcgcgcccccggcgccgggcgccatggcccgagccgaaggcgcctctggccccggagcgcccgcggcctctgcgcttggcgcggccgcccaagtaggagaagaaggcgcagcccaggaacactcggaagcagcaggtcgccc

SEQ ID NO: 9866 - DNA, 714 bp, Homo sapiens
  source 1..714: mol_type = unassigned DNA
tgtgattcctttttcctgccccaagtggctggcgatacagcccccggcgcgccgggcactgaggccctggagcacagcgtggggggcctggcacagacacgactcacgaccgggccgatctccggccagaaagaactatgttccggccgcccgggtcgcgggcccgcggtgcatccctgcaggcctccatcctgcctcggcagaggtctgcaagaatcctgtgggtgtcccccggagcgggcagaggaggagcccagcgccgaggcccaggcgcgccccgccctcgcccctccccgtgcccctcccccgctgctcccctcccaaaggccgagacctggacgctgcccggtggcctcggcgggggccctgtccttggccgctgcctctctgaatcccaggtgagaagaataaaacgtcctgacgctgtccggcttccggttcttggagaggacgggccgtctctgccgagagaactgtgcggaatcaggaagcgctggtgctccttcgctttcacgggactaagcgaaatccggctttaaacgaagtaaagccggctgcctcctggagtatttttgtcatagtatttttattttgggtcagggtattctgctgcggaccctgagtcttaggaaggaggcttataacagcggaaagccatttttttttaagaattgctgagttttccggattgtactttcaaagactttccctgaa

SEQ ID NO: 9867 - DNA, 1216 bp, Homo sapiens
  source 1..1216: mol_type = unassigned DNA
cttaccctgaggttccccagaccccgtagggtctcccacgccaccaagtttgcctcgacttcccctcgctgcctcccacacctcctgccgcggcgcggccggccagggacttaccccgaggcccagctggtgggggtgttggggtgcgcgcggacccggcacccacggcggcggcggcggcagcagcagcaggaggaggagaaagacgaggaggaggaggaggactagctgagcggcgcctccttcccagcccgcagcgcgcactggctccttggggcacccccgggagagcaccaagaccggagactaggcggcgacacaggcaaccgctgctgcacggggctgggctcagtcggctctcagaggccagggcagggggaggcaggactgggaaggagggtcggagaagtggggtgcagagggcggggcagcgagcggccaggtccggaggaaggcgccccaggcgcctagggatgccgccgcccgggctgacgccgtcggcccctctccccgccaggcgggcgcttgcagccgcgggcgcacgggcctcgcctcgttcaccggctcgttgccggcgcccgcggtgcgccccgctttgtgctccccgcagccggcgtgcacctggtgtaagcaaaggcggtcagctgatgggccgcgcgcggattggctgctccgccgtctcctcccctcccgcccgaccctcttcgcggcctcccgcccccgccctcggcgcggccccgtgctgggcaccatctgtggaccgcccaacaaaggcgcagcgcggcggggctcgggtggccgggccgcggtcgccgctttttgtctaggggacggcaggctgcggctgggcagggaggcgaagcgcactgccggtttttagcaaaagacagaccaaaagaaaatacacgtccgtgctaggaggccagctaggcacaatggggccccatctctttgcggcgtagaactcgggctcgggggctgagaaccagacacagttcggcctggggctgtgggagccaagtttcggggtgaaatccgaccctgcgtcttaaaatacagggcgcgtcctcgggctgtgtgtgcgcgcccgggggcgtcctccgcagacctggcccgggccggtgtccctgccgcgggaaggaggattcggacgcttaactcagcggcgaagtcgcttcccattggaggaggctttccgaaaacgtttctgaaactt

SEQ ID NO: 9868 - DNA, 207 bp, Homo sapiens
  source 1..207: mol_type = unassigned DNA
ggcctgcctagctcccaccccggcatcgaagccgcagctctcgggcccacctccgcatcctcaggggttcccgggggctgccgacaggttcctgaccagcgagcgcgcccccggggcaagcattcttggcgggcagaaacctgggagcggagcacagcggtgcaagggaaccgtgccaggcgggaagggcggaatttgcggggaact

SEQ ID NO: 9869 - DNA, 253 bp, Homo sapiens
  source 1..253: mol_type = unassigned DNA
ggctgcgcagcgctctcaacccaacccctggactcatcttcgccccagcctccttcgtgcccagcgtcccttgtaaatgacccccccggccgggtgccccgctttctctctcggcctcttccgcgtggtctgctctccgcccgcctgcgctcgcccggcctccctgcctctgcgccttcacctgaccgcaaaggcggccagggcagcctccgcgcggcctgacagtcacggctcccagtttgtccctggacgt

SEQ ID NO: 9870 - DNA, 209 bp, Homo sapiens
  source 1..209: mol_type = unassigned DNA
ggccaggcctgagcctcacctacctacgccgtatttctcctcctccgtgggggtccacatggccgtgccgggcgcggccccgcgggcgcggcgaccgggcgacaacgcggcggggacggccgcgggcccggctgtggcgcaccgcgagtcgaggcggggacggtcaggcggcgcggggcagtgggcggcgcatccctcacaggccgtcc

SEQ ID NO: 9871 - DNA, 225 bp, Homo sapiens
  source 1..225: mol_type = unassigned DNA
ctgcgatcggcttccaacttgggtcgagttgcgcagcggggcgggcgcgcggggcggggcgggccgcgggccctggggagctggccgggaaccggagcccgcggccgcctggtcgaacctgcccgcgcggcgccggggaggagtccggggcggcggcgcggggcgcgcgctcggcgagggcgccccctccagggccgcctgcagcctgcgggacggggccgagcg

SEQ ID NO: 9872 - DNA, 1133 bp, Homo sapiens
  source 1..1133: mol_type = unassigned DNA
ggaggagaagcgacgcaagtgggtagcttttcagcgccggcgaggcgcgggaggaggagaagcagtggggaggcgcagccgctcacctgcggggcagggcgcggaggagggacccgggctgcgcgctctcgggccgaggaaccaggacgcgcccggagcctcgcacgcggccaagctcggggcgtcccctcccctcggccgggcgaactcaaggggcgcagctctttgctttgacagagctggccggcggaggcgtgcagagcggcgagccggcgagccaggctgagaaactcgagccgggaacaaagaggggtcggactgagtgtgtgtgtcggctcgagctccgggcagaggcatttgggcccgaggcccccgctgtgactccccgagactccgcagtgccctccactgcggagtccccgcgcttgccggcaaaaactttattcttggcaaacttctctttctcttcccctcctcctcggcccccatcttctgctcctcctccttctctagcagattaaatgagcctcgagaagaaaaaccgaagcgaaagggaagaaaataagaagatctaaaacggacatctccagcgtgggtggctcctttttctttttctttttttcccacccttcaggaagtggacgtttcgttatcttctgatccttgcaccttcttttggggcaaacggggcccttctgcccagatcccctctcttttctcggaaaacaaactactaagtcggcatccggggtaactacagtggagagggtttccgcggagacgcgccgccggaccctcctctgcactttggggaggcgtgctccctccagaaccggcgttctccgcgcgcaaatcccggcgacgcggggtcgcggggtggccgccggggcagcctcgtctagcgcgcgccgcgcagacgcccccggagtcgccagctaccgcagccctcgccgcccagtgcccttcggcctcgggggcgggcgcctgcgtcggtctccgcgaagcgggaaagcgcggcggccgccgggattcgggcgccgcggcagctgctccggctgccggccggcggccccgcgctcgcccgccccgcttccgcccgctgtcctgctgcacgaacccttccaactctcctt

SEQ ID NO: 9873 - DNA, 478 bp, Homo sapiens
  source 1..478: mol_type = unassigned DNA
tgaactgagggggtccggcggccgctgaggaggggagcgcgcgggaggaggggcgaggagcccggaggcgggcgcggctggcagcttagagggcccgggcggaggcctgagagcagggctggaggggcggaggaccggggagacccgcccgcggcgttcccggccggttctgagcaggcgccgtggcagcgcccgcgccccctgcccgccctccgccgtcgccaggacgcaggctcgcgtcagggctggcggtagggcccgcagctgtcggcctggcgtcttcaccccgcgcagtcggcctcgcctagccttctcgcgcctgactggccggaccctgcccctggcggaggtaactgcccgcggattccttaccccgcgatcctggcctcctcgtaagctccccggacccgggcgtcctcggtctcccctcatctactcttctgtcgggcaggtccgcgaccttccgcctcccgggccg

SEQ ID NO: 9874 - DNA, 201 bp, Homo sapiens
  source 1..201: mol_type = unassigned DNA
ttaatgtgttttaacacgttttaatgtgttgtgacaggaaaagagccggctaacggtattacggaagtactagttggcacagaggctcggtgcaattaccgttctgcaccgtaaaacgggtttaggaagttcctaggagatactagcggtgccagaaccgagaaagtgacgacacagacaacttatggactccgcgtacgg

SEQ ID NO: 9875 - DNA, 208 bp, Homo sapiens
  source 1..208: mol_type = unassigned DNA
gctcccgccgccgcccgggccgcgcccgccccgcctctaggcgccggccccggagcccggtccgcgagcagcggcggctgccggagggacgatgagctgcgcggggcgggcgggccctgcccggctcgccgcgctcgccctgctgacctgcagcctgtggccggcacgggcagacaacgcgagccaggagtactacacggcgctcatc

SEQ ID NO: 9876 - DNA, 210 bp, Homo sapiens
  source 1..210: mol_type = unassigned DNA
ccagctccccgggaagcagcaggcgcacggccgtctggatctccctggaggtgatggtcgagcgcttgttgtaatgcgccaggcgggaagcctcgccggcgatgcgctcgaagatgtcgttgacaaaggaattcatgatccccatggctttagaggagatgccggtgtcggggtggacctgtttcagcaccttgtacacgtatacggagt

SEQ ID NO: 9877 - DNA, 229 bp, Homo sapiens
  source 1..229: mol_type = unassigned DNA
ttttaagacagggtctccctctcgcccgggctggagtgcggtggtacgatctccggtcgctgcaacgtccgctcctgggttcaagtgattctcctgcctcggcctcctgagtagctgagattacaagcgtcagccaccatagcccggctaatttttgtattttttagtagagacagggtttcaccatattggtcatcctggtctcaaacccctgagctcaggtgagcca

SEQ ID NO: 9878 - DNA, 209 bp, Homo sapiens
  source 1..209: mol_type = unassigned DNA
ctctctctctcttctaacattcccctccagaaaaagaggaacgcaacgaagggagttcagctactatgttggagctgtggaccggccctgtgaggcccacgcgggagcgcggaggctcctgggtctcagggcgccggcagatggcctgcagcgcaccgcccggcccccgcgctggccacgtccgccagcgtcatctctctcccccgcct

SEQ ID NO: 9879 - DNA, 255 bp, Homo sapiens
  source 1..255: mol_type = unassigned DNA
gttattccgcagcgagtcaaagccactccctaccctgggcccgctacgcgacctctgccggcctccgccccacgcggttttagtacggcgccaaggccccgcccacaaatcggccccgtcccctcgtgtccgggcccgccgctcatcagacgccgttccggcgcagcgagttgagggcacgcctaccctccctccgggtccccagtcctcaaggtcccagcacaatgccccaggaggaagactccaggccccttc

SEQ ID NO: 9880 - DNA, 297 bp, Homo sapiens
  source 1..297: mol_type = unassigned DNA
ctcaccattgtcaacgccgccgccgcgtcccccctactccactcctcttccctcaggagaactcccagccccggctccctccgctccggcgctccgtcacgtgacctcgggccgcccctcacacgtgaccgctcccttcctctcccccacccccgcacccgtccctctcccagcctcctgccccgccctgctggccgccaggcactccggggagaggccgcttggaggcggggcctcaggctccacccttcggagggtggagaggggcgggcaaattacgtcgagtgggcggggcct

SEQ ID NO: 9881 - DNA, 232 bp, Homo sapiens
  source 1..232: mol_type = unassigned DNA
tagtcgctccaagccccttcctcctcctcctcctcctcttccgccccggaaagttagcgagcctccggcagcggccgcattttcgccccggtggcctgacgacggcggcggccgcccctgcgcgtcctcccgcctccctccggctcagcccagacgccgcagtggcggcaactgcggcagcggtggcggctctgactccgcgcactccgccccctctttccagccagctcac

SEQ ID NO: 9882 - DNA, 247 bp, Homo sapiens
  source 1..247: mol_type = unassigned DNA
cccttcgcggcctcccctcccccgcgccttccctcccacatcgggctctcggggcagcagcggggaggggagaccggcgggggagggaggacagggaggcgaaggaattggggtggggggtgcgtgtgtggtggagggggtgggacgacacaggtgtcctgaggggaggagccgggaggaaggcgaggaggccgggccaagtgggggtgcggaggtcggggagacaggaacgcggctgcgggcgcgg

SEQ ID NO: 9883 - DNA, 292 bp, Homo sapiens
  source 1..292: mol_type = unassigned DNA
gggcgctgaggctgaagctggggccgggggtgggactgggggcgctggggctgggccgggggtgggactgaggctgcgggcgttcaactgggattgagtcgagggcagcggtggggctgggccgggggagcaggggtcgcgccgggcagcgtcgcgtgctggagcggaggcgggtgcggccggggcaggtcgcgggaggaggaagcgcctggggagcaggagctgggccgggcgggtccgcgccccgcacccgcgggggtgaatcggagtcgccgcagggggctcggggggc

SEQ ID NO: 9884 - DNA, 201 bp, Homo sapiens
  source 1..201: mol_type = unassigned DNA
tgctgtggggctcagggctgcatggggcagcaaggcgcgggggcccgggccgcagagcctccggggaggatccggaggggaggcagtggctcggcggctcgggttacagcccggtgtggtgggggggagggagacggggcgggagagggggcaaggctgcccctgaagggaaccagctggcccgtccgttggccgagctgc

SEQ ID NO: 9885 - DNA, 201 bp, Homo sapiens
  source 1..201: mol_type = unassigned DNA
acccttgctcctcacactcactccccactctcgccccagaaacacgcccctcacaccgggcccgccggatccccacacttcccactcgcgccagaaacgcgcgcaccctcgtggcccctccctgccgcgcgtaaacacgcccggtccgcgcacgccctcccggcctggccccgcacactcgcgccagaaacacgcgtggcc

SEQ ID NO: 9886 - DNA, 201 bp, Homo sapiens
  source 1..201: mol_type = unassigned DNA
cgacgcccgagccagcggagcccggagccgctgggcctcccgtcccctccgcccgtccgccctccccgccccctcggctccctccgccccgccgccccgcgccgctttaccataaaaggtgaggctcggggggagggggcgcgggattcccgccccgcggaagcggcccctacctgccccccaacctgcccggccgcgccc

SEQ ID NO: 9887 - DNA, 201 bp, Homo sapiens
  source 1..201: mol_type = unassigned DNA
gctttattaagcggtctcagctacaacggcgtgcatgccaattacgcctgcaggctaccgcccgcccccggctgccggaccacccagcgcgcctccccccgagtcccggacggggagaggaggagccaggggaggaggcgggaggaagggaaggatggggaggacaatgggggaagaagagggaggatggaggaagggggt

SEQ ID NO: 9888 - DNA, 201 bp, Homo sapiens
  source 1..201: mol_type = unassigned DNA
cactactccgctgtcggcggcgtctccttgggaagcagcagcaactggtggagctggagccgcagcagcctgagtcgccgcagcagcccctgccggagccgcagcaggaggaggaggaggcgggcgccggggtgggcgccggggcgggacacggagcggggccctgggacgaccccttggaaaagcctttggcggaaacgg

SEQ ID NO: 9889 - DNA, 201 bp, Homo sapiens
  source 1..201: mol_type = unassigned DNA
gggcggggtcggaggaaaaggggcggggcggcggggaaaatacaaattaaaatttaaaaatcagtcaaaggaaggatggaagccccgcggctcctccggcgcccagcggtgcttttgctttggtgtccggatcccagcccgcggcctgcctgcctgtcagtcccgtggacaccgcactgccgggcagcgccccggccgcac

SEQ ID NO: 9890 - DNA, 201 bp, Homo sapiens
  source 1..201: mol_type = unassigned DNA
cagcatgatgccgtcctcctggcagtggcagggggccgggcaggcggtgggccccgggccgggctggggggcgccgccggccctccgggaagcgcacagcgcggcgcaaagccatagcgcccggagccccggcgggctgggcatctcggcggtcgggctactggggcacctggcggccgggcgcggacgcacggcgcgatg

SEQ ID NO: 9891 - DNA, 241 bp, Homo sapiens
  source 1..241: mol_type = unassigned DNA
cgaagaaaggggcgcgggggcgcgggggcgcgggggcgcgtggggcgctgggcgccggaggcctggcaggatgcgcggtggggtcgccgccgtcgccgccgttgcgcgctcgctctctggccgggcgcgcgcctcgctccgcagtacttatagggcgccgcggtcccgcccctccataggccccgccccggccagctcacgccccgcccccggccccgcctcctgccgccagggcgcgcag

SEQ ID NO: 9892 - DNA, 201 bp, Homo sapiens
  source 1..201: mol_type = unassigned DNA
gccgctgccgccctgccgctcggtgtgcgagcgcgccaaggccggctgcgcgccgctcatgcgccagtacggcttcgcctggcccgaccgcatgcgctgcgaccggctgcccgagcaaggcaaccctgacacgctgtgcatggactacaaccgcaccgacctaaccaccgccgcgcccagcccgccgcgccgcctgccgcc

SEQ ID NO: 9893 - DNA, 201 bp, Homo sapiens
  source 1..201: mol_type = unassigned DNA
agaggaagtgagaggtgtccaattcggtcatgcagaacgcagctgggctgctcgaaacgaaacaaagcggctactccgaaggaggtgttgtccctgggccggtccaggttgagtcagagcagacgccactcccacgtcaaaaataccaggccactgtcccagggagctgggctattcactgaggtcattttcaccccactt

SEQ ID NO: 9894 - DNA, 201 bp, Homo sapiens
  source 1..201: mol_type = unassigned DNA
gcacccacccccctgacggtcccgccccgcagggagggcctgtgccggctgctggagctcacccgcagacccatcttcatcaccttcgagggccagaggcgcgaccccgcgcacccggcgctccgcctgctgcgccagcaccgccacctggtgaccttgctgctctggaggcccggctccgtggtgcggagcaggcgcggg

SEQ ID NO: 9895 - DNA, 201 bp, Homo sapiens
  source 1..201: mol_type = unassigned DNA
ggtccctggagtcactggctcagggcgggcccgcgggatggggcgggcggcccggggcgcagccggccaggccgttgctatggcaacgcggtggaaaaacgggcctctgggtatctcgctgccggccggctggtaaccccccagcggagggaccgggccgagcccgcggacccctccgagtgtctcctggggcccagccgt

SEQ ID NO: 9896 - DNA, 201 bp, Homo sapiens
  source 1..201: mol_type = unassigned DNA
ccaaaagtagcttctttgaatttcatttgggttttgtagggctcccccgaggcccgagaactgggagaagggaaagagctcatcggtttgtttgaaggccggcgggcggtgcaggcagcttttcccagactctcccagctccggcttttcacgcataccagaagagccgcttttttcctccagtgattgaaaccatctgga

SEQ ID NO: 9897 - DNA, 201 bp, Homo sapiens
  source 1..201: mol_type = unassigned DNA
ggtcttgctctagggctctgcattcccgagagctgctgtatgccggggattggcttccaagcctgcctgagcttctccagtctcccgggcatcgccatgcggtgggagggtgagccttcctctcctgctgaaattccggcggcttggcaaccggccggggggtcttggattcctcggggagacaccactgatgctttgtgg

SEQ ID NO: 9898 - DNA, 201 bp, Homo sapiens
  source 1..201: mol_type = unassigned DNA
gtgctttccgctgatccccagaggagacactggccagggctcttttttccgagacaaacttcattctggaaaggctgtcagaccgggcgcggtgactcacgcctgtaatcccagtactttgggaggatgaggtgggcggattgcctgagctcaggagttcgaaaccaccctgggcaacatgttgaaaccccgtctctacta

SEQ ID NO: 9899 - DNA, 201 bp, Homo sapiens
  source 1..201: mol_type = unassigned DNA
gcacactccggccgggtgcgggccggcggggcacagcggcctctacggcccgcctccgtcagtcattccccggtccctcctcccgctgctcgcgtgctccgggccggcccagcaccctccgagttacgtgcccgcgctccccggcggggaggagcgcagccgcgggggcgcgccccggtgactccgcccctcagctcccct

SEQ ID NO: 9900 - DNA, 201 bp, Homo sapiens
  source 1..201: mol_type = unassigned DNA
cccccgcgcaccgccgccgcgtactcaccctcacgggtggagcggggcggggcagcacggttccgcgcgcagctccgatccgctaggcgcaccgaccggcggcgcagcgctggcgcgacggctcgactcggccgggtccctgtcccgggcgcgggtccggcctgggagcgggcgagtccgcctgcaggggaggcggggacc

SEQ ID NO: 9901 - DNA, 201 bp, Homo sapiens
  source 1..201: mol_type = unassigned DNA
ggggcggagcggggaggggcggggcggagcggggaggggcggggcggagaaggatcgcagggctgagcggggcgccagcgccagtgcccggcactgccccgggctgggtcccctgcgttagaggaaggggagcccggggacggggcacggggcccgcgaggcacgggtgctctctcggggttccggaagcctccctccccg

SEQ ID NO: 9902 - DNA, 239 bp, Homo sapiens
  source 1..239: mol_type = unassigned DNA
gagaggaagggggaaggagacagaggaaccgagactggggtgagggagcggccgcgcgtggcccccggagaggcgcccatcacctgcgtggcgcccccccgcgccggagtgcggccctgctcccagcgccagtgcgccgcgcggctcgccggcctcgtaggattggctaccgcctcccattcatgtaacctgcgtgtgcgtgtgcgtgtgtgtgtgtgtctctctctcgctcgccctct

SEQ ID NO: 9903 - DNA, 201 bp, Homo sapiens
  source 1..201: mol_type = unassigned DNA
tcttctcgtgggtggtctccgtgagctccttggttagcctctctatctcagtcttataatggtccaccgtctgcaatacctcttctgcggccatagccccggtggatggaggcaggagggggttacggggtgggggagatggatgcgaagctggcggggaaagggagaaggaaatgggaagggatgggtggaaacggaaaa

SEQ ID NO: 9904 - DNA, 201 bp, Homo sapiens
  source 1..201: mol_type = unassigned DNA
ccacctgaaattgacaggcctgccctctatgataatagctgctactaactagtcctcctcacaccctttcactcaccggtctcagcactctgcacacctcgcggagaatccgctcctggttcttcacagagcacagcaccagggtgcagaccaccacatccacagagccatcagccacctggtgcatgttctccccggcag

SEQ ID NO: 9905 - DNA, 201 bp, Homo sapiens
  source 1..201: mol_type = unassigned DNA
aaaacagtagtctcatggaaaacaacagaaaaaaaccccactccagcctggtaaccaacggttggccgggggacgtgtccgcgctgctccccctccggccgccagggggcgcaggaagaagctttggaggtctgtcccgggaccgcgtactcgtccttctttcccgttagtcttttcttcacttccgttgagttccgcctc

SEQ ID NO: 9906 - DNA, 201 bp, Homo sapiens
  source 1..201: mol_type = unassigned DNA
gcctgacgaagccctccttgggggtcgatgcctctctccgggtgggaaggggcgctgtcggtgagggctatcctggcgccggcctgcgccgtccgaagtcgggggggaggggaggtctccgttcagcaggggtcacgcccgccccggacgggggccgcgcgggcgctcaggcgacgcatcttcgccggggcccgtgatcgc

SEQ ID NO: 9907 - DNA, 201 bp, Homo sapiens
  source 1..201: mol_type = unassigned DNA
tcttgagaagcaatagatttcgaccaatgtgcaccgttcccgcggcgccccgccgcgcccggaaccgctgcttacctggcgcccggcaaggaaggctgccggagggttcataggtgtttcctccgcccccggagaagcccggtgtgggcggcgtcacctcagaaacgccatcggcgcgcctgccccgagcggcgggggcga

SEQ ID NO: 9908 - DNA, 201 bp, Homo sapiens
  source 1..201: mol_type = unassigned DNA
cctgccatttgcatccaagatggactctccgctgccgccgctgctcctccggcttccttgtcatcatccctcacgccctgcagccctgcctcctgttcacgggttgccaagccgcggcctggccggtggtggcagtggcggagttagacaaagcccccgcctcccccgccccagagccccccaggcgccccaagtggcggg

SEQ ID NO: 9909 - DNA, 201 bp, Homo sapiens
  source 1..201: mol_type = unassigned DNA
ccctagggcggccgcctccactcccggctcccacccagcggggatccaccagggcgagggctgaagacctcgcgggacgccgcgcgccggggacagcgacgcacctaccttcccagccacctgggaggctgcaggtccgggccggagcccgaggctcaggggcgcgcggagcagtcctggttaaggcgcagggcgcggggt

SEQ ID NO: 9910 - DNA, 201 bp, Homo sapiens
  source 1..201: mol_type = unassigned DNA
ctttggggccgggcggggcggggcggggcaggggggccgggcgcggcctacgcgccccctcgagtgcgcggtgcgggacgggcgcggttgacgcgctcccgccggtgtctgtgcttctccgcaggccaggagggcatcctgcgctgccacccggacctggcgggcagcgagctgcagcggggcacgctcacggccgagtcg

SEQ ID NO: 9911 - DNA, 201 bp, Homo sapiens
  source 1..201: mol_type = unassigned DNA
cgggcttggacaggtcagcctgagagcatgcgaagtcggtccccgggcagacaacaagagacaccgccgggaagtgccaggaactccgcgcgttgcccgcggggtcctcctgtagccggggctgggccagaaggatggcaaagttgcgcggcgccgtccgggctggagccgcagccgaggagccgaagccttcccaggccg

SEQ ID NO: 9912 - DNA, 201 bp, Homo sapiens
  source 1..201: mol_type = unassigned DNA
gactcggagctacgcggggcgggggccggcaccgagggccgggaggcgcgaagggtacgcggcggcgggaagcggggcgacccgaaggcccacgggggccgggaggttgcggggcgcccgggatcccctcccgggtggtcaccgtgcggccggggcgcggaagccagaggtgcccagaggcgccgactccgccgaggttgc

SEQ ID NO: 9913 - DNA, 201 bp, Homo sapiens
  source 1..201: mol_type = unassigned DNA
cagccgaggcagaaatccgtcccgaggcgcgggcgccgggtccgggtcccaaggatgcgcgtcgggctccctcccgcggggacagccgagctccgccggcgctccaggtgttcccgcagtgcgtccgggcgcggacgcctctctgccctcggaggggaagcgggagggcccttggggtaacgccccgacctcgggcttcct

SEQ ID NO: 9914 - DNA, 201 bp, Homo sapiens
  source 1..201: mol_type = unassigned DNA
cacaggtgctcccgtcgtaggtctcgcacacccactcatggcactcacacaggggcccgaagaacatgcccggctcagtcacgtggcagatgcagacgccgcagtcgcagcggccccggccgtggcacagcgcggcccccgggggctgcccaggtgcgcggcagcgtcgctccgactcggcccgggacagcctgcaggcgg

SEQ ID NO: 9915 - DNA, 201 bp, Homo sapiens
  source 1..201: mol_type = unassigned DNA
agaccgctgcttggccactctacgcccctgagccccccacacagccagccccgtgacctccgagccccgtgacctccgagccccgtgacctccaagccccggaagccgctgtaggcagcggcccagccaggccccgccccctccaccggagctccacgcgtcaattccagccaggccccgcccccggccgccccaggcgtg

SEQ ID NO: 9916 - DNA, 201 bp, Homo sapiens
  source 1..201: mol_type = unassigned DNA
gcagcagctcaccgaggacggggactcgtaagtggcggaggcccggggctgggggtcgtcgggagggcgggacgcgcgcggcctgggggtgggaggcgccgggcctggagcccgagccgggggaccagcgatgcagccgggcgggcgccgcggcaccccggggctcctgcaccgccccgaacgctgcagggctgcagggcc

SEQ ID NO: 9917 - DNA, 201 bp, Homo sapiens
  source 1..201: mol_type = unassigned DNA
attctgcaggccgcacccccaactcgtatctcacccaggcccccgtctggcgccgatctgccccagctcaacctccggctccgcagactaggcactttccgggacgcggggcagaccctgcgctcgggtcccttcccgcagccgggctgtccggcctctgcgcgcgcacaacaggcggcacggcgcagcccccgggagcgc

SEQ ID NO: 9918 - DNA, 201 bp, Homo sapiens
  source 1..201: mol_type = unassigned DNA
aggatggcgatggcattggcgcggatcttcctcatggtgggcagacgggcgccccaggtgggggactgggccggcgtgctctcggggccggggcgggggcgctcgcagccccagctgtttgttttcgctcgcgcctagctgctcagtcctgcagagcagaaaaaggagagaggtgggggggcgggggggtgatagggagag

SEQ ID NO: 9919 - DNA, 201 bp, Homo sapiens
  source 1..201: mol_type = unassigned DNA
ccagccctttctgagggagctcagcggtgcgggctcgcctcctcccagcccagcttccctgacatcgcccctttcctggggacgttgcctgcgggcccgcgcgtccccgcccccgactcccctgcaggttcctccgggggccggggcaggaccgcactcaccgaggacccgggcgctggagccagcagcagcggcacgagc

SEQ ID NO: 9920 - DNA, 201 bp, Homo sapiens
  source 1..201: mol_type = unassigned DNA
caagccgaagcctttgaaggaggctcggtgccatctcggtgtgatcgcgtcccggcgacgctgggtagggtgcagggagccagctcggccgcggctcagcgggaggggagggggccggtcccgaacccgggcgcccgggccgcgggtgattcactgggaacgccaggttcgcgcgcctagaccggcgggcgacgcccagcg

SEQ ID NO: 9921 - DNA, 201 bp, Homo sapiens
  source 1..201: mol_type = unassigned DNA
gggggcccggcccagggcgggaaatgggtggggaggggcggggcctgggttggagactggacggaggagccgggcggagatgcaactggaggaagagggcgggacggggcggagaaggtttcccgcatcggcggagggagagggactaggagggggctgcggcgggggaggagagggggcttccggcccagagactgaggc

SEQ ID NO: 9922 - DNA, 201 bp, Homo sapiens
  source 1..201: mol_type = unassigned DNA
gcgacccctgtccctcccctgggccgagcggcaggcgcgctcgcaccgcccccgccccctcgtcgcagtcgctgccgaccggctggctgggccttgcggcgtgaggaccccggcggcgccgcagtcccgcgagccatggcccagtccggcggggaggctcggcccgggcccaagacggcggtgcagatccgcgtcgccatc

SEQ ID NO: 9923 - DNA, 201 bp, Homo sapiens
  source 1..201: mol_type = unassigned DNA
ttcatgaatattccggggcgcgggagcccgagcgctgccggagggcgcttcgggggaggcggccgctgatgtaagcccggcgggtcgctgggctccgctcggttgcggcgggagccccgggacgggccggacgggccggggcagaggaggcgaggcgagctcgcgggtggccagccacaaagcccgggcggcgagacagac

SEQ ID NO: 9924 - DNA, 241 bp, Homo sapiens
  source 1..241: mol_type = unassigned DNA
tctcactcccacacactcacacccggccgctcctcgttccctcactcgcctgccgcgcgcgcgcgcgaccccgctcacacacagcgcgcgcgacgccggcggagaccgccccgctccctcagaccgaacgccgcccgcccgcttgctgaggagcggcgcgcgccccggccccgccctcctggcgccgcggcgcggcgggcggggggcggcggccggaggagctgggggccgggccagcgcg

SEQ ID NO: 9925 - DNA, 201 bp, Homo sapiens
  source 1..201: mol_type = unassigned DNA
tcctcgccgcctcccaggctcccagtgaggttcttcagctggccgcccaccatggtcttcaccatgaacgccatggtcttcgccggccggggcaccgggcgcctgctaccacgcgccaggcaccgggcacgtccgcgcctacttcagcactaggtttcgcggacagctcccgccgcgggcccgcgccccacgcttggcacc

SEQ ID NO: 9926 - DNA, 201 bp, Homo sapiens
  source 1..201: mol_type = unassigned DNA
gacccggcatgaggagcccggcacccttgctccccagcctcctggaagctcttccttggactggccggcgccgtcttcccgacatctgggggctgaggccggcatcccgggcctgcgtggaggggcgagcgccaaggctgcgagagtcgggtcccgatttgtaatcacttcttccaactttcatggagctccgtcccgcgc

SEQ ID NO: 9927 - DNA, 201 bp, Homo sapiens
  source 1..201: mol_type = unassigned DNA
gcgcccggcagagagcccccagccgctccggaccccgcgcagccccgcagagacgcgcgtgtcgcccgcacgggccggcacccgggtcgcccccgccggcgtgccaggaccccgcacagaagcgcccggacgcggacgcacgcagccgcggtcacgatccccgccgcccgcccggcccgtgcccggctctggccagcaggg

SEQ ID NO: 9928 - DNA, 201 bp, Homo sapiens
  source 1..201: mol_type = unassigned DNA
ccttcccggcttctcccccactcttcgcccccggggcccctccctgctgagcgggggctgccgggatttgggattgcggggctgccccgaccccgcagccgtccgcggtggaagccagcccgggcctggccctgagcgcgcggctggggcggccgctgtccatggtgctggcgcgggtggcgcgccggccggcggggtctg

SEQ ID NO: 9929 - DNA, 201 bp, Homo sapiens
  source 1..201: mol_type = unassigned DNA
ccgcccgcgcactggggccttcgaggtgtgatgtcacctgcccgcagaatcggcccccctcgcgccgcccccctcgcgcccccaccccagcctccctctcgccgctcccggggctaatatggcagcggcgccgccgccccacccccgcaaccgcacgacccggctggcagggccgccggcccggacccccgagactcacac

SEQ ID NO: 9930 - DNA, 201 bp, Homo sapiens
  source 1..201: mol_type = unassigned DNA
ccgcgggcgcggcccctggaacggaccctcccccgagccgcgcccgccgggccgcccctcccccgcccgcagaccccggcccggccccgccgccgcgcgcgcccctcctcgtcctggcctcccccttcccgcccccgggccccggcgcccccgcccggcccgagcgcgcggcctgccccgcccggctcaccatggcgcggc

SEQ ID NO: 9931 - DNA, 201 bp, Homo sapiens
  source 1..201: mol_type = unassigned DNA
ggccaggtctcccaggagtagttggggaacacccggcgattctggcggctgcttcctggtggcgcagggagcccgcgtgtttgcgagtgcgtgtgtgtgcgaagttctccgggtaagtgtgccagcgcgcgcctgggtgtgtgcaagggtgtgagcgtgcacacgtgggcacgggcgtgtgcgcgcgggggtgcccggttg

SEQ ID NO: 9932 - DNA, 201 bp, Homo sapiens
  source 1..201: mol_type = unassigned DNA
cctcgccttcatccgcctctctcaccgcgccgctccctcgtcctgccctgcgggctcaggcggaacccggaacggccgtcctcttcccccgccctccgccgccgcctcctcctcctccttctcggcttcctcctcagccccgggccggagcggggtgtcggcggcggccggttcgggcggcggcgcttggccatgtcgtgt

SEQ ID NO: 9933 - DNA, 201 bp, Homo sapiens
  source 1..201: mol_type = unassigned DNA
ccaagcccgctgggcgcccgcccctgcgcaccgcgcccgctctttccgtttgtgcgcttgggctccggcgcacgcactgcatctgtcgcccgcccctgccgtgtgtgtgcactgccggggcccgctcgcccacgcccgcgcgtgcgcccccactcccaccccgcatccgcgtgcacgacccactcgccgccgctgtgcgcg

SEQ ID NO: 9934 - DNA, 201 bp, Homo sapiens
  source 1..201: mol_type = unassigned DNA
tgccgaatgaagctgagcgtctcagtggaaccagggatctcaggggtgagcgaccgcgaggggagagcgacgaaaagggcggccggagctggaggggcgcggagttaaacaaaaaagggcggccggagctgcaggggcgccgagttaaacacgtcatttccagatggggggcttcaggcgagctgcttagctcccctgagg

SEQ ID NO: 9935 - DNA, 219 bp, synthetic construct
  misc_feature 1..219: note = Description of Artificial Sequence: Synthetic polynucleotide
  source 1..219: mol_type = other DNA
tttagggagggggygggaggttttttttgtttagtttygagtyggtggtgtagygttygttttyggtygygggygtagattggyggtygttttygggttaygtggtgygygyggygggygygttygaggagtttgyggttgtttttggtttatagygtttygggygaggagagygggyggaygtygggggttgggtyggtgygggyggygaggtaggyg

SEQ ID NO: 9936 - DNA, 315 bp, synthetic construct
  misc_feature 1..315: note = Description of Artificial Sequence: Synthetic polynucleotide
  source 1..315: mol_type = other DNA
ygagtttygagtttygtttygggggttttatttygttttttygygttygyggttygtttttttttattgagygtttagttttygtagttttttyggtygtygagygtygtgggyggggttttagggyggyggygtttygyggggagggtttttygtgttgggggygaggttattygaggtagtttttygttygtttttaatttygtttygttttyggagtttataaagggaggygattygyggttygttyggttggtattttttagtygtygttagtttygtygaggggagttagygtygtttttgaggggygtt

SEQ ID NO: 9937 - DNA, 201 bp, synthetic construct
  misc_feature 1..201: note = Description of Artificial Sequence: Synthetic polynucleotide
  source 1..201: mol_type = other DNA
gtattyggtttagggttggagttggttgtagggttggttygyggygatttgggtagggtggyggttgttttttttttttttatttygtttygaggygtagygygyggtagagyggttyggtgttyggygggygggyggttygggygggtttgyggtygggatgaggayggygttttygttgtagagygttggggyggygyg

SEQ ID NO: 9938 - DNA, 201 bp, synthetic construct
  misc_feature 1..201: note = Description of Artificial Sequence: Synthetic polynucleotide
  source 1..201: mol_type = other DNA
aataatagggaygttgagaataataattaygattagtayggygaaggygtttttttygygggttagaggtyggygttttagtttygtagaattyggygttyggttagygttttttggtagtttttttyggtagttttaggtttttaagatttgtaggttygtttygaagtttttygttygttttttayggtygtttygagt

SEQ ID NO: 9939 - DNA, 201 bp, synthetic construct
  misc_feature 1..201: note = Description of Artificial Sequence: Synthetic polynucleotide
  source 1..201: mol_type = other DNA
ygygtatttttttygttygtttgttygyggttttttttttgttttyggagygttagtygttttatttygtgatyggtttttygttttgtttygtaggattygttyggaygggattaygtygtygtygtygtygtygtygttyggagtygygtttygggttttgtttgagtygagtygygygyggggtygtagttatygtyg

SEQ ID NO: 9940 - DNA, 201 bp, synthetic construct
  misc_feature 1..201: note = Description of Artificial Sequence: Synthetic polynucleotide
  source 1..201: mol_type = other DNA
atagagttgttttttttttttttgggttttgtaagttttygaattggaggyggaaatgggggaagggttggaagttgtgtgtgaaaaataattattgtaaygggttttttttaggagtttagttyggtttgtattttggtggaattgttgttatyggtttatagygtttaggtygagtyggtagggttgggygggaggttt

SEQ ID NO: 9941 - DNA, 201 bp, synthetic construct
  misc_feature 1..201: note = Description of Artificial Sequence: Synthetic polynucleotide
  source 1..201: mol_type = other DNA
tagttatygyggyggttgyggyggyggtattttygtttttattttygttygggattgttttttattgttttttygtttttttyggatagtgagttygyggyggggygggggaaggagtygtttttattttttttaagtttatttttaaagagatttttttttttttttttygtygtttggygyggagtygggaygatgttg

SEQ ID NO: 9942 - DNA, 201 bp, synthetic construct
  misc_feature 1..201: note = Description of Artificial Sequence: Synthetic polynucleotide
  source 1..201: mol_type = other DNA
aataagtagttygggagatattttttttttttttagttttygtttttttattttgttattttttagttygtgattagttgttttttttttttttygygggygtttagggttgagtaaatatttygggtygttygtttygttattagttggtttygatyggygtatygttggygattttttaggtaattyggygttatgaga

SEQ ID NO: 9943 - DNA, 201 bp, synthetic construct
  misc_feature 1..201: note = Description of Artificial Sequence: Synthetic polynucleotide
  source 1..201: mol_type = other DNA
ygtggtttggtygaggagttaatgggtygggaggggygygygggggaggagtttaggtgtagagtgtygattggttagttygtttttyggtatgtagatayggtgggagttaygtgttaggggtygggaygattttttgttggaggttaaygyggggyggggaagggggygygagygtttygtttggttgaagygggggga

SEQ ID NO: 9944 - DNA, 201 bp, synthetic construct
  misc_feature 1..201: note = Description of Artificial Sequence: Synthetic polynucleotide
  source 1..201: mol_type = other DNA
ggaggaggggaggygttgttygaygygtttttttaagttttygygttttttttyggyggyggttgttygggggyggtggttyggygtygtttttttygatygttttttttagggtttttttttygtgtygyggttaggttgttyggtyggyggygygttggaaatatgaagagaygttgtagttgyggtggyggtggyggt

SEQ ID NO: 9945 - DNA, 201 bp, synthetic construct
  misc_feature 1..201: note = Description of Artificial Sequence: Synthetic polynucleotide
  source 1..201: mol_type = other DNA
tttatttgggaygygatttataggggygttgtttygttttgygggaagaggaggyggyggtygtygtgattggggygttyggttttattygtttatagaaygtttttaatattaggggtttgaaagygaaaatttygggaaggtattttttgatygtagattatattttgtagttgatttatatygtttaggaggtagtga

SEQ ID NO: 9946 - DNA, 201 bp, synthetic construct
  misc_feature 1..201: note = Description of Artificial Sequence: Synthetic polynucleotide
  source 1..201: mol_type = other DNA
ataaaagagtagttttygyggagygggtttagagtttgttyggattgttygatggttttyggttttttgagygtygyggttgtygggttttgtgttygygyggggggygggaaggayggtyggggtttttagtgygygtttygyggagyggygygyggygttygaattggaaagttgtygtyggygtttgtygtttttayg

SEQ ID NO: 9947 - DNA, 243 bp, synthetic construct
  misc_feature 1..243: note = Description of Artificial Sequence: Synthetic polynucleotide
  source 1..243: mol_type = other DNA
gttaaggttyggatygttattttagtaatagttttagttatgtgatyggtaatggyggygttgaygagaggtaggtgagttyggygttttttatatttatygygygtttttygggtttygttygtattttttaygygtttttygttttttyggygtttttttttttattttttttttttgygygyggtttygggtttttygtttygtgttyggtygattatttttttagtattttttagtttt

SEQ ID NO: 9948 - DNA, 201 bp, synthetic construct
  misc_feature 1..201: note = Description of Artificial Sequence: Synthetic polynucleotide
  source 1..201: mol_type = other DNA
tagttygtttatttttttttggagaagttygaygtagygttygttattttttttttttygtgtgtagtttttyggttttaaagtatttatttgtttaattygatttttattttataagatygtaatyggttattatttttgtttttygttaggatatygaggttagttgtgttattgtttygaggggttgtaggtgtagag

SEQ ID NO: 9949 - DNA, 201 bp, synthetic construct
  misc_feature 1..201: note = Description of Artificial Sequence: Synthetic polynucleotide
  source 1..201: mol_type = other DNA
tygtagtatyggttattttattgttaagggtgttttttgtatttgttgygatattttgggtygtttttagtttagtttgtatagtatttttggttaygttygtagtatyggtgattttattgtagatagtgtttttggtatyggttagtayggttttggtygtgtttatatttatttggayggtttttttggttatattyg

SEQ ID NO: 9950 - DNA, 201 bp, synthetic construct
  misc_feature 1..201: note = Description of Artificial Sequence: Synthetic polynucleotide
  source 1..201: mol_type = other DNA
tttygggtygaggggaattygygatyggatttgtgggggagaatgaggatgaaaaygtggagtttttattgtttagggtttgatyggtygatagggatttygaygggggatyggggatttggggagggggtygtattttttygtttttttygyggtttttyggtttttgtttgtttttttgatygtttttaggggygyggc

SEQ ID NO: 9951 - DNA, 201 bp, synthetic construct
  misc_feature 1..201: note = Description of Artificial Sequence: Synthetic polynucleotide
  source 1..201: mol_type = other DNA
agtyggggtagaaggaggagtttgaaggtttattatggggtggaggttgtttgttygygggttygtttttagagttyggggtttattaygttgttttatgygtttttgttggtttttgttaaatagttttttttttttgtgttttagttttttggttgtaaaaagggggtgtttatagagtttttttgaggagtygttata

SEQ ID NO: 9952 - DNA, 201 bp, synthetic construct
  misc_feature 1..201: note = Description of Artificial Sequence: Synthetic polynucleotide
  source 1..201: mol_type = other DNA
ttggtttttatttggtttgygagaaattaaattttgggtataagttatgaagtygataagttygggagatatagtgttagaattataaggtgagattagtygttyggttaagttattttttygttagtaggtgaggttygtgaatagttaagttttttttggtayggyggaatygtagtggaygygtggaggggtttygta

SEQ ID NO: 9953 - DNA, 201 bp, synthetic construct
  misc_feature 1..201: note = Description of Artificial Sequence: Synthetic polynucleotide
  source 1..201: mol_type = other DNA
aattttttatttattaaygtyggygtygttatgggtttagggggttgggtgaggtygtgagagtyggygaggaagtyggttttgygggttyggtygatttygggtttyggttttgggttgygagggattttagttttygtygtygtgtaaaatgtatataaggttygyggygtygtttttgygygtygtgaggatataggg

SEQ ID NO: 9954 - DNA, 201 bp, synthetic construct
  misc_feature 1..201: note = Description of Artificial Sequence: Synthetic polynucleotide
  source 1..201: mol_type = other DNA
gatagaaggggagagtggttaggaaggaggggaggatggatatagggygtttgtagaattggtgggtagatggayggagggaygggtygtgtagtgtagtyggyggggttagggttaggtygagggygygaggtggtagtyggttyggggaggyggaggttgagygagyggtggtgtttgtggagttgtyggttgyggtgg
